United States Patent Application Publication US 2005/0228172 A9 - sequence listing, part 39

SEQ ID NO: 142231 - DNA, 395 bp, Homo sapiens
tgtgtcatacaactgtagtcccagctacttgggaagctgagacaggagaattgttggagctaaagaattggaggctgcagtaagctatgattgtgccactgcactccagcctgggtgatagagcaagatcttgtttyttaaaaaaaaaaaaaaaaaagaaaagaaaatgaaagatggtagaatgggactctcctttgcattgtattaatggaatattcaacagtgtccctggccactgcccctacaggtgtgatgatcgaaatgtctccagacattgccaaatgccctctggagggtaaaatgtcctccattgagaaccacagagttaaattaattaaaaccatttgattttagcataggtatagacaagaaaaataattataaagaaaaagaaa

SEQ ID NO: 142232 - DNA, 463 bp, Homo sapiens
tagggccccaatcccttctagcttgtacggtttctgctgagaaatctgctgttaatctgataggtttctttattttaataggttacctggtacttttgtctcacagctcttaagattctttcttccgtcttaacttatataacccgatgacaatgtgcctaggcgatgatctttttgtgatgaatttcccaggtgttccttgmgcttcttgtatttggatgtctaggtctctagcaaggccagggaagttttcttcaattattcccccaaatatattttccaaacttttagatatctcttcttcctccggagcaccaattattcttaagtttggtcatttaatataatctcagacttcttggaggctttattcatattttcttactcttttttctttgtcttcgttggattgggttaattcaaagacgtctctgattagcttaataactaacatcctgaattc

SEQ ID NO: 142233 - DNA, 568 bp, Homo sapiens
agaatccgatgattatgtttcttggggttgatcttctgggggagcatcttaatgggattctctgcaggtccagaatttgaatgttggcctgtcttactaggttgaagaagttctgaaygatatcctgaagtatgttttccaacttggttccattctcatctctttcaggtaccccaatccattgtaggcacagtgtctttacatgatcccatatttcttggaggttttgttcattccttttcattatttttctctattcttatctgcctattttagaaagatattcttcaagctctgagattctgctattgatacttgtgattgcattgtaaatttctcgtgttatgtttctcagctcctttaggttggttatgttcatctcgaaactggctgtcctggctatcagcttttgtattgttttatgatgattatagcttctctgcattgggttacaacatgctcctttagctcagcaaagtttattattatccaccttctgaagcctacttctgtcaatttagccatctcagcctcagccctgttctgtgcccttcctggagagatgctg

SEQ ID NO: 142234 - DNA, 443 bp, Homo sapiens
tcagtgtacatgcatagcagtatcagaattgttgacctacacccccatggacaacagctttaggaactagagtrttgtgtgctctacacagagttcttatgtgcagttctttctgcctttagtcttacagatgccactcattttcaaagtaacttggattatcatttttcccctcatcccttcagtaagattgttaagatctgtaatacagttaaagtctcttgtcataatctgcattcctttctgggatccactgatctcataaattattttcttaaatttgaatacattaaagttcgctctttgtgcttcaaaagttctatgcagtttgacagggcataataccttatacccaccattagatttttatgcagaatagtctcaccaccctaaaaatatcctttttgtttcacctatttaacccttgcctctttcccctaaac

SEQ ID NO: 142235 - DNA, 563 bp, Homo sapiens
aaatcctgcctgagtttccaatctgctggcttgtcttatggatttggactcaaattgcattagctcttacctcaattttcatcctatctgctctatagattctaaacttgtcagcaccacttttgcttaagctagtccttaaaacaaataaattccttccttccttccttctttcttttctttctttcttcctttctttcttttctttctttcttcctttctttcttttctttccttccttcctttcttccttcyttccttctttccttccttccttccttccttccttccttctttccttctctatccatcctattggttttatttttctggaagaccctgactagtacaactactttaataatcaaatacatgtctaagttttcatgatcttgaattaatcagtaatttcttagctgtagctttaaaagcacaagtgaccatggaaaaatagataaatttgactttattaaaattaaaaatgtttgtacatcaaaaagttactatcaggaaaataaaaaactacccacagattagagcaaagttatatttgcgaattatat

SEQ ID NO: 142236 - DNA, 563 bp, Homo sapiens
aaatcctgcctgagtttccaatctgctggcttgtcttatggatttggactcaaattgcattagctcttacctcaattttcatcctatctgctctatagattctaaacttgtcagcaccacttttgcttaagctagtccttaaaacaaataaattccttccttccttccttctttcttttctttctttcttcctttctttcttttctttctttcttcctttctttcttttctttccttccttcctttcttccttctttccttcyttccttccttccttccttccttccttccttctttccttctctatccatcctattggttttatttttctggaagaccctgactagtacaactactttaataatcaaatacatgtctaagttttcatgatcttgaattaatcagtaatttcttagctgtagctttaaaagcacaagtgaccatggaaaaatagataaatttgactttattaaaattaaaaatgtttgtacatcaaaaagttactatcaggaaaataaaaaactacccacagattagagcaaagttatatttgcgaattatat

SEQ ID NO: 142237 - DNA, 574 bp, Homo sapiens
acctgggcacacagccaggataaacttaagctgtccaaaagccatgtgcgctctcrccagaatcatcaattctctccagtcatttcactatgaagaaggcctggatgaacttaatgggaaagtcccattagctgccactcttggattgcatatctacgtatccttcagatttcatgtccctgatatatttgtgttcttgctagtcctgattttaaattattgcttttccttttaatattgttctgatttatttttatatgttactcaatattctttaatgacagcaaataatgataaaaataatagctgccatggcctattgaggcttcctatgacagaaactcttctaagataaaatttcatcctcatgacaactcataacctttgagaaagtttccatagatttctattttactactaaaaatactgtggtttagtgagattatgcaattaactcaaattcacaaagataggaaatgcttcagctgggatgcaaacctctatctaagagaaaaacccgatttcctcattgctatatataccattaatttggagcaaagcagaatcacttaaa

SEQ ID NO: 142238 - DNA, 595 bp, Homo sapiens
ggaaagagggatctgtagtgggtataggaggatgttctaagagggtatgtagtasactcgagacatggataaaaactcattgaggcttggattagtgtagagaagaaagagtgatgtttgatgaagttgaggaaggcacccagacatttgttcgaatttcattttaagatccagggtaatcattgaaggtttcaagcagggaagttatataatcaacgaagtgaagaaaagatgcagtcaagaggctgttaggatagtctaggtatcctcagctacgtttaaggcaataaggatataaaaaaaccataaattagaaccgtgaaatatgtaaggtacaaatccataggagtaagtggtttacatgatgaagtagaataaggatttatatgatgaggcagccaaggaggatgcctccgtttttgacaaggacaattaagtttctctgagttagagaacacaaaataaagagcagaattctggaagccattagtggctgcaggtttatcacccaggacacgcacctctggaggttgaaaaaagtagctagtgtgggggaaggaacattcttctactacaaagaattttggatgggtat

SEQ ID NO: 142239 - DNA, 595 bp, Homo sapiens
ggaaagagggatctgtagtgggtataggaggatgttctaagagggtatgtagtacactcgagacatggataaaaactcattgaggcttggattagtgtagagaagaaagagtgatgtttgatgaagttgaggaaggcacccagacatttgttcgaatttcattttaagatccagggtaatcattgaaggtttcaagcagggaagttatataatcaacgaagtgaagaaaagatgcagtcaagaggctgttaggatagtctaggtatcctcagctacgtttaaggcaataaggatataaaaaaaccataaattagaaccgtgaaatatgtaaggtacaaatccataggagtaagtggtttacatgatgaagtagaataaggatttatatgatgaggcagccaaggaggatgcctccrtttttgacaaggacaattaagtttctctgagttagagaacacaaaataaagagcagaattctggaagccattagtggctgcaggtttatcacccaggacacgcacctctggaggttgaaaaaagtagctagtgtgggggaaggaacattcttctactacaaagaattttggatgggtat

SEQ ID NO: 142240 - DNA, 595 bp, Homo sapiens
ggaaataggaaatagattattttgtctacactgaactataaaataaaagtcaagacagtataagtggcattgaatttttctgaattggctagattggtcattttgatattctagatcaaatgtatttgaggtcaaatggcatcactaaaaaacacaggaataaaagtttctcttttttcttaatttatcaaatacatgttagataaactttcagtaaatctacaaacctaccctaagcagattttttaagactcaaattttaagatttccacaaaagcctatccagaggggtcaacaccacaagcatttgctttttctctttgagtggtcctagtcatgagaatgatgarctcatcagaatggcgggacatacagatgaaaccaattcttttgtaatcacattaaactgagtttgaatctggggctcaacacaagttattaaacttctaagcttcattttctttacttgtaaaattatctactttatgggttctgtgaaagatagcaaagtaaggcagaaaatgttagcattatgtctaccacataataactcttaaaaatcttagcaatcaccaccaccatcatcattatcatc

SEQ ID NO: 142241 - DNA, 595 bp, Homo sapiens
ggaaataggaaatagattattttgtctacactgaactataaaataaaagtcaagacagtataagtggcattgaatttttctgaattggctagattggtcattttgatattctagatcaaatgtatttgaggtcaaatggcatcactaaaaaacacaggaataaaagtttctcttttttcttaatttatcaaatacatgttagataaactttcagtaaatctacaaacctaccctaagcagattttttaagactcaaattttaagatttccacaaaagcctatccagaggggtcaacaccacaagcatttgctttttctctttgagtggtcctagtcatgagaatgatgaactcatcagaatggcgggacatacagatgaaaccaattmttttgtaatcacattaaactgagtttgaatctggggctcaacacaagttattaaacttctaagcttcattttctttacttgtaaaattatctactttatgggttctgtgaaagatagcaaagtaaggcagaaaatgttagcattatgtctaccacataataactcttaaaaatcttagcaatcaccaccaccatcatcattatcatc

SEQ ID NO: 142242 - DNA, 445 bp, Homo sapiens
ctcattttttttggaacttaattttacatatcttgcattcatttttattattcctgtgagattgaaaagggattttttaaaaatggacaatgatatagaaaaagaagaatagaaagatataactaccaggttagttttaataggatgtagtaacagtagaacagaracaaaacgataatgaaacaatatcaaaggaggtaaataacttttagagtagtgtattcgtctgttctcacagtgctgtaaagaactacctgagactgggtaatttatagagaaaagaggtttaattgactcacagttccacaggctgtacaggtcacatggctggggaggcctccggaaacttacagtcatggtggaaagtgaaggggaagccagcatgtcttatatggtggagccaggagcaagagagagagagaaggggaagtgccacacactttca

SEQ ID NO: 142243 - DNA, 539 bp, Homo sapiens
gattagaaaactattcctacttgcacaaaattctagaatcaaaaaagttatctaagacaactaaaaccaactttttgtgygtgtgtgtgttacatacggtaggtgccagaggtattttagctatacataaaagcaaatgcactttcattgttatatttaaaacatatattggaattctttatcaaccatctatcaatgaaaaccggagttactgaaacaaagactcttttaaacttgaggaagggaatctgtttgacaagactgttataaatttgataaaatctctaaaagaaaaatttaagcaggaaaataacctaccaatatttcaatggaaaaggtgggaaaactctagtggtttaatacttttttttacaaaattaaaatggcaaaaatgaaaactttattctgatttggaagaataaaaaaactgtaaaaaaaagtcttatttaaaaaattttaagagtacatcaaaaattaaattatctatagcaaaattcctaccttcaagggagaatcaaaaacattgatgcaaaagtgtt

SEQ ID NO: 142244 - DNA, 578 bp, Homo sapiens
gattctgtgttactaggaaaccaaactagtgaagaaaatagttctttttacttgctaaagaaagaaagaatactgtttttgttttgacagccaatggcagaaaaattcaatgtaattgagccacacagactgtattattgtaacttaatcgattggtccagtgggaaagagaaaaagccaattctataaagcaacagaattgacagtttaaaaaatggaatcgacttgctcattaactgggttgactaaatggacttttttttcccattgtgtgagtagtttttaaaatcaaagaccatgatatagggagccatgagaaacaatattttacaaagggatcatttaagcagtgaaataacgcttattctcctggtatccagctgaccaaacatcttttgctttggaatcatactgktggtgagctcacttaagtcatggcaggagaagggaaagaaacaaacaaaaattaaatggaaacctaccagggaagattttgtatgttttgggctgtttaacttctccagttatcttctagggtgaatcttggacattttacaaagcaataacaataataattt

SEQ ID NO: 142245 - DNA, 417 bp, Homo sapiens
tatcactcagttttgtttctgtctaaaaatctacttgctagaagggaaaaagagcctttctataatattagaagatttatttaaatagttctaaggactatggactgtaaacttaaaattaataatgtttgccaaaggaaatacctgtgttagaagacttgtgaaagaaacctttgttctttcacacaagagttaagtgtagcttgtcataggaggtggattttagccataaatcctagtgacactgatatcatcaatcgagtcctaagtaactctacctgtataagaaaatcatgattttattaaaattacaayggtaactaatgacttccacagtttcccacaatcacatcaggcctttacctcccttagtctacttgggctgccattaactaaataccatagaatggatgtctt

SEQ ID NO: 142246 - DNA, 622 bp, Homo sapiens
agagtaatatctctgatgaccattggtgcaaaatttctaaagaaaatgccagcaaatcaaatctaacagtgtataaaatgataatgcattatgatcaagtggggcttatctcaggaatgcagttagtttaactttagaaaatcagtgtctgtaatttacaatattaacaaactaaaaaagtgattatttcaatagatactgaaaaagaatttgacaaaactgcaatgtgaattcctgacaaacactctcagcaaatcaagaacaaaaggaaacttcctcagtgtgataaaaagcatcttttaaaaacttacagctaatttaatggttatatttaaaaaacttaatattttccctctaatatcatgattatgagaagttatctactcttacctgttcgaattgtatagtgcagattctagccagtgcaacaacaaaaaaaagaaatacagtattgagyatgaagaagatatatttatttaaagatgacagaactgtctatgtataaattccaatgaaatctacataaatatctaatagaaataattgcatgcagtgagactgcagcatacaatatcaatataaaaataacttccattaaattgaaattaaatattatttataa

SEQ ID NO: 142247 - DNA, 622 bp, Homo sapiens
agagtaatatctctgatgaccattggtgcaaaatttctaaagaaaatgccagcaaatcaaatctaacagtgtataaaatgataatgcattatgatcaagtggggcttatctcaggaatgcagttagtttaactttagaaaatcagtgtctgtaatttacaatattaacaaactaaaaaagtgattatttcaatagatactgaaaaagaatttgacaaaactgcaatgtgaattcctgacaaacactctcagcaaatcaagaacaaaaggaaacttcctcagtgtgataaaaagcatcttttaaaaacttacagctaatttaatggttatatttaaaaaacttaatattttccctctaatatcatgattatgagaagttatctactcttacctgttcgaattgtatagtgcagattctagccagtgcaacaacaaaaaaaagaaatacagtattgagcatgaagaagatatatttatttaaagatgacagaactrtctatgtataaattccaatgaaatctacataaatatctaatagaaataattgcatgcagtgagactgcagcatacaatatcaatataaaaataacttccattaaattgaaattaaatattatttataa

SEQ ID NO: 142248 - DNA, 585 bp, Homo sapiens
aatttgatattttgttcaatcacttggcctctgtcagcttcagaattttgaatgttaaattggaggcaatggccatcttttgaacttgacacaatttatcaagaggatgaagtatgtaaaagtatcaaaaatgagtcactggcaggctctgataatgagttaggagcatctccttcatcataaagagttcatttttggggacaaagtattaactctttgcaaattactggaatgattaggtaaaatttactaaaaatttctcttgtaggaatcatttytcagccaaacaatgtagcctaaagaaagtggggctaattttgcagatcaagttttttttttttttaagtgcgtacacattttgaaaatcaatattttcccccaggtactcagggttaaattgctcttgtaggaatcatttctcaaccaaaacaatgtagcctaaagaaagtggggctaatttttgcagatcaagcttttctttttaagtgcgtatacgttttgaaaatcagtattttcccccagttattcagggttaaattgttcttgtaggaatcatttctcaaccaaaacaatgtagcctaaaga

SEQ ID NO: 142249 - DNA, 613 bp, Homo sapiens
gaattgtcaaatgtatcaaaaatcttatatttatgtactaagtattgacattgtgtatagaaaaacatcaggtgtagaagactttctactaagggtttacaatcttagaaaaactagaaagcgaatacaatctgatctctaaaacactagaaggttggctatcttaatatcagtgggatgagactggatttttcctccctggctattggagaaaaaaaaargggaaaaatagttatatcaatcctagaagccagatgagtatggaaacaaccttccattttctgtttttctaatcaatttaagacaaatacactacagattatatttaggggcctggtaggctgcctcagttttcccagatgactgagcagtggatcagctttctgaagtttagtgccacaactcatctgcccaagagccaggtggccctgattcaaatataagtgacccaggaaccatttaccagtagacagtcagtatcaagaatcacagcattgacactctacttggagacttcttgattgtacacaaaatctatttctcgttattttcatcttattgtggctggcagcccatctttgcatgttactatctccaaaatggcacaaaagct

SEQ ID NO: 142250 - DNA, 400 bp, Homo sapiens
gcctacttcctgggttttacttggagatggttgccacattcttcctatacctgactctctaaatctgtttgggatttctattgctcccttacttcctacttttgaatttagtcctgtggaatcttgaccatgtctgaggataagggtaaagtgcagataaacatttccctrataatattttctgcttaatcttttgtcgcgtcagagcctgtgccatttgaaactcaaagccaaggatcaattctttcgttctctctttctcctatgttctctcttccttggcgactgttgaaagcagggaaacatccagggataatgaaatgctgggaatgaaaaacagaactgattaataaatcaagattttattcaatatttctcaaacttcaatgaagcacagacc

SEQ ID NO: 142251 - DNA, 470 bp, Homo sapiens
ataccctgtctcaatcatgaactcaagccccatgttcactgctaatactttacatctgcactgtaacgactaaaaagaaattgttcaaattaaggctttaaccatatagtaacccctgccatccctctagaagtccctcccaccccaagcaggagaacataaaatagaaaataagctttataaaaaggttatagtgtgctccttatagaatctcctcttagaataactactctaaaaatatagtgagtgatgtgaccctttttacttcacccttaatcataagaggttagaatggaacaaactattatgttggaggcctggtagtatggttgttttgtaaacagattacagagacattcagagtccaaaagtctcattgccatcctttagctcaaatcatctataatttactgtgttkcactggttcccaacgtgcggtcacctgagaacttgttggaaatgcaattgct

SEQ ID NO: 142252 - DNA, 563 bp, Homo sapiens
gatagactcgttcaatgcagggttgccacaaatcttcaattggtaaaatacataatatccgcaaagcacaataaaatgaggtatgtctggacaaayagactgtgagtgccctaagaacagggagtctctgttttctgtcttttcataacaagtactaagataaaaaaaaacttatagacattcaataattatttcttttgaatgttagtatttacataatcatcattttttgatattgtttgttctagttgagaaaaagtgtcagatataatttgaaaaaaatatgaagaaggaaaatttggtctcttctctgtagacaatgaaatccctgattttatgtagaaacatgtagagtctactgtgttggcttaatgtttgaatacacgcttaccatagaagaactcagataggaaaagtttaggaaaagtatgacccatcttttattgaaatgtacactttaattctgtgaaaatatttcaatgtaaaagaaatgatgcaagtaaatctgcatccattcaacaataaaatctctttttagggcattacaaaaggtaatgaggtca

SEQ ID NO: 142253 - DNA, 567 bp, Homo sapiens
aatctgtggtttgactcacatttttcagactctgggtgtctcaaaaggagtataccccagaaaggaaacaaagtgaaattagaaagggaaatgcataaccacagaacaagtctctgtcacagagggacttttgcatcattaaaagtaatttgtgggaacagcaaatgttctttayaagccaacaaaggcagctttgtttacagccactgttgttctcaaagaaaatgtataatgtctgaagattttaatagacttattcagatttaccatcagagccaaaaaatacagaattatagacagaattaattacatggaaatattttgtatatcaattaaaataaattgattcattattgatttatatgtcacagacttccatgacttcagctatgctgaaaacttcctaatttatatcctcaatccagaaccatatattgagatgcattccagatggttctatgtcaatgggacgagctctgcttaagttcattatgtccaaggctggcctcattatcttctaaccctatcccaaatctgcttttcttccacaattttctctcacagcca

SEQ ID NO: 142254 - DNA, 567 bp, Homo sapiens
aatctgtggtttgactcacatttttcagactctgggtgtctcaaaaggagtataccccagaaaggaaacaaagtgaaattagaaagggaaatgcataaccacagaacaagtctctgtcacagagggacttttgcatcattaaaagtaatttgtgggaacagcaaatgttctttataagccaacaaaggcagctttgtttacagccactgttgttctcaaagaaaatgtataatgtctgaagattttaatagacttattcagatttaccatcagagccaaaaaatacagaattatagacagaattaattacatggaaatattttgtatatcaattaaaataaattgattcattattgatttatatgtcacagacttccatgacttcagctawgctgaaaacttcctaatttatatcctcaatccagaaccatatattgagatgcattccagatggttctatgtcaatgggacgagctctgcttaagttcattatgtccaaggctggcctcattatcttctaaccctatcccaaatctgcttttcttccacaattttctctcacagcca

SEQ ID NO: 142255 - DNA, 567 bp, Homo sapiens
aatctgtggtttgactcacatttttcagactctgggtgtctcaaaaggagtataccccagaaaggaaacaaagtgaaattagaaagggaaatgcataaccacagaacaagtctctgtcacagagggacttttgcatcattaaaagtaatttgtgggaacagcaaatgttctttataagccaacaaaggcagctttgtttacagccactgttgttctcaaagaaaatgtataatgtctgaagattttaatagacttattcagatttaccatcagagccaaaaaatacagaattatagacagaattaattacatggaaatattttgtatatcaattaaaataaattgattcattattgatttatatgtcacagacttccatgacttcagctatgctgaaaacttcctaatttatatcctcaatycagaaccatatattgagatgcattccagatggttctatgtcaatgggacgagctctgcttaagttcattatgtccaaggctggcctcattatcttctaaccctatcccaaatctgcttttcttccacaattttctctcacagcca

SEQ ID NO: 142256 - DNA, 567 bp, Homo sapiens
aatctgtggtttgactcacatttttcagactctgggtgtctcaaaaggagtataccccagaaaggaaacaaagtgaaattagaaagggaaatgcataaccacagaacaagtctctgtcacagagggacttttgcatcattaaaagtaatttgtgggaacagcaaatgttctttataagccaacaaaggcagctttgtttacagccactgttgttctcaaagaaaatgtataatgtctgaagattttaatagacttattcagatttaccatcagagccaaaaaatacagaattatagacagaattaattacatggaaatattttgtatatcaattaaaataaattgattcattattgatttatatgtcacagacttccatgacttcagctatgctgaaaacttcctaatttatatcctcaatccagaaccatatattgagatgcattccagatggttctrtgtcaatgggacgagctctgcttaagttcattatgtccaaggctggcctcattatcttctaaccctatcccaaatctgcttttcttccacaattttctctcacagcca

SEQ ID NO: 142257 - DNA, 471 bp, Homo sapiens
aacatattggttacacaagtcaatgtgagaccccctcccacaaggatgtgattatcaggagacraggctcattggaaccatctaggggaccctggcaattcttattgacaatgttctcactctaaatctgacttttctttcctcttgttttatattatcctcccagtcgagctttcccacacatggttcacatctctggcaatcttctagccgtcaccagagcttctccttatcaatttctgtgcactttgtgtacaattcagatcttaacattttgtcatattagatgttaatcccttctttgctttaggtaaaattttcattgtatgaggaagttgtaatttttctgtgttgaatctgccactacctttgttgtcacttctttgatgcagaaaagcactattcctctaaaaagttcataaatatttagttctgttttgaactagaggggttatttattgtttttaaata

SEQ ID NO: 142258 - DNA, 463 bp, Homo sapiens
acattttgaaaataaatcttaaagtataaaatacattcttaattcatgtgatgtttgcttttactattttttaaaataaaattgagttwtatatatatatatatatatatatatatatatatatatagacaaatgataccaatctatgatataatgacctcctaaatatttttttcacagtagtaacagctactaaaccactggattatattgtagtttatattcccacaatattgtacagtcagcaatttggaaagataatatggtcatgttatttgtgcttgtagaacttagaaagaattgtcctttagcagtacattataataatcgattaatagtgaattaaagcaattaaatatgatttttttagtatttgagatactagaagcaccattatcttgggctgtaaatcaaaccaattgtaggagtagatgggctttgtcatgcatatgaaatctttaaa

SEQ ID NO: 142259 - DNA, 537 bp, Homo sapiens
aagaatctaagcaattaacagatttttcttggttccaatttgtgttttttcttgcattctaaaaaacactggtgagctatgtttgtttgtttgtttaaaagtgagtcattttgataatctccttggctcaaagatttgtagaatctctgcagggagagacaaaagaggaggccttatttctgtatgtaagaacctctgtctattttctttatcatattctgaagctgtatgggtagttgtrcagattatgggacagctctgataagactgaatcagggataggaaacaggctacggataggtctggaccacatcaaaccctctggctttcccattttaagcatgattcatatgaccagccaaaagaaaaagcagagaaatctcaattctagctttagatcaaaatacactaactttgatttttgatggagaaagaaactaattatggtgtattagagttaagtcaaatgtcacctatttcttgttaaggtatttgcgtatttcactgaatatgtctctgaaccttagcaagaaacgc

SEQ ID NO: 142260 - DNA, 537 bp, Homo sapiens
aagaatctaagcaattaacagatttttcttggttccaatttgtgttttttcttgcattctaaaaaacactggtgagctatgtttgtttgtttgtttaaaagtgagtcattttgataatctccttggctcaaagatttgtagaatctctgcagggagagacaaaagaggaggccttatttctgtatgtaagaacctctgtctattttctttatcatattctgaagctgtatgggtagttgtacagattatgggacagctctgataagactgaatcagggataggaaacaggctacggataggtctggaccacatcaaaccctctggctttcccattttaagcatgattcatatgaccagccaaaagaaaaagcagagaaatctcaattctagctttagatcaaaatacactaactttgatttttgatggagaaagaaactaattatggtgtattagagttaagtcaaatgtcacctatttcttgttaaggtatttgcrtatttcactgaatatgtctctgaaccttagcaagaaacgc

SEQ ID NO: 142261 - DNA, 591 bp, Homo sapiens
ctcctagctgtctgtactgccatgtttaataaataattgtttttcaggttttatgttttgttagtaagmacccacatgccacaaaaacattcttttattttcttttccttttgatttctctctattccctttcctatttcctctctccttccttccttcctttttcttctctcctctcctcttcccttttctattcttctttaaaaataagatgtttgattttattggctctctacttggggaaacaaaaatgttttgaataagacaattcagtaatggtttggataaatatcatacagctttatatataccagaacaaagattgaagagtaccctatctaacagggaagaaaattacctgtccaaaatgttcagtgtattcagggttagccagggctggaattcaggcatcctgatgctagagtgtgtgacttcccctgtgagacatttacaaagttagtacccatcttaatggtgtctgcctattgaattagaagtatatttcccaaggaaacctgtagcactgttaaggtttcatgcagctcacctgattctatttccctgacttggtgagacagaggcaatgattta

SEQ ID NO: 142262 - DNA, 540 bp, Homo sapiens
gccattacactccctctctttctccttagggtaactccctgttgatagrtgcataattcaggcctgcatgtggctttcaaaaatcatgaatgcattagctttgtgctgatttggaagatacatataaatcttatcttattagtgttctgacaattctcaatagagccccatgcttctaaaattttagagttgagaaaatgcaattatatatctacattaaattcactgaaaatttcttgcagaatacaaatcttcataaaagcacaaaccagaagaaatgcactagagaggttcttttctacctgaatccttctacaaatgaagggaacagatgacacccccacagctcatagagggtttgagcttcttgggcccaaacaaacctggggctttggcaactcagtctgcagtgttctccaactcacatgctttggtggccaggtagggagtgaacgcatgacatccacagggctgtaaagatgcttgttttgtaaccagacctccacagcacattgactttatagactgtgagggaggagg

SEQ ID NO: 142263 - DNA, 540 bp, Homo sapiens
gccattacactccctctctttctccttagggtaactccctgttgatagatgcataattcaggcctgcatgtggctttcaaaaatcatgaatgcattagctttgtgctgatttggaagatacatataaatcttatcttattagtgttctgacaattctcaatagagccccatgcttctaaaattttagagttgagaaaatgcaattatatatctacattaaattcactgaaaatttcttgcagaatacaaatcttcataaaagcacaaaccagaagaaatgcactagagaggttcttttctacctgaatccttctacaaatgaagggaacagatgacacccccacagctcatagagggtttgagcttcttgggcccaaacaaacctggggctttggcaactcagtctgcagtgttctccaactcacatgctttggtggccaggtrgggagtgaacgcatgacatccacagggctgtaaagatgcttgttttgtaaccagacctccacagcacattgactttatagactgtgagggaggagg

SEQ ID NO: 142264 - DNA, 558 bp, Homo sapiens
taatttccaacttctgattctttctgcaatcctgacagctaggaagcattgttctatgtattttctgtgagaatactcccttttggaaagaaacattgcaacagtaaaacacatcttggtgctggtaaataagtgtagaggcatcagtggcaggattaatacagattctcataaaatgttattttgctttttcttttgccttttgagtataaattttcttctgacttaacctaaagtctccatttccctggaggtgaactaggatttgcaaakgaagaaataaaggaaaaataacaagaaagagtccttctttttcttagcatatagagggctgaggccagaagtcttggaccatcaaattctatctttggagtagaaaaggtactccagtctgtcacttaaagcttaaccataggctggagtcagaaaggagaaaaataacaaaagggagcatagaagatcaatctgtttctttctgtcccacaattttgttggaattatggaaggagaagatagatagaagtgggaaaattgagcaagcagatgtgactttttgtt

SEQ ID NO: 142265 - DNA, 566 bp, Homo sapiens
gctcacgttatcgcctgagctccacctcctgtcaggtcagtggggccattagattctcataggagcctgaacgttatgtgaactgtgcatgcaaaagatctaggctgcatgttccttatgagaatttaatgcctgatgatctgtcactgtctcgcatcacccccaggtgggactgtctagttgtaggaaaacaagctcagggctccccgtgattctacattatggtgagttgtataattattttattatatattacaatgtaataataataggaaaaaatgcacaataaatgtaatgcacttgaatcatcctggaaccatcctctatcccccggtctgtggaaaaattgtcttccacgaaactggtccctggtaccaaaaaggttagtgaccactgtgttagatgattgttgacctgggatctgtcttcctggatcctctacccatgttttctagttcytcctttctaattatccctttcacatgaccaccatctacatatttgttggctctcatctttactcctagatttactagattgttcctgaagatcaagatccagaaata

SEQ ID NO: 142266 - DNA, 254 bp, Homo sapiens
ctctgtagggaagagagtggggaaggggcagacatcagaaggagaagcatggacatgggtctggggcaggtgggaggctggacctggagggtgaggaagcaaaaggwgcagcctctaaaccccaagacacacccaggttgcagctccagccttgtcctctgggagcgcctgcaggaggcttcccttggtcccggggcactctccgactggggatcctcccagggcatctcatgcaagtccctatcaagcagaac

SEQ ID NO: 142267 - DNA, 580 bp, Homo sapiens
agaattctgagcatggaaggactgaagtacagcaagctcttaacaggcccgagctctgtagggaagagagtggggaaggggcagacatcagaaggagaagcatggacatgggtctggggcaggtgggaggctggacctggagggtgaggaagcaaaaggtgcagcctctaaaccccaagacacacccaggttgcagctccagccttgtcctctgggagcgcctgcaggaggcttcccttggtcccggggcactctccgactggggmtcctcccagggcatctcatgcaagtccctatcaagcagaacaaatgtcgtctgtctgtgtgtcacgcgctgcactagaagtttcttcccttcaaccctatgttgtggttccttccatgattcccaacctacaggtaagggtgccaaggtaggggagtcattctgcagtgagtgcagtgagggagcaccatgcatggtcaagaatgcaaaccactccccgtggccctgcaggctctgtcgaggcccagctctctcagcaccccagggggtgcagaaggaaacatggaaatctcagtttctattcctaggcggaac

SEQ ID NO: 142268 - DNA, 472 bp, Homo sapiens
agggtaattttcttctattattaatctaatttcttcacacccatttttcctttacctccttttagaactcctagcacatctcatgttagggtcttccaaatccatcttttaattctttatctttccttaaggatttctttttcctttttgtcctccttctgtgtggatttttcttatacatcactgtttgtatctaaacagtggctatcctcttactcaatttatacctctaatattatcttcaggaaaccattcttcttggtttgagaaagtcctgtgtaggcatgtgcttctctgtttttttgttttgttttgttttgtttttaaytttaaagtgtgtattcctgcagcacctttatttttcataaatattggcactgtttgggtttttctctggttgctgggaccccaggacatgtgtttgttattgctgttttgacagatcagataagtatgttgcctatcaactgga

SEQ ID NO: 142269 - DNA, 569 bp, Homo sapiens
ctttacacaggatgattccagcaagagagagaggctagactccaaccatggcaggggcagctggaatgtgcggccaagaagcagtgggtggtcaccagatggaaaccactcagaggagacagtggggaaggggttcttgctaaaccggtctgacagggctcctgctaaggaggcatgggctaggggtgaggaatttgatcagatatggagagtgggggattcctaggaaactgatgtcacctgattcttgctaaaattgcgctggacagccaaggacagggcccgaggckgaggcctggtctaaaggaaggctccgaggatcctgggtagagtttgctcagacagagtctctgtcatgaagaagccaaaacagaggccctggccaggagacacaattctctccagcccagaaccacttcagagcacttgccaaacaagatctaagatttgtagcagcaagctcttcagcaggctgacaaatacttacccgtgaaacagatcactgtttgcatgcggagcgccgccctctggggatgcagctcctagttgtggttcctcatttgttatgt

SEQ ID NO: 142270 - DNA, 569 bp, Homo sapiens
ctttacacaggatgattccagcaagagagagaggctagactccaaccatggcaggggcagctggaatgtgcggccaagaagcagtgggtggtcaccagatggaaaccactcagaggagacagtggggaaggggttcttgctaaaccggtctgacagggctcctgctaaggaggcatgggctaggggtgaggaatttgatcagatatggagagtgggggattcctaggaaactgatgtcacctgattcttgctaaaattgcgctggacagccaaggacagggcccgaggcggaggcctggtctaaaggaaggctccgaggatcctgggtagagtttgctcagacagagtctctgtcatgaagaagccaaaacagaggccctggccaggagacacaattctctccagcccagaaccacttcagagcacttgccaaacaagatctaagatttgtagcagcaagctcttcrgcaggctgacaaatacttacccgtgaaacagatcactgtttgcatgcggagcgccgccctctggggatgcagctcctagttgtggttcctcatttgttatgt

SEQ ID NO: 142271 - DNA, 568 bp, Homo sapiens
tgggcagcaaagttgacacagtgyggacacacaagagtcaaatcctggagagatgtccgcaaacaggttttcagctatagacaggggagttcaaattgatatgtggatttgaaaatgattcgaaaactgtacaaagaatcttaaaatatttataccactttgccaattgattgtactattggaaatgtaggttaagaaaataattctaaatgaagaaaaataatagttctatcagtgttcagtagtagagaaacagttaaataaataagtgaataaataaatccacctaaggaaatattaaaaagtcattgaagacatttttacacagtgcagcatttttttaagtctgttacagtgtaaagtaacacacacaagttcctaggcagcatgaacaaaattctgtagaaaagaaactttaaataaaaagaggaaggggcattctgtttccaaaatcacaatagcacatgcttacacctcgcctctccacacacactcccaaatccttcagggctcaacaccgaaagccaaggaagtcacccagccccctgcccagagcatagctggtgac

SEQ ID NO: 142272 - DNA, 568 bp, Homo sapiens
tgggcagcaaagttgacacagtgtggacacacaagagtcaaatcctggagagatgtccgcaaacaggttttcagctatagacaggggagttcaaattgatatgtggatttgaaaatgattcgaaaactgtacaaagaatcttaaaatatttatamcactttgccaattgattgtactattggaaatgtaggttaagaaaataattctaaatgaagaaaaataatagttctatcagtgttcagtagtagagaaacagttaaataaataagtgaataaataaatccacctaaggaaatattaaaaagtcattgaagacatttttacacagtgcagcatttttttaagtctgttacagtgtaaagtaacacacacaagttcctaggcagcatgaacaaaattctgtagaaaagaaactttaaataaaaagaggaaggggcattctgtttccaaaatcacaatagcacatgcttacacctcgcctctccacacacactcccaaatccttcagggctcaacaccgaaagccaaggaagtcacccagccccctgcccagagcatagctggtgac

SEQ ID NO: 142273 - DNA, 568 bp, Homo sapiens
tgggcagcaaagttgacacagtgtggacacacaagagtcaaatcctggagagatgtccgcaaacaggttttcagctatagacaggggagttcaaattgatatgtggatttgaaaatgattcgaaaactgtacaaagaatcttaaaatatttataccactttgccaattgattgtactattggaaatgtaggttaagaaaataattctaaatgaagaaaaataatagttctatcrgtgttcagtagtagagaaacagttaaataaataagtgaataaataaatccacctaaggaaatattaaaaagtcattgaagacatttttacacagtgcagcatttttttaagtctgttacagtgtaaagtaacacacacaagttcctaggcagcatgaacaaaattctgtagaaaagaaactttaaataaaaagaggaaggggcattctgtttccaaaatcacaatagcacatgcttacacctcgcctctccacacacactcccaaatccttcagggctcaacaccgaaagccaaggaagtcacccagccccctgcccagagcatagctggtgac

SEQ ID NO: 142274 - DNA, 568 bp, Homo sapiens
tgggcagcaaagttgacacagtgtggacacacaagagtcaaatcctggagagatgtccgcaaacaggttttcagctatagacaggggagttcaaattgatatgtggatttgaaaatgattcgaaaactgtacaaagaatcttaaaatatttataccactttgccaattgattgtactattggaaatgtaggttaagaaaataattctaaatgaagaaaaataatagttctatcagtgttcagtagtagagaaacagttaaataaataagtgaataaataaatccacctaaggaaatattaaaaagtcattgaagacatttttacacagtgyagcatttttttaagtctgttacagtgtaaagtaacacacacaagttcctaggcagcatgaacaaaattctgtagaaaagaaactttaaataaaaagaggaaggggcattctgtttccaaaatcacaatagcacatgcttacacctcgcctctccacacacactcccaaatccttcagggctcaacaccgaaagccaaggaagtcacccagccccctgcccagagcatagctggtgac

SEQ ID NO: 142275 - DNA, 527 bp, Homo sapiens
tctgcttgccgccttccacccaaagagatcaagagctctcgggrgtgggatgaaatacacgtctccatcaacccaatctgcatggcagagggtgcaggacctaatatggtttttctgtgtccccacccaaatctcatcttgaattgtaatttgcacatgtggagggagggaccttgggggaggtgagtgaattatgggtgtggttccccccatgctgttctcatgatagtgagtaagtgctcatgagatctggttgtttgataaaggtgtctggtgcttccccactttgttctctctcacctgccaacatgtaagatgtgctttgcttccccttcaccttctgccatgattgtaagtttcctgaggcctcccagccatgcaaaactgtatgtcaattaaacctcttttctttataaattacccagtctcaggctattcttcgtatcagtgtgaaaatgaactaatacaggacacatgcttaagaagagcctgagattgctaactgaacttagtttacgaaatggaac

SEQ ID NO: 142276 - DNA, 527 bp, Homo sapiens
tctgcttgccgccttccacccaaagagatcaagagctctcgggagtgggatgaaatacacgtctccatcaacccaatctgcatggcagagggtrcaggacctaatatggtttttctgtgtccccacccaaatctcatcttgaattgtaatttgcacatgtggagggagggaccttgggggaggtgagtgaattatgggtgtggttccccccatgctgttctcatgatagtgagtaagtgctcatgagatctggttgtttgataaaggtgtctggtgcttccccactttgttctctctcacctgccaacatgtaagatgtgctttgcttccccttcaccttctgccatgattgtaagtttcctgaggcctcccagccatgcaaaactgtatgtcaattaaacctcttttctttataaattacccagtctcaggctattcttcgtatcagtgtgaaaatgaactaatacaggacacatgcttaagaagagcctgagattgctaactgaacttagtttacgaaatggaac

SEQ ID NO: 142277 - DNA, 527 bp, Homo sapiens
tctgcttgccgccttccacccaaagagatcaagagctctcgggagtgggatgaaatacacgtctccatcaacccaatctgcatggcagagggtgcaggacctaawatggtttttctgtgtccccacccaaatctcatcttgaattgtaatttgcacatgtggagggagggaccttgggggaggtgagtgaattatgggtgtggttccccccatgctgttctcatgatagtgagtaagtgctcatgagatctggttgtttgataaaggtgtctggtgcttccccactttgttctctctcacctgccaacatgtaagatgtgctttgcttccccttcaccttctgccatgattgtaagtttcctgaggcctcccagccatgcaaaactgtatgtcaattaaacctcttttctttataaattacccagtctcaggctattcttcgtatcagtgtgaaaatgaactaatacaggacacatgcttaagaagagcctgagattgctaactgaacttagtttacgaaatggaac

SEQ ID NO: 142278 - DNA, 509 bp, Homo sapiens
ccaaagagatcaagagctctcgggagtgggatgaaatacacgtctccatcaacccaatctgcatggcagagggtgcaggacctaatatggtttttctgtgtccccacccaaatctcatcttgaattgtaatttgcacaygtggagggagggaccttgggggaggtgagtgaattatgggtgtggttccccccatgctgttctcatgatagtgagtaagtgctcatgagatctggttgtttgataaaggtgtctggtgcttccccactttgttctctctcacctgccaacatgtaagatgtgctttgcttccccttcaccttctgccatgattgtaagtttcctgaggcctcccagccatgcaaaactgtatgtcaattaaacctcttttctttataaattacccagtctcaggctattcttcgtatcagtgtgaaaatgaactaatacaggacacatgcttaagaagagcctgagattgctaactgaacttagtttacgaaatggaacc

SEQ ID NO: 142279 - DNA, 527 bp, Homo sapiens
tctgcttgccgccttccacccaaagagatcaagagctctcgggagtgggatgaaatacacgtctccatcaacccaatctgcatggcagagggtgcaggacctaatatggtttttctgtgtccccacccaaatctcatcttgaattgtaatttgcacatgtggagggagggaccttgggggaggtgagtgaattatgggtgtggttccccccatgctgttctcatgatagtgagtragtgctcatgagatctggttgtttgataaaggtgtctggtgcttccccactttgttctctctcacctgccaacatgtaagatgtgctttgcttccccttcaccttctgccatgattgtaagtttcctgaggcctcccagccatgcaaaactgtatgtcaattaaacctcttttctttataaattacccagtctcaggctattcttcgtatcagtgtgaaaatgaactaatacaggacacatgcttaagaagagcctgagattgctaactgaacttagtttacgaaatggaac

SEQ ID NO: 142280 - DNA, 555 bp, Homo sapiens
ctccaggagagcttggggaggggtctgggaagcagcgggctatggagccatccagcctcctgcaccctctgaagcctttctgcctctcctgcagactcccaccttcccttcctccagtctgctcctccttcatgtgacttaaccctgtttccaggcttagccaagccagttcctcaagccctctcctgttcaacacctgctctgacccctcctatctctaataactaaaaccacattgtcccatggaactagtgaacttgcctcttccaagaagacttcccggattgacctgctctgttttgctgtctcatcccttctctttcctgggaaygtggccctggtcctccacagtcatgtgcagccatctctgtgaggttacacaaggttcttccaactttgatccagccttttcctataggtttatctggctggaccaatgactctatgggtttggggagccctcacttgatatttattttcctcagacaaggggagcacaaaatggaggtgctatttgggtagagtctttatatcaaaatcatgtgaattgacatt

SEQ ID NO: 142281 - DNA, 560 bp, Homo sapiens
ttctgttttgttttctaccagaagctcttgtctatgttttattttagtaaataatcagctgccacagaaagaagctcagcgtttccatcaccatttcctgtgttaaagcccctggaagtgggagccagggcatgcacaggcggtggccaggctgaggccctctgcccagccctgtgtttccctacttcattctgtytctgtttcctgtgcaggcccctcttaaattacttttctaaattaatgacaatactatctcgcagtttcttatcgaagccctgagtcatcttttatctttttcttagatttcatatccggtcgacaacctcttctgccgtattttatgccctgaaccggcctgagcctcatgtcctgtgttctcggctccagcctgctgacatcacttctacaccatggctcttgtttatgtgatggccccgacggtctccccacctccagctccagtccattttctgggctttactcatatgtcttaaagaaacaccattgaactcccctatttgcaagctggaaggtccctcccctgctacaggacaaagatc

SEQ ID NO: 142282 - DNA, 503 bp, Homo sapiens
ttctgttttgttttctaccagaagctcttgtctatgttttattttagtaaataatcagctgccacagaaagaagctcagcgtttccatcaccatttcctgtgttaaagcccctggaagtgggagccagggcatgcacaggcggtggccaggctgaggccctctgcccagccctgtgtttccctacttcattctgtttctgtttcctgtgcaggcccctcttaaattacttttctaaattaatgacaatactatctcgcagtttcttatcgaagccctgagtcatcttttatctttttcttagatttcatatccggtcgacaacctcttctgccgtattttatgccctgaaccggcctgagcctcatgtcctgtgttctcggctccagcctgctgacatcacttctmcaccatggctcttgtttatgtgatggccccgacggtctccccacctccagctccagtccattttctgggctttactcatatgtcttaaagaaacacc

SEQ ID NO: 142283 - DNA, 560 bp, Homo sapiens
ttctgttttgttttctaccagaagctcttgtctatgttttattttagtaaataatcagctgccacagaaagaagctcagcgtttccatcaccatttcctgtgttaaagcccctggaagtgggagccagggcatgcacaggcggtggccaggctgaggccctctgcccagccctgtgtttccctacttcattctgtttctgtttcctgtgcaggcccctcttaaattacttttctaaattaatgacaatactatctcgcagtttcttatcgaagccctgagtcatcttttatctttttcttagatttcatatccggtcgacaacctcttctgccgtattttatgccctgaaccggcctgagcctcatgtcctgtgttctcggctccagcctgctgacatcacttctacaccayggctcttgtttatgtgatggccccgacggtctccccacctccagctccagtccattttctgggctttactcatatgtcttaaagaaacaccattgaactcccctatttgcaagctggaaggtccctcccctgctacaggacaaagatc

SEQ ID NO: 142284 - DNA, 564 bp, Homo sapiens
tagggtttttgcttttctgttttgttttctaccagaagctcttgtctatgttttattttagtaaataatcagctgccacagaaagaagctcagcgtttccatcaccatttcctgtgttaaagcccctggaagtgggagccagggcatgcacaggcggtggccaggctgaggccctctgcccagccctgtgtttccctacttcattctgtttctgtttcctgtgcaggcccctcttaaattacttttctaaattaatgacaatactatctcgcagtttcttatcgaagccctgagtcatcttttatctttttcttagatttcatatccggtcgacaacctcttctgccgtattttatgccctgaaccggcctgagcctcatgtcctgtgttctcggctccagcctgctgacatcacttctacaccatggctcttgtttatgtgatggccccgacggtctccccacctccagctccagtccattttctgggctttactcayatgtcttaaagaaacaccattgaactcccctatttgcaagctggaaggtccctcccctgctacag

SEQ ID NO: 142285 - DNA, 431 bp, Homo sapiens
cagcaagttgctaatgaaaaagttggggcactgatggggaaggagtgggtccatgagatttgaaatgagggtgacattaygctgacattacgcacaagtggacataaatgaagctgagagtgttgaacccccaaataaccctgagattcccttgttagtgaaaacagcccacttgccctccccccatgtctgaggacactattataccatcctttaattatatactctgtgataatctcatctaggacagttaccttacaagggtgtatggatgtcattaagacccaccctcggttgcccctagacttgcaaccagggtcagatctcagcatgtgccttggcagaaggcacaaaatctgacccaggaagaagtggcttattctctaagtccacttcttagagattattgttagtttatatttcagaaactt

SEQ ID NO: 142286 - DNA, 587 bp, Homo sapiens
aacataggggaaaagctccttgacattgggttagataatgatttttgggatatgatccttaaagcacaggcaacaaaagcaaaagtagacaartgagattacatcaaaccaaaaagcttctacacagcaaaagaaacaacagtgtgaagagacaactcacagaatgagaggaaatatttgaaaaccatatatctaatatggggctaatatttaaaatatataaggaatttgaaaaactcaacagcaagaaaacaaataacctgattaaaagtggacaaaagacttcaatagatatttctcaaaagaagatatacaaatgggcgagaggtttatggaaaaaaatcaacatcactaatcagagaatgcaaattaaaatcacaatgagatatcacatcattatctgttagaatggcaattatcaaaaatatgaaagagaagtgttggtaaggatatggaactaacaaaacgcttgcacattgttggtgagaatttacattagcacatccattatggagaacagtatggaggttcctcaaaaaactaaaaagagaattaacgtatgatccagcaatcccacttctgggtat

SEQ ID NO: 142287 - DNA, 567 bp, Homo sapiens
cctgaggccaccattccagatcctagctcctggacgacatttcttgacacatctgggccagaagaggacttctgccttgaagggaagaacccartcctggcaggattcatcacctgctgactaaagagcccttgggccatgaataatcaggagtaatacccaggcagtacaagccataggccttggatgagactcagggatgtgttggcttcaggtgtgacccagcacattcccagctgtggcagctatgaggagagactccttctgcttgagaaaaggagaggaaagagtaaaggagcttttgtattgcagctgagataccaggttggccgaagtagggtagagcaccaagcagactcttcagatccccagttcccgaccttggctcctggacagcatttctagacctgtcctgggtcagaggagagcccactgccctgaagggagagtcacaggcgtggcagcattgaccacaagctgaagagcccttgggccttagtgaatattaatggtagctaggcagtactcgccacaggcctaaagtggtgttagccatggagagagact

SEQ ID NO: 142288 - DNA, 567 bp, Homo sapiens
cctgaggccaccattccagatcctagctcctggacgacatttcttgacacatctgggccagaagaggacttctgccttgaagggaagaacccagtcctggcaggattcatcacctgctgactaaagagcccttgggccatgaataatcaggagtaatacccaggcagtacaagccataggccttggatgagactcagggatgtgttggcttcaggtgtgacccagcacattcccagctgtggcagctatgaggagagactccttctgcttgagaaaaggagaggaaagagtaaaggarcttttgtattgcagctgagataccaggttggccgaagtagggtagagcaccaagcagactcttcagatccccagttcccgaccttggctcctggacagcatttctagacctgtcctgggtcagaggagagcccactgccctgaagggagagtcacaggcgtggcagcattgaccacaagctgaagagcccttgggccttagtgaatattaatggtagctaggcagtactcgccacaggcctaaagtggtgttagccatggagagagact

SEQ ID NO: 142289 - DNA, 601 bp, Homo sapiens
acctccgtctccagggttcaagcaattctcgtgcctcagccgccagagtagctgggattacagtcatgtgccaccatgcctggttaatttttgtatttttagtagagatktttgccatgttggccacgctggtcttgaactcctggcttcaagtgatctgcctgccttggcctcctaaagtgctgggattataggcattaaccaccatgctcagcctattttttgccattattgtgtctatgaatactcaatgtttagctcccacttctaagtgagaacatgtggtatttaattttctgatcttgtgttaatttgtttaggataatagcttccagctgcatccatgttgctggaaaggacttttttttttatatatatatctgtgtagtgttccatgatgtatatgtaccacattctaaaaaatccaatccatcattgatgggcacctaggttgattccacgtctttgctgttgtgactagtgctgcaatgacacgtgagtgcaaatgtctttttggtagaacggtttgttttcttttggatatatacccagtaatgggattgctgggctaaatgatagttctagagtagtttgttttaaa

SEQ ID NO: 142290 - DNA, 601 bp, Homo sapiens
acctccgtctccagggttcaagcaattctcgtgcctcagccgccagagtagctgggattacagtcatgtgccaccatgcctggttaatttttgtatttttagtagagatgtttgccatgttggccacgctggtcttgaactcctggcttcaagtgatctgcctgccttggcctcctaaagtgctgggattataggcattaaccaccatgcycagcctattttttgccattattgtgtctatgaatactcaatgtttagctcccacttctaagtgagaacatgtggtatttaattttctgatcttgtgttaatttgtttaggataatagcttccagctgcatccatgttgctggaaaggacttttttttttatatatatatctgtgtagtgttccatgatgtatatgtaccacattctaaaaaatccaatccatcattgatgggcacctaggttgattccacgtctttgctgttgtgactagtgctgcaatgacacgtgagtgcaaatgtctttttggtagaacggtttgttttcttttggatatatacccagtaatgggattgctgggctaaatgatagttctagagtagtttgttttaaa

SEQ ID NO: 142291 - DNA, 601 bp, Homo sapiens
acctccgtctccagggttcaagcaattctcgtgcctcagccgccagagtagctgggattacagtcatgtgccaccatgcctggttaatttttgtatttttagtagagatgtttgccatgttggccacgctggtcttgaactcctggcttcaagtgatctgcctgccttggcctcctaaagtgctgggattataggcattaaccaccatgctcagcctattttttgccattattgtgtctatgaatactcaatgtttagctcccacttctaagtgagaacatgtggtatttaattttctgatcttgtgttaatttgtttaggataatagcttccagctgcatccatgttgctggaaaggacttttttttttatatatatatctgtgtagtgttccatgwtgtatatgtaccacattctaaaaaatccaatccatcattgatgggcacctaggttgattccacgtctttgctgttgtgactagtgctgcaatgacacgtgagtgcaaatgtctttttggtagaacggtttgttttcttttggatatatacccagtaatgggattgctgggctaaatgatagttctagagtagtttgttttaaa

SEQ ID NO: 142292 - DNA, 485 bp, Homo sapiens
ttgttccaacaccactgcctacaagatgaactgcttccaaatgatgatagaggaaaaactttcaggtaaatggacctgccatcatcacacatgctttttctcatattacattttacctgcagtttgtaaatattataaaaaatcaataaagcgkccatattgctgtaatctaatttgtcttttctgattgtgtgaagctggaggacacatttggcatcacattttcggacctcagagagtgatgttaaacatttatagtgcacttaataatctgtcagaaatgtacaaaggcataatgtctcattaataattattaaatcattgagtcacacagaagatgttcccctctttacttacgtaatgaccagcaaccgctaaaacgtagctcatttgtgatgcacagccagcacatctaatagtggaaatctgcttgaggaaattaataagaaatcgtattcagagataggattttagacagcaagaaa

SEQ ID NO: 142293 - DNA, 427 bp, Homo sapiens
ttagcttccattttcaaccttaagctttcttcattctgggtaaactcaaggcttcccaatccgtactggtgataagtgcatgatccaatcaagctagctggtggctcaaggttgttgactaaagagttgttccaaattgcaggattgtaaagggtgtcccatgcagttagcctgggcctggtaagacattctgtgccaccaacatttctgtggtcaaacttttgaagtttttcacacctttcacactcattactgtgctggggcttgtctttggtaaaagtgttaaatacacaatatttgcctttggtgcgcatccttccagttctaggccaataagcaggcaccacgtttcttcctgccagtagctgtcctgcatggttgttcaacaagcctcrcccatagatctttgagccactgtgggatgaag

SEQ ID NO: 142294 - DNA, 638 bp, Homo sapiens
acgttaatagacacctcaaagaagatatacagatggcatatcaacatttgaaaagatggtccacagcatatgtcatcagggaaatgtgaaactaaaacagtgagataacactacacgcctactagaatagtcaaaatccagaatgctgacagcaccaaatgctggtaaggatgtggaccaacaggaaccctcatttattgctggtgggaatggaaaatggtagagccactttggaagactgttttgtgacttcttacaaaactaagcatacttttaccatacaatgcagcaatcgtgatccctggtatttacccaaaggagttaaaaacttaatgtccacacaaaaacctgcacacagatgtttatggcagtgcagctttattcgtaattgccaaaacctggaaacaaccaagatgtccttcagtaagtggatggatgaactgtggtacatccagacagtgaaatattattcagtgacaaacagaaaagagctatcaagccatggaaaggcaatgagaaagctacatattactcagtaaaaagaaaarcaaatctgaaaagggtatatactgtattattccaattgtatgacattctggaaaaggcaaaacaactgagacaataaagagtcagtggtt

SEQ ID NO: 142295 - DNA, 545 bp, Homo sapiens
gaattctagcctaaactcaactttataaaggaacaaaggccaaaggaggttaacctcgtacagggccaatcattttcctattacaacatagaatgagactcagaaaaggacaaaccaaggaatcctagaagctgctagtgtgcatataaaatatttggtgtcaggaatgaacaaaaggaaaaaaacagggaacaaaaagaactaaaacaccacaaaatagaagataaagagaaaaagcagcagaaagatataaaaaaagtttcttgttgatagttacttttttcaggtaaactgaaagtcacaactgaaccttcaaacctataatcctctaagagaggcacattttaaagaagttacctctagaaaacttcctggaygttacctgtcagtcccaggggcagactgggcacctcactctcatcttcatcattatctggcttctccacattattttctgtttctttagtagtctcggcactttcttcttcagatttccctttgttttcagtttttgcttttttcgtatctttggttttaaaagacaa

SEQ ID NO: 142296 - DNA, 554 bp, Homo sapiens
gactccccgcttctgccaataaaatgtttccattagctaccaggctaatctctaacatactggtgagtacagggaattctcatgtcatgtgcacacaatagtaatagaaagaggaacaataaccgtctgtgaaaaactaaatggctgaagttcaaagataataaatacctaccaggctcagcatcattcaccatttttctctttttcttctttttcttttttgattctgaattggaagactgcattgctgcttctccattgsttaatacagtggatttctggggagactttgtaacttttatatttcccactgcttcttgagacatgcctccattttgagtttctgataagcccacattcatgggcttttgttttgattttttaacctttctacttcccattgtttcttcagatacatctccattttgagtttccgatagggtcagatttgaggcccctgtttaaataaacagaacatatactgtgacaaagaaggagaagtttacttagaaacactgaaatcccaaatgagaacttccatggcttcctgacac

SEQ ID NO: 142297 - DNA, 569 bp, Homo sapiens
gtcttaattcttctatcaaactgtgtatttgtgtccawtataatattttccttaatgagagggtgtgcaggcgcagtgtcgaaacctccacagctgaggtggtgcttcgacagttcaactatgggtaggagttgacagtctggattagataggcaggacatatttattattcccactttctatagggaaaaaccaaggtataaaaaagttgataaagacacctaaggtcagcagcttttgtaaaggaagtgctgaaaatggtttatattttcttcacctttagctcagttcttgagacagccaagagattctcacccagggtgtggagcattttctcaccccagctccaagaggcacaacagaagctcccagaatggggcctgagagctttggtttatcagaaggaaacagatgttagaaaaggtaaaatatgttggattagatcctcttgctgcaattaattgtagacttgtttcttgagttctttgattctgatatctgttgtttaattaatgaggaattcttaatatgaaatcccagatattggagattctaggaagaagccagat

SEQ ID NO: 142298 - DNA, 562 bp, Homo sapiens
tggttttttaatgtctgtgagaaaatcaaagcatgtttgtaaccctcactggcaatattactcagctaaaagtattcaacaacttgactacataactctttggtttcttctctgtcctctatcctggaaagaaaacccaccacattattgacttatccatggaaagaaagggatttcattcatttgtaccctctttaccagggtgaccccacagtggtttttatgtcctgcttcctcaggaacgagggaggttttcttccctttcccycttcttcttcttcttctttatctttttaaagtcacttagtgctccttcctcactggaactttgcctgacatctccagatactgaattcctttatcaactaggacatacaccattgggctgctctggatgtaaactgtcttctgtaaatagcttggagtttaaaaatacaagtttgatcctaaatatatatgcacccaatacaggagcacccagattcataaagcaagtcctgagtgacctacaaagagacttagactcccacacaataataatgggagactttaacaccccact

SEQ ID NO: 142299 - DNA, 609 bp, Homo sapiens
attagcaggaagtaactttagacagactacttaacctttcacaacgcttatctatgtgtaaaacaaactccaggggatataagctactgcatcaaagtgctccttcatgattaattttttttctgcttatgtcatggctgaaagagctcaakgagcaacacaggttgggattctgttcagatccccctagaaagcagggctattcatatctacacagctcatagttgaggcaggctgctgcctgataaggacttgacattgaaagttatttaagtgttggacataggcttccctttttccaaatgtttcctggattcagtttgaagctgtgaacaaccaaggtgttttgaaagtttgaaaaaggtgactattatataagagaaactattacacagttagagagacctatgttaaatttggatatatgtatttttcctttcctccccatttatttccccctctaataaacaaatatatatttaatgaacagtactaggctctggggataagtggtaaacaaaataagcagtcttagctcccacagcatttataaataatagagaaatagacaagtaatcgagtatttgtaataaaaagtttagctgagta

SEQ ID NO: 142300 - DNA, 606 bp, Homo sapiens
atttacaattaggaagaattagtgtagaagaaaaagaagaaagggaagaggagagggaaggagggaaggaaaggagataggaagggaagaatgaaagaaaagaacaaatkaaatggaagtgaatatttattgaggactgttagtcaataaccttgatattaatatgcattatctcatttaattcttataaaaacacttcacggatgcaaaggatttcctttttcagtaagaaaactgaaaaccaagacaggttgaaaacttcctagtgatgcttataaccaagtacagacttttgttttaatctacatttttcccaagaacatttaatgaatggaaatctaccaaggtttgcaagctgtcctgagacataaatatgtgccatagataaatggtgacaacattcaactaggaaacacattcctattctagttaacttgtttttgagtggatcaatgttttagagacgtttaatagactagtagataaaatttaagtttctttctgctttcatttgcaggcatattactcttcattgactgcccccagggagaaaaaaaaaaaacactttcatagctgaaagatattattgagaagtatgtgcattat

SEQ ID NO: 142301 - DNA, 606 bp, Homo sapiens
atttacaattaggaagaattagtgtagaagaaaaagaagaaagggaagaggagagggaaggagggaaggaaaggagataggaagggaagaatgaaagaaaagaacaaattaaatggaagtgaatatttattgaggactgttagtcaataaccttgatattaatatgcattatctcatttaattcttataaaaacacttcacggatgcaaaggatttcctttttcagtaagaaaactgaaaaccaagacaggttgaaaacttcctagtgatgcttataaccaagtacagacttttgttttaatctacatttttcccaagaacatttaatgaatggaaawctaccaaggtttgcaagctgtcctgagacataaatatgtgccatagataaatggtgacaacattcaactaggaaacacattcctattctagttaacttgtttttgagtggatcaatgttttagagacgtttaatagactagtagataaaatttaagtttctttctgctttcatttgcaggcatattactcttcattgactgcccccagggagaaaaaaaaaaaacactttcatagctgaaagatattattgagaagtatgtgcattat

SEQ ID NO: 142302 - DNA, 606 bp, Homo sapiens
atttacaattaggaagaattagtgtagaagaaaaagaagaaagggaagaggagagggaaggagggaaggaaaggagataggaagggaagaatgaaagaaaagaacaaattaaatggaagtgaatatttattgaggactgttagtcaataaccttgatattaatatgcattatctcatttaattcttataaaaacacttcacggatgcaaaggatttcctttttcagtaagaaaactgaaaaccaagacaggttgaaaacttcctagtgatgcttataaccaagtacagacttttgttttaatctacatttttcccaagaacatttaatgaatggaaatctaccaaggtttgcaagctgtcctgagacataaatatgtgccatagataaatggtgacaacattcaactaggaaacacattcctattctagttaacttgtttttgrgtggatcaatgttttagagacgtttaatagactagtagataaaatttaagtttctttctgctttcatttgcaggcatattactcttcattgactgcccccagggagaaaaaaaaaaaacactttcatagctgaaagatattattgagaagtatgtgcattat

SEQ ID NO: 142303 - DNA, 517 bp, Homo sapiens
tttaaaaatttagatttgaaatacatattgtttagaatttcagaagtttttaggagaacaactatcttacataccaaggatatactaggcatatgtatgcatttataaatgttgttgataaatactattttgtggcagaactagatgattggatgctttattcaatataaaaatttttatgtctcatatactgtaatgaagctacaacttatttaaaacacattctgatacttaacctttaataaattattgaataaccacgaccaacatagatccattaatacaggttgtaatagctaaaagcaatgacaggtaacattcgtgtggaatttactgtgggtcctacttcattctgaaaacctggcttatttaaagagtttaatcttccaacaattctaaatacagtatggttgagcaatttgctcaagattatacacrcagggatagtcactcagtggttccttccttggacatgtaaataaaatttgtgtgccttttacaaaaaaaaaaaaaaaga

SEQ ID NO: 142304 - DNA, 559 bp, Homo sapiens
aaaaggcaatcatttcccccagtttattcacttaaatgaaatcactactgctcacagtagtattcccttgtcttgccccatgtcaacactctgatgtgtggagttggactgaaaaaagataggaaatgaaattccacaagtgtgtcagatttaaaagagcaactggagttttaaatagctctcttgattttttaaggatttttacaagagcaaactacagggggcagcaaatattaacaggctcctaggagtgtgctgaacctcggaattaacaagtgctattcggctcaacttctctctgaagagaaatgcccaactttaatgtgaaatgtatagttttctcgttgctttagctttatgatatatgagagttaaatctagaaggctcttcctacctgtctttacacagtaaactaaagtctggaggagtgtctcacatttcagcagcactcattgtcttccccaaattctgcaatcaagtgtgacrtgctgaagtgacatggattaaaaacctgggattatctgagcattaaaaagcgaatgcagggcacaggaattg

SEQ ID NO: 142305 - DNA, 439 bp, Homo sapiens
acagcaaacataggatgtatgtttttctgtaaacagggtaacaagtagatggttgaaatgtttaaattgaaaactctgacttaaggagtcagggagggagacgaaaaaggctcactttctgccaagaggttgctccttttctgtgaactggaaggatcactcttctctccttacacattttagtgtacctagaaacacgtgtggggtgcttagagcagtctcaggaaatggatgactggacacttggcttccagatttggtccagcctctctccgtttgtgtttctatgagtaaagttgaggcaaaccctaatgagctttcccaatgcaagattgttatsccaaatggaaagcagttagcaggaacgctaagatccaggattctgtttcaaatcattaaaattaaatagtattcttccctccaaaacgtttaagatatt

SEQ ID NO: 142306 - DNA, 529 bp, Homo sapiens
tcaagaaaagcaaatcagagaaayattccaagaaatatatgttctagcctagttcacatctgggtggctgactcatgccaagccctactgaatggccagaaattgatgggggtagggatgatgagacagcgctgcagagtcattaacagtttccttctacagacaagatcagttctgcaagtagaagtgaggagttggcgagtttgctaatgatggagaggcctccatggactcatctgtctagggaggtgaggtggggagatgctaagacaagacaaaggagttgacagcttctgtgaaattcaggtaccactttgattccctgattgttacaagaagaatatttgcctccccaaataaactctaaattccgcaaattgatgcaacatgccaagagcacctaagagtgaatttgacatgttgcaagtactcagtggtttctctttctatcccaccaaggactaggttttgtatttttcttcctacctctccttgtaccaagaagagagctgaggaactattgagaatt

SEQ ID NO: 142307 - DNA, 452 bp, Homo sapiens
gaattctaagcactgtcacatttcaagaaaagcaaatcagagaaatattccaagaaatatatgttctagcctagttcacatctgggtggctgactcatgccaagccctactgaatggccagaaattgatgggggtagggatgatgagacagcgctgcagagtcattaacagtttccttctacagacaagatcagttctgcaagtagaagtgaggagttggcgagtttgctaatgatggagaggcctccatggactcatctgtctagggaggtgaggtggggagatgctaagamaagacaaaggagttgacagcttctgtgaaattcaggtaccactttgattccctgattgttacaagaagaatatttgcctccccaaataaactctaaattccgcaaattgatgcaacatgccaagagcacctaagagtgaatttgacatgttgcaagtac

SEQ ID NO: 142308 - DNA, 530 bp, Homo sapiens
tcaagaaaagcaaatcagagaaatattccaagaaatatatgttctagcctagttcacatctgggtggctgactcatgccaagccctactgaatggccagaaattgatgggggtagggatgatgagacagcgctgcagagtcattaacagtttccttctacagacaagatcagttctgcaagtagaagtgaggagttggcgagtttgctaatgatggagaggcctccatggactcatctgtctagggaggtgaggtggggagatgctaagacaagacaaaggagttgacagcttctgtgaaattcargtaccactttgattccctgattgttacaagaagaatatttgcctccccaaataaactctaaattccgcaaattgatgcaacatgccaagagcacctaagagtgaatttgacatgttgcaagtactcagtggtttctctttctatcccaccaaggactaggttttgtatttttcttcctacctctccttgtaccaagaagagagctgaggaactattgagaattc

SEQ ID NO: 142309 - DNA, 590 bp, Homo sapiens
atgcatctcttcaaaggtctaatatccagaatgtataaggaacttaaataaatcaaaaagtcaaaaacaaataacccagtgaaaatataggcaaaagatatgaacagacacttcttaacagaagacatacaagcaacccacaaacatatgaaaaaatgttccacatcactaatcatcagagaaatgcaaatcaaaaccacaatgatatgccatctcacaccagtcagaatggcttttattaaaaagtgaaaaataacagatattggcaaggctgcaaagaaaaaggggacacttatacactggtgggaatgtaattagtcctgccactgcggaaagcagtttggggatttcttagagaacttaaaacagtgctataattcaacccagsaatcccgttactagttatatacccaaagtaaaagaaatcattctaccaaaaggacacatgcactcatatgttcattgcagtgctattcacaataggaaaaacttggaatcaatccaggcacccattcacaatggactggctaaagaaaatgcagtacatatatatcatggaatacaatgcagacattaaaaagaacaaaatc

SEQ ID NO: 142310 - DNA, 507 bp, Homo sapiens
taatgtggaagaagattgcttagaaggratttgtcagtaaatttcatttgaacaagcatcacttgtttaagcttctgtaatttcatggcacagtgacatttctaccaaaggataggtttgtttgggatacattttctatatgggtaatctcatttgcttctaattggtagctggtgacacttattaaaatgtcatgcttggcttacatctgtttccacaaagtgtccaaattctctcccttttttaaaaaaataaaaatggatttcaactctccacaattaagcccttaagaaagatagctaaaagaatatgtgacttgtgcttcctgattgttcattatatgaaattatagcctcagatgtaaaagttcagcattttctttgcgtcataagtcttaggaaggtcaaagagcaaatgcttatatgttacagcagtctgacttaatgtaacctaaataataatgccatcacaatggtgctagactggagaattaatgaattagaattc

SEQ ID NO: 142311 - DNA, 598 bp, Homo sapiens
tgtagttactacttaaaaatggaattcagccaaaggatcatttctttttcayctataaaataaaagcactttcacaaagaatcctagagctgggagaaaaaaaagaaacaactttaaagataatctagtctagtgattttcgaattgtgctctctagagctacaaagcaaagttgctccaactttggctaaacatttgagtcactgggaagatttttaaaatatagatgctaggctgggcacagtggctcatgcctgtaatcccagcactttgggaggccaaggctagtggatcacttgaggccaggatttcgagaccagcctggccaacatagtgacacccccttctctactaaaaatacaaaaaaaaattagttaggtgtggtggtacatgcccctaatcccagctactcgggaggctgaggcacgagaatcacttgaacctgggaggcagaggttgcagtagctgagatcgtgccactctactccagcctagggtacagaggagactctgtctcaaaatataaacaaataaatgaattaaaatatagatgctagaacttcactcccagagaatccagttcagctagtatgcgtgg

SEQ ID NO: 142312 - DNA, 598 bp, Homo sapiens
tgtagttactacttaaaaatggaattcagccaaaggatcatttctttttcatctataaaataaaagcactttcacaaagaatcctagagctgggagaaaaaaaagaaacaactttaaagataatctagtctagtgattttcgaattgtgctctctagagctacaaagcaaagttgctccaactttggctaaacatttgagtcactgggaagatttttaaaatatagatgctaggctgggcacagtggctcatgcctgtaatcccagcactttgggaggccaaggctagtggatcacttgaggccaggatttcgagaccagcctggccaacatagtgacacccccttctctactaaaaatacaaaaaaaaattagttaggtgtggtgrtacatgcccctaatcccagctactcgggaggctgaggcacgagaatcacttgaacctgggaggcagaggttgcagtagctgagatcgtgccactctactccagcctagggtacagaggagactctgtctcaaaatataaacaaataaatgaattaaaatatagatgctagaacttcactcccagagaatccagttcagctagtatgcgtgg

SEQ ID NO: 142313 - DNA, 598 bp, Homo sapiens
tgtagttactacttaaaaatggaattcagccaaaggatcatttctttttcatctataaaataaaagcactttcacaaagaatcctagagctgggagaaaaaaaagaaacaactttaaagataatctagtctagtgattttcgaattgtgctctctagagctacaaagcaaagttgctccaactttggctaaacatttgagtcactgggaagatttttaaaatatagatgctaggctgggcacagtggctcatgcctgtaatcccagcactttgggaggccaaggctagtggatcacttgaggccaggatttcgagaccagcctggccaacatagtgacacccccttctctactaaaaatacaaaaaaaaattagttaggtgtggtggtacatgcccctaatcccagctactcgggaggctgaggcacgagaatcacttgaacctgggaggcagaggttgcagtagctgagatcgtgccactstactccagcctagggtacagaggagactctgtctcaaaatataaacaaataaatgaattaaaatatagatgctagaacttcactcccagagaatccagttcagctagtatgcgtgg

SEQ ID NO: 142314 - DNA, 585 bp, Homo sapiens
tctcccaaaaccctttataaaaggaaagaaatagttaaagatattctttttcagattgccttttaagttagatttggaaagatttgcagtgcagagcacatttggaaataagctgatgtgtgtgtgtgtgttatgtatatatcaacatacacatagatgaaaagctaaaataaatattgtctgcagcaatgctatacattttatttacatagttctttggtggagaaaaaataatactttattctaataaattatagagtcacagtaaatgttacagaactttgtatctttcaaaatgaagttaagagtatgcatctgtctgtctgtatgttttatgtacttattccccatctcaatccaaaaagactttagagtgattccagagtctttaaaaatgttctaggtattttcttccttgcaagcaattcagaacataraatttaaatgagctgttcaaataaacatcagtggtagtaatggaaagtatctccattctaagggggtgagaaagagtttcagtggcaataaacaatagacttaaattatcagcatgaataatatgacattatcattctcattaagaga

SEQ ID NO: 142315 - DNA, 483 bp, Homo sapiens
atcattcatgaattatctttcttatttctgtatatgattgtatattattccatcatgcaactatactacagtttattcattctaatattgaggccatttgagtggtctacagttttgggcattgatgaagaatactgctatgaatatttctgttcatgtctttttgtgaacataaatactcatttctctgggtatatactgaggagaggaagtgctgagtcatagagtgggagtatgctcagctttagtagatattggcacaccgttttccaaagtatttgtatcactttaaagtttcaccaggcagtaattwaagccctgctgatgggctatgtagggatacctcatgtggctttagtttgcattcttctgataatgatgtttaacaccttctcattcatttattgataatttggctatcttctttatgaagatatcagatattttgttcattttttaattgcatagtgtaatttcttctta

SEQ ID NO: 142316 - DNA, 564 bp, Homo sapiens
tcattattcatttatttgtgagtcacatttagtaggtatctttcttctgaaagtgcttgtgtttttagcttaaaataacaaatagagcatttagataaagcagaatcagagacgggagtgcttgtattaaaagtgaaaaataaaacatggctgagtgctatggtgtccccaaaaaggttccagggctgtctttcctattgcctgttttcagtggtgcttaggcagaaagcagacaaattttaaaaaataaataaataaaataaaacaaacaaacaaaaaacagtatgcagtcccagtcaaggatgtaagccagcagaagtttccaaatgtggatgctatgaaatagatgattcttcaaggattcaccaccccagaacacaatgcacaaagcagtacgtcagagataaaggagcccacaggatgagagtaagttttctcatttcagggatatagtggaataagyaaagatcccatgtaaaactaggtttggataccaggtcagacaaaaagttgaacctgaagcaagttttaatcgacacctctgtttagtaatactctagatgt

SEQ ID NO: 142317 - DNA, 650 bp, Homo sapiens
atgttcattcaagaacctgtaaataaatgttcatagcggatctaatctaaatggccaaatctggaagcaactcaaatggccttcaatgggtgagtggttaaattaattgtggtacatccaaatcatggaatattatttagcaacaaaaaagaatgaagtattgatagatacaacagtttggatgaacctcaaggaaattatggtgagtaaaaaagagattcrcaggtccagatggttttagtggtgaattcttctaaacttttgagaaacaaataaaaaaattcatacaaactcttccagagaatagaaaatgagaaaatcttccaaacttgccttatgatttaagaataatattaaagccaaaacctgataatgactttataggaatggaaaattataggcaaatatatcttattattagatgcaaaaaaactaacaaaattaatcaatgatataaaaaaagaaatacatcatgaccaagttagcttggtattccaagaatgcaagacttattgaacatccaaaatcaatcaaatcacatttgattgaaaatttttttaaatcatgggatcaacaaatacaggaaaaaatgtaataaaatttaatacctgctcatgacaaaaactttcaactaactagtaagggaaaca

SEQ ID NO: 142318 - DNA, 617 bp, Homo sapiens
ggaaaacaactcacaaatctgtatatcaggcctcttaatgtacatcttttgtgaaaaagaaatctgtgattgaattaagatatatataaatttaaagyggcagcattcaaatgaaggctaaattcagttctctgttttagcaattcagtctcatttattcactataacttctgagttgaaacaaccaactgattatagccatcagaaataaatatgaaattaactggacactgccccatgaaaaacagaagaggttcttcaatgcagaatgatgttcttagttattccacatattggcagcagaacaatctcatccaggattctggaagatacagatgacaagggaaaaataacaacaaccttccagaagggaacctgacattttctggcaaaaatacagaataggttctgtatttcaaaggattttgaaagaagctctcctgttcttctttggtccatgcctctcaggcttggtagagaaattgttttttcaaaataacatcttatttaaccccaatactcctgaatattatgttaacatagagtcaataaaaatattataatgagatgttttacatattttcccttttctcatactgtgttttgaaaatccagtg

SEQ ID NO: 142319 - DNA, 549 bp, Homo sapiens
aaactctgatgtgatgagaatctctcaggaacctggtaaaacatccagcttcttgagaagatttttagagattcccttagaattctggagacctggaatgggctgaggttagaatttgtcttttaaatgggtactttgggcgattcttgacattaaggtggtcaagagctcaatgagctcgaaggtcctttagagctgtaaagtcctgaatgctcyggtcccacaatccacatcaagtgtgtgtgtgtgtgcgtgtgtgtgtgcacgcgtgtgcgcgtgtgtgtatatgttttgagagggagagaagttgtgtctccggactgatttaactgtcaactgggcactcgatttcaaaaagatttgaggctgttagcttgacgttgcatgatcatctcacgtcctggcagccaatctgcaggggtgagctgtttgtcgctttctcctgactcatgtttgcttatctccagaaaactctgcaccttccaaacgggcactgccccagggcctgcagctggagtgtcccaggcagccattctcgtaggcagcgct

SEQ ID NO: 142320 - DNA, 631 bp, Homo sapiens
ggaatagcccaacaaagccaattctgcctatgacagcatggttgagaatggttgtataccttaatgggttacagatagccacatacctatcaaaggccatggcaagtagaatcgaggactccagagcatagatagaatggacacaaaacatctgggccaggcatccaccaaaggaaatctcaccagcatggagccacaaaatggccagcatcttgggcacagtggtagaactgagagccaggtctgtgagtgagagaaggcagaggaagaggtacataggtgcatgaagagcattgtccatggcaatgaccaggatgagggcagcatttccaaccagtgctacaagatacatggcacagaaagggatggcaatccagaagtgggcagcctccagccctgggatccctgttaagaagaaggtgtctggaagatggttatcactgaggttggaatctgacattcttcctggcaaatgmagggctctttctgaatagtattgttatgcttgccctgtaacatcagatatttggttgatttatgtaaaacaaagatctttctgtgaaataatcttttttggactaaaaaaatttgtttttcacttgtacaaacatctgaaatgactaccacatat

SEQ ID NO: 142321 - DNA, 531 bp, Homo sapiens
gaattctgagtagaaatgccaagaaatctgaattttagccccgattctgtaacattattgatttgtgactttgaacaaatctgttacttatctggacagtctcaatttagaaacggcaatgaatgtagtcattctctgattttctgtctgctcagtatgtggcattgaaaaaaattccaaagcctttttgtgccttagtttttatctttaaattgggaatgacaccatctgacctaacttcacaaaattttgtggttgacaaaagatgactattcatggaattaaacatttgtatacccagaataattcccctattttttcctaaaaaaataagatatttatattttaacaacayatactctcgataaaagagagtacagttatcatttacatccctaaccaatgaaaagaccaatcccagagaagtgaactgatataatttagatcacgaggcattttatttgcagaactatgattaggtctcatgtcccttgattcagagtttggcgtttttgcctcaccctactgtcc

SEQ ID NO: 142322 - DNA, 497 bp, Homo sapiens
tcttttgtttaccagctgtgtgacctagagtaagtttattaacctctcaggaacaaaattctttgatctgtcatatggcaatgttagcaaacaaactagactgttagggaattcatagttcactatatgctgaatcctcagaaaagtgcctcccacagagagggcatttggcaaatgctctagcatcctaagccctagcrtcaccctcactcatctaaaatctctgtacaattgctggttgcctctcacaggccccatttgtatcctgcagggacacagccagatggaggcaggagatggggctggatcctgcactgccagctttcagtcagaacttgctgatctctgggtctgggtcctttgtcctgctggggatgccgggactggaggctctgcatgcctggctctctgtgcctgtgtgcctgctctacatggcagctttggtagggaatgcccttctagtggggctgggtggtcgctgacaaggcactctgggc

SEQ ID NO: 142323 - DNA, 501 bp, Homo sapiens
gctcctgagctgtactttgtagctgttccagctgctccagggggatggggttgttgggtaggtgaaccatacaatggcatgtgcctccttcatccacagagcttgacacacttctcaccagctgcaaaccatggccacaggcacagtaaacataatgaagcatgttggagcaccctggactgttcgcaaacatgaagcaagagaagaggctgagcytactttggagtgccagagaagcattgcctctgcccaggggtttcttcttgactgtctgttagggcatccctctgttaggggattgagttatgtttctcttgatttcccagaattgaagctgcgggtcccttccagaacctactgatggggcctacctcaccctacctcatgcactggctggatctggctgcagttcacattactggaagctgatttttcttcaaggccctgtgggagagagcaaagctggtctacagagatgtgttaggggataggcttaggaag

SEQ ID NO: 142324 - DNA, 584 bp, Homo sapiens
ttaaatgtccgtggggcagtcatactaatgaatgtggaagtgtctaaactagcaatatgaattgacgattcatttgcatttaaaaaatatttacagtttgaggactgttgaggagccagaacaaaaggtgaaggagaaagtatcagggtaataatatcaatgatgaggacaaaaaggcaagaagaataaaatgaagatgcaaagcaggaagcagtgaatgagaaaaagctgtaacaggcagaaagtagctacccatggctctaatactaagacccaagaatatgtaaataaacaattattccaccaagaaagaaggagcaagaggaaagcacgaagacaaacaaaatataaagaatatcttacaytctgaaggttacagaatatcacaagctacatcatgcctcaaattcacaaccacactattcattctatgcagaaaatagctgctagaatttcaacctcagttcaagtccctccatcaaatctctctaggcttgataccttgtaatctgcgacctacacacatacagaccagagcccagacccccaaaaccagttcaaatatcaattgctacagtatgtta

SEQ ID NO: 142325 - DNA, 469 bp, Homo sapiens
gtgcatgtgtctgtaactgagaaatcctccttgtctttgggygtcttcactgtcaccttgatgaggtggggatcctggactggtgctgggctgccctgtggcagggcttctccacctttggccatggtggcagcaggaggcccagatctgtggggacacagctaggggcatggggattggagaccaagatcatcctttcaggcaatggcaaaagtaggaagggtgagtatgaaaagggtcttgaatatcaggatagggaaatctgcagggtctacatgaaaggggccatgaggtttctggggcaggatgctttaggaagattgcgggattgagatatgttggaatcaggggagggaaatgcagggccctgggaaagaggtctgtagttgatgaatacagggacaaaggtagaaggaagggcccagctggggtgtacataccagtcagctgtggtcccgtccttctcttt

SEQ ID NO: 142326 - DNA, 469 bp, Homo sapiens
gtgcatgtgtctgtaactgagaaatcctccttgtctttgggcgtcttcactgtcaccttgatgaggtggggatcctggactggtgctgggctgccctgtggcagggcttctccacctttggccatggtggcagcaggaggcccagatctgtggggacacagctaggggcatggggattggagaccaagatcatcctttcaggcaatggcaaaagtaggaagggtgagtatgaaaagggtcttgaatatcaggatagggaaatctgcagggtctacatgaaaggggccatgaggtttctggggcaggatgctttaggaagattgygggattgagatatgttggaatcaggggagggaaatgcagggccctgggaaagaggtctgtagttgatgaatacagggacaaaggtagaaggaagggcccagctggggtgtacataccagtcagctgtggtcccgtccttctcttt

SEQ ID NO: 142327 - DNA, 375 bp, Homo sapiens
taatgaataactaagaatctagttttttctgttggaccagttccaggctcatgaatcacctggagttgtcctttgatttttaaaaataagctgggcagtctgctattgattactatcacttgaaatattggttggtgccataaattggcatagcagcaattacggagttacrtttaccgaagaatagaaatgtgtgcacagcaatatgtgattgtcctttattccatattaaaacatttccctaatatttcttaaagagccaaggcatttttcctattcacgaagatcaacttggcaaataatatctctgatgtgatgtctcaagcttttaaaatggaagaagttatgtgtgtgagctcagacttcatagacaag

SEQ ID NO: 142328 - DNA, 375 bp, Homo sapiens
taatgaataactaagaatctagttttttctgttggaccagttccaggctcatgaatcacctggagttgtcctttgatttttaaaaataagctgggcagtctgctattgattactatcacttgaaatattggttggtgccataaattggcatagcagcaattacggagttacatttaccraagaatagaaatgtgtgcacagcaatatgtgattgtcctttattccatattaaaacatttccctaatatttcttaaagagccaaggcatttttcctattcacgaagatcaacttggcaaataatatctctgatgtgatgtctcaagcttttaaaatggaagaagttatgtgtgtgagctcagacttcatagacaag

SEQ ID NO: 142329 - DNA, 375 bp, Homo sapiens
taatgaataactaagaatctagttttttctgttggaccagttccaggctcatgaatcacctggagttgtcctttgatttttaaaaataagctgggcagtctgctattgattactatcacttgaaatattggttggtgccataaattggcatagcagcaattacggagttacatttaccgaagaatagaaatgtgtgcacagcaatatgtgattgtcctttattccrtattaaaacatttccctaatatttcttaaagagccaaggcatttttcctattcacgaagatcaacttggcaaataatatctctgatgtgatgtctcaagcttttaaaatggaagaagttatgtgtgtgagctcagacttcatagacaag

SEQ ID NO: 142330 - DNA, 397 bp, Homo sapiens
tgataatacctctccactcagtttccacaggcatctttgaattccctatgactttcmttctgcattgaaattttcttttacaaatctgttgactttagcaggtaatgttctcttaagaatagactgatatgtgtttctgaatacctaaggtttagcatcatgtctggtttcctgggcctggcaaattatttgtagtattaataaacatttgttccttttaactgtgcaaactaccttttgtcctgtttaatgctttctaagttaaattttactttttatgctttccattttgctagacttgcttccattacatttaaatttgtcagaaacacacttgtctatcctttttatccttgtttattcacacttgtttatcctttctgcatcattttgtttt

SEQ ID NO: 142331 - DNA, 405 bp, Homo sapiens
gaattccctatgactttccttctgcattgaaattttcttttacaaatctgttgactttagcaggtaatgttctcttaagaatagactgatatgtgtttctgaatacctaaggtttagcatcatgtctggtttcctgggcctggcaaattatttgtagtattaataaacatttgttccttttaactgtgcaaactacctkttgtcctgtttaatgctttctaagttaaattttactttttatgctttccattttgctagacttgcttccattacatttaaatttgtcagaaacacacttgtctatcctttttatccttgtttattcacacttgtttatcctttctgcatcattttgttttagatcttactcatataagtgacatataattgaatttttaagcttta

SEQ ID NO: 142332 - DNA, 383 bp, Homo sapiens
actttagcaggtaatgttctcttaagaatagactgatatgtgtttctgaatacctaaggtttagcatcatgtctggtttcctgggcctggcaaattatttgtagtattaataaacatttgttccttttaactgtgcaaactaccttttgtcctgtttaatgctttctaagttaaattttactttttatgctttccattttgctagacttgcttccatyacatttaaatttgtcagaaacacacttgtctatcctttttatccttgtttattcacacttgtttatcctttctgcatcattttgttttagatcttactcatataagtgacatataattgaatttttaagctttatttatctttgtgctttttgatagaggaattc

SEQ ID NO: 142333 - DNA, 383 bp, Homo sapiens
actttagcaggtaatgttctcttaagaatagactgatatgtgtttctgaatacctaaggtttagcatcatgtctggtttcctgggcctggcaaattatttgtagtattaataaacatttgttccttttaactgtgcaaactaccttttgtcctgtttaatgctttctaagttaaattttactttttatgctttccattttgctagacttgcttccattacatttaaatttgtcagaaacacacttgtctatcctttttatccttgtttattcacacttgtttatcctttmtgcatcattttgttttagatcttactcatataagtgacatataattgaatttttaagctttatttatctttgtgctttttgatagaggaattc

SEQ ID NO: 142334 - DNA, 306 bp, Homo sapiens
ccttctctatcttccagttaaaaatccatcaacaaaattccttcaagcgcttttgtcatcctaaattctctgatctttttttttcctttgctgaagtttattgttgatttcttgtgaaataaatcataattgcctactgtcacaacatgagaagcacttgacaggcatctatcctgagatatcactcaatgtctgtctcagccagctggctctggggctggagtaggcgaggggaagagtccascagccaggcccagggtcccacggcccccagatcaccccccatcatcaggcaggatagtccct

SEQ ID NO: 142335 - DNA, 406 bp, Homo sapiens
gaattcccacatgttgtgggaggaacttggtgggaggtaattgaatcatcggggcargtctttcctgtgctgttctcgtaatagtgaataagtctcacaagatctgatggtttaaaaaatgggagtttctctgcacaagctctctctttgcttactgccatccatgtaagacgtgacttgctcctccttgccttccaccatgattgtgaggcttccccagacacatagaactgtaagtccaattaaacctctttcttttgtaaattgtccagtcttgagtatgtctttatcagcagcatgaacatggactaatacagtaaattggtacctgtagagtgggggtgctgctggaaagatatctgaaaatgtggaagtgactttggaaatgggcaacaggcagaggttg

SEQ ID NO: 142336 - DNA, 549 bp, Homo sapiens
ccagagaaattttcagacagaaggaaaattatcccagatggaaacccagaaatagaggcagaaattaggaataatagaaatggtaaatatgttggtaaatgaatatagagtaaacacaaaaaaagtaaagttttatagatttaaagtatatgaaaaattataatgaatattttattttattttacttattattattattttttgagatggagttttgctcttgttgcccaggctggagtgcagtggcgtgacctcagctcactgcaacctccgccttccagggttcaagtgattctcctgcctcagcctcctgagtagctgggatgacaggtgcctgccaccacgcccggctaatttttttgtatttttagtggagacggggtttcgccatgttggccaggctggtctcaaactcctgacctcaggtgatctacctgcctcagcctcccaaagtgctggrattacaggcatgagccaccgtgcctgaccttataatgaatattttaaaaagcaatagaggataaatgaattttaagtgtttaaagatct

SEQ ID NO: 142337 - DNA, 670 bp, Homo sapiens
ccagtcttggacagttctttataacagcatgaaaatggactaatacattattcattataaaaatgcaaataaaaacaatcaggtagtacttcaaccccactaggataactgtgataaaaacaaacaccccaccccctgcaaataataagttttggtgagacagtgaagaaattkgatccctcatatactgctagtggaaaaataaaatgttttagccaccgtgcaaacaatttggtggttcctcaaaaagttaaacatggaattactacatgaccctggaattctactcctatgtgtatactcaacagaattgaaaacacatgctcaaacaaatacgtgtacatgcatgtttataggagcactattcacaatagccaaaggtgaaaatagcccaaataatcctcaacagaagaatggataaacaaattgtggtatatatgtacaatggaatattatttagctataagaagaaatggagttctgatttttactacaacatggatgaatcttgaaagctttatgctaagtgaagaagctggatgcaaaaatctacatattgtttagttccacttatatgaaatatctataatagataagtcgttagagatggaatgaagattgatggtttccctgggctggggagaaactgctttatgtttaagtagttcta

SEQ ID NO: 142338 - DNA, 571 bp, Homo sapiens
gctttaaattctcctgcaccccgaaaagtataggcaagattctgcaattctgggtcatcctcagtgatgaaggggctggggaggaatggaaaactggcagagggactatctacagtcattataagtcaatacaggctttattagctttcctgttgagatctgacctacctagcgctatcttcttggtttctcatgaatctactgttcttcactacctgccctcagtaggagctgccagaatggaaatgactatcaaatctgaagagaaaacagacgagacttgtgccacagagagcatcratccaggactacggggttcaaggctctcagctcactcagaccatgggggtagggaagaggaggggaggacaggtgcttcttcaggtacaagtgaatttcctatccctggagtttacaagcagaagcaagcatagtaatcccacctctcagtctgcacacctgagaaacacacacatttgtttgcacaaggagccacatacaagattctttttacagtaggagaaaaaaagagatgacaacaatttatcagtagaggaatggtgaaataaac

SEQ ID NO: 142339 - DNA, 551 bp, Homo sapiens
ggagtattggggatatagagactgagacacagtgagcttgggatctagtgagagaggsggaaaagacatagacgaagaggaccctgtggttccatacaacagcatgagtattgcaaagcgtagctgtgcagagaagggagcgacaccctgagggcgatgggagctgcaggcagagaccatcagaggagcctcctggagaggatggcagtgagctgtgtttgaaagatgaattccaggcagacaggtagccaagccccattctggcgtgagcaaatagcatgtgcatggagccataaaacagcctggacaatgtgggtctgtaattgttcagaggaaaggatgtgggtcacagtggaatcgaagccccagccccctaaagcactgggccatgaagtcccagggaacaaggatctgctataagctctgagtagcttattacccaatctggaactctaggaaagagggcacaccggggcttagactcccacagtcaagaccctccagccacacaggacttaaacatcatcacttcccctctcagggcccagccc

SEQ ID NO: 142340 - DNA, 622 bp, Homo sapiens
cttctctcttctttggttaatcttgctaatgatctatcaattttgtttatcttttcaaagaaccagctttttgtttaattttttatttcagtttcatttagctcttctctgatcctggttatttcttttcttctgctaggtttgaattcamttgttcttgtttctctaattccttgaggtgttatgttaggttgtcattgtgctcttcagattttttgatgtaggcatttaatgctatgaactttcctcttagcactgcttttgatgtattccagaggttttaataacttgtatcactattattcatttcaaagaattttttaatttccatcttgatttcattaacttcaaaatcattcaggagcaaattatttaatttctatgtatttgcatagttttgagagctccttttggaattgatttctaattttattccactgtggtctgagaagatacctgatatgattttgattttcttaaatttattgagattacaatggcttcttttgcactgccactgttaatttgcttccaatgaactctgcacaacatgatgaatattcacatataggatgcagaaggccatcttgccctctaaaccccattatgtgaacacctacta

SEQ ID NO: 142341 - DNA, 576 bp, Homo sapiens
caggaacattctggggtaatggaaattttctatatcttgattgggttagtgatgacatggttgaatacgtttgtcaaaattaattgaactttacatttaaactatatgaattttattgtaaattgtacctcagtaaagccaattttaaaaasagatggaagagattggggaggtgggggacataccttcaaattgtgggacagaaccagtagaaaaatcttgccttccaagatagcaagtgaacagcaatatccccaggttgaaagcagctatgtgttcttgagccaataacccaaactactttatagtttgtatatataactaggtacaagtagactatatatagtaaatagtctcagactacaactgaactattcaaaatatccttatttatttggacacaaagttataaaaacttggacatgtagaacaaatatcttttaaaatctgcaacacttaagagaaatttgctgtcctgatgctacacaatttccaaatattttagtgggtgtgataggcagaataatggcccctaaaatgtcagatctcaatgtctggaagctgtaaacattgcct

SEQ ID NO: 142342 - DNA, 576 bp, Homo sapiens
caggaacattctggggtaatggaaattttctatatcttgattgggttagtgatgacatggttgaatacgtttgtcaaaattaattgaactttacatttaaactatatgaattttattgtaaattgtacctcagtaaagccaattttaaaaacagatggaagagattggggaggtgggggacataccttcaaattgtgggacagaaccagtagaaaaatcttgccttccaagatagcaagtgaacagcaatatccccaggttgaaagcagctatgtgttcttgagccaataacccaaactactttatagtttgtatatataactaggtacaagtagactatrtatagtaaatagtctcagactacaactgaactattcaaaatatccttatttatttggacacaaagttataaaaacttggacatgtagaacaaatatcttttaaaatctgcaacacttaagagaaatttgctgtcctgatgctacacaatttccaaatattttagtgggtgtgataggcagaataatggcccctaaaatgtcagatctcaatgtctggaagctgtaaacattgcct

SEQ ID NO: 142343 - DNA, 565 bp, Homo sapiens
atgcggtacatatacaccatggaatactacactgccataaaaaacaggatcatgtcctttgcagcaaygtagatggagctggaagccattaacctaagcaaactaacacatgaacagaaaaccagatgtcacatgttctcacttacaagtggaagttaaacattgagtacacctggaaacaagggagcaacagacactggggcttacctgagggaagggagggtgggaggagggtgaaaggatcaaaatactacctatcgggtattattcttattacctgggtgacaaaataatttgtacaccaaacccctgtgacatggaatttacctatatagcaaacctgcacatgtacccctgaacctgaaataaaggtttaagaaaaagtgttactgttgacatttggactgaataactctctgctgtgaggactgccctgtgcattgcagtattttgagcagtgtccctggcttctacctgctagatgccagtagcatccttccagtggtaaaaaccaaaagtgtcttcgaacgttaccaaatattcccttgggttcggggagacaaaa

SEQ ID NO: 142344 - DNA, 589 bp, Homo sapiens
ttaactttatgaagtgcatcataaaacaacgttttatttgaagttgctgatacggaattcagatgggaggaccaattcttcttggctactattaaatacttttgaatatcaaatctcaggtaactgggctgattttttcacttaaaaacttgtgcttgttagtcttaagagtagcacaaaaattaagcttctttgaagtaatgttttataataatctaataaattttttattattagagaaatctattaaatataaaatttggcagagaaattcataagatgaaagcaatttttaagaacatgtatatatgaaaataggaaagactcagtggagaaagaaaacggttgaaggtttattaaaaggcaatatgagtgcagaagcaaggtaagttttttgtaataattttttgttaataatgtgaaatgtaaggaaaaaatatacaactttaagtttctgactgtcctgctagaaactagttttgccctgcagcgacccctctgtgggaatctcattgatsacaagtgaaattctggaagtgctaaagttagtttgctcaagttcactgctcatggatatgatcatgatggt

SEQ ID NO: 142345 - DNA, 567 bp, Homo sapiens
ccatcttctttaacccctggttcactggggtcttccagatacatgcggtttaattcttcacttttctaagggagaaaagtctgcaaatcttttttcctagtgttttcctttggaagcttcgtcccactgttatcacagagtatttgaattctcatcagtttccttgtaacttctgtggaatgtgctggtagaactgcagctgttagtccttgtacttagaacaggttttcttcccctgaaggattaataaggaggccaactatttgcagttgcttctaccccatctctgacagttctttaaccccctgacaaggaagggtctcagaatttctcattccttctcagggtgacaattgttgtgaattcttccttgtctattctttttacctcctctttttccattttagcctttcaatttgagttggatttatttctatggtggtctatyacctaacagaaaacgtggtgcaccaagtaatgagtaacttagtttttattatgttttaaaaaatacaataaacattttttgagcactttctgtgcactaggcatttgctaaatgctggt

SEQ ID NO: 142346 - DNA, 565 bp, Homo sapiens
ctccattgtgtatatgtaccacacttctttatccattcatctgttgatggacacttaggttgtttccaaatcttggctattgtgaatagtgttgcgataaaaacgggagtgcagatgtctcttcaatatactgatttcctttcttttgggcctatacttaagagtgtaattgctgggccatgtggtagttctatttacagttttttgaggaacttccaaactcttctccatagctgtactagtttacattcccaccaacaatgtatgagggttctcttttctccaaatcctttccagcattggtattgcctgccttttggataaaagccattttaactgggttgagatgatatctcacggtagttttgatttgaaattctataatgaggaatggtgttgagcacctttttatatttctatttgccatttgtacaacttctttggagaaatgtctattcagatcttttgcccattttwaactagattattagattttttttcctatacagttgtttgggctccttatatattctggttattaataccttgtcaaatgggtggtttt

SEQ ID NO: 142347 - DNA, 471 bp, Homo sapiens
gcctcccgggttcaagccattctcctgcctcagtctcctgagtagctgagattacaggcatgcagcaccatgcccagctaatttttgtatttttattagagatggggtttcaccatgtttgccaggatggtcttgatctcttgacctcgtgatccgcccacctcagcctccccaagtgctgggattacaggcgtgagccaccatgtccggcctatgaactgttccttrtactttccccagtacttttgaactttataagtctagattccaaggtctaacgttatagttaatttacacaaattcaaatatatgcacccgaccaaagaggaaggagagaagaggggttggagggttgcaggaatggggaagaggggttggaaaattgcaggaatgggggacagggagtcttgggggagacagagaccctggaggaacactggttggggacggctcattgggaagtgtcatgta

SEQ ID NO: 142348 - DNA, 415 bp, Homo sapiens
tcggatgtttgcagaagacaatggtcacttgactttaaggagacaaagtgagaggkttccttttgttagccaaactagctttatttctaaattgtgtcagtgaactataataattttcagtgggacaaaagggacatcatactggacttaataatacctgggtgatgaagtaatatatacaagaaacccctctgacatgtatttacctaggtaagaaaccttcgtgtgtacccccgaacctaaaataaagttaaaaaagggtgactgatatggtttggctatgtccccacccaaatctcctcttgaattgtagctcccttaattcccacatgttgtaggagggacccagtgggaggtaattaatcatgaggctgggtctttcctcgtgctgttctcatgatagtgaataagtcac

SEQ ID NO: 142349 - DNA, 415 bp, Homo sapiens
tcggatgtttgcagaagacaatggtcacttgactttaaggagacaaagtgagaggtttccttttgttagccaaactagctttatttctaaattgtgtcagtgaactataataattttcagtgggacaaaagggacatcatactggacttaataatacctgggtgatgaagtaatatatacaagaaacccctctgacatgtatttacctakgtaagaaaccttcgtgtgtacccccgaacctaaaataaagttaaaaaagggtgactgatatggtttggctatgtccccacccaaatctcctcttgaattgtagctcccttaattcccacatgttgtaggagggacccagtgggaggtaattaatcatgaggctgggtctttcctcgtgctgttctcatgatagtgaataagtcac

SEQ ID NO: 142350 - DNA, 429 bp, Homo sapiens
aaagatagatctgaaaatggatgtaaaataatgtgttatatatacacaatagaatactattcagccattaaaaaagcagccaattatttgtgatgacatgaataaacctgaagartattatgtgaagtgaaacaagcctggcacagaagacaaatactgcgtgatctcactcttatatgtgaaatcttaaaagttaaactcatgaaaacagagagtaaaatgatgattacctgaggctgaagttgtgggtaaggatatttgtcaaaggttacaaaatttcagttagaaggaaaaatttcaagagatctacatacatcacagggattatagttaataacaatgtattatattcttgaaagaaatgaatgtgagtaaggaaaagttactggaagagagaagaaagcattgttttccaaacagaacataatg

SEQ ID NO: 142351 - DNA, 558 bp, Homo sapiens
gctaacatgtattgatttctcttgcccattgatacacacaggtgttgcaatttattttggaaagggtagcaccataactttatgatcatcakcctggagattttatttctgtccttggtttgcccttactatttgatattcctgacagtattaatgatctttagtaaaactaaactaaagcaaatgtttgcctatatgtgatccaaatattctcacattgaatcactctaaatgccagaatttttacaacacagtcttatgcactagataaataattttataatcaaaattctcactgtttccaatcctctcatactcatttaagaaacagaatgtgttagaaatgaccaacattttcagagattgagctactcagggttatgaaatgaaatcttgcagtgagtctttgagctaacaagaaaaattaagcgaagaaggacttcccttcacaagtgaacgtacttcacttctcaaaccacccattaaagcttgaatagaccattgttactttaagaaaatagaaatagcagtagtaacattcatccctttcaagtctct

SEQ ID NO: 142352 - DNA, 461 bp, Homo sapiens
aatctatcttactgaaaaaaattagtaaaaacataaactaaattttctgtgatcaattcaagaacatagaaatagttgctactttgaagattttgaggttgaaacaaatttattaatcatcttctatttctgagtcaaagtaatcaaggtgagaaatcttaatttctaaatargaatgtcaagaatgtttctgtttccaacaacatttccataatattttctaatttgtaaaattaagcaaatacaaatgtttcagtcttcaattgcatgtattaatccaggcatactaacaaatccttggatcattggatgattgttttaacatgtttgtacaactaatattacaaataactcgatagtcattaggtaccaaaaagttaaccaatttttttttaaactgacttttccttactgtttactttgtttcaaatcctgacatcaggaaaagaattaaataccac

SEQ ID NO: 142353 - DNA, 536 bp, Homo sapiens
taatttttaattttagtgggtatgtagtgggtgtatatgtttgaggggtacatgtgatgttttgttacaggtatacaatgtgtaatgattacaccaagcattaccttaagcatttatcatttctttgtgttataatagaatcattccaactccactctttttgttattttaaaatacacaataaagtactgttggctatagtaaccctattgttctatcaaatactagatcttattgattctatctaaacatatttttgtaaccataaaccatcctcactctccrtgccccctaactacccttccccgcttctggtaatcatcattacactctatctctatgacttcaatttttttcatttttaagtacccacgtatgaatcagaacatggaaaatttgtctttctgtgcctggcttatttcacttcacagttctatccatgttgctgcaaatgacaaggtttccttcttttctattgctgaataatattctattgtgtttacataccacattgctttatctactcttggttgaga

SEQ ID NO: 142354 - DNA, 257 bp, Homo sapiens
gcttatgcaatctatactgtcccctcacagttttacactatttatctgtggaggaaaacagtgtctttacctctaaaatttctgttccatatttgactgcttcctcatgwtatcagtcaacttattctttgctcatgtttttttctaagctatttgttgcatctggagactgggttaacttttagataagtttatattttaggcaaaaaatgctccataggccattctgtatatgtcttagtagcttcaacagaagg

SEQ ID NO: 142355 - DNA, 529 bp, Homo sapiens
aaggattccctattaataaatggtattataaaactggctagccatatgcagaaagctgaaactggatcccttccttacaccttattatgaaaatgctcaaacttttaaagttgcaagaataatataataaaaactcttaggatccattttgaatggatccatatcttatgctttccctgatttagacctggaattagcctcagtttcttccagtatctaaaaatacttastggatgtatgatggtagtttagagaacactaggcactaggggtgctcattactgctagggtgcctttgtctatatgttctttcatacatatcaatcaagagtttacactgatatttccttttcacatttaatattacaatgttaaaagttaagttttattcaagttttctgattttatatctttcttgtttacataaaaatcatgttttacaacaattcatataattacttatttgctttaactacaatattgctaatggagtttcaatatgacaataattttgctaacaatacagctg

SEQ ID NO: 142356 - DNA, 554 bp, Homo sapiens
tgtttacatgtatatgtgcatatatataatgttatatatatatttatatatatataaaaaaagtgtgcatgcatgtatatatatacatagaaagagagagaaaggctgtgccaaaaccagaaacattctgtttgaaaactggccttcattttaaaaagtataaagtctattaaaacatggttgtgagtggatagtctgtttcttgttatagtcctggtttttgaggggaggttrttcaaatgtgcagtatttttactaggaccttaaacacataccccctgttaatgtaaagatgtccttatttacctgatggcaaatatttctgaaaattgagaatgtccccctttagtcatgcctttctttcacaatatgtgaaactctgtgaccttgcattcaagaaacattatttctagctatggaaaatgaatggaataacatttattttctccttgttagttggatagttctgtatttaaatgtttcatatttaaaattatctgtgtattgtttatcagaagtgtgcaagtaatttagaccttgatgatgagtaatat

SEQ ID NO: 142357 - DNA, 554 bp, Homo sapiens
tgtttacatgtatatgtgcatatatataatgttatatatatatttatatatatataaaaaaagtgtgcatgcatgtatatatatacatagaaagagagagaaaggctgtgccaaaaccagaaacattctgtttgaaaactggccttcattttaaaaagtataaagtctattaaaacatggttgtgagtggatagtctgtttcttgttatagtcctggtttttgaggggaggttattcaaatgtgcagtatttttactaggaccttaaacacataccccctgttaatgtaaagatgtscttatttacctgatggcaaatatttctgaaaattgagaatgtccccctttagtcatgcctttctttcacaatatgtgaaactctgtgaccttgcattcaagaaacattatttctagctatggaaaatgaatggaataacatttattttctccttgttagttggatagttctgtatttaaatgtttcatatttaaaattatctgtgtattgtttatcagaagtgtgcaagtaatttagaccttgatgatgagtaatat

SEQ ID NO: 142358 - DNA, 554 bp, Homo sapiens
tgtttacatgtatatgtgcatatatataatgttatatatatatttatatatatataaaaaaagtgtgcatgcatgtatatatatacatagaaagagagagaaaggctgtgccaaaaccagaaacattctgtttgaaaactggccttcattttaaaaagtataaagtctattaaaacatggttgtgagtggatagtctgtttcttgttatagtcctggtttttgaggggaggttattcaaatgtgcagtatttttactaggaccttaaacacataccccctgttaatgtaaagatgtccttatttacctgatggcaaatatttctgaaaattgagaatgtccccctttagtcatgcctttctttcacaatatgtgaaactctgtgaycttgcattcaagaaacattatttctagctatggaaaatgaatggaataacatttattttctccttgttagttggatagttctgtatttaaatgtttcatatttaaaattatctgtgtattgtttatcagaagtgtgcaagtaatttagaccttgatgatgagtaatat

SEQ ID NO: 142359 - DNA, 538 bp, Homo sapiens
tgtgatttgaagtagctcctctctagcactagcactctgattatttctctctaatataacctcacatgcacaaaaatttttgaagctctatttttttaaatggcaaaaattgatttatttccagatatgatctataacactaggttataaaattcattttaagcagagcttattttaagcaaaactgtatcatgttgaattaatttgtaaccatatttgtaaatattccaattttttaaactttaaakttcaggagtacatgtgcagggtgtgcagatttgttacataggtaaacatgtcatgagggtttgttgtacagattattttatcactcaggtattgagactagtatccattagttatttttcttgatcttctttttcctcccacccaccaccctccacttccaggctccagtatgtgtcgttcccctctatgaatacacgtggttctcatcatttagctcccacttataaatgagaacatgcagtatttggttttctgttcttggattagtatgctaaggataatggcctcc

SEQ ID NO: 142360 - DNA, 504 bp, Homo sapiens
cttttttatttatggcaacagatttttacaattatataatgaaaagcaaagagaaaattatatttgaggtcgaaattcctattactattacatttttagaaatgcctcatggttatatatgtgtgtggaaatgagaacaaataggactggaagctttgacttcctgctccctcttcagcacaatactccaaaacagcatttcctcctttctctctcacaattcatcttcttttcccccttctctgatcttgctacatttttatttttattttttgttccacactgattgtagcccaaaggtgataaatttgtgtggactaagtgcaagaggagattggggaaaatttgtttcattgttgtgtcattaaactcagttttcccaccaaagcctgttctaataatttaatggccatgaaaattggttcttttttagagtaaaatatctttcctggctcatttgaaagttgccacattcartgttgcatttttatctgaaattcggaa

SEQ ID NO: 142361 - DNA, 475 bp, Homo sapiens
cttttcgaaaggagctcaaaaatctgtgtttttaacaagcagtatctgtagttccaccacactttacgaaagtgctttataggaaacttgcaaagtatagggaattaggaactgtcaaaagacatacaatgtgatccttgcacctaagtggcttacagcctctttgtgggacaagtcatgtacacaatctaactcagtattagtgacaggttcttacaagtgccacattacaggttgtgagttctagatgaaatcctataattaagcactcactcaggctggaattgccagggaaaccaggaaataatagaggaaagggtaaagaaaatttcaagtggaatgacctgtatatacagaatagagagatgcgtgggcctggcatatttaagaggataactcttggatagatgcttgaataaaytgatataatagattgaacaatatattataaagagaggagtatatattgtattaa

SEQ ID NO: 142362 - DNA, 574 bp, Homo sapiens
ttctcatcagagggacaggtggagatcattgaatcataatcaaggttcattgttgtgaactttaaaatagttaataactatattcaaatattaactattttaaagttcaaagtttgaagaactctaaaatagtattatctattttaaaaaacctattaaagaaggaaaagtaccaggaaycctggaaaaattaatcttgttgccctgcaatcagagccagccaggaaaagaagcagtacacagagtcagaaacagctacatgtgaaaaatcacatagtattaactattttaaagttcataacaatccaatcagtgcaagtctataagtattcacatttcctagataggtaagcttagtgagaagttaaataatctgtccacagtctcacaactagcaagtggtgtccctgtaaaacagaccaggcagtctggctccaaagtcctacactctattgaatgatcttaataagaaatgacaactagttttatggcctgatgcattcaatttcattctagaaatatttatccatgggcaacagaatgtctccccaatacagagataagaaaaatgatg

SEQ ID NO: 142363 - DNA, 604 bp, Homo sapiens
agtatttccttgcaaatacttttattatttcagcaaaagcaccttgctacatactgtagcagcctttcccrgctggcatttctcattggaactagaaacaacaaaaatgatttcagtgaccattttcccagttctcccaagaatggcacatagccactacctgtcaagatgcataggagagaagttaattaatcacatacagtggctgctttaggtattaaggcttcattctctgtattagcaaggatgctggggataactattacagcaaagattcagttacaaatgaattcatactctctatttcagttcctgttccaggaaaacaaacatgatacattaattttaaaaaggcactttgggttataaagatatataaaatatgattcttgtctatgggtgataacatcttgttggagaggcaataaataagaataagataatcagtagtaagaccacagtatacatatttgtactatacactgatataaatggtcactatattgtaatatgaagtaattaaattggtaaatcacattaccttctgccactgtagaaactaaagagatatttttttctaggttgtcctggaaaaaaaaaactt

SEQ ID NO: 142364 - DNA, 618 bp, Homo sapiens
gaagcaaggagaggaatgttaagtgataaatctgcagacaaggacagggatcggaaatttaagaagaarcattgcatgctcttaaaaccaggttgcttttcctttatgtatctgaaagctagacagatttttaagtagagaacacaagaaaatctgtgttttgaaaaaatgagtatctactgtttgtatggaaggagaaagatagcatcaaagattaaaaacagaacatcaagtagaagaccatagcccttggatagattgggcttaacctaagggaatttcagtgacgattagaaggaagggggatcatttaaggcctctttcagagacagagtcaataaggcttcagtgccaaactggggagatcttgaggacaatgtgcactgggaatatgactgtatgaagcctaacctgcaacaaataattaatcacattttcaaaactgtcttttcctaaagtggaaaacagcttcattgtgttacagatgctctttatatttgtaaaataattagaagagaaagagatggccctgtgtatatattaatgcagcaatagaaacctaattttgagcctggcacagtggcttatacctgtaatcccagcagtttgggaggccaa

SEQ ID NO: 142365 - DNA, 661 bp, Homo sapiens
ggtgtgaataacaagtaatggcattctaccattgagagagaagcaacggtataaaaaatatactcactgaggcacaggctcacaggaaaatctagtatygagaaaagttacaaattctctttagtgacccaacacctaacctaagcataagatttcactagaagattggaaacctgtggtgcactgagtgtaacaagcaacagcagtgtaaatcaagattgactgttgactggattgatttaacagcccatctccaataaaaacacacactggggcctgtggggtgggggaagggggaaggaaagcatcgggataaatagctaatgcatatggggcctaatacctaggtgatgggttgataggtgcagcaaacctgcatagcacacgtttacctatgtaaccaacctgcacatcctgcacgtttcctggaacttaaaataaaatataatctaaaaaaaaactagcagcaggagaggcatgcctgtttccacacattaatactatttacctcagtctctgctgtccttacatagtgtctgtctttcattcaaatgttataagacacataaaaaagcaagaaaataacacccactattaggacataaattaatcactgaactagatgcagatataatccatatgctggaatcaaaacacagga

SEQ ID NO: 142366 - DNA, 494 bp, Homo sapiens
ttgaagttatcaaattatgtcatagaattttccagaatttaaaagttttcatgtgctagaatatactagttacacagcacaaggcacaaaaaaatcaaaaaggaaaattgcagttagacacacctttgggaaactgcaaacaacaaaagataaataggtgatgtggttaggctttgtgttcccacccaaatctcatcagaattataatccccataatacccataatccccacktgtcaagggaaaggccaggtggaggtaactgaatcatgggggcggtttccccaatgctcttcttgtgatagtgagtgagatctcacaagatctgagtgttttataagggttttttcccccttggctcagcacttcttcctgccaccttgtgaagaaggtgccttgcttccccttcgccttccaccatgattgtgtttcctgaggcctccccagccatgctgaactgtgagtcaattacacctcttccctttagaaattacc

SEQ ID NO: 142367 - DNA, 494 bp, Homo sapiens
ttgaagttatcaaattatgtcatagaattttccagaatttaaaagttttcatgtgctagaatatactagttacacagcacaaggcacaaaaaaatcaaaaaggaaaattgcagttagacacacctttgggaaactgcaaacaacaaaagataaataggtgatgtggttaggctttgtgttcccacccaaatctcatcagaattataatccccataatacccataatccccacttgtcaagggaaaggccaggtggaggtaactgaatcatgggggcggtttccccmatgctcttcttgtgatagtgagtgagatctcacaagatctgagtgttttataagggttttttcccccttggctcagcacttcttcctgccaccttgtgaagaaggtgccttgcttccccttcgccttccaccatgattgtgtttcctgaggcctccccagccatgctgaactgtgagtcaattacacctcttccctttagaaattacc

SEQ ID NO: 142368 - DNA, 494 bp, Homo sapiens
ttgaagttatcaaattatgtcatagaattttccagaatttaaaagttttcatgtgctagaatatactagttacacagcacaaggcacaaaaaaatcaaaaaggaaaattgcagttagacacacctttgggaaactgcaaacaacaaaagataaataggtgatgtggttaggctttgtgttcccacccaaatctcatcagaattataatccccataatacccataatccccacttgtcaagggaaaggccaggtggaggtaactgaatcatgggggcggtttccccaatgctcttcttgtgatagtgagtgagatctcacaagatctgagtgttttataagggttttttcccccttggctcagcayttcttcctgccaccttgtgaagaaggtgccttgcttccccttcgccttccaccatgattgtgtttcctgaggcctccccagccatgctgaactgtgagtcaattacacctcttccctttagaaattacc

SEQ ID NO: 142369 - DNA, 510 bp, Homo sapiens
ggtataagaaccatgcctgtatgacaggggttctttgtttcagttctcagaaggggaagacaagaaaaaggttttgaatttgccacatgtgattttwaaaaaatgtatggtgggaagttactgtttgtaaaggagagacacactgaaaagtttatggaactttgacattacattagagcactgaacaggaccagtacataataaatcctttggaacttgttaatcaaaagtgcagtctatagaccagcagcatcaacatcacctagtatgtagggttgtagtatctcaagcttcattctataccttctaaatcagatgtgcattttacaagatcctggagcaattcaactgcacattaaagtttaaaaagtgctactctagaatgagttaaaaaaacatatcagaaggctttctagagagctgtttactttcctaaagggacaggtggctgggaggcctacctgtaatttgtgttaaaagctaaaaaaggcttagagcacccagaagcta

SEQ ID NO: 142370 - DNA, 553 bp, Homo sapiens
ccaggaacaatgaaggggttttcctcttctgcctttctgtgctccaaacctgagggagccagcaatcccggttaggaagctgagggagcagaaatcatagtcatggcctgataatgagagaaaaagtcaactatatttycccagctgtagatttcccacctgcaaaaggcccagattagaggagggtagaagcctcaatatctaaccagggccagagtttgaattttcactaaggttagaggtttttaaaattgttgaattttaagaatgtgatcataagtcactctattgcttaaaaatacacagaaaggtcataggacctgtctaaattttttgaaaagtaaggaaaaattaacccagcagaaaaaatttgaaagtactctgagatgcaaaaaatatgattatttttattgtactttacgaatgttgcttatgcaatctaacattaacaaagctaaaagtcaagaattataaactactaagaaatacacagatgaataattacattttatgtctttgtagcattttataattttacatgtattctcttatt

SEQ ID NO: 142371 - DNA, 584 bp, Homo sapiens
atagggccttctaagatcttccaaagacttgcaactatgaactattcaccrtgaatgctatgtgaagccattcacgtgctttcaccagaggggtggttttgcctggctggttttgattctgttttttaagataattctagctgatatgtaagaatagatgccagcaagccatggcaggagtgagaagactggtgtggagactactgtaataatggtccagcaagagctagggtggcagtcgacatgcaaaggcatgttttctacttttttaactttttattctgcaggtggtccttcgctggtctcatactgcatttccttaggtcacattggtgcaatctgtaataaaagatgcctcaatgacaaaattgtttgctacatggagggattcctcactcccatgtctggaaatgaaatcttgcaggtcattaccagttaagataacccttgaccatcctttgtagttcactctgcctttgcaccatcatcctgtcagcagatttctctatcactgaatgctatttattttctttatagcactcattataaattgtaattgtacatttatatatgtatttatgcag

SEQ ID NO: 142372 - DNA, 584 bp, Homo sapiens
atagggccttctaagatcttccaaagacttgcaactatgaactattcaccgtgaatgctatgtgaagccattcacgtgctttcaccagaggggtggttttgcctggctggttttgattctgttttttaagataattctagctgatatgtaagaatagatgccagcaagccatggcaggagtgagaagactggtgtggagactactgtaataatggtccagcaagagctagggtggcagtcgacatgcaraggcatgttttctacttttttaactttttattctgcaggtggtccttcgctggtctcatactgcatttccttaggtcacattggtgcaatctgtaataaaagatgcctcaatgacaaaattgtttgctacatggagggattcctcactcccatgtctggaaatgaaatcttgcaggtcattaccagttaagataacccttgaccatcctttgtagttcactctgcctttgcaccatcatcctgtcagcagatttctctatcactgaatgctatttattttctttatagcactcattataaattgtaattgtacatttatatatgtatttatgcag

SEQ ID NO: 142373 - DNA, 521 bp, Homo sapiens
agccattcacgtgctttcaccagaggggtggttttgcctggctggttttgattctgttttttaagataattctagctgatatgtaagaatagatgccagcaagccatggcaggagtgagaagactggtgtggagactactgtaataatggtccagcaagagctagggtggcagtcgacatgcaaaggcatgttttctacttttttaactttttattctgcaggtggtccttcgctggtctcayactgcatttccttaggtcacattggtgcaatctgtaataaaagatgcctcaatgacaaaattgtttgctacatggagggattcctcactcccatgtctggaaatgaaatcttgcaggtcattaccagttaagataacccttgaccatcctttgtagttcactctgcctttgcaccatcatcctgtcagcagatttctctatcactgaatgctatttattttctttatagcactcattataaattgtaattgtacatttatatatgtatttatgcagtt

SEQ ID NO: 142374 - DNA, 571 bp, Homo sapiens
caaaattattattaaaccatggacttgagccaaatccaaatagagcatttctattcacacaagtgtcagctgggtttctggtgcttggggtccaagacttcagaactcatatgcacttcctggggcattcatgatgctgttggtgatggacaggtggtctcctgcctctgtgtatccatcactgcccttagatggccactatcttgcaggagaaatggagtctaactgcctcaggtgctccatctgyccaaagagaattggcttgctaataactctgagtttcctgggcttcctcacctatatactttttattgcatacattgaaaatgagactctatccttttatataagtttgcatggggctgctaaccatacattgatatgttgtatcagagtaaaaatttgtgtttctaatatttctaacatattcttgtgaaggtttaaagataccttttccattgggcttccaaaatttgtttcctgaattccctctaataattatgttttctatgcttaatttttatgttttccctgtattgtgtgaatagcagtcttgttaaagtgagaagta

SEQ ID NO: 142375 - DNA, 571 bp, Homo sapiens
caaaattattattaaaccatggacttgagccaaatccaaatagagcatttctattcacacaagtgtcagctgggtttctggtgcttggggtccaagacttcagaactcatatgcacttcctggggcattcatgatgctgttggtgatggacaggtggtctcctgcctctgtgtatccatcactgcccttagatggccactatcttgcaggagaaatggagtctaactgcctcaggtgctccatctgtccaaagagaaktggcttgctaataactctgagtttcctgggcttcctcacctatatactttttattgcatacattgaaaatgagactctatccttttatataagtttgcatggggctgctaaccatacattgatatgttgtatcagagtaaaaatttgtgtttctaatatttctaacatattcttgtgaaggtttaaagataccttttccattgggcttccaaaatttgtttcctgaattccctctaataattatgttttctatgcttaatttttatgttttccctgtattgtgtgaatagcagtcttgttaaagtgagaagta

SEQ ID NO: 142376 - DNA, 563 bp, Homo sapiens
tccctatatgaagagatgactcacaggaaatataattctgctcaytcgcaaagaaaataaattggaatgtgattcaaaatgtgtagacattcatattcttcaactgatgtgattttaaaataacaacaggaaattaaatgcagcattgcagtttggggataaatttctgaaagaaactctatttaatagatagagaaatttctccaaatttcagtattattagaattgtggcagacaattcaaattttatgtggcacaaaatcataacgttctcttctataagctgtcccttgtctgtttgttttttaaacagctgtcgacttgttctgtatcatcaattctggtagttcaggattaattttcactattatcagtggcagagcatgatggtacaataagccaaaatgactaaaagcatttcaaggaaaaaaaaaaaacctgaggagaatggaagagaatctctatacgcaagctaatcccttatgaacagcagatttggaaactgcctgcaggtaattacattcaggtaacccgatctgaaaatgccaagttcacacaatggt

SEQ ID NO: 142377 - DNA, 403 bp, Homo sapiens
ggttcatttaattccatctggtgtgcaataatacattctttaatggacacattgatttaaaagaaaaaaatcacctcagatataaaaagcccacattcggtaattaaaaaatattacatcaaaaattagaatctcaaaaatgatcctgcaatgcttaacctataaaaaaggaaattaaggtaatgagctttagacttctcatacctaaatcccttcttagttatggtctggtttcttagtaaggaatgcatatgttaatatgaagaattgagtcaggacttctgataccttgggaggaaaaaataaattgattaagaacatatttamatcattaaatgtactcagaaatagtttgaaaggaaacattggctcttggaatggtgccacctgtcatcaggataga

SEQ ID NO: 142378 - DNA, 583 bp, Homo sapiens
atgcaagtagttactagtgggtatgtcaatgggttatttcacttatcaaaatgcattactttaaggacctcctggtgtcagtgcctgaacctaaagtaggaactctgttaataggaaattaagttactataataaatcaattctttttaacacttagtataggagagtatgtaactagtgcatttcagggtaatgagataaaaagatagttcatagttttcattaattcattcattccataaatatttattaartgcctacaatgtgtcaggcagagttttcaccacttgggattcaacagtgaacaaagaagacaaagattcctacgaagagagattacatggtggaggtggtgtctcatgcaggaaatgagacaaacaataataaacataataaacatggaaattttattttatgttagattgttgataagtgctacaaaaaatattaactcagattaaagaagaattaggagggggacactcctagaaacagaatagaatggtggttgccaggggacagtgggtagggaaatggggagatgctggtcgaagcatataaactttccattataaaatgtgtt

SEQ ID NO: 142379 - DNA, 421 bp, Homo sapiens
atgacttacagaagctatccacgggtagcttcagaccattgttctaccacgtttgggctcagtccacatcaarctttgaccacccctggcatccttgtggcctcccttgactggccatcctgaggtctctgaggccctctgctgagagcagccgcactccctgcccccatgctgggctgctccagcatccacagtgaggaccctccaatgatctggcttcttagacattcaacctaagcttccccaagtctggacctctccccctgtctccaccttggctgcctctgctcatcatcctcctaatttctcagacatgccaccttcaaaattgagaaagctggcattcccttttgttgcctggcttctgttgctccaaccctttctcctccccgatctcttgggaacctggcttttgcgctca

SEQ ID NO: 142380 - DNA, 611 bp, Homo sapiens
tctttctaatccggtgccttaggctagatttctcttgcactattttcagtaaaaagaaaattacaattcattgttttcttataagccagagtcagttattgttccttatctctttttcctttatttttgtagtgtcaattctactttcaatcaaatgtgtcttctactattgcttttatgttaagagatgtaacattcttacayagactctgtgtgtttcataagttttgtgttttacacgtgtatttacattcttcaaattttcttcaaaatctaaaatgttacttctttttatttctctttttcctacagaactttgctcatacctttattataaataaacttaggttctgtttatatatctacttcctcacccctctcaaagaggaaggatgagaatttcttatcagtgccttggttcaaagtgcttcttagagcttggcacagagaagaactcaacaactatttgattcactagatgaatgactataagcataaatgtagtgcttacaggtaggcagtatgaaattgctagacagaacctgccagcttctatatctgacccgaatgtagctctataccaaataattagtctacaggtagactcagac

SEQ ID NO: 142381 - DNA, 372 bp, Homo sapiens
gaattctctcagcatttgtttgtctgaaaaaggctgtatctttccttcatacatgatgcttagttttgctggttacaaaattcttgacttataattgtkttgttgaggaggctaaagatagggccccaatcctttctagcttgtagggtttctgctgagaaatctgctgttaatctgataggttttcccgtattggttacttggtgctctgtctcacagcacttaagattctttccttcgtcttaactttggacaacctggtgacaatgtgcctaggtgaagatctttttgcaattaatttcccaggtgttttttatgcttcttgtattgggatgtcaaggtctctggcaaggccattgaagttttcctcaa

SEQ ID NO: 142382 - DNA, 439 bp, Homo sapiens
tgcatctgacaaaggactattatccagaatctaaaaggaactcaaaatataaccaagaaaaaacataataatctcatgaaaaagtaggcagtgtttatttgtgtcctttgcccactttttaatgggatttcctttgcagggacatggatgaagctggaagccgttatcctcagcaaactaatgcaagaacggaaaatcaaacaccacatgttctcacttataagtaggagctgaacaatgagaacacatggacacgaggacrggaacaacacacctggggcctgccaagggatgaggtcaggagaggaagagtattaggaaaaatagctaatgcatgctgggcttaattacctaggtaatgggttgatgggtgcagcaaaccattatggcacacatttacctatgtaacaaacccacacatcctgcacacgtaccccag

SEQ ID NO: 142383 - DNA, 525 bp, Homo sapiens
tggccttgacaattatggatcatttcaaatcaatgcatggtaggttatttttttcttcttgtttttcttcaaatggagatttttctagagtggttcaaaaactcatataatcatagaaaataaaatattcttaaagaagtaaaatgcrgggggccagcatggtggctcacacctgtaatctcagcactctgggaggctgaggagggtggatcacctgaggtcaggagctcaagaccgtcctggccaaaccctgtctctactaaaaatacaaaaattagtctggtgtggtggcagccacctgtaatcccagctacttgggaggctgaggcagaagaatcacttgaaaccaggaggcggaggttgcagtgagccaagaccgtgccactgcactccagcctggatgacagaatgagtccctgtctcaaaaaaaaaaaaaaaagacgtaaatgtgggagagatcatgatcagcaattcaagtatgtattagtgtcatacctcttattggaaatctgagcacctaagggt

SEQ ID NO: 142384 - DNA, 540 bp, Homo sapiens
attatgtttgctaatatcccattagccaaagcaagtcacaaggtcaaatgcagatttaagaggtgaagatgaatactccatcactagataaaatatgctgtcaaacgctatggccatttaaaaaatttacaacatcatctctgttttccaacatagtaaacaaatttaacaaccttgtacctctttctatgtaagcatctttctattcttaggggagaatcccatgtctctattatgagacaactattatgagacaattcacatacaattctcagagcatggaatatggcgggcagcaggggccatgactttgagctggatcagaagagggtgctttgttatttactctgcaaattccctttcctgctttttactctgggaaatttgtattatgartaaaactctattttgctttatttatttcacttctgttgcatcagtaaaatccacacctgtttgttctggcattgagagcagctgtctggtctgcagtaatatttcccacctgggtggctgagctgtctctcagtggcagacacc

SEQ ID NO: 142385 - DNA, 658 bp, Homo sapiens
tcttcactctcttgcaggctagggaatatctctatctgaatatgagtacaaattaaaagtaccttgctttgcacttgttttttcattgaagaaattgagtttttcaattatattttaaaatacacatacatattggatattgattgatcttttccatctgcattctttctggttgagcaattcctcacacatgtccttaaaaatctttttagatgatgatgatgatgatgatgttgatgataatgcaatagcatgtctgtttcatctgtctagtatgacatcatctcattgaaaatctgcaggagcatactagtattatttgaaccctaatcatgaggagatcacatatgtctcagtatagtgtagcactgtttgtgctataggtgagaagcaaggcctctgttaataaatgttatcttgatgctgtttatccaattagttttgtttcatgtggaactrgaaactatagtgaggtttaactaaatattctttagagaggagaaaatttggtgacaataattatagtagaggtcatttgccaagaagttgaagatgctgttgtatacctgatattagagacatttccttctagaaaatgtatcacagtagatatagtttaaaacatcagtctctatttacagctttagaatattcctct

SEQ ID NO: 142386 - DNA, 554 bp, Homo sapiens
tattgtggagaggtggagaaaaaacacatacttttaaaagaactaagtctagcacatagtagacctgcaataaatcttggttctcttttactagcatacctcaccggcatcttagtattgatggctttttaaatttatttttcttactctgaagtacaaattatataagagttactgaaggaagggatggggagacagtcacaaaatcaggaaattctattttgcttcaagtcaccctgatgattcagagttactttaccaaaaagaatttagactggacaatcatgggtacagcttgggctctttctcactttggctggaatttcacaggatttttaagtagagaaatagtttcatgctggtatacaaaattgagcytggaattaatcagcaaaatgaagatatgaaaaggacaattttcttcattgcatagtctataggaaatttgaatatttagtccaactacgggtttgtcagtacaaatggattgtcttaattatatcctcattttctcaatggttgtatagtataactgaattttatagcaaacttac

SEQ ID NO: 142387 - DNA, 554 bp, Homo sapiens
tattgtggagaggtggagaaaaaacacatacttttaaaagaactaagtctagcacatagtagacctgcaataaatcttggttctcttttactagcatacctcaccggcatcttagtattgatggctttttaaatttatttttcttactctgaagtacaaattatataagagttactgaaggaagggatggggagacagtcacaaaatcaggaaattctattttgcttcaagtcaccctgatgattcagagttactttaccaaaaagaatttagactggacaatcatgggtacagcttgggctctttctcactttggctggaatttcacaggatttttaagtagagaaatagtttcatgctggtatacaaaattgagcttggaattaatcagcaaaatgaagatatgaaaaggacaattttcttcattgcatagtctataggaaatttgaatatttagtccaactaygggtttgtcagtacaaatggattgtcttaattatatcctcattttctcaatggttgtatagtataactgaattttatagcaaacttac

SEQ ID NO: 142388 - DNA, 585 bp, Homo sapiens
tgggacatttctggctattaatttttcaaacattttggtaccccctctttcaaagattccaattaaatgtacattagacaattgtctatcaccctagtgatgcattttatttttaaaatttccttattctctgtgtgtttcattttgggtaatttctactgtcatcttcaaatttactaatgagtaaatcttattctgcaatgtctaatatgttgttaatccaattatttatctcatatattaattttttcatttccagaagcttcgtkgggtgttttttttataccattcatttttctacttattttgcaaacacatgaaatataatgactatttattgttcttaaaagctaattctaatatctgactaagatttggaatggtttcaattgatttttcttccacatggtgatttgtgctttcttgcaatctagtaatctttgattggatttatgagttttaccccttgaacaccagatattatgttcctacaaataattttgatctttcttgggggatgcaattaagcttcttagaaactgtttgatcctttcaggtcaggtttttaagatttgttaggcaaga

SEQ ID NO: 142389 - DNA, 546 bp, Homo sapiens
tttatgggcccatgtgtccaaataatacggttttcttaaaaaattaatctgctgtttaatggaaaattgtaaagggttctaaaaagtttatggaaatcttaccttctggtcaaattaattaaaactgaatagatttataaaattgtatttgaaaactacctttagcattagagatgcactaatgtggctgggcacagtggctcatgcctgtmatcccagcactttgggaggctgaggcgggtggatcacctgaggtcagaagtttgagaccagctggccaacatagggaaacgctctctctactaaaaatacaaaaaattagccagatgtggtggcgcacacctgtaatcccagctacttgggaggctgaggcaggagaattgcttgaacctaggaggcagaggttgcagtgagcgagatggtgccactgcactccagcctggacaacagaacaagactctgtctcagcaaaacaaaaaaaaagcaaacaaaaaaaaaatcaaagttgacttacaaagccaataaaagccccttgggaaaactgac

SEQ ID NO: 142390 - DNA, 603 bp, Homo sapiens
gcaatatgctaaatgctttaatctcattatcttattttatgttcacaaacccctgtaagctaggtattrtcatttgcattttaccaatgaggagaaactggggcttcaggtgataaaggaacatgtttagggtcatgtagccaataaaggacagaacctagatgcagcacagatacctataatgccgttgctttcaaacactagataatggttcccttgcgcagctcttaaacccacagaacggtacacaccccacagcatccctctcaaaccttgggacctccagtccttacactgcttactttagtgcaggcatacctatgtgtccggcttttaaaactcataaccctgggctcatgggggccaggtccctttctttttaagcttcttttcttgctgtttcaacccttctgttgtgggatgttgctaaagaaaaaaagtgttcatgacacttgttaaagatggcaaggaagactattcaaggtcagggactaggatgggaagtatagggaccactgcaatggggtcttacagtgggggagacagactggtctcaactctgactccagcaagcgtaagtggagatttatagccaaggagcaa

SEQ ID NO: 142391 - DNA, 560 bp, Homo sapiens
aatttgattagattaccaaggatgagagattttcactaaactgaccaagcaagagtctgctaaaactggactaactggccagagtcactagggcaagatsagagccaaagaccagggcctagtaagaaagagaactcagagaaacctgactcaagtcttgtcaagggagagaatgacagagtccagaagggcggagctcagggctcaaagcaatgcacttctgatcctcagtggtggtgccattcaatgacttcggcttcaggtcctgtgttttactccttttgccttgcaccttcgattatacactctttcgtggacatacaaggactttgaaattgttcaaagtctggtaaaaaatttccataaagtacttccatagcttttagcagattctctaaggggtccctatgagatttaaaaaaaaaaatctagactcctcataagtgtctctcagagctgtgacctacacactcatggtgacttgttaaaaatgcaaattcctaggccccagtctggaactggctcagggattggcaattcctaaaacgcccagaaacctg

SEQ ID NO: 142392 - DNA, 662 bp, Homo sapiens
cccccacctccagtggtctctcccctgtgtcaatgactcagtttttgcctagagttcccacagctctagggaaragaggtgaggctggagtaaggcaaagccagaggggagcctgaccctgggggcgggggttggtggggcagaggggggcgtcctgcagttgcagttgatgagtgagttcttggtcctgacaggacagatgaggccctttgttcctgcaaatgggcctttcctggcagtgatggagatcgcctgcagtccagcccgctcctcctcttcagctgcagccattatcctaaagtggttttattgatctgctgactccctgtctcctgcctgctctccctttcctcctcccttccccaccccctgcaccccatcctcaagctcctaaatgctctgttgctggcctcatccatgcaaggctgttttttcaggggtgaaggatgattttgaagttagattagacaactgcacttgcctcatgagaaagcagatattcccttagggcaagcattttcagactagcaaaggatatacctccatttaccaaccacaccttttctggatgtagttctttggttgttttgactttttgtaagatgtaggaaatatagatgctatgaaagttcagtttcaaagtttgcaccttggcaaactat

SEQ ID NO: 142393 - DNA, 546 bp, Homo sapiens
ttgtgatttctatgcctatagcagacattactaatcaaaagcagttttctttctgataaagccaaaatacagtcccaggccacccataaatgagggcaatgttctgatmagagttaaaacctaaaatgcttgaattctatgctcacgcaggtcctttccagcccagacaccccagatcctgaattagtggtcagcctcctgcagttttatgccaggagcttcccatatattaaactaatctttcaaaaaactccctcaattcatttcaaagaggaaagtcatggatacatttcagaaagaaggttatttatgcaagacaaaaatattattatgaaaaaactgaattgttttttctaaagcaaacttcagccaatgctgcacttgttttggatctattcaattttggtctccttttcctttctgtcttgagcagctctcacattctctttctccctggactttcatgaatttattcctaataaaaatttataattgtggcactacctacgttcttgtcactttgggggcttgttggccatatacctt

SEQ ID NO: 142394 - DNA, 489 bp, Homo sapiens
aaacattttactttgttgattcatgtattataaaggctattacaaaggatgcaggtgaacagccaggtggaaaaggtgtatagggtgaagcctgggagaagggatgtggagcttccatgccctccctaggcatgccactctccagggacttccacatgctcagcaatttgggagctctctgaaccctgtcttttggggttcctatggaagcttcactatgtaggcgtgattaattacatcactgaccattgatgatcaactcaaattttagcccctctatcctttccagaggtcaggagtgagcctgaaagtttcaatgctctaatcacatgattggttcccctggmaaccaaccccatcctgagctatccaggaacccaagaaaagtcaccccattagaacaaaagatgcttctgtcacccaaggaacttaggagctctgtatcagatgttcctacaactcaggaaattacaaaggccttaggagctc

SEQ ID NO: 142395 - DNA, 576 bp, Homo sapiens
ggggtctgttttcaaaaacaagccaccatgagcagttcctgacttgtagtgcttcccagggactcagtctatgtcttaaacacttctttcttcttcccatgtctccttcagtcttcaggcagacttgccaagttttctctttcttgggccagtgtgctttttccccagctcattctctgactttctacccaaagagtcacttaaaaaaattttttttcttaagggacctagggttgtatcctcttgaatagtgctattggtagtaaccaaagatgcagcactgaataagccactcccttctagacagaactactcatcctcaatctcaagtaccacatcttccaacaggccttccctgaccccctctgtctaaattaggtcaatctctcaccaccacaattctattctctctcatggagctcatgttctygtccttcataaaaaagaatcatcaccagttgtaattatattcttatttgtgtatttatttatgaaatagccctcttctccactagagtttgtgaatgcaaagtcatgattattttgtacaccactgaatattcaacaacttgcaaa

SEQ ID NO: 142396 - DNA, 558 bp, Homo sapiens
gtctttgaatgagattaagtataaatgtcaatatcctgattttgatggtcgtaatttggtcatatacaagatcatttttttgtgtgtgaaaaatattcactgtaggattcaaggataattggggcatcatgtctgtaacttaatctccaattgttcagaggcaacaataatatgcatacatttatattcagaaggaaatttataaggcaaataatgtaaaatgtccacaattggggaatctgaattaagagcatataagagttttttctactggtcttacaacttttctgtaagcttgacattattttataatagaaattgttggaaaataagtattcataacatcagtcatagagaagatatttcagccaggtatggaaaaccgaacttgtgttgaaaggaaatgcagctataatttaaatcaacasttaaataaggcattgaaccctttattaaaactgtcttagtaaccatgataagttgccatgaaattttcacaccattgtttgaatttgttttaaataacttcttatagaaaatgaagtagacaaatagatc

SEQ ID NO: 142397 - DNA, 528 bp, Homo sapiens
ctgtattctttcattgggacttagcaagtaaactgaatcaagctctcattctaaatactattcaccactttgagagtctagcctcagtgtaaatgaggctaatgggataagatctaagtatttttgctcttttttctacaaaatctataaacaccccaaaactaagcctggattttgggtatgcagaccggcatgytaaatgagtatttgtttactataaaattttcattttctccttcttcacaattttcctcctatcaagatttctttgtcttataggttctatttataaatagtgttatgacattcatatactctcatatattttaatctcttagaatgatttccatattagtatccagactgtatactgtagggatacatttacagtgtttgaaacatattgcattttgttacagtcattcaaaatactgccttaagcatcattgcctccatcagcgcctctgcctatgccaaatatctggaaagatctattaacagatgcctgtttactctaaagtgatatta

SEQ ID NO: 142398 - DNA, 615 bp, Homo sapiens
ataaatcaaaagtagtgtagttttattgaatctaatagtcttaaatatagtttatttcagcatctggttagggtcacactaatttgatattaataagaatgtaacttttttctttttaagcatctctgctacacaccatttatcagtagctgtttgacacagcgtagtcccctttctttcccttctcactactggcagagcctatcacccaggrtagaggctagaaattccacacactcccatttctagtctcttattcgggtagagcctggcctaaatacccacacctggggaaattgtgctgagtacatctaaggacattttgcttcctgtcaaaaggagagagaaatgtgaagaaaatgttttccctttttttggttttggacaatgtcatgagaggacaagattcctggagcttctgcagccatcttgcccctgtaagagaaagatggggagaatctcagagaacatgggccactgagctaaccagaaatattattgttcaagtgacttttacttgggtattcttgtaccagaaaacaactgaaagccaggttaccttttaagaaattcaaccctgcatctatcctaaattatttggtctacaataacact

SEQ ID NO: 142399 - DNA, 615 bp, Homo sapiens
ataaatcaaaagtagtgtagttttattgaatctaatagtcttaaatatagtttatttcagcatctggttagggtcacactaatttgatattaataagaatgtaacttttttctttttaagcatctctgctacacaccatttatcagtagctgtttgacacagcgtagtcccctttctttcccttctcactactggcagagcctatcacccaggatagaggctagaaattccacacactcccatttctagtctcttattcgggtagagcctggcctaaatacccacacctggggaaaytgtgctgagtacatctaaggacattttgcttcctgtcaaaaggagagagaaatgtgaagaaaatgttttccctttttttggttttggacaatgtcatgagaggacaagattcctggagcttctgcagccatcttgcccctgtaagagaaagatggggagaatctcagagaacatgggccactgagctaaccagaaatattattgttcaagtgacttttacttgggtattcttgtaccagaaaacaactgaaagccaggttaccttttaagaaattcaaccctgcatctatcctaaattatttggtctacaataacact

SEQ ID NO: 142400 - DNA, 489 bp, Homo sapiens
tattttacagtgttccatatatatgcacgcatatatctatgtctacttttatttactttttattttattttatttattttattttygtgacagggtctcacgctgtcacacaggctggtgttagaatatattattctaataataatcatatattattggaagtcaggaatgtagaatctctttctatttaaaaattcaggagattttaaaccactatggcacatgtttacctatgtgacaaacctgcacatcctgcacgtgtactccaaaacttaaaataaaattaaaatttaaaaaaaaactaggagcttttaagaaatccttgctcggaatcaaggctttttaatttctataggaacgctactttcatctttacttttgagtgaggtcaacgttgatctcaaaaataaatctttgaattacttttgagtgagggcaaccttgatcacaaaaatagatccttgaatttgttaaggattctgagtcaga

SEQ ID NO: 142401 - DNA, 603 bp, Homo sapiens
acatgtgctttgggaatttctaattgtttgtaccaccatcacttccaaattaatatatctaagtcaagatcatcatccttctcccggaccacctttccctttggacatcattatgtgcgccaaatttaccatcaagttctgaacacctaaactcaaaacatgagtcactttttgacttactgtatacagctagtaaatcactgatttttattagctctttacagttccattgtcttgttattgtctttcttacaactatcatttatcctaggaatttttcttttcttttttttttttttaaagagtttacttttgcctccaggttttctcytcttcaactaatcctgcaaactgcatccctgaaattgttcatggaattcagctgtacaagttgatgaaaactgtatttgcttccaattcactaaatagggcaaggaatcattgttcagatgtgttttagtatacaacacagaaaaagaaaattaaaaatgatagtaagaataaatatgaaggcctccatgtggatgagaaaaatatcattacaaatgtacaggtgaggaaaagctagctgaacagcaattcatgttttgctttgttttattt

SEQ ID NO: 142402 - DNA, 476 bp, Homo sapiens
ttaaggagaatcagaaaatataggaaatgtctctagtaactataaagaactcggcaaaagaaggacatgagtggtacagatagtctcttttgatcagagagattgggacttgaatttgaayacacattatatggtatatatcaaatatttaacacagaatacagagagaaatgtattatgtagaatagatacagaaaaataacataataaattagctagctcattatcaacagctatacgggccacttcctagatgtcttgtaactccaatgtcatgttttcctcatattttctgcaactgctagtctcctttaaaatgaagacaattatttaattactcaatgctgttcagcattttccatactacttgttacactatttatggcataatatttttggtacaattatactcaccagcatccccttttacttccttttgatttaagagtacttcactaagcaaaattgtgggtgca

SEQ ID NO: 142403 - DNA, 476 bp, Homo sapiens
ttaaggagaatcagaaaatataggaaatgtctctagtaactataaagaactcggcaaaagaaggacatgagtggtacagatagtctcttttgatcagagagattgggacttgaatttgaatacacattatatggtatatatcaaatatttaacacagaatacagagagaaatgtattatgtagaatagatacagaaaaataacataataaattagctagctcattatcaacagctatacgggccacttcctagatgtcttgtaacyccaatgtcatgttttcctcatattttctgcaactgctagtctcctttaaaatgaagacaattatttaattactcaatgctgttcagcattttccatactacttgttacactatttatggcataatatttttggtacaattatactcaccagcatccccttttacttccttttgatttaagagtacttcactaagcaaaattgtgggtgca

SEQ ID NO: 142404 - DNA, 555 bp, Homo sapiens
atctagtttccaaaaaaaaaaaaaaagagagagagaaacactttgctgttttacaggtgtttgttatgtttctatgtccaaaacataataaactcctgtaaaaaggcaaagtgtttctcaaagggtattttcggttgaaaaaaaaaatcaatgttgaacataattaaaaaagaatatattctctctccactgaaaaaaaatagggatcactcaaataaattgctcttaacaacatgaacctgccaaaactcaattctttcctgtgctattatttatttgatagattttactacatcatagcccaacctcataaaacaaggatgaataagttatttaccaaaacatatccatgattaagttttatttacttgcaaaaggccataggacatgcatttctaaacattaacaaatgagccatgtctatgattctctcccctactatcagttaatctatacattttccctccctgctcactctcctcccaaacaacatatatttttttctkttttgaaaaattcagcatatcattgtttcttttcttaactggttaaggg

SEQ ID NO: 142405 - DNA, 591 bp, Homo sapiens
caactgctctccttttctaaatgtgtttgtcttctagtgctgcttttataatacaaaagatgacaacacaatcggtatgtatagattctataaagctgctttggatctatcagaaagagatatttttataagatgaactatagtgctttaattgttaaccttttaagaaacctcaaaaaacacaaactaaaatataagttwcctgcacttttaaatcaggagataaattgtcataatcttctatctgctttaagtgtaaaagtatttaaggaaatactcaaagtcaacagcaatatatgacttaaacagtatttctaataactactattatatatatatggatatctgtgtgtgttgcatgtggaaatatatattatttccaccatttctctaatggatgtctgcactgtgtaagtactccagagagtaaatgtaaggaagtcaatgacccacaagttgaggcaaaactctctctatgcagttcttatacagtctcccttaaaaagatgttcccactaagagaataatattctaaatctcattttaaatgacactattcaaatatagacaggcccaggctttaaaaacctt

SEQ ID NO: 142406 - DNA, 591 bp, Homo sapiens
caactgctctccttttctaaatgtgtttgtcttctagtgctgcttttataatacaaaagatgacaacacaatcggtatgtatagattctataaagctgctttggatctatcagaaagagatatttttataagatgaactatagtgctttaattgttaaccttttaagaaacctcaaaaaacacaaactaaaatataagtttcctgcacttttaaatcaggagataaattgtcataatcttctatctgctttaagtgtaaaagtatttaaggaaatactcaaagtcaacagcaatatatgacttaaacagtatttctaataactactattatatatatatggatatctgtgtgtgttgcatgtggaaatatatattatttccaccatttctctaatggatgtctgcactgtgtaagtactccagagagtaaatgtaaggaagycaatgacccacaagttgaggcaaaactctctctatgcagttcttatacagtctcccttaaaaagatgttcccactaagagaataatattctaaatctcattttaaatgacactattcaaatatagacaggcccaggctttaaaaacctt

SEQ ID NO: 142407 - DNA, 405 bp, Homo sapiens
ctcctgctccatgccgaaactctatgaaagatcacagtattttctgaacttytgaatgaaataactgaataaataaaagacaagttatacttggataagtgatgatatattagtatttggaataggaaaagatgagatcaagaggttttttggaagacaggtaaaagtacatggtagaaggatgcagaaatactggctgtacagggcttggaggtaaactaggaataaatcaaaatgcacagcaaaatggcaatcatgtcaaaataaatcatggtacaaatatttaattttagaaaatgttaatttaaaagtagctttcttattagacatgtgttttgtcatagtattatagaaagttatatcaacattaaaataaactatattcgctttggatatgaaaaaaat

SEQ ID NO: 142408 - DNA, 551 bp, Homo sapiens
cctgggactagaaggcagcaattctaaaagaaatggattaatctttgtccattcttgttatgcctttgttgagattttcaaagtaatccaaatacttgaacaagcattttcagtatagcattgcattatatctttaaagctggacagagaaattttgaagattatcaagaaatactcttatgtggggaaatcatagggacaataagaggcaggggcaatgtgtacagaatggaaataaattaaaatcaacatctgttggaaatcaggtatggcaagttgtgtcctatagcatastctttgaccaagttgtgtgtcagtgaaataaattcaatctattgggatataacaggatctaaggcaaccctgaagtgatattcataacaaagcactctttccttagatcaagactactgatactttctctgattatttttattccaggccaatgtcagcatatatatatatatatatatatatatatatttttttttttggtggaggggagaagacaaagaaaagggaggctaggattctcaactctactaatagta

SEQ ID NO: 142409 - DNA, 596 bp, Homo sapiens
cttctttcacatttttagagtattagacagctggaaatattctaacatcacattcccatgaatactgatattatttttattgtaatataaaaggaaatatatagttaaaggcatatcaaaattcaaacacttacgaatgtaagtttttcacttggagagtctcagggcatctctattgagttcattgcatactttctgcaaatcacttgtgctgacatggtgtcatggataaaatctaaatttgtatatgagatttacaacagctgctttctgagtactcaaagtctccttagggtctgtcttttggtcctgtgttcatggaatcgccgggctacacagcactgcacaggaagtagagatataaacttgttaagaaaataatgggtttctgtgatcatctcaarcacaatttccaaacttcattctccttgtatagagttttacatatggtcatttcatagtgtgcgtatactgagaaagataaccaatgtacataatttgctgaagcagacatctgacagaggtaaatcaatgaggtcatttttatattgaaaactgtgaacaagtccatggaaacaaaatataatgcaaacaga

SEQ ID NO: 142410 - DNA, 596 bp, Homo sapiens
cttctttcacatttttagagtattagacagctggaaatattctaacatcacattcccatgaatactgatattatttttattgtaatataaaaggaaatatatagttaaaggcatatcaaaattcaaacacttacgaatgtaagtttttcacttggagagtctcagggcatctctattgagttcattgcatactttctgcaaatcacttgtgctgacatggtgtcatggataaaatctaaatttgtatatgagatttacaacagctgctttctgagtactcaaagtctccttagggtctgtcttttggtcctgtgttcatggaatcgccgggctacacagcactgcacaggaagtagagatataaacttgttaagaaaataatgggtttctgtgatcatctcaaacacaatttccaaacttcattctccttgtatagagttttacatayggtcatttcatagtgtgcgtatactgagaaagataaccaatgtacataatttgctgaagcagacatctgacagaggtaaatcaatgaggtcatttttatattgaaaactgtgaacaagtccatggaaacaaaatataatgcaaacaga

SEQ ID NO: 142411 - DNA, 438 bp, Homo sapiens
ctcaatcctcaatactggagagtggtttaattcaaatttctgttggatttaataatgtctatttatatttgatttaccttcaggtgtccaataaacagacttaatagtttggattgcagaatctcagaaaaatgatacaattattatctaacagtgcttttggagaactcacaaaacttgttatggatacaaacagtgtttatattctcataatcaaataacaatgcgaagaatatatgcatcytaaggtggtgatgcaaattcatataaggagttagcaagcaagggccatgtggtctgaaatatgtgtcctgggaatacaggtaaaaagacaggatgttgggatagctttcaaaaacttaaagacacttaagtctatgtgctgaaatatagtagatctttgtgttttagtagaaaaggaaaacaagaaaagaattc

SEQ ID NO: 142412 - DNA, 438 bp, Homo sapiens
ctcaatcctcaatactggagagtggtttaattcaaatttctgttggatttaataatgtctatttatatttgatttaccttcaggtgtccaataaacagacttaatagtttggattgcagaatctcagaaaaatgatacaattattatctaacagtgcttttggagaactcacaaaacttgttatggatacaaacagtgtttatattctcataatcaaataacaatgcgaagaatatatgcatcttaaggtggtgatgcaaattcatataaggagttagcaagcaagggccatgtggtctgaaatatgtgtcctgggaatacaggtaaaaagacaggatgttgggatagctttcaaaaacttaaagacacttaagtctatgtgctgaaatatagtagatctttgtgwtttagtagaaaaggaaaacaagaaaagaattc

SEQ ID NO: 142413 - DNA, 601 bp, Homo sapiens
ttttggcttaaagaattaatatgattaaaacatactgacttactgctaaatcattagtttcactattacatagaaaatttatgaaacaaaaaaatagaagaatttgtttgcaacttataaataacaataaattaatttacattaaaccagtttcagtcaaaaatcaagtcattggccgggcacagtggcttacacctgtaatcccagcactttgataggccgaggcgggcaaatcagctgaggtcaggagtccgagaccagcctggacaacatggtgaaaccccatctctagtaaaaacacaaaattagccaggagtggtggtgcatgcctgtaatcccagctactaaggagactgaggcaggagaatcgcatgaacctgggaggtggaggttgcggtgagttcaaattgctccattacactccagcttgggcaacaagagtgaaactccrttaaaaaaaaaaaaaaaaagtcattataagtcattattaagtcacttgtgaactttcttttatcctttcaaaatacatttcccaaaactcattttgaattccagttacatgataattatctatcgagctctatctttgtgaacagcaggt

SEQ ID NO: 142414 - DNA, 522 bp, Homo sapiens
gtaatttcctgggttcttacgtgtggggagggaggagggcttcatgctatagggcacaagggatcttaacttctggagttgctttgggcttgttgccactctttctgggaagctggcatggaaagtcccccttgagcatgtggcaggccaggagggcttctcttaaggaaagcagcaggggtggcagaaacagcagtggacttggagtccgaagttctgtgtctgggctccacagtcacatgaatagccagctgaataactggggcaagacccttttatctgttgggacctgaatttctcaatttgcaaaaatactgggattgtactaggtctccagtccctttccagttctataggcctattaattattcatgactctagatgttargcttttttgcttagtgacaccagaagcacaagctggttacagcagtgcccctcctttttactggacacagagaattctagaagccttggagggggaaagctgaatctttttagaatcataggcttttgaagctt

SEQ ID NO: 142415 - DNA, 526 bp, Homo sapiens
cacttattcaaaagaagagactattggcaggcagcactcaaaacctgcatacaccgttttaaagatcccacctagattatcaaacctagcctttccatgtgatgcagttggcagcaagaagaatttgttgtgacaaggaggcttctcacaggtaaatacctgaggtttctacctttgcataatagaatcaggcccatccaggttactgccccaatatctaaaaggaaccctgtcactttcacagtttaaaaatatctatttgtgctttcagcccttaaaccaaaggttgtagcttccatcatctcaattaagrttctgtacctcacagtcagtcaatgtttacaaggctcgtggtttcccttccctgaagcttctatcagagagaaattggcatgttttccccagaccaaagagagaagctagcttttacctctaaggctatcctgtgacccctatcatagctatttaggaacttctgacaggttcagtgatctttctccatgttctcattttgtataatgtgtga

SEQ ID NO: 142416 - DNA, 525 bp, Homo sapiens
ccatgcatgctggtggaaagttcctcctgacctctaacataactctgtcctctttacaattggttaaataatttcccctgagtctgacctcttttccctgggtaagatgttctttttgccagctttagaaaggccagtagaattaaaagcgctctgctgggggcccctctcctgctcctgctcagcaccccgcaagggcaagctgtgaggagatggggaggaaccttggctcctgcccactgcccctccgggaagaagccatgccagtgaggtcatccctggtgagaggtgaaggctgggccctagggggataggcaccagctgagggttgsggtggggaggctgggccggagatgagctcacccacagtaaggaggtgaggagaccctcctcctcctctcccctccacaagtgagactacgccagcaggatgcagtaaacctttctcagaagtattgatcacagacgaacaagtggcagctacggatgggctgtctgagccccatccgggaggtaacagccaga

SEQ ID NO: 142417 - DNA, 607 bp, Homo sapiens
tatcttaaatgagaattctacactgcctttaccaaaggaccgaatcgctaatgaatttttaggcactatctcctgacttgtggtgttggtgtctggagagattacaaggctgggagatcctaatcgtttctcttaattcacaccatatacatgtttcctgtcctttggcagaaggcagaaccaaggaagctgaacacttccggcttcaattcccttgcagagctggagaytgaatggaggaggctggctggaggctctgtgggctgggaaaggggtcctggtcctgttttgccaaaggaaggaagcaagcacagtttccttctttagttgggaggggtaacagggaagtcaggctaggggctcagaagtataaccaaagcaaccaactcttccttgacacgcagcattgtgctcttcctctgtggggtgactatcacagcctcttggttgttccctaatacacattttcctgttcttccctagtaagaatccccaattgcacatggtgaatatagttaataatagagtattgtacatttcaaaattgctaagagagcgcacttcaaatgttctcactacaaaagtgttaagtatttgaggtgatgga

SEQ ID NO: 142418 - DNA, 538 bp, Homo sapiens
tcctgcctgaggggtgaggcctgggcaaacctcgaggagagagccaggtgctccagcagctcccagggtgagtggggggccggttctgtccacagggagccccagtctgaggggagacacagccctgcctcagggagccccactctgagggagacacagccccgtcctcagggagccccagtctgaatgggaakaaataatccctactttctaggtacttctagtctgagagaagagtcaaagtcactgccttcctggaaccgaacccagaacatgtattacacacatgttaactattccccaaggtcacagtgtgacttaacagaatgacagcaaatgaaggtctgaaatttccttagctgccttgagttagaaaaatgaaaagaatcagtgaagggactgaagggcctgggactacagtggagacaaagcagggaacatgggaaatgaggagcctgttttggaccacaaccactaggaggtgcagctggaggaactcaggacccgtcccgcagagtgctgggagagcttgcctgca

SEQ ID NO: 142419 - DNA, 582 bp, Homo sapiens
ctttgtgagaacagacaataaacttattacagtggttgactctggagaggagaattagagtgctkgaggagagagggcacttagtgtttgcttcacgtccttgaatattgctttactttcttttctaccatgtacatattgacctattcaaatagataaatacgttaatttttttaaatgtactatatgtacatggacagactgctagacataagacactgcctagagacctgagcaagtcatccttctgggaaattccaagctccacaaatcatctaaaactcaattcttaaaatttcaaaaaatatgcacataggtgggcttgtacaacacaggggaaggagctgtggttcacaagaggaccagctaagtatgtgaaattacttgggggatatcctgtgttccaggttacaatagtgatcttaaaagacagtgttggagtaaggaacaaatacacaaaccccaccgccctctagccaacccgtgctgtgtgtcaagggtgtcaatggttggattccgtttacctcaagggcttagacaaatctgtaaacaagcaggagccatatggcatcattcataggc

SEQ ID NO: 142420 - DNA, 582 bp, Homo sapiens
ctttgtgagaacagacaataaacttattacagtggttgactctggagaggagaattagagtgcttgaggagagagggcacttagtgtttgcttcacgtccttgaatattgctttactttcttttctaccatgtacatattgacctattcaaatagataaatacgttaatttttttaaatgtactatatgtacatggacagactgctagacataagacactgcctagagacctgagcaagtcatccttctgggaaattccaagctccacaaatcatctaaaactcaaytcttaaaatttcaaaaaatatgcacataggtgggcttgtacaacacaggggaaggagctgtggttcacaagaggaccagctaagtatgtgaaattacttgggggatatcctgtgttccaggttacaatagtgatcttaaaagacagtgttggagtaaggaacaaatacacaaaccccaccgccctctagccaacccgtgctgtgtgtcaagggtgtcaatggttggattccgtttacctcaagggcttagacaaatctgtaaacaagcaggagccatatggcatcattcataggc

SEQ ID NO: 142421 - DNA, 582 bp, Homo sapiens
ctttgtgagaacagacaataaacttattacagtggttgactctggagaggagaattagagtgcttgaggagagagggcacttagtgtttgcttcacgtccttgaatattgctttactttcttttctaccatgtacatattgacctattcaaatagataaatacgttaatttttttaaatgtactatatgtacatggacagactgctagacataagacactgcctagagacctgagcaagtcatccttctgggaaattccaagctccacaaatcatctaaaactcaattcttaaaatttcaaaaaatatgcacataggtgggcttgtacaacacaggggaaggagctgtggttcacaagaggaccagctaagtatgtgaaattacytgggggatatcctgtgttccaggttacaatagtgatcttaaaagacagtgttggagtaaggaacaaatacacaaaccccaccgccctctagccaacccgtgctgtgtgtcaagggtgtcaatggttggattccgtttacctcaagggcttagacaaatctgtaaacaagcaggagccatatggcatcattcataggc

SEQ ID NO: 142422 - DNA, 585 bp, Homo sapiens
gctttcagagtggtccccagggcatccctccctctaggtgactcccatttaggccagcattaatgggtcacctgccaagaagcccttagattgtgcagttaaaagtgccttattcagataatcaccaactgaaccagaaagscttctgggctgggagggtgagctctggctgtgggtccagccaagcctgcagcaaggcagcctctcagcctgccaaccaggtttttctcaccctctcctcttaaggaagattgtagggctttgcagactcatgggttgcactgtgaataatgatcatacaggagcagggagcttaggacaaacccagggtccgatttcagatcaggttcaggatagcaggagggcatgagaaaatttgagggatctggaactttccctatgggaggtgggaggctggaggctgttcttttactaggcacataggtatggttcacttgctatggacgaggagctataccaggtgctggagatgctgggatgagcataatgggcccagcccactctcagggagccgaagtcttaagagaggagacggaggcctaataaactaatcagtaattacag

SEQ ID NO: 142423 - DNA, 585 bp, Homo sapiens
gctttcagagtggtccccagggcatccctccctctaggtgactcccatttaggccagcattaatgggtcacctgccaagaagcccttagattgtgcagttaaaagtgccttattcagataatcaccaactgaaccagaaaggcttctgggctgggagggtgagctctggctgtgggtccagccaagcctgcagcaaggcagcctctcagcctgccaaccaggtttttctcaccctctcctcttaaggaagattgtagggctttgcagactcatgggttgcactgtgaataatgatcatacaggagcagggagcttaggacaaacccagggtccgatttcagatcaggttcaggatagcaggagggcatgagaaaatttgagggatctggaactttccctatgggaggtgggaggctggaggctgttcttttactaggcacataggtatggttcacttgctatggacgaggagctataccaggtgctggagatgctgggatgagcataatgggcccagcccactctcagggagscgaagtcttaagagaggagacggaggcctaataaactaatcagtaattacag

SEQ ID NO: 142424 - DNA, 396 bp, Homo sapiens
tctgaaccctgggccaaaggttttcaggcctcacgtgggacactctagtcagccacctcaccccacacctgctcactgccccacagggccacaagacccatgtgccctgcaaggacagcaaactggcctgccttctcagactccctcaggggtaactgccacatggtgatgattgttgccatcagcacctccagcctggcctacaagaacacataaaacaccctcacatatgctgactgggccaaggggattgggttccccagtgtgtgccatcaagggccagcttgggtgcggwgggagccctcatcctgggagcaagaagaaacagaacccagacagatctctcagattcctggaacaagtgtttctcaaggcagaagaaagaagctcttctgt

SEQ ID NO: 142425 - DNA, 630 bp, Homo sapiens
atttcaagttttttatcgcatgatatttggtttttcactgtaagcctcaattggctcagaaatgagtttttgtagcttctataaaaagagtgtttacaacctattgaatcaaaacaaaagtttaactctgtgggatgaacccacatatcacaaagctttttcacaggtagattcaacctagttcatgttacgggatatttgatttttyactatgggtctatatatgctcagaaatttttctttatagattctaccaaaatactttttcaaacccagtaaataaaaactcaggttccattcaatgagatgaatgaacaaataacaaatcattttcacagatagcttgcttttattttgtctcacaggatattcactttttgctacaggcctcaatggtctcagaaatatccctttgtagattctacgaaaatagtttttccaacctggcaaacaaaaacagaagtttaactatttgggatgcatccacacatacgaaagcattctcacaaatagcttatttctagtttttatcatgcaaaattctgtttttcactgtaggcctcaatgggcttgatatgtcccttcatagattctacaaaaagagtgtttccaacctggtcaatcaaaaca

SEQ ID NO: 142426 - DNA, 630 bp, Homo sapiens
atttcaagttttttatcgcatgatatttggtttttcactgtaagcctcaattggctcagaaatgagtttttgtagcttctataaaaagagtgtttacaacctattgaatcaaaacaaaagtttaactctgtgggatgaacccacatatcacaaagctttttcacaggtagattcaacctagttcatgttacgggatatttgatttttcactatgggyctatatatgctcagaaatttttctttatagattctaccaaaatactttttcaaacccagtaaataaaaactcaggttccattcaatgagatgaatgaacaaataacaaatcattttcacagatagcttgcttttattttgtctcacaggatattcactttttgctacaggcctcaatggtctcagaaatatccctttgtagattctacgaaaatagtttttccaacctggcaaacaaaaacagaagtttaactatttgggatgcatccacacatacgaaagcattctcacaaatagcttatttctagtttttatcatgcaaaattctgtttttcactgtaggcctcaatgggcttgatatgtcccttcatagattctacaaaaagagtgtttccaacctggtcaatcaaaaca

SEQ ID NO: 142427 - DNA, 406 bp, Homo sapiens
atgtgcataatatactattttctatttataaatacattgaatttggattaagatggcttaactatcaatctagttttatttgaataaattaatgacactaaactgtattctgttttgtaattacaaaagacacattgtgacaaaggtcactgatttcccaatgtgtaataagtaaatgtawtagaaaataaaatacttaattaacctaataacataatttaaattatttttgttccaattcaaatgaattcaaattaatggcatttttttttcattctgctgcaagggtatttcatgtggcatgtgctgatttgaaaatttacatcaacttcaaatttttagaaaggctaattaattatcaatggatgtggggatgcctaggtttcaaacatgcctttattgtgaa

SEQ ID NO: 142428 - DNA, 492 bp, Homo sapiens
gattttatgtatgatattgggaattcatgctatgatttaagataatgttctttatcgatcacgtaagcagttgtttagctatccagtaacaaaatgatgctcscattcacagaatatgggacatacatagccaggagactacagtgctactctctttaatgtttatttctttttttttcctacaagcatattcactgctggaaaacaatggcaaaaaagcatttgtgctttagaaacaatcttctcataattttctttgttgcagctattagtggccaattgtgattcagtgaaaaccccattcaacaaacagatgttacaaagtatattttctgcttgctgcatctaaacaaatattaatgaggtaattggaactatgaaggaaaaaggagtgttttgcaagtatttatgatttcatgtatgaggctatacccttctaaaacttctcatttatattgcacaattgtaagatgtagttataaagatatacca

SEQ ID NO: 142429 - DNA, 492 bp, Homo sapiens
gattttatgtatgatattgggaattcatgctatgatttaagataatgttctttatcgatcacgtaagcagttgtttagctatccagtaacaaaatgatgctcccattcacagaatatgggacatacatagccaggagactacagtgctactctctttaatgtttatttctttttttttcctacaagcatattcactgctggaaaacaatggcaaaaaagcatttgtgctttagaaacaatcttctcataattttctttgttgcagctattagtggccaattgtgattcagtgaaaaccccrttcaacaaacagatgttacaaagtatattttctgcttgctgcatctaaacaaatattaatgaggtaattggaactatgaaggaaaaaggagtgttttgcaagtatttatgatttcatgtatgaggctatacccttctaaaacttctcatttatattgcacaattgtaagatgtagttataaagatatacca

SEQ ID NO: 142430 - DNA, 583 bp, Homo sapiens
aggcactatggtgctaatagattatgtatcttgtaagccatacacaagatgagaaatttcaaaaggattcataaacttaaaaaataacatgcccatagtattttggcttttcttaaaattgtgttttattgttagtagcatagatgaataygtttacttttaaaaattctggtttaaatctttctgaaacaatgacttaatccagtttgtttcaaaatggctgtcatagctggaaaggatactactaaaactctatagatacaagtgggagaaagacacatttagtaaattatcctccatttcttctcaaaaattattctaggtattattttttaagtttcattgtaaatgtctgtcttgtttgatataaaacagttcttcttgcgaaggcttcggtaatacttagtaagactattcttttggaatattttctaaaaggagcttaaaaattcggctttcaattttttaaagcattcatgtatgaacatttttatttacaaatcatataataaagaaaatatttccaaacttcctcaatgcactttccatagtacaagtttcctactcattgttaaagtatcat

SEQ ID NO: 142431 - DNA, 433 bp, Homo sapiens
ttaacctttctcagtgtctgttatatcatctacgaagcagggaaaacaatacactcagttcatggagttgctatagttattaagtgagattaagtgaaaatatatatgtaaagtgyttatcatcatagtggctcttacaggcttttatgtaaataagaatcgccaagaaaaacatttcagtgtttgagaatcaaatagagtttcctcaggtgttatgtttgtttgcttacttgctattaaagctttatgagatgtaattcaaataccttaaaatttacttgttgaagtgtacaagtcaatagttttaatatattcacaaaattttgcaaccatcaccactacataattttaaaatattttcattgtccatgcaaaaaccacatgccctaatctacgttttcttgtttgcatgtgtatttattttgatcattac

SEQ ID NO: 142432 - DNA, 618 bp, Homo sapiens
gtccgggtaccatttcttaaaaaacgattctttctccattgaattgttggcagcattgtcaaaaatcaattgaccatacatgtaaatgtttatttctctattctcaatctattttatagtctgtttgttcayctttgtgttagtaccacatggttttgattattgtagctttaaagtgttgaaatcgagaaacgtgagtcctgacacttgtttttctttttcaagattgttctgccattctgtgtctcttgcatttttaatatcagttgtatgatcagattatcaagttttgaaaaagccagctgggaatttgttaggaaattcattgaatctgtagatcaatttggggaatcttgtcatcttcataatttaagtcttctgattcatgagcatgggatatctttctatttatttaaatgtcttcaattcccttcaaaacagttttgttgttttcataagttttgtacatcttttataaaatgtatttctacatttaaaaattatttttgataacttttttaaaattttttattttcataggtttttggggaacaggtggtatttggttacgtgagtaagttcttgagtggtgatttgtgagcttttggtgcacccatc

SEQ ID NO: 142433 - DNA, 618 bp, Homo sapiens
gtccgggtaccatttcttaaaaaacgattctttctccattgaattgttggcagcattgtcaaaaatcaattgaccatacatgtaaatgtttatttctctattctcaatctattttatagtctgtttgttcatctttgtgttagtaccacatggttttgattattgtagctttaaagtgttgaaatcgagaaacgtgagtcctgacacttgtttttctttttcaagattgttctgccattctgtgtctcttgcatttttaatatcagttgtatgatcagattatcaagttttgaaaaagccagctgggaatttgttaggaaattcattgaatctgtagatcaatttggggaatcttgtcatcttcataatttaagtcttctgattcatgagcatgggatatctttctatttatttaaatgtcttcaattcccttcaaaacagttttgttgttttcataagttttgtacatcttttataaaatgtatttctacatttaaaaattatttttgatamcttttttaaaattttttattttcataggtttttggggaacaggtggtatttggttacgtgagtaagttcttgagtggtgatttgtgagcttttggtgcacccatc

SEQ ID NO: 142434 - DNA, 608 bp, Homo sapiens
tttcaccatgttggccaggctggtctcaaactcctgacctcaagtgatccactcgcctcggcctcccaaagtgctgggattacaggtgtgagccaccgcggccagcctccactagcctgttttatgtgccctaatcttctctgcacttatcaaaggaagtttagctaaaatggtcatgaacttctcagaggcctggcatgtgagacttcccatgaagaaaggccaagtttttcaagtctcagaaggcttaccaaattaggttccaaggctataacttactaaattaaaaatagactgctcctttgaggaacaagtagaaagatctaaaaagaaaagaaaagaaaaaaagaaaacctaagaaaaaagygggtaaaaaacactaacattgaaacatgcaacctcctggtagacacttcagactttgatcaaccaagagtagcagcgtatcatccaaacccaaatctttttactgtgttcaaattgaatggtgtaagaactaattttagctccaagtttaaaaaattaaacaaacaaacaaaaactttgggtagtttaagttctctggaggtgggtgtaaaataatgggaatagtaaccataatgttctga

SEQ ID NO: 142435 - DNA, 486 bp, Homo sapiens
tcatggtacaaagcctgataaatagtaggcacttacgraatgtcagtctccttacttcattaaaagtgagacaggattttaaaaatcagccagacttatccttaactttgcacatggagaaactaagactcagaggaaagttagttgctaaatgtatcaacagattagtctggcactcataaattatggttgagattagttatattgaatcaaaagtaaaattaaaaagtgtgtttggaaagagggttcaacaacaacaacaaaaatctattatatgtgtaaggtaagttatgttgagtcaaagtgaaacgaaaatgtgtgtttggaaaaagggttacacacacaaacaaaaaaaaatcattacttgcattctgatgattacttgcatttgtacagtggcaggtacaaaaaatgtttgtaaaccacctgatggtacattaattatttttattttattgagtgtgtgttcttctgtgaaacaggtgt

SEQ ID NO: 142436 - DNA, 486 bp, Homo sapiens
tcatggtacaaagcctgataaatagtaggcacttacggaatgtcagtctccttacttcattaaaagtgagacaggattttaaaaatcagccagacttatccttaactttgcacatggagaaactaagactcagaggaaagttagttgctaaatgtatcaacagattagtctggcactcataaattatggttgagattagttatattgaatcaaaagtaaaattaaaaagtgtgtttggaaagagggttcaacaacaacaacaaaaatctattatatgtgtaaggtaagttatgttgartcaaagtgaaacgaaaatgtgtgtttggaaaaagggttacacacacaaacaaaaaaaaatcattacttgcattctgatgattacttgcatttgtacagtggcaggtacaaaaaatgtttgtaaaccacctgatggtacattaattatttttattttattgagtgtgtgttcttctgtgaaacaggtgt

SEQ ID NO: 142437 - DNA, 414 bp, Homo sapiens
atggatttatcaagagagaatggagtcaatctgtacagatatgcgactaatagaatgttcaaagacaagaacaagaaccaaacgtcagtaagrgcattcatgaagaaaaaaagcgaactatgtttgggcagtaaaatctcacaagtgacagcaataaaggagcttactttgggtttcaggaactgtttggtatgctccagactactatgtgagatagaatcttccaagggaattgataaaagcttcagcatttgggacttttaaaccctgactggatagcatattaggagggattttcaaggaatcagttctgcactgggaagaaactgagctccatgacatgtttcatccttctacttctctactgttcaataacattttaaagaatgggggaggggagattcttcggaattc

SEQ ID NO: 142438 - DNA, 489 bp, Homo sapiens
tggcagccacctctccatcctcactgctctcattctgtcctgctgcccgacttgaagcaagatacatgtatttctttgcctcatttttcagttttcacactgtgggctccatcaatgacttctagaagaaagcacttgttcggaaaagatccatccatgtaaacagagcactggggcttaagcagatttattcagcagtttctccacaattacccacttctttctcagggccaaaatgttgaatcagctttgaactccaaatgaaaccccccacgtatttgctgggtacttcattttgaaagtaagggagtcagggagaaaaatattacctcagactctgcaataaaataaatagaaaatatttttctctaccsgaatccatcagctacccctgccttagttcttcctcaaactttcctgtcttaacataccctaggaaaaaacaattgttagtctggttgctgtttgttttttgtttgtttgtttctt

SEQ ID NO: 142439 - DNA, 567 bp, Homo sapiens
aagccacttaggagtttcccyggcaagcctcacccaagaagacttaaccttttttaaaaagaggcaaatagattaaaggggccaggggctggatgcataatcccctgatctgataccaacccaacaggcccagatgacttcttccagcagatacaatcaatgggtcaagaacattttctcaaagtttctttccctctctatggaaaagagctgacagcccccttctaagggcaccacatttcctggatttcccctcagactgaccttcaccctcccccctaacttcccctttaataataaaaaaacccagaatgcatatatacaaggaacagagtaagacatgggtaatttgtatggtgaactgggcttcaatgatttgtgaggaatttgttttgtgaaatcctgcacctcttattctagctcacaaacccttcccatcgttctgtttccttccttgtccttttctgttcccccaaataatacacatcaacatatcgacttttaaccaacttcagaatcatggaaggagagagggagatttttcagaaagaaaagcattcaggtttt

SEQ ID NO: 142440 - DNA, 577 bp, Homo sapiens
cttggaggacataaattgttggtagggcccagaactgaagtggtgtgactacaaaatcatgagtttggtaaatgtttttaaaacatacatctgcatatgtgcacacacacagagaacacagaatgcatacattcaggtgagtgatgttccccaccaacgtagtcaccaaagagattccacctatctcaatgatgaccacaatgtttaagacatctctggaatttctgtttgggaactgtttgggaactatgagctgcacaagaaaatggctctgctttacagcagcactcattactacaaacccacttgataagccaccttctttcccagaggcttcaaatagctgctggctagtctcagacattacattctctctctctctyaaccacaaataaccacaaaacactgaagatttgccctgagaaaaggcaaatctgagaacacttaaaaggagttatactatctgccttgatcaatgggtcactgttctggactttggcttctaggtctagaagctgaggaggaccttaggaggaggctggaatagataaccattaaggtcccttccagttctagc

SEQ ID NO: 142441 - DNA, 514 bp, Homo sapiens
caaatcacgaaaagcctggcacagactattcaatgaggagtctattattaacacattttatccctgtatcaaaacagattgggattcgatggtttcccttaatactgtcaacaagtactctttcggagaaacacttgttgaagaggccccatcaatctcccacaacgctgtcagtgcagtrtctgggttcccattgaccctgagcatttggtaaatggcaagtgcttttcctctacacaaggtcctgttcatcctaatgaagatgcatcattggcacttgcttcctgtaagactgggaaagagcagtggaactaaaagcccccatccagatggagtagctcaacagaacatctgccttgcctatatgtcacctgcctacctcctgctgctaggctagctgccagggattgcagcagctcctgactcaagggtcctcctcttctggtgcttgcttggagctttgagtgattatctgcaccaccgttcccaaaagcatcatgccatctttcttaaa

SEQ ID NO: 142442 - DNA, 373 bp, Homo sapiens
agggataagacagtaagatttttatttactactggtagaactctaaattggaacaggtacttataaaactatttagcattacctggtattgtygaatatgttcatatcctgtgacttagcaattctacccaggctaaaatattgcaaataattaatagcaacatagttaatttggatgtattaagttcctttagaacagtagttctcgaacttttgcatgcatcatcatcccctggaaggatttattgaaacacagattcctgggcccatcccagtttctgatcggacagctctgggatggtcccctaggactggcatttctaacaagatccttggtgatgctaatgctactgaaagttgaaagaaaagccac

SEQ ID NO: 142443 - DNA, 393 bp, Homo sapiens
aattctcagcagagtatcatcagggctaattgatgccctcatcataccctgtctaggaatagaattagtcctcaagtctggccttgggctcattacttaggaattcagtcaccataactataagagagctgtatcctccaaaacacatagtatggcattgtagccccatgaaatattttaaaagaaaacaaaaaaggatgggaggaggaaggaagagaatgaggaagggaggaagaaagaatagaagagggagggaggaagagtgagttttaaattcctaggtttaaattgtttgagaaaccctgcatgcaatcgcatcttttgaggaacttataatgcacattagcataaaactccatttgaaraaaacaatcattctccaagcttatttaa

SEQ ID NO: 142444 - DNA, 191 bp, Homo sapiens
gtaccttccacagacagaaactgtcaggtgtcaggaaaggacactcagacggcagctgtgggtccagtaatcagcactgtccaaagacttacaagggaacctcgccctgactctaccactgactagctgagcygtgggcactcgcttaacctctctgaaactccaaatcctcaatcataaaatgagagata

SEQ ID NO: 142445 - DNA, 600 bp, Homo sapiens
tgggcatttgattcagtatattgtttaggcaaagtacacagtacctcctttctaaagtggagatgctaaatccattgattttattccttcgatgtcattttttccaactttttaaaagttgttttctgtattagatcattcctcccacctttgctgattagtagaggcttttgctggactgtaagctccacgagggtggataccgtgattttgtgctcctttgggatttcaggttctagcacagcacaagcatgtgtggtaggtatctggtcaatgaatacctgaggtgggtagaaaaattttcttaacctctaacacgtactgatcaatcttcccttttcttcgttccgttcacctttgtgtatacttaaggcctgaacagattgagattcagtgagcaatagaactgtttcaggggaggttgatgctctggatgaagctgggttgcatgtattgaaaatcagggatggctggatttatggaaggcagattttgagggaaattaattcagtattggcttstgcctggccatctttctagttcagatcatctaggagattaaagatccactaacccaataccagtctgatttgcagagca

SEQ ID NO: 142446 - DNA, 535 bp, Homo sapiens
ctagcaattttctttttctagtattactattttctagtattactattactcatgcaaataatgaagttaacttaaggctctgtaaacaattaagtaagaaacacttgtttctaaacctctaacaacatgatgaaatgaattacagcctatctaaccaagagattatatcaaagccattgactatgatgacataggtctctatttattgtccaggacagatgcttagaatatatgaccaattaaaaaataaacaacrggtcaatatgctatctaatccaattttgtgcctctctatgtgtgtgttagaatgcagcaccaaagaacaaagaatacacaccaaagcttatcagtggttagctataggtgggaagactgcaagtgatgcattaccttcttttcacctgttcatgttttctgtaaccacaaagacaagtcctgctaaaaagcttggggaaaatgtcataaagagagagggagaatgattgaaaacttcagagacggataagccagcttgtccttcgctttgatattagac

SEQ ID NO: 142447 - DNA, 594 bp, Homo sapiens
cctcccttgcctatgagctgagtttagatgtgggccaccatttcaactctggttgaatgtttatatatgaacacgggcctaacacygaggtgatgtgagtctttggcctagacacttcaagcaggaggcaaagtgacatatctctgggtctatcaactatttgatgtgaccttccttttttacctgagctttccccataaaagagatgtgacatatgtctagacaaagcacctgggtgatgtgactctcctttattgactgagccctgtgtattttgggtattctgacgtatccctggacctaacttctggaagataagaagatccaacatgggccctgcctaaaaagtttcttgtgacaaatttctacatgaatcaccttggagatttgactctcctctcttacccgagttttgcccataagagagattgttacgtacctctacagcaagcacctaaatgctgtggctcttctttcttgcccgggtcatgcccacagatgaaagagtggcttatcgctgtgtccagcacaccggttatgtgattatgctgcctgatctctgctcacaggagccattgtgacatatccctgggg

SEQ ID NO: 142448 - DNA, 594 bp, Homo sapiens
cctcccttgcctatgagctgagtttagatgtgggccaccatttcaactctggttgaatgtttatatatgaacacgggcctaacaccgaggtgatgtgagtctttggcctagacacttcaagcaggaggcaaagtgacatatctctgggtctatcaactatttgatgtgaccttccttttttacctgagctttccccataaaagagatgtgacatatgtctagacaaagcacctgggtgatgtgactctcctttattgactgagccctgtgtattttgggtattctgacgtatccctggacctaacttctggaagataagaagatccaacatgggccctgcctaaaaagtttcttgtgacaaatttctacatgaatcaccttggagatttgactctcctctcttacccgagttttgcccataagagagattgttacgtacctctrcagcaagcacctaaatgctgtggctcttctttcttgcccgggtcatgcccacagatgaaagagtggcttatcgctgtgtccagcacaccggttatgtgattatgctgcctgatctctgctcacaggagccattgtgacatatccctgggg

SEQ ID NO: 142449 - DNA, 562 bp, Homo sapiens
tcaagatctaatattttccacgtagtgcttcagaaaagayaaggtaatttcaacaacttaaccccatcatcaagagggtgttacttaagtacattatgggaggtcatagataaacaaccagtcagcctctaagcatcagaaaatccgtgatgtccattggcctgagagatggtctgcatttctttgaaggaaaaaagcaggttttaaaacactagaaccgaatcaaatcctaaatttgaatagaaagattagaaaggcttatgcatgggaaaaagattcagggtatccaacggttaattctgactatttctgagtaatttaaatttacctataatttaaaaaaaaaaataaggtcaggtgtattgactcaaacctgtaatcccagcattttgggaggccgaggagggtgaatcacttgagaccaggagtttgcgaccagtatgggcaccatggccaaacctcatatctactaaaaacacaaaaattagccaattggtggtgtgtgcttgtagtcccagctacttgggaggctgacgcatgagaatcgcttgaacctaggggg

SEQ ID NO: 142450 - DNA, 562 bp, Homo sapiens
tcaagatctaatattttccacgtagtgcttcagaaaagacaaggtaatttcaacaacttaaccccatcatcaagagggtgttacttaagtacattatgggaggtcatagataaacaaccagtcagcctctaagcatcagaaaatcygtgatgtccattggcctgagagatggtctgcatttctttgaaggaaaaaagcaggttttaaaacactagaaccgaatcaaatcctaaatttgaatagaaagattagaaaggcttatgcatgggaaaaagattcagggtatccaacggttaattctgactatttctgagtaatttaaatttacctataatttaaaaaaaaaaataaggtcaggtgtattgactcaaacctgtaatcccagcattttgggaggccgaggagggtgaatcacttgagaccaggagtttgcgaccagtatgggcaccatggccaaacctcatatctactaaaaacacaaaaattagccaattggtggtgtgtgcttgtagtcccagctacttgggaggctgacgcatgagaatcgcttgaacctaggggg

SEQ ID NO: 142451 - DNA, 562 bp, Homo sapiens
tcaagatctaatattttccacgtagtgcttcagaaaagacaaggtaatttcaacaacttaaccccatcatcaagagggtgttacttaagtacattatgggaggtcatagataaacaaccagtcagcctctaagcatcagaaaatccgtgatgtccattggcctgwgagatggtctgcatttctttgaaggaaaaaagcaggttttaaaacactagaaccgaatcaaatcctaaatttgaatagaaagattagaaaggcttatgcatgggaaaaagattcagggtatccaacggttaattctgactatttctgagtaatttaaatttacctataatttaaaaaaaaaaataaggtcaggtgtattgactcaaacctgtaatcccagcattttgggaggccgaggagggtgaatcacttgagaccaggagtttgcgaccagtatgggcaccatggccaaacctcatatctactaaaaacacaaaaattagccaattggtggtgtgtgcttgtagtcccagctacttgggaggctgacgcatgagaatcgcttgaacctaggggg

SEQ ID NO: 142452 - DNA, 529 bp, Homo sapiens
aagacaaggtaatttcaacaacttaaccccatcatcaagagggtgttacttaagtacattatgggaggtcatagataaacaaccagtcagcctctaagcatcagaaaatccgtgatgtccattggcctgagagatggtctgcatttctttgaaggaaaaaagcaggttttaaaacactagarccgaatcaaatcctaaatttgaatagaaagattagaaaggcttatgcatgggaaaaagattcagggtatccaacggttaattctgactatttctgagtaatttaaatttacctataatttaaaaaaaaaaataaggtcaggtgtattgactcaaacctgtaatcccagcattttgggaggccgaggagggtgaatcacttgagaccaggagtttgcgaccagtatgggcaccatggccaaacctcatatctactaaaaacacaaaaattagccaattggtggtgtgtgcttgtagtcccagctacttgggaggctgacgcatgagaatcgcttgaacctagggggtg

SEQ ID NO: 142453 - DNA, 543 bp, Homo sapiens
cagaaaagacaaggtaatttcaacaacttaaccccatcatcaagagggtgttacttaagtacattatgggaggtcatagataaacaaccagtcagcctctaagcatcagaaaatccgtgatgtccattggcctgagagatggtctgcatttctttgaaggaaaaaagcaggttttaaaacactagaaccgaatcaaatcctaaatttgaatagaaagattagaaaggcttatgcatgggaaaaagattcagggtatycaacggttaattctgactatttctgagtaatttaaatttacctataatttaaaaaaaaaaataaggtcaggtgtattgactcaaacctgtaatcccagcattttgggaggccgaggagggtgaatcacttgagaccaggagtttgcgaccagtatgggcaccatggccaaacctcatatctactaaaaacacaaaaattagccaattggtggtgtgtgcttgtagtcccagctacttgggaggctgacgcatgagaatcgcttgaacctagggggtggaggttgca

SEQ ID NO: 142454 - DNA, 529 bp, Homo sapiens
aagacaaggtaatttcaacaacttaaccccatcatcaagagggtgttacttaagtacattatgggaggtcatagataaacaaccagtcagcctctaagcatcagaaaatccgtgatgtccattggcctgagagatggtctgcatttctttgaaggaaaaaagcaggttttaaaacactagaaccgaatcaaatcctaaatttgaatagaaagattagaaaggcttatgcatgggaaaaagattcagggtatccaayggttaattctgactatttctgagtaatttaaatttacctataatttaaaaaaaaaaataaggtcaggtgtattgactcaaacctgtaatcccagcattttgggaggccgaggagggtgaatcacttgagaccaggagtttgcgaccagtatgggcaccatggccaaacctcatatctactaaaaacacaaaaattagccaattggtggtgtgtgcttgtagtcccagctacttgggaggctgacgcatgagaatcgcttgaacctagggggtg

SEQ ID NO: 142455 - DNA, 543 bp, Homo sapiens
cagaaaagacaaggtaatttcaacaacttaaccccatcatcaagagggtgttacttaagtacattatgggaggtcatagataaacaaccagtcagcctctaagcatcagaaaatccgtgatgtccattggcctgagagatggtctgcatttctttgaaggaaaaaagcaggttttaaaacactagaaccgaatcaaatcctaaatttgaatagaaagattagaaaggcttatgcatgggaaaaagattcagggtatccaacggttaattctgactatttctgagtaatttaaatttacctataatttaaaaaaaaaawtaaggtcaggtgtattgactcaaacctgtaatcccagcattttgggaggccgaggagggtgaatcacttgagaccaggagtttgcgaccagtatgggcaccatggccaaacctcatatctactaaaaacacaaaaattagccaattggtggtgtgtgcttgtagtcccagctacttgggaggctgacgcatgagaatcgcttgaacctagggggtggaggttgca

SEQ ID NO: 142456 - DNA, 539 bp, Homo sapiens
ggtaatttcaacaacttaaccccatcatcaagagggtgttacttaagtacattatgggaggtcatagataaacaaccagtcagcctctaagcatcagaaaatccgtgatgtccattggcctgagagatggtctgcatttctttgaaggaaaaaagcaggttttaaaacactagaaccgaatcaaatcctaaatttgaatagaaagattagaaaggcttatgcatgggaaaaagattcagggtatccaacggttaattctgactatttctgagtaatttaaatttacctataatttaaaaaaaaaaataaggtcaggtgtattgactcaaacctgtaatcccagcattttgggaggccgaggagggtgaatcacttgagaccaggagtttgcgaccastatgggcaccatggccaaacctcatatctactaaaaacacaaaaattagccaattggtggtgtgtgcttgtagtcccagctacttgggaggctgacgcatgagaatcgcttgaacctagggggtggaggttgcaataaccca

SEQ ID NO: 142457 - DNA, 604 bp, Homo sapiens
acatttctgacaacagcccwcacaaccacatgagtctgggttacagaacacatgggcgaggctcgggtagcaggtttcacttactttattccaatgtgaaatgaagattgatgatttaaaaacaagacaaagttgtttatcagctgtggggtggctacacttgctagctcatgctcacttcctttgaaacaaggtatctggacagaccatattcataagtaggtcttcgcaaaaccccagacagaagttccagtcagacacagctccctcaggctcacagggtggcaaccgcctccatgttaggctctgacagcaggcaaggaaaggagcacaggcagcaggggacagggagggtccgggactgtagggatccccaaatgccccagagctattctctgtagaagggcacacgcaggtctcactgtgtcagtgcagtggctgaatcatgggtcactgcagcctcaatctcttaggctccagtgatgctttcacctcagcctctcaagtagctgtatggcaaaaagcctcctactttttacttaaaacctggactttaagccaggttgggcctgggaatagtggcagcaaaagcagcagccaaatg

SEQ ID NO: 142458 - DNA, 604 bp, Homo sapiens
acatttctgacaacagccctcacaaccacatgagtctgggttacagaacacaygggcgaggctcgggtagcaggtttcacttactttattccaatgtgaaatgaagattgatgatttaaaaacaagacaaagttgtttatcagctgtggggtggctacacttgctagctcatgctcacttcctttgaaacaaggtatctggacagaccatattcataagtaggtcttcgcaaaaccccagacagaagttccagtcagacacagctccctcaggctcacagggtggcaaccgcctccatgttaggctctgacagcaggcaaggaaaggagcacaggcagcaggggacagggagggtccgggactgtagggatccccaaatgccccagagctattctctgtagaagggcacacgcaggtctcactgtgtcagtgcagtggctgaatcatgggtcactgcagcctcaatctcttaggctccagtgatgctttcacctcagcctctcaagtagctgtatggcaaaaagcctcctactttttacttaaaacctggactttaagccaggttgggcctgggaatagtggcagcaaaagcagcagccaaatg

SEQ ID NO: 142459 - DNA, 502 bp, Homo sapiens
aatacaaaatctgaatagatagaaaactactaaggaaatggaatcagtaattaaaaacctctcatgaagaaaagcccttgttttgttggcttcactggtgatgtagatcaagcatttatagaacaaaaatcctttccaaaatctaccaaaatcctgaagagagcagttccaaacttattccatgatgccagcattagctcataccaaagccagacaaagagactacaaaaacccatagactaatatcccttatgaacacggatgcaaaactactcagcaacatcctagctaaccacattcagcagcatactagcaagattacaccccatgaccaaggggaatttattactggaatgtaaggaagatttagcgtatggctggtttcagtgcaatggtgtttacaactaattgatcacaaccagaatagatttctttattctttttccagtctcactggttcrcttagctagcctttcttaacaaaagttttagcatatgaaaa

SEQ ID NO: 142460 - DNA, 375 bp, Homo sapiens
gggtttcaccatgttggccaggctggtcttgaacttatggcctcaagtaacctgcatgcctcagcctcccagagtgytgcgattacaggcatgagtgatcactcttggcccttgggtgtcatttttaatttcggattgtggtaaaaatacataacataaaatttagaatctttaatattttttcttatacagttcagtcatgttaagtgtatttacattgttaagcaacatatttgtaaaattttttcttttgcaaaactaaaactcagtacacatgaaatgacaactacccattgtccttaccacctggctcctgataaaaatcattctattttctggttctaagtttcaatactttagatattacatataagt

SEQ ID NO: 142461 - DNA, 375 bp, Homo sapiens
gggtttcaccatgttggccaggctggtcttgaacttatggcctcaagtaacctgcatgcctcagcctcccagagtgctgsgattacaggcatgagtgatcactcttggcccttgggtgtcatttttaatttcggattgtggtaaaaatacataacataaaatttagaatctttaatattttttcttatacagttcagtcatgttaagtgtatttacattgttaagcaacatatttgtaaaattttttcttttgcaaaactaaaactcagtacacatgaaatgacaactacccattgtccttaccacctggctcctgataaaaatcattctattttctggttctaagtttcaatactttagatattacatataagt

SEQ ID NO: 142462 - DNA, 503 bp, Homo sapiens
aagggtccctggaaagtccctggcccttgggtcagtgtctcatccctgcataacataaaaggaatcctggaaaaaatcaagctgcagacactaacaaggtagctagcacatggtgttgtgcttggagacctgcccatggctgcacagacagaaaaacctctggcacatttggataaaaacttgtacaaacctccagctcactgagataagggaacaagaccgacctggcatagaaatgcctttgtttgtccaggcacggtggctcatgcccgtaattccagcaatttgggaggcagaagtgggcggatcacctgaggtcgggagttcgagaccagcatgaccaacatggagaaaaatacaaaattagccgggcatggtgcctcatgcctgtaatcccagctacttgggaggctgagrcaggagaatcacttaaacccaggtggcggagtttgctgtgggccgagatcgcaccattgcactccagcctgggcaacaagagcaaa

SEQ ID NO: 142463 - DNA, 578 bp, Homo sapiens
tactcataatgggaattctaaaataaaaagagaaaagagagcagcaaagttatttcaagaaacaaacagtgacagagaactcagaatttgagggagaaaatgacctaaaatttaatgaaactttaccaactctaactagtaacaacacagggagacccatgacaagacacattataatcagagattcaaaagttaaaacaccgagaatcttgaagtcagcaagaaaaaagtgacttagcwtgtacaagtttacccctgcaggatgaccagcagatgtctcagcaaaaaaacttacaggtaagaggttgtaggatgacatactcaaagtgctgaaaaaatggcaagaaccacccaaaaacactatgtctgccaaaactatcatttcaaatgaattaaaaaataaaaataccgccctttcaagatcaacaaaaactgtataaatttatacccactaggcctgtcttaaaaaatgctaaatagtcattcacattaaaaaatgaaataatgatgagagcaacacaaaattatgtaaaatatgacattttctaatagaaaaaattatgtacacaatcataata

SEQ ID NO: 142464 - DNA, 453 bp, Homo sapiens
aaagtaaatatattttgtaaatctaatgtagaaaatgaggtcagctgagaagacaatgacagttgaagcagaacctgagatcctgtttctctccattgacatatgaacttaactacaattgggtgaacaaagccagttgagtttgtagcaccccacatgagaaaaaagccaaccataaccacatttagaagaaaatttggtcacatttgtgcactacagaacagcgcagttagataaaaatctgtccattccatgattctcctttgggaaagaaaaaagagtgaaatgsgtatgcaaacttctgacttactgagttataccggggttatctaaagactggaaattgcttcctttaacatgtagtgttgatgagaatagagactgagtttaaatgacagcttgggtcaactgagaataaagataaatgcttcttacaacaagagagactgtagt

SEQ ID NO: 142465 - DNA, 453 bp, Homo sapiens
aaagtaaatatattttgtaaatctaatgtagaaaatgaggtcagctgagaagacaatgacagttgaagcagaacctgagatcctgtttctctccattgacatatgaacttaactacaattgggtgaacaaagccagttgagtttgtagcaccccacatgagaaaaaagccaaccataaccacatttagaagaaaatttggtcacatttgtgcactacagaacagcgcagttagataaaaatctgtccattccatgattctcctttgggaaagaaaaaagagtgaaatgggtatgcaaacttctgacttactgagttataccggggttatctaaagactggaaattgcttcctttaacatktagtgttgatgagaatagagactgagtttaaatgacagcttgggtcaactgagaataaagataaatgcttcttacaacaagagagactgtagt

SEQ ID NO: 142466 - DNA, 493 bp, Homo sapiens
atgtgggcctgtgtgcgtctccctacgttttctgggagatgtatctcataaacactcttggccctttggtcacagggctgcaggactacaatcccagcatgcagcgagttcagggactctgtgtgtgtgtgtgtgtgtgtgtgtgtgtgtgtgtgtgtgtgtgtgtgtccctggaggaagacgtggagctgtgcgtgcctcgctgggcttgctgggagatgcattctgataaccaatcccagccctttcatcacatagctgtaggactacaattccagcatgcacggggyaccgggacagttcgcctcaatggaggaagagaaaggggtacatgcgtctcgctgggctttctgggagatgttgtctcattatttctcccagcccttttgtcacagggcttcaggactacaatcccagcatgcaccgtgctcagggagagcgcgcctcagtggaggaagaagtggacctgtgctcttctcgctatgctttttcg

SEQ ID NO: 142467 - DNA, 493 bp, Homo sapiens
atgtgggcctgtgtgcgtctccctacgttttctgggagatgtatctcataaacactcttggccctttggtcacagggctgcaggactacaatcccagcatgcagcgagttcagggactctgtgtgtgtgtgtgtgtgtgtgtgtgtgtgtgtgtgtgtgtgtgtgtgtccctggaggaagacgtggagctgtgcgtgcctcgctgggcttgctgggagatgcattctgataaccaatcccagccctttcatcacatagctgtaggactacaattccagcatgcacggggtaccgggacagttcgcctcaatggaggaagagaaaggggtacatgcgtctcgctgggctttctgggagatgtwgtctcattatttctcccagcccttttgtcacagggcttcaggactacaatcccagcatgcaccgtgctcagggagagcgcgcctcagtggaggaagaagtggacctgtgctcttctcgctatgctttttcg

SEQ ID NO: 142468 - DNA, 516 bp, Homo sapiens
agaggtggacctggaggacaggtctgggctgagcattgaggagggtattaccctatgtaggcaccttacctttgcccaaatcaggcgggttgtcctcacccgattggccctatgcttctcaggttcctctttcagctgcacccagggttccttccagagcattgcaccttctgcagcttagggcactgccttctttcctaaactgctgtggaaactgtcctgatgtctgagacactgtccattgtgcagcagccctcttttttctctagccagagcgcgtgctcaatcgcttttgagagaaatcttccacatggcctgcttgtgaacagcttcagagctctgcaggggctgacaagggctgagccttcctggaaacgtcactctcaatggcgcctttttcacgaatgtgaaagtcgagrcatcagaaagttagtttaatgggttgcagaaaatctaagagcaagggagaaaaccccctttccaaggcgtgagttttgtgagccattttcatcaacc

SEQ ID NO: 142469 - DNA, 304 bp, Homo sapiens
gtgtgtgtgaggagttactactcaagaggttttgaatgycgttataacagtttgcacacagaatggtataagaaagttccagttgcttgacatcatcactagtacttaattttgtcagttttcaaaaatgtgaatgattgcatagtggtattcaattgcagttttcatatgcattgttctgatgcataaggatgtggatatgttcatctacttgttggcccttcggttctgtatgtggaactcctagtcacatgtttgccaattttgttcaatgtattgcatctttgtttattaattgatggga

SEQ ID NO: 142470 - DNA, 304 bp, Homo sapiens
gtgtgtgtgaggagttactactcaagaggttttgaatgcsgttataacagtttgcacacagaatggtataagaaagttccagttgcttgacatcatcactagtacttaattttgtcagttttcaaaaatgtgaatgattgcatagtggtattcaattgcagttttcatatgcattgttctgatgcataaggatgtggatatgttcatctacttgttggcccttcggttctgtatgtggaactcctagtcacatgtttgccaattttgttcaatgtattgcatctttgtttattaattgatggga

SEQ ID NO: 142471 - DNA, 304 bp, Homo sapiens
gtgtgtgtgaggagttactactcaagaggttttgaatgccgttataacagtttgcacacagaatggtataagaaagttccagttgcttgacatcatcactagtacttaattttgtcagttttcaaaaatgtkaatgattgcatagtggtattcaattgcagttttcatatgcattgttctgatgcataaggatgtggatatgttcatctacttgttggcccttcggttctgtatgtggaactcctagtcacatgtttgccaattttgttcaatgtattgcatctttgtttattaattgatggga

SEQ ID NO: 142472 - DNA, 687 bp, Homo sapiens
atttagttattttactactgatgcacatttgagtttttttcagtttggaaaagtaccaaataatgctgcttagagcatttgtctgcattggaaaatatgctggcatttctattgggtgtatatacctagtagcagagttgctgggtcctagagtgtgcttatgtacatcgtgtgtgtgaggagttactactcaagaggttttgaatgccgttataacagtttgcacacagaatggtataagaaagttccagttgcttgacatcatcactagtacttaattttgtcagttttcaaaaatgtgaatgattgcatagtggyattcaattgcagttttcatatgcattgttctgatgcataaggatgtggatatgttcatctacttgttggcccttcggttctgtatgtggaactcctagtcacatgtttgccaattttgttcaatgtattgcatctttgtttattaattgatgggatttagttaaatagaactagatataaggcttttgccacatcaatatatagcgaatgttgatttccactttggtcttgcctttcagctctcctgaaggtttttttttacgaagagaaggccttaattgtaataaagtccaacaagtcatatttttgtcatgagaaataatgcattttgtgtcccaaaaaatctgggcgtgtgccagtcatggacat

SEQ ID NO: 142473 - DNA, 394 bp, Homo sapiens
tctccccgccctgcaagaggacaaataactgatttttgttcatttgactctgttttaaaattctctttaaaaaaaaaaaaaacaaaaaaaagaaaaagaaagcatatctgaaacttaaaaaaaaaaacaaggaaaaaagatgaaaaaaatgacatacttacataggtgaaaaacacatagatatatctataagcaacaaacacrgctaattcaaatataaattaaatatcacattgtcataatgtgtaccgagttaaaaaattatcattcaactcatgatatcaagctttaaaagcaaaaatacaattaactgctctgagaaaacatacccccccagaaaagaaacacaacaacacagaactgaaaataagaagagagattttaatgcataaaa

SEQ ID NO: 142474 - DNA, 394 bp, Homo sapiens
tctccccgccctgcaagaggacaaataactgatttttgttcatttgactctgttttaaaattctctttaaaaaaaaaaaaaacaaaaaaaagaaaaagaaagcatatctgaaacttaaaaaaaaaaacaaggaaaaaagatgaaaaaaatgacatacttacataggtgaaaaacacatagatatatctataagcaacaaacacagctaattcamatataaattaaatatcacattgtcataatgtgtaccgagttaaaaaattatcattcaactcatgatatcaagctttaaaagcaaaaatacaattaactgctctgagaaaacatacccccccagaaaagaaacacaacaacacagaactgaaaataagaagagagattttaatgcataaaa

SEQ ID NO: 142475 - DNA, 394 bp, Homo sapiens
tctccccgccctgcaagaggacaaataactgatttttgttcatttgactctgttttaaaattctctttaaaaaaaaaaaaaacaaaaaaaagaaaaagaaagcatatctgaaacttaaaaaaaaaaacaaggaaaaaagatgaaaaaaatgacatacttacataggtgaaaaacacatagatatatctataagcaacaaacacagctaattcaaatataaattaaatatcacattgtcataawgtgtaccgagttaaaaaattatcattcaactcatgatatcaagctttaaaagcaaaaatacaattaactgctctgagaaaacatacccccccagaaaagaaacacaacaacacagaactgaaaataagaagagagattttaatgcataaaa

SEQ ID NO: 142476 - DNA, 394 bp, Homo sapiens
tctccccgccctgcaagaggacaaataactgatttttgttcatttgactctgttttaaaattctctttaaaaaaaaaaaaaacaaaaaaaagaaaaagaaagcatatctgaaacttaaaaaaaaaaacaaggaaaaaagatgaaaaaaatgacatacttacataggtgaaaaacacatagatatatctataagcaacaaacacagctaattcaaatataaattaaatatcacattgtcataatgtgtaccgagttaaaaaattatcattcaactcatgatatcaagctttaaaagcaaaaatacaattaactgctctgagaaaacatacccccccagaaaagaaacacaacaacacagaactgaamataagaagagagattttaatgcataaaa

SEQ ID NO: 142477 - DNA, 492 bp, Homo sapiens
aatacattcatgtgttaacagctgcttaaatttrttttttctgtgaagtgtgggataatgtcattgccatattttaaatcaaattctaaaagctctctttagagtggataagtgagcatctttgtaatataaacttcacatatttgttgccagtttgttctttttgtttttgttaaaatgttttgttttattctgatttggatgtcttttggggttttgctttgtggctctttattatgacagtgtgacttctcctctaattgactgacaggtttgcccattctcaataaaatattttcataaaatctttgtaaaaattgtgtagtcaattttacattacataaacataaaacagtaaagactatcatgatgaaaaagaaagattgagggcttaaaaagtaaaatacgacacagctaaagtagtctgaaagggaaatttacagcactacatccccacaagagaaagcagaaaaatgtctaaaatcgacaccg

SEQ ID NO: 142478 - DNA, 490 bp, Homo sapiens
aatcttgtgagaacctaaatgatctgaatagtttgtcattgcttttggggatctgggaaaatctctgcacatttctggagaccgctgttatgccatttttaataaatctgttgtgcttcaattcagaagtgtgtgaggggagttgtggaggaattggcatttgggttagaaattayaggaacaacagagacagatgacacctgttttctgcttcataatgtcaagttttatgaaagctaaaacctaattctacaaaaaaattagactgaaaaactttataggcaaaaattatcttattaaataggaaaatctaattattttattttaaaattttcttttccttagtaggacctaatcatagaaatttaaacactgtatgccaacagcctctactgtaggatggtttattgtaagtactcattttacagatttcttacaaaaactttttccgtaagggaaattagaatattgttcaacatatattgaattc

SEQ ID NO: 142479 - DNA, 490 bp, Homo sapiens
aatcttgtgagaacctaaatgatctgaatagtttgtcattgcttttggggatctgggaaaatctctgcacatttctggagaccgctgttatgccatttttaataaatctgttgtgcttcaattcagaagtgtgtgaggggagttgtggaggaattggcatttgggttagaaattataggaacaacagagacagatgacacctgttttctgcttcataatgtcaagttttatgaargctaaaacctaattctacaaaaaaattagactgaaaaactttataggcaaaaattatcttattaaataggaaaatctaattattttattttaaaattttcttttccttagtaggacctaatcatagaaatttaaacactgtatgccaacagcctctactgtaggatggtttattgtaagtactcattttacagatttcttacaaaaactttttccgtaagggaaattagaatattgttcaacatatattgaattc

SEQ ID NO: 142480 - DNA, 505 bp, Homo sapiens
tttaatatgaagattactatgactgtgttttcactttctgaattatcatgtgtcacatttttctgtaatttcagtttgagaagttgtaaaacagcatgctcaaatgtatatattatgtatcaattatataattaattattaaaatatttggcttgtatgtttaattgactctaggcacaatrttactattagcatcttcttccagttttcccaacttttatttgactaatagtacaatttatttccagtttttattttatctgtcaatgttttatactgtatttacaatatttatattgtcaccatatgtaaaaatgtaagacctttctattaaaggctagattacagccttacccttttgtgtaaggaaagcagcaatgcatcagtagcataatttaaaactttctctagtattacttaaatttttatttcttaaaactttctcatcacatctctttctaataattataatatggtttctttgaaatgttgttgccctaattgt

SEQ ID NO: 142481 - DNA, 505 bp, Homo sapiens
tttaatatgaagattactatgactgtgttttcactttctgaattatcatgtgtcacatttttctgtaatttcagtttgagaagttgtaaaacagcatgctcaaatgtatatattatgtatcaattatataattaattattaaaatatttggcttgtatgtttaattgactctaggcacaatgttactattagcatyttcttccagttttcccaacttttatttgactaatagtacaatttatttccagtttttattttatctgtcaatgttttatactgtatttacaatatttatattgtcaccatatgtaaaaatgtaagacctttctattaaaggctagattacagccttacccttttgtgtaaggaaagcagcaatgcatcagtagcataatttaaaactttctctagtattacttaaatttttatttcttaaaactttctcatcacatctctttctaataattataatatggtttctttgaaatgttgttgccctaattgt

SEQ ID NO: 142482 - DNA, 585 bp, Homo sapiens
gaaattagaatattgttcaacatatattgaattcacaattattaccttatttctcacttattattttatgattctgttttctttaatatgaagattactatgactgtgttttcactttctgaattatcatgtgtcacatttttctgtaatttcagtttgagaagttgtaaaacagcatgctcaaatgtatatattatgtatcaattatataattaattattaaaatatttggcttgtatgtttaattgactctaggcacaatgttactattagcatcttcttccagttttcccaacttttatttgactaatagtacaatttatttccagtttttattttatctgtcaatgttttayactgtatttacaatatttatattgtcaccatatgtaaaaatgtaagacctttctattaaaggctagattacagccttacccttttgtgtaaggaaagcagcaatgcatcagtagcataatttaaaactttctctagtattacttaaatttttatttcttaaaactttctcatcacatctctttctaataattataatatggtttctttgaaatgttgttgccctaattg

SEQ ID NO: 142483 - DNA, 505 bp, Homo sapiens
tttaatatgaagattactatgactgtgttttcactttctgaattatcatgtgtcacatttttctgtaatttcagtttgagaagttgtaaaacagcatgctcaaatgtatatattatgtatcaattatataattaattattaaaatatttggcttgtatgtttaattgactctaggcacaatgttactattagcatcttcttccagttttcccaacttttatttgactaatagtacaatttatttccagtttttattttatctgtcaatgttttatactgtatttacaatatttatattgtyaccatatgtaaaaatgtaagacctttctattaaaggctagattacagccttacccttttgtgtaaggaaagcagcaatgcatcagtagcataatttaaaactttctctagtattacttaaatttttatttcttaaaactttctcatcacatctctttctaataattataatatggtttctttgaaatgttgttgccctaattgt

SEQ ID NO: 142484 - DNA, 407 bp, Homo sapiens
ccttacccttttgtgtaaggaaagmagcaatgcatcagtagcataatttaaaactttctctagtattacttaaatttttatttcttaaaactttctcatcacatctctttctaataattataatatggtttctttgaaatgttgttgccctaattgtatccaaataattcaaaatttatactttttacggattcaaaggaagagttgaaaattgtagttacctaggattctttttcagttggacactatgtttattcaggattttatagatcaaagtttctcttaattatgttttagaatttatgtttctgtattttttagagtaggctgtctcacagcagttaattgtgtttttactttctacctatttattatgattttgaattacattattcaagtaagaattc

SEQ ID NO: 142485 - DNA, 407 bp, Homo sapiens
ccttacccttttgtgtaaggaaagcagcaatgcatcagtagcataatttaaaactttctctagtattacttaaatttttatttcttaaaactttctcatcacatctctttytaataattataatatggtttctttgaaatgttgttgccctaattgtatccaaataattcaaaatttatactttttacggattcaaaggaagagttgaaaattgtagttacctaggattctttttcagttggacactatgtttattcaggattttatagatcaaagtttctcttaattatgttttagaatttatgtttctgtattttttagagtaggctgtctcacagcagttaattgtgtttttactttctacctatttattatgattttgaattacattattcaagtaagaattc

SEQ ID NO: 142486 - DNA, 407 bp, Homo sapiens
ccttacccttttgtgtaaggaaagcagcaatgcatcagtagcataatttaaaactttctctagtattacttaaatttttatttcttaaaactttctcatcacatctctttctaataattataatatggtttctttgaaatgttgttgccctaattgtatccaaataattcaaaatttatactttttayggattcaaaggaagagttgaaaattgtagttacctaggattctttttcagttggacactatgtttattcaggattttatagatcaaagtttctcttaattatgttttagaatttatgtttctgtattttttagagtaggctgtctcacagcagttaattgtgtttttactttctacctatttattatgattttgaattacattattcaagtaagaattc

SEQ ID NO: 142487 - DNA, 383 bp, Homo sapiens
gaattctagatactcataagtgtctgctccccttggctcttcattggtaactcactgtgctttgagactctgggaagaggcttttcaggttctagaggtccttcagagaagagagaggcctagagatgtgggcagatgaggacttggaataaagcagaatgtgacaatgcactgggctctggagtgtggggcccagaaaaaatactagwtttttgggctgtccttgagttcctcattcagaagtggaagaaaatactgtctctgaatgctgttaaaatgtttaatgagtgcacagcacactcaaagaggctgaggaaaataggaatcaagggaggtttccgaggttacttttatggcccttggagtcttcagatactgctcct

SEQ ID NO: 142488 - DNA, 383 bp, Homo sapiens
gaattctagatactcataagtgtctgctccccttggctcttcattggtaactcactgtgctttgagactctgggaagaggcttttcaggttctagaggtccttcagagaagagagaggcctagagatgtgggcagatgaggacttggaataaagcagaatgtgacaatgcactgggctctggagtgtggggcccagaaaaaatactagttttttgggctgtccttgagttcctcattcagaagtggaagaaaatamtgtctctgaatgctgttaaaatgtttaatgagtgcacagcacactcaaagaggctgaggaaaataggaatcaagggaggtttccgaggttacttttatggcccttggagtcttcagatactgctcct

SEQ ID NO: 142489 - DNA, 383 bp, Homo sapiens
gaattctagatactcataagtgtctgctccccttggctcttcattggtaactcactgtgctttgagactctgggaagaggcttttcaggttctagaggtccttcagagaagagagaggcctagagatgtgggcagatgaggacttggaataaagcagaatgtgacaatgcactgggctctggagtgtggggcccagaaaaaatactagttttttgggctgtccttgagttcctcattcagaagtggaagaaaatactgtctctgaatgctgttaaartgtttaatgagtgcacagcacactcaaagaggctgaggaaaataggaatcaagggaggtttccgaggttacttttatggcccttggagtcttcagatactgctcct

SEQ ID NO: 142490 - DNA, 393 bp, Homo sapiens
ccttggctcttcattggtaactcactgtgctttgagactctgggaagaggcttttcaggttctagaggtccttcagagaagagagaggcctagagatgtgggcagatgaggacttggaataaagcagaatgtgacaatgcactgggctctggagtgtggggcccagaaaaaatactagttttttgggctgtccttgagttcctcattcagaagtggaagaaaatactgtctctgaatgctgttaaaatgtttaatgagtgcacagcacactcaaagaggctgaggaaaataggaatcaagggaggtttccgaggttacttttatggcccttggagtcttcagatactgctccttttcccaggggtccctgaakagccactgccttgagaattc

SEQ ID NO: 142491 - DNA, 531 bp, Homo sapiens
ctgttaaaatgtttaatgagtgcacagcacactcaaagaggctgaggaaaataggaatcaagggaggtttccgaggttacttttatggcccttggagtcttcagatactgctccttttcccaggggtccctgaagagccactgccttgagaattccccagtgcaggtgcctgttttgtgatgcttccacctgggacttcagggctagtggaggcctctaggtggcggcagaccccgtgtttcttatgcccgctgggctttactggagcagctggagctagggggagagtcagcctgaggtcctgcagctcctgttatcattcatgatctccacattattgggtggccaaaagtggaaagaagggctttgtgattttccatgttattttactcagcgactcttcccctagcacwcaccatgtggcagctaccttggtaggttcaccatgtggtaccaaaaatgattatgttatccctgcatcccggcgggagcccacgggctgaggacagcaggacaaaaacactaaagcaa

SEQ ID NO: 142492 - DNA, 531 bp, Homo sapiens
ctgttaaaatgtttaatgagtgcacagcacactcaaagaggctgaggaaaataggaatcaagggaggtttccgaggttacttttatggcccttggagtcttcagatactgctccttttcccaggggtccctgaagagccactgccttgagaattccccagtgcaggtgcctgttttgtgatgcttccacctgggacttcagggctagtggaggcctctaggtggcggcagaccccgtgtttcttatgcccgctgggctttactggagcagctggagctagggggagagtcagcctgaggtcctgcagctcctgttatcattcatgatctccacattattgggtggccaaaagtggaaagaagggctttgtgattttccatgttattttactcagcgactcttcccctagcacacaccatgtggcagctaccttggtaggttcaccatgtggtacyaaaaatgattatgttatccctgcatcccggcgggagcccacgggctgaggacagcaggacaaaaacactaaagcaa

SEQ ID NO: 142493 - DNA, 572 bp, Homo sapiens
gcccctctctgacaaaatttccctgaattttagcacatgttgacaacaaatactatctcacaacttttgtgaaccagaatctcgatatagcttagttgggtgcctctgcctcaaggtctcttacgaggctggggctgtgatttcaactgaagctggatttgaggagagatcagccttctatctgcctcatggaaactggcacgattcagtgtgaactgagagcccgagttccttcctctcgattggcctgggcatctcctcagttctctatcatgtgggtctgtgcctagagcatcttaggacactgcagatcacttcctcatcttgaggattacaatacagagatgaaaaatgaaagagatagacagacatatgcagagaaaaagagagaaagggagacagagagattgagagaggacgcacaggacagagcaagtaagaggaaaataatagctgttttagaaatataactttggaagttgcagtagactatgtgattycccaccatgttcacataccaaaaccttaatccccagtgtaatggccttagcaggtcagaggtaattaagtcc

SEQ ID NO: 142494 - DNA, 551 bp, Homo sapiens
aattaacagagtctcaggatctgggcaacaataacagaagaactaacatgtgtataattggagctccagaaagaggaggcagagactggtscccaacaacactgaaaaagtaaaaactaaaaactttctaaatttggcaaaagatataaacctagagattcaagaagcagagtgaatcccaaataggataaagccaaagaaattcatgacagacacatcataattaaacttgtgaaaactaaagataaaaaaaaatcttgaaggtatccagaagcaacacattatctctaggaaaacaccaatttaaacaacagagaatgtctcatcagaaatcacggaggcaaggaggaagtattgcaacatttttcgagtactgtaagaaaataattgtcaactgcaaattatataggcaaagaaaatattcttcaggaattaagggggaaataataaaattctcaaatgagggaaaagtaagagaacttttgtcagcacacttaccttaagaatggtttaagaaattgctctaaataggaagtgataacagaacaagt

SEQ ID NO: 142495 - DNA, 552 bp, Homo sapiens
cgaaccatatcccagccgaatcatatcccagcagtttgggaggctgaggtgggcggatcacgaggtcaggagttcaagaccagcatggccaacatggcaaaaccctgtctctattaaaaatacaaaaattagccaggcgtggtgctgggtgcctgtaatcctagctactcagaaggctgaggcagaagaattgcttgaacctgggaggcagaggttgcagtgagccaagattgcaccactgcactccagcctggaatgttcaattttgtaagataatgccaagtggttatcatggccctacaaatttgtatttccactagtaacatataaaaggttttgttgatccrtagtatctccattcttttacatagactgtctctgatttttgctcctacaatgagtatacgtcagtatcaaaacttggggcttggtttgcatttccctaatgacacaatggggctgaacatctcgtcatagatgggtttcattcaacattggttgtttcctctgggggggtgttaatttccctgcacttctaagctgcacacatgt

SEQ ID NO: 142496 - DNA, 634 bp, Homo sapiens
gttgtttcctctgggggggtgttaatttccctgcacttctaagctgcacacatgtgtggaccctgagagctcccacttgtaccagtgaagcccaggagcggagggaaaaaatgcacatgattgttgcatgcaggtgccgttgccytgaagtcagtccaagccctagggaactatctataccagcatggtagaaatcagaggtaacgctgagaagacttaattgagaaataagaggcatattctacaagcctatatttgttgtttcgcctctttgatccaaaaataataatattttggaattgaacaataagaacacatggacacaggagggggaacatcacacaccgggggaagcgggagggatagcattgggagatatacctaatgctaaatgacgagttaatgggtgcagcacaccaacatgacatatgtatagatatgtaacaaacctgcacgttgtgcacatgtaccctaaaacttaaagtataataataataaaaaaaattagcattatgtgttaaaattgaaagggaataagataaaatttacatacacatacacataaaaacttgatattttatgttagtggctagtgtatattatgtatatatataaaatgtcaatgaataaagtt

SEQ ID NO: 142497 - DNA, 528 bp, Homo sapiens
acaaaatagactccccagagagtcttttcaagtcttctggaaaggggtcttggaatcagagattgtatcaaaagtacactgggtgatactaatgtgcaggcagatttgaaagctgatgggttaaatagtaggtgagacacagctgaaagaacagtgatgtttaatttggcaaatgtaagtgtcaacacctgactcaacacataccaactgcccccaacccaggctgggagatgcagtgtgggaacagttccygtgaagacaactctgagatctgggtggacccaggatcctttgtgtggtcagggttctgcagctctaaagaatgcttaggagagagaggtgagagtcctgccctgcattcctgagagagagctgcattctggaacctctactctaagagctacgtggacagtgggaggtgtctaggccagtgcttcccacacttcatgtggccaggaaacatttggggatcttgtttttgttgttgttgttgttgttgtttttgtttgtttgtttgttttagagata

SEQ ID NO: 142498 - DNA, 593 bp, Homo sapiens
ttttaagatgccaacttgcaaccctcccttgccaacccataccttagttcctatcacatagtaggtctcaataacactctacttttcctttcagtgtaaattcagaggaactattcaataatggcaataatcaggaacacaatggcaattaacacattgcagatactgctccaagygctttctatattttaattcaccgaatgcttatgaccaccccatgagatggatactatttcacacgggaatttggaaagctcacccaaggtcacaaaggtactaagtagcaggggtagaaattaaacccagacaatggggcttgagcttgcttctcagtccactgggagtggttctcagactgaaattacctggtgggacttaaaaatgcagcctgtaggaccccacccccagagcttctgattctctaggcctgagtggtgcctgagaatctgaattttcagaagattcccaggtgacattggtctggggaccacactttgagagctactgatttagacctccgagttaaagggaaaaactggactccatgtgaactccaaggtcccttggagcttcaggatccctgtgtttcccaa

SEQ ID NO: 142499 - DNA, 593 bp, Homo sapiens
ttttaagatgccaacttgcaaccctcccttgccaacccataccttagttcctatcacatagtaggtctcaataacactctacttttcctttcagtgtaaattcagaggaactattcaataatggcaataatcaggaacacaatggcaattaacacattgcagatactgctccaagtgctttctatattttaattcaccgaatgcttatgaccaccccatgagatggatactatttcacacgggaatttggaaagctcacccaaggtcacaaaggtactaagtagcaggggtagaaattaaacccagacaatggggcttgagcttgcttctcagtccactgggagtggttctcagactgaaattacctggtgggacttaaaaatgcagcctgtaggaccccacccccagagcttctgattctctaggcctgagtggtgcctgagaatctgaattttcagaagrttcccaggtgacattggtctggggaccacactttgagagctactgatttagacctccgagttaaagggaaaaactggactccatgtgaactccaaggtcccttggagcttcaggatccctgtgtttcccaa

SEQ ID NO: 142500 - DNA, 408 bp, Homo sapiens
ctatgggaagttaggaggaaaggtattttcccttttctcccaacatgaatcagattttccctctaaatagctcaactgttgggctccgagagaaaagaggtgcactgtgatctggctggggcaaggacgctgctccctctgtgtgagccactccctccccctccastgcacccttggtggcctgggctacctccagtgtgtcacagtcccacttggtggaaagcagaggtctggctcgaccagctctgagtgcctcagtcctgcaggtctgaaacatggtggctcctccgccagactatgaacccaccaccaccttcccagaaacactgctgtctgatgggtttcacttttgcatcgggtttgagctacatcaaggacccaattcagagaaagagcctttttcctaat

SEQ ID NO: 142501 - DNA, 440 bp, Homo sapiens
ctcaacatccggagagaccctgccttgtatcagcacaagactcctgggtttaatgatgmttgaccctagcttctttcaagactttggtcttcatttgtgcatctgcagggagcagggagcatggagggaacagcaagggctgggagtgggtaccaagtcaaattccagcaccacaacagggagcctcgtcttcagccagttcattcaactcagggggcttcagcgtcctcactggtccagtacaggcaacattccccctggcctgctgtggggtaacaggaaaaaacatggggtgccgccaatgacattgggagatgtatctgggggtgaggttctggagagcttcaagccctgggggatttgggtcttgaaggcacactgtggacctggagcagcactagccctgcatggcaccaggaccctgcccctcaccatgaacc

SEQ ID NO: 142502 - DNA, 457 bp, Homo sapiens
gagcccaacaaagtatgaacacagcctgtctctctctctctctgtttatgtaaatgtattagggtaattgaggattgggtgtattttttaaggtgcctcattgctactataggtttatttcattcttaacaacgaacaaraacaatttatttccctccttctgctattcagctaggtctatactaaaactatacagttgtattctgaaattgaatgaagaatgtttcatttactccaataaagttcatcatatgtatcctggtccatcatttcaatactttgattttttttttgaaacttaatttcctcatccaatacattcactagtcatctaaaatttgcatatctgcaattttgatgagtcttttatgactcgataagggaggcatacatataagcctataattgggtgtaagtgagacaagtatgttagggaagctatgtacagggataggaa

SEQ ID NO: 142503 - DNA, 433 bp, Homo sapiens
gcaagtggcaacctaaaacacatcctagttatttcacagagtactcagggggcaggcaaatcaaagaataggggccttgtttttccttgagtaatgcaccaagaaaactttcagaggtggccgtcaataaagctaaagttgtatctctctgctgaatgggcacaccccatttcatcttctcttctccaggtcacgggatcacctgcctttttggctgctgcacctgaacagagtcatcatgcctcgaggtcagaagagtaaactccgtgccagggaaaaacgccgtcaggcccgaggagggctggaagatttgatagatgctctggacattttagaagaggaggaagaatctcccccctctgcctctgcttgtttgaaggatgtttyccagagttcacttgatggggcatccaacaatccccatggacttcgg

SEQ ID NO: 142504 - DNA, 569 bp, Homo sapiens
ggagcatacaacacttacaccaagcatttatgggttttattgacttcatttgagatgtggggccatggagagggtcccatgatccttgcttggtgttggccaactcattgaattctctctttgacttcacccttcccttttctactcacctcctctgtcatggattgctctgggaattctgagccctagttcctttattttgcagataaccttcactcttctctgcaacgaatcccaaaagtatgtagttgagctgactgcaaggtgcttgagaygccagagactccacaaatgggatttggcctctggaaagtggtggtagttccagatttatgtggatgttactttgtttttccctataaaatatattctttaaattatcaagctcttggctcctggatgcagtcctttgctggtggcagtgggctgggtactgtcaccggggagaaatgctgcccacttagagaaagagaaactggttctctttaagaggcagagggaggtttccagtgccagtttgtttggaggcaaaatggctgttgtattaaaattgcccaaacttgggctgg

SEQ ID NO: 142505 - DNA, 569 bp, Homo sapiens
ggagcatacaacacttacaccaagcatttatgggttttattgacttcatttgagatgtggggccatggagagggtcccatgatccttgcttggtgttggccaactcattgaattctctctttgacttcacccttcccttttctactcacctcctctgtcatggattgctctgggaattctgagccctagttcctttattttgcagataaccttcactcttctctgcaacgaatcccaaaagtatgtagttgagctgactgcaaggtgcttgagatgccagagactccacaaatgggatttggcctctggaaagtggtggtagttccagatttatgtggatgttactttgtttttccctataaaatatattctttaaattatcragctcttggctcctggatgcagtcctttgctggtggcagtgggctgggtactgtcaccggggagaaatgctgcccacttagagaaagagaaactggttctctttaagaggcagagggaggtttccagtgccagtttgtttggaggcaaaatggctgttgtattaaaattgcccaaacttgggctgg

SEQ ID NO: 142506 - DNA, 289 bp, Homo sapiens
ggggcggcatctggccactttagaaccttgcagcgaacccgggwgtccaaagccaacgtggttctgctggtttatctccaatgccttccaaggctccctcctgctgaccaccggaggaggctgagcatcccagcagcctggggtgggagactcagtccctctaccacgcctctgcactgctgcccctttcctcttttaggggctcgccaagtagctgataacagggagccaggatgcacaacacgctgtcatgttctggaccagccttggaccttccacagagccctgg

SEQ ID NO: 142507 - DNA, 544 bp, Homo sapiens
tggcttaaaacaacagaaatttattgtctcacagtcatagaagccaaaatcaagttcaaaatcaaggtgtcagcaggactgtactccctctgaaacctataaggagagtccttccttgcttcctctactttctggtggctcccggcactcttcggcattccttggcttgtagatgcatcgctccagtctctggctctgtcgtcgcatggcattttgcctgtgtgtctccctcttttcttataaaaaacacagtcgcattgaatcaagggctcaccctactctagtttgacctcatcttaagcgattacatctacagtgactctatttccaygtaaggtcacattctgaggtactaagggttaggactccaacatacctttttttggagacacaggtcaacacataacaagtggtaaaccaaaatagacatagccccatgctttcatcaagctagcagtcgagtggggaagtcacattacaagtatgttgagaatttccaaagggggaagtattaatgggaccatacagtaagagaattttaccc

SEQ ID NO: 142508 - DNA, 266 bp, Homo sapiens
cctcaatccctgagaatcattttttaaaagtactgatgccttgtcccatcctgagatctcgaattaattggtctctgttggaatatttttttctaaacttcccagctgactctactgtgcaatggggatcccctcttactagatgaaggaaatggccaggcacatgcctgcagaagctcagggccaggcagacrgagcaggtgcccagcacatgtgagccaaattaaatcagcaatatcggcttgtaccagagccagcctgataag

SEQ ID NO: 142509 - DNA, 266 bp, Homo sapiens
cctcaatccctgagaatcattttttaaaagtactgatgccttgtcccatcctgagatctcgaattaattggtctctgttggaatatttttttctaaacttcccagctgactctactgtgcaatggggatcccctcttactagatgaaggaaatggccaggcacatgcctgcagaagctcagggccaggcagacagagcaggtgcccagcacatgtgagccaaattaaatcagcaatatyggcttgtaccagagccagcctgataag

SEQ ID NO: 142510 - DNA, 581 bp, Homo sapiens
cccttcactttgatctgcatggagctttccagcccattccttgacatactgtcatgtgcccatgctttagctacagtggacaatttgccctttcctgggcacacagacaccttctctgctctgcctttgatcatgtcattcagtccatgagcaatgcctgccagctctttgttcacccagagacttccaagatgtgcttgaaggtccagctcaaaagccacttcttgtcctggctagagcagtaagacaagagaaggatataaatggcatccaaattggaaagaaagaagtcaaattatccttgtttgcagatgatatgatcttatatttggaaaaacctaaagactccacaasaaaactattagaactggtaaagaaatttaaattcagtaaatttgtagggtacaaaatcaacataccaaaatcagtatttctctatgttcaacagtgaacaacatgaaaaagaaatttaaaaagtaattccacttataatatctacacacaaaatttaaatactaggaattaaccaaagcagtgaaatatccctataatgaaaagtttaagacactgatgaaataaat

SEQ ID NO: 142511 - DNA, 595 bp, Homo sapiens
tacccacgtatataagaacaattgattttccagaaagatgcaaaggcaactcagtggagaaaggataatattttcagcaaattgtagtggataagttagatgtccatatgtataaaaacaaacttcaatatatagcttatatcatatacaaaactaactaaagataaattaacttaaaacttagaattatgaaacttctagaagaaaatatgagaacgtctttgagacagaagtaggcaaagatttcttaaatacaatgctaaaagaatgagccctaaaagaataaatggaaagtcttagtgagagccatcaggcaagagaaagaaataaaaggcatcccaataagaaaataagtcaaactatctctcttcactgactatatgattatacatctagaaaaccctaaagacttccaaaaggctcctggaattgataaatgacttcagtaaagtttcaggatacagaatcaatgtacaaaatcagtaacatttctrtatgtcaataaccttcaagctgagggccaaatcaagaatgcaatgccatttacaatagcaacacaaaaatacacaaaaataaaatatctaggaatatatct

SEQ ID NO: 142512 - DNA, 595 bp, Homo sapiens
tacccacgtatataagaacaattgattttccagaaagatgcaaaggcaactcagtggagaaaggataatattttcagcaaattgtagtggataagttagatgtccatatgtataaaaacaaacttcaatatatagcttatatcatatacaaaactaactaaagataaattaacttaaaacttagaattatgaaacttctagaagaaaatatgagaacgtctttgagacagaagtaggcaaagatttcttaaatacaatgctaaaagaatgagccctaaaagaataaatggaaagtcttagtgagagccatcaggcaagagaaagaaataaaaggcatcccaataagaaaataagtcaaactatctctcttcactgactatatgattatacatctagaaaaccctaaagacttccaaaaggctcctggaattgataaatgacttcagtaaagtttcaggatacagaatcaatgtacaaaatcagtaacatttctatatrtcaataaccttcaagctgagggccaaatcaagaatgcaatgccatttacaatagcaacacaaaaatacacaaaaataaaatatctaggaatatatct

SEQ ID NO: 142513 - DNA, 435 bp, Homo sapiens
gacactgatgatgttccaatgattcttgytggtaataagtatgacttggaagatgaaagagctgtagggaaggaacaaggtcaaaaatctagcaagacaatggaacaactgtgcattcttagattcttctacaaaattcaaaataaatgttaatgagatcttttatgacctagtgcggcagattaacagaaaaactccagtgcctgggaaggctcgcaaaaagtcatcatgtcagctgctttaatgtactaagtgcattgcagctctgagtcagctctgaagaactgttgtccaattcaatagtgccaacattccaactttgttaaacctaccagcatcttaaatggactttcctgtggtggtaccctttaagagcatatgaaagctactatatcactttgcacattctaatcactttcaagcatcacaagagag

SEQ ID NO: 142514 - DNA, 533 bp, Homo sapiens
aaatgaaaataagaatctccttatacatctccatcagaagtcttgggtagacaggtgcattgtcaataaccagtaatattttgaaagaaggctttttctctgagcagtaggtaacaaaatagtgatcttaaaatgttctgtaaaccatgctataaacagatgtgctgtcatccaggctttgttcttccatttatagagcacaggcagattagatgtaacgtaattcttaagggacccaggattgttggaactagagatgaccattggcttcactttaaagtcaccaggtgcattatcccctaacaagagagtcagcctgtcctttgaagctttgaagccagrtattgacttctctctagttatcaagctcctagatagcatcttcttccaatagaagagtgtttcatctacactgaaaatctcttgtgtttaacatagccaccatcatcagtgatcttagccagattttctggataacttgctgctttaacttgcacttttatgtaagagagactgtttctttcctaaaacct

SEQ ID NO: 142515 - DNA, 507 bp, Homo sapiens
aagctttgaagccaggtattgacttctctctagttatcaagctcctagatagcatcttcttccaatagaagagtgtttcatctacactgaaaatctcttgtgtttaacatagccaccatcatcagtgatcttagccagattttctggataacttgctgctttaacttgcacttttatgtaagagagactgtttctttcctaaaaccttatgaaccaacctctgctagcttccaacttttcctctgcagcttcctcacgtstctcagccttcatagaattgaagagaggtagtagggcttgctctggattaggcactagattaagggaatgttatagcaggtttgatcttctaaccagaccactaaaactttcttcgtatcagcaatgagactattttacttcttatcaatttttttgtgttcactggtgtagctcttctaatggtcttcaagagctttttctttgcattcacaacttggctgtttggagcaagagacctgtcttggc

SEQ ID NO: 142516 - DNA, 521 bp, Homo sapiens
tgtgctggcttttattggaaaatggaacgagcattttactccaggctacaattagggttggagggtataggtgcccggatcccaggagatccccagtggactgayttctctccccaaggccatttctacactcatttcagaacaggagtgcagtgacaccaccatggacctcgtggcatgtagatgcctagatgccgccaggagcttgtggtgagactgcttctcctgagtaccttgaataaggtgatacagggccaggcaaggtggctcacacctgtaatcccagcactttgggaagctgaggagggaggatcacttgaggccaggagttcaagaccagcctgggcaacatagcaagactccatctctactaaaaaaattaattagctgtgtgtggtggcacatgcctgtaatcctagctatttgggaggctgaggtgggaggatcacttgagcccaggagttcaagattgcagtgagctatgattgcaccattacactccaacctgagcaacagaatga

SEQ ID NO: 142517 - DNA, 521 bp, Homo sapiens
tgtgctggcttttattggaaaatggaacgagcattttactccaggctacaattagggttggagggtataggtgcccggatcccaggagatccccagtggactgacttctctccccaaggccatttctacactcatttcagaacaggagtgcagtgacaccaccatggacctcgtggcatgtagatgcctagatgccgccaggagcttgtggtgagactgcttctcctgagtaccttgaataaggtgayacagggccaggcaaggtggctcacacctgtaatcccagcactttgggaagctgaggagggaggatcacttgaggccaggagttcaagaccagcctgggcaacatagcaagactccatctctactaaaaaaattaattagctgtgtgtggtggcacatgcctgtaatcctagctatttgggaggctgaggtgggaggatcacttgagcccaggagttcaagattgcagtgagctatgattgcaccattacactccaacctgagcaacagaatga

SEQ ID NO: 142518 - DNA, 447 bp, Homo sapiens
tgtttccccagcattttaaagtaatagttccattatctcctggtttcctttgtttcctataagaggtcaaccatcattcacatcattgtttccttacatgtagtctagctttttttctgtcctggctttcaatattttttctttctctgctatctactaattccagcaatttgactatgatgtgcataggtggtttgtaaactttttagaactttcagatttcccaaaatttgggaagtttgaggattttatttcttccaatatgttttagttattttcttctttctttcatggcctccaattagacatatattagacctcaattttttttcaatttttttctgtttttcacaatggataatttatgtggaacttcaagtttactgacactcctgccagctctaatcttctgttaagaytgtctagtaaatttttcatttcattttt

SEQ ID NO: 142519 - DNA, 583 bp, Homo sapiens
aagtacctatctcctgctatccatcaaagctcaacttaatggctaccttcattaaggtttctggaccagaayatcacacatttcctatttcaacggattcagtttaggttagagttgtctgtggtcaaaaagaatcatctgctttgcttgtgtgttttgtagacagtgtaaggctattgagagaaaaaatattataccttttacttcttttgtagaacagctctgggcttcagttgaagtgaattcaattctatttctgaatggagtatatgcctgtgcagagttataaaacctgattcttatttcagttcttctactaaataactgtgtgatcttgggtaactcattttcagacttttctataaaatgaactcattaaatcaaattatctccaaggtctcttttagttctgcaatggtataatcttagccataaatattagataataacagaaaaagcaaaattatatagcatccactgtataataaacttctttctttgtctgaaatcctccaaaagtattcatcactatacactaagctgaaaactcatggtttttatctgaaatatttacaagtttatt

SEQ ID NO: 142520 - DNA, 553 bp, Homo sapiens
tttccttcctctttgtacaccttaacccctgttctaataatcaatatatttaaatattttactgtattgtaaacactctttacagtttgcttttgttacttaccaagaaattattggcacttttttaaaaactttgaagccacacagtttatacttattgatagcctacattgtaagctccaaggatacagtaataaaagatacaattyttatccacaaagggtttatggtctagtgaacaaaacagtgaattcatatgcataatatagtgggaagtgtgctatgatggatgaattcttgatggtactgcataacccagaatagtgcataaacgcatagagggatgtttatatttgggctgtacaggaaagagcagttcagaaaggagattgaggaggtgtggtcacagaggtagaaaataatagagagaattttatatattttaatgtttcatataatttaatcaatttgaggtagtattatgtgcttagccatttttattagacattatttataaccaattttaactattataaataatgttgcaataaat

SEQ ID NO: 142521 - DNA, 596 bp, Homo sapiens
gtcctacttgggccaatcatttttgacacaatcatgagatgtcttcatttgttcagtttgtatcatctgactacactgatgaccaggggcaacgcttcctctcagagrtagatggaagagagggtgagcaaacaaatctgtaactaccactctcagaaatttctgtagataattattgtgctgcacatttatttattttgtttgtttgtttgtttgtttaaatcaaggtagtggtattgaataacacagcagagtctaaataaccagaattaatccccaatatatttatattcatctcttttacatctctggcatactcaaattcactgttttacctgatatgaaacctccttcttcagtaggcagcataatttattgttgggtaacttttgttcttacaaaaactgataatgtaaacctaaatcttcctcctactttgttggttttagttttacttttttcaagacatgagctaaacataattacctctctcatatcagcccttacatttattggatacactatgttttctccaagtgttttgtcttccggttggacatattcaaaaccgtgtgatcttctgccctggtctcttg

SEQ ID NO: 142522 - DNA, 634 bp, Homo sapiens
tcatttttgtctctatactataccttgaagatacatgaccttgtgttttataattcttacacgaagtgttaccttattctaataaattttcactcatactcattcaaaacatttaaagcaatcttaggaattaaaagatcaattttacagtttcatgtatgtacagttatggtttgaggctacgtatatgtgaggtcaaaagtattytgatgaagagatttaacaagattactgttataaggagaagtcttgtgatttttatcagtgaccttagaaatatgccaattatctacacaattaggattatgtattttatcaatttaaataataagctgcaattttaaaatataaagagtatatgatgggaaatttcatttgttactgtattgggatgagcaaactatggcacacatgccaaatctggccggctgtcagttttgtaaatacagtttatggtagcatagctatactcatgtatttatcaattgtctatggctacttgatgctaaaatagcaaatcttagtatttgcaatcaagaccatacgacctataaagtctaaaatatttactatccagccctttgcctacaaattttgcttgtccctgtcttatataatattccgttctgttgag

SEQ ID NO: 142523 - DNA, 634 bp, Homo sapiens
tcatttttgtctctatactataccttgaagatacatgaccttgtgttttataattcttacacgaagtgttaccttattctaataaattttcactcatactcattcaaaacatttaaagcaatcttaggaattaaaagatcaattttacagtttcatgtatgtacagttatggtttgaggctacgtatatgtgaggtcaaaagtattctgatgaagagatttaacaagattactgttataaggagaagtcttgtgatttttatcagtgaccttagaaatatgccaattatctacacaattaggattatgtattttatcaatttaaataataagctgcaattttaaaatataaagagtatatgatgggaaatttcatttgttactgtattgggatgagcaaactatggcrcacatgccaaatctggccggctgtcagttttgtaaatacagtttatggtagcatagctatactcatgtatttatcaattgtctatggctacttgatgctaaaatagcaaatcttagtatttgcaatcaagaccatacgacctataaagtctaaaatatttactatccagccctttgcctacaaattttgcttgtccctgtcttatataatattccgttctgttgag

SEQ ID NO: 142524 - DNA, 185 bp, Homo sapiens
attctaggctacatatggatttattttttatcaggattaaacaccatggctagaaacatacagtctctttctaaatgcrtacttttcagggaagtcagaggttacatttagtatggctttctcatgggaaaacttagataagctttagctcataaaaatatttactttcaatgatcaattaaact

SEQ ID NO: 142525 - DNA, 456 bp, Homo sapiens
atctgaagctaatttttagtggcagatataaatgaaagacttacaattacagcaaatacaatcagcgatactgaggataggctttaagagaaacaaacaaaaagaagaggaaacgaacaacaagataaaaaaaggggatagacatggaatatggatcactagatcatggagcacagtccataatgattttggtctccagaagaaaagattgaggaggaggagaaagaggaggatgaggaggaggaaaaaaaggggaaggaagagtcactactaataaaaayaaaataattatgtgcttaccaaacattgtttatacttaaatgtattaaacatagagaattatcctcaatgtaagagcaaaatgagggcaagtgtgatcactatagtgggaaagtgaagaaaacttaattcacaaaaatgagaggcatcagttaagatttaatcacaacaaacact

SEQ ID NO: 142526 - DNA, 456 bp, Homo sapiens
atctgaagctaatttttagtggcagatataaatgaaagacttacaattacagcaaatacaatcagcgatactgaggataggctttaagagaaacaaacaaaaagaagaggaaacgaacaacaagataaaaaaaggggatagacatggaatatggatcactagatcatggagcacagtccataatgattttggtctccagaagaaaagattgaggaggaggagaaagaggaggatgaggaggaggaaaaaaaggggaaggaagagtcactactaataaaaataaaataattatgtgcttaccaaacattgtttatacttaaatgtattaaacatagagaattatcctcaatgtaagarcaaaatgagggcaagtgtgatcactatagtgggaaagtgaagaaaacttaattcacaaaaatgagaggcatcagttaagatttaatcacaacaaacact

SEQ ID NO: 142527 - DNA, 582 bp, Homo sapiens
cttatatcaattatttcatttccttatcttattacatttactagactcccccaagtcaacatttaataacattgtacacaagtcagaccaatcttattcttgattttaatagatcactgtttcactctttaggataatatttactgtgaatttttgtttttttgattttattgtttttaagcaattttattttattcaaattctatagctttctatattttattagaatggtattgatttttttatttgccttttcagcakctatcaggattttctcttttaattagttaacttaatggcttatttcagtagttatgtatatttgcagaaaggaggctcaggaagaacattcaaaatttgaagagatggcctctggagatatgtggagcaaggagaggagaggctgcttctgctcagcaagtgttatttgagctatctatgttcctctttctttaggagctgtgagttaggtaaagatgtgtgaagagtccttcctgccattgaagcaggcagcataccagcatttgccatcctttaggcagagaagactaggaaagaggaaggcatcaaccgggtgaaaag

SEQ ID NO: 142528 - DNA, 582 bp, Homo sapiens
cttatatcaattatttcatttccttatcttattacatttactagactcccccaagtcaacatttaataacattgtacacaagtcagaccaatcttattcttgattttaatagatcactgtttcactctttaggataatatttactgtgaatttttgtttttttgattttattgtttttaagcaattttattttattcaaattctatagctttctatattttattagaatggtattgatttttttatttgccttttcagcatctatcaggattttctcttttaattagttaacttaatggcttatttcagtagttatgtatatttgcwgaaaggaggctcaggaagaacattcaaaatttgaagagatggcctctggagatatgtggagcaaggagaggagaggctgcttctgctcagcaagtgttatttgagctatctatgttcctctttctttaggagctgtgagttaggtaaagatgtgtgaagagtccttcctgccattgaagcaggcagcataccagcatttgccatcctttaggcagagaagactaggaaagaggaaggcatcaaccgggtgaaaag

SEQ ID NO: 142529 - DNA, 596 bp, Homo sapiens
atttcagtttagaatgaagacaagataatcttttcctgctactttgtctatatccttttggtgctttgaaatatataacatcaaaacatactatccttctcctttggtgatttgtgtgtgtatatgtgtacgtgtatgtgtatgtgtatgtgtgtgtcataaaatagtcaaaatggcatctgaaattcattcatctctatgaagatatatattagattttgcatttcctttaataatttctctcacttctacttccccttcaccttactgaaacctcaatttgcttttttaataagaatacaacaagagaaaaagctgcataaatgctctytggataaaggagagcataattaacgaactgcctaacttactaaatacacaaagtacagacaagcattggcagttctgttctgcttttaaggtaagtagagagactggattgcagtagagataacagaggtacaattcttcactctggaaggataacgtattttaaaacatagttttactttgtgggattcggtataatgaagatctcgctgaaagatataacttacatgggaaaaagcatcagatcttctttaactatttaaaga

SEQ ID NO: 142530 - DNA, 596 bp, Homo sapiens
atttcagtttagaatgaagacaagataatcttttcctgctactttgtctatatccttttggtgctttgaaatatataacatcaaaacatactatccttctcctttggtgatttgtgtgtgtatatgtgtacgtgtatgtgtatgtgtatgtgtgtgtcataaaatagtcaaaatggcatctgaaattcattcatctctatgaagatatatattagattttgcatttcctttaataatttctctcacttctacttccccttcaccttactgaaacctcaatttgcttttttaataagaatacaacaagagaaaaagctgcataaatgctctctggataaaggagagcataattaacgaactgcctaacttactaaatacacaaagtacagacaagcattggcagttctgttctgcttttaaggtaagtagagagactggattgcagtagagataacagaggtacaattcttcactctggaaggataacgtattttaaaacatagttttactttgtgggattcggtataatgaagatctcgctgaaagatataacttacatgkgaaaaagcatcagatcttctttaactatttaaaga

SEQ ID NO: 142531 - DNA, 449 bp, Homo sapiens
aacttacatgggaaaaagcatcagatcttctttaactatttaaagaaatcaagagtcacttaaaaattatttacaggtggattaaagagctaaatgtaaatggcaaaattataatatccttagaagatgataaaaagactacctctatgagcacagggaaagaaacraaacagaacaattttcatagaataacccaaagagggaacatcaaagaaacgattcatttaaataaagaactttcatttgtaaacaaccaaaacaccataaaaagaaaaaaaaaaaaacataaatttccaattgggaaaagatattgttaacatataaaattgaacatatgtaactgttcaaatatatttttaatactcctagaaaataacctaagaaattgccaacagacttgaacatataattcacataagagaaaacccaaaggaccaataaaaatataa

SEQ ID NO: 142532 - DNA, 393 bp, Homo sapiens
agaaataggataatgggcctatcacctgcatgatttgccttctgtacctttttacatgaaccatctgcaaaactgtagagagctgctccagcaatttcaaggtctagattatgtcacccwtaagtatttgcccctctgatagaaatatcagtatttctgcaatgacttcaacagaaaaacaggacaggaatgaaaagacaatagactttaaaaactactttgacattgcaaggttgttcagttcataaaacaaactttaatgtgtagaaggagttgcatttatcattttgctctttttatttctaatatttactcactttactcatactctgtacaaatatatattaaaatttataaatgtatgcactaaaatttattagtattatgcattaa

SEQ ID NO: 142533 - DNA, 393 bp, Homo sapiens
agaaataggataatgggcctatcacctgcatgatttgccttctgtacctttttacatgaaccatctgcaaaactgtagagagctgctccagcaatttcaaggtctagattatgtcacccataagtatttgcccctctgatagaaatatcagtatttctgcaatgacttcaacagaaaaacaggacaggaatgaaaagacaatagactttaaaaactactttgacattgcaaggttgttcarttcataaaacaaactttaatgtgtagaaggagttgcatttatcattttgctctttttatttctaatatttactcactttactcatactctgtacaaatatatattaaaatttataaatgtatgcactaaaatttattagtattatgcattaa

SEQ ID NO: 142534 - DNA, 539 bp, Homo sapiens
ggctgtttgtcaaagttgaagggtaaatttagtgacagcttagatctggaaatcctgaatgtgatttgataaagataaatataataagacaaaaagtgggagagamccctttggaattacagtgagcatcctaattagagaatgtgtcccacccattattatagatcttaagactgagttatcacctcactttatgaccatgctttcaatggttagacctttagattgtgactgcaaagcaattagacctttgattcttctttttgaagccgcagtgaaacacctataaacaaaatggtccttaggcatttaaccttgcagcccccatgggggtatatttaaagtgataagaccttctttatgaaggtgagattgatggtggaggaaagtcaaaagacattgaaattgcacctgccaaataaagtgattctacttttcataaactaactccagaagccatttttttgtctcttaggaaagttagaagatagtggaaaatgtctatttacttgtaatgaagaatcatgaatatcccaact

SEQ ID NO: 142535 - DNA, 539 bp, Homo sapiens
ggctgtttgtcaaagttgaagggtaaatttagtgacagcttagatctggaaatcctgaatgtgatttgataaagataaatataataagacaaaaagtgggagagaaccctttggaattacagtgagcatcctaattagagaatgtgtcccacccattattatagatcttaagactgagttatcacctcactttatgaccatgctttcaatggttagacctttagattgtgactgcaaagcaattagacctttgattcttcttttygaagccgcagtgaaacacctataaacaaaatggtccttaggcatttaaccttgcagcccccatgggggtatatttaaagtgataagaccttctttatgaaggtgagattgatggtggaggaaagtcaaaagacattgaaattgcacctgccaaataaagtgattctacttttcataaactaactccagaagccatttttttgtctcttaggaaagttagaagatagtggaaaatgtctatttacttgtaatgaagaatcatgaatatcccaact

SEQ ID NO: 142536 - DNA, 504 bp, Homo sapiens
atacaattttggagctcaatgggtccttacagttaatttgatcttttacttgacaggtgatgaaactgatctggagcacttaagtgagatgtctgttaactttggcatgacagagtcagattctgaatccaaatcatctatgtcctagccaatgcctgactcacaagttcacacagaaagataattgtgcctctttcacccttcatcctcaattatagcattgtggattactacaaaaaacacagttccacctccgtgactcccatttttcttccatcatgttgcaatgctcctcttccctacttcacaatcaaaaattcaggccactgctgagactatcctgtgttagaaataggcagtggctgtgcatttaaacaaaggtctttccagaattctcatttggtycctggttgcttggcaaggccatctctctttctcttagtcagtatcactcagcccattgactggtgtaggctctcataaacttccactgagcacctacca

SEQ ID NO: 142537 - DNA, 548 bp, Homo sapiens
ttacctaatgaggttgatacctaatgcaggtacattgattaattttgatgaatctgttactaaaatgtttaatgttttgtcaaagaaaaactttcttggcatttacaaatatgtaaagctggctctatgtgtgtgactgtcagtgtgatacaatttgagattcatgaagaagtacaaggccctagttccactgaactgttttgtttcctagaatcttctgataattaaaatcattttcaagataagcattatcttttattgcagaccactttttaagtgtagatatcacaaagatgggtagcatacaaatttattaactttttctataacttaattcatcaaaataaatatctaaattttaaaaacatcactcatagatccctcagttacagaaaatatctcattcatctttgtgttcacagtacatagaaaagtagatagtaggcacttaattttattcaaatggwtcaatgtataaatccatgcatggataagaaagactgttctttcaaaagcatgctagtgtgtatttagttttggggtttgtg

SEQ ID NO: 142538 - DNA, 476 bp, Homo sapiens
tacttgatcagatgattaacggtattccatctgctttccaaatattcccaccttccactaattcctctgaaattttgccatttcagtcaggctgaaatttattagcacccacttactgtgatttacattcagaatgatttgcatgcctcttgcctgggctcctgcatgcctttattaggaatgcagcttatttggtggctcatgtgatttataagcatttggcaagtctgcccttctrttctttttttcaccttttgatttatgcaagggcagagttatattcctgaggctcatccattccctacgaaattaatttttttaaactgaagtctccccatttggttaaaaccaaatgtgacaaattagattcaatatccttttcttggatacaacaaaaacagtagttataattaggacttctctttggtaaaattttgaattaggtgaagcttgtatacagtggctgtgggctcatg

SEQ ID NO: 142539 - DNA, 476 bp, Homo sapiens
tacttgatcagatgattaacggtattccatctgctttccaaatattcccaccttccactaattcctctgaaattttgccatttcagtcaggctgaaatttattagcacccacttactgtgatttacattcagaatgatttgcatgcctcttgcctgggctcctgcatgcctttattaggaatgcagcttatttggtggctcatgtgatttataagcatttggcaagtctgcccttctgttctttttttcaccttttgatttatgcaagggcagagttatattcctgaggctcatycattccctacgaaattaatttttttaaactgaagtctccccatttggttaaaaccaaatgtgacaaattagattcaatatccttttcttggatacaacaaaaacagtagttataattaggacttctctttggtaaaattttgaattaggtgaagcttgtatacagtggctgtgggctcatg

SEQ ID NO: 142540 - DNA, 565 bp, Homo sapiens
ttatcttttattgcagaccactttttaagtgtagatatcacaaagatgggtagcatacaaatttattaactttttctataacttaattcatcaaaataaatatctaaattttaaaaacatcactcatagatccctcagttacagaaaatatctcattcatctttgtgttcacagtacatagaaaagtagatagtaggcacttaattttattcaaatggatcaatgtataaatccatgcatggataagaaagactgttctttcaaaagcatgctagtgtgtatttagttttggggtttgtgctggtggggttgattggttggtacaggctactgagctgtgaatgggatcggaatttaagtggttgaagcacagaatactgaaaaatatttttcctaccttataattttccatcttttctctggtgacatcaaacagccatttgtctagactgtgacttaaggtctgtcacaatctacagaggacaatcttggtcttatktatgttgagaattggggcagaattcctcccctgagccagagagtttcttttccaccagaggcatta

SEQ ID NO: 142541 - DNA, 400 bp, Homo sapiens
cattttaaatcatttattccccgttgcaaaggtggacactacagagtagccatactaccaattgtattgcatgaaacartgggcatctatgagatgactggacaaaatataagacaaaatttggagacgtacatacttgttgtcatgttttttatagtatatttaaacttcttatatcagttaacccacatgaagggtaaaactataattttcatctcagtgtacaatgttcaaatcatctcctctaatctgccctatccttgagagtgagcttgggtacataacaagcctgagtattatctctaccttgcaaataaatataaaagccaagaaatttaaggtgactcaccctatatggcatagttgtaattcttgttatagactacctacaacaatatac

SEQ ID NO: 142542 - DNA, 557 bp, Homo sapiens
tcattagagaaactgtaagctgaaaaacagataacagctggagaaagggaaaaaagccatttgcagatgagaaagtggtgagggtagaactaattggttcttcactgaataggtctggctttctttcccaatcacccagggccacattttgcccagaacygatgcccatgagcttctggattcttgctgcagttgccaggtaatacttaccattagagtcctaatggaattagtagaaatgacagactgttcaataaatcacacactagtctcttccatttgaatgagaattgactggcacaaatgactgattaacgttgacaaagccatatgggttcaaatcatattccttttgttcatattttcaaacaatttaaattgtatttttcttgaagttccatcattaagattttgtttgcttgttttgtttttttccagacagcataggagaaaggaaagtaggattaattctcaggcctaacttgcactggctgtatgatctggggaaaaacagttaacctttaagcctgtggttcctcatctgtaaaatagtttat

SEQ ID NO: 142543 - DNA, 573 bp, Homo sapiens
tggagtcgtcatcaagacagtttcttcaaatccttcaaatatttccagcctcacacagatacaatatattttggccttcatgatggttaattttacctacgaaattgactgaattaaggaatgcccagacagctggtaaaatattatttctgggtgtgtctgccagagagttcagaagagattggctcttgaataggtagattaaataaacaagtcttcccttaccgaagtgggtggacatcatccaatyagttgagggaccagattttgggggtgggggggaagcaaagaaatggaagagcaaattgctttatctttgtttgagctgggacatccatcttctcccattctgggatataggtgttcctgattctcgggattggactcaaaccaggacttactccatgacttcctcccaactcatccaccctcatccccagttctcaggccttcagccttagattgaattacaccaccagctttcctgtttcttctagcatgccaatagcagattgtggacttcttagcatccgttttcagataaaccaatttgtataataaatctcttacatt

SEQ ID NO: 142544 - DNA, 579 bp, Homo sapiens
agtctaaagtcttctccgtagaagtagctgctcagcagagattcacttaagtcttggatattagaggctttatctgtttatttgatgattggaattttctgcccattattgatccctgccactcttatgaacaacttaagtgtctgacacaagtgagttgataaaatagactgtattttttatccattaactggcacttcatatattgtccaaaatctgtcatgagctttgcaacatttccacagcaatagcacctgcctattcagggatcatatatcaaggtgcattcagttcatctgccacaacaggaattggctgctgctgtttatattttcccccccaactcttatcatgaagttaccccttacccttacttttgaaaaaaaatgggacatacttccaggattattttcttcaatatttctctatctaacaaagttatgtgttttataatttttgrtatctgttaggttacatacatttacctgcttgaggaaatatatgagaagaaatattcaaacttgatagatgtcagtaatgctacctaaacattttcaaggcatgtaaaatcaaccccta

SEQ ID NO: 142545 - DNA, 608 bp, Homo sapiens
gaagtatataataatactgacagcaatagcataataaccaaactacatttggttaatagctaaattaaccaaagccaatatttattgatatttaccatgtcataggtaatttttagttataacctcattgaatcattaaaacagctctttggaaaaagaaaagtttagctattcttattttaaaaataaaaaacttgccttaagaccaggagttctctaccagactggggaacatgacaagactctgtctgtacgcataataataataataaaagactgagcctggcagcacattcctgtagttccggtgacttagaaggctaaggcaggagcattacctgagcccagaagttcaaggctrcagtgaactatgatcacatgactgcactacagtctagatgacagagcaagacactgtctcaaaaaataatataaattaaaaatcaaggcaaagaaaaggaatgtaatttgctcaagtttgcataaaaggtagttatgggcaggtatttaaccccatgcctgactccaaagttcatagtcataacaactatgacaagtgcttaaatatggtaagcgcttccacattcattttatttgagcctataaaa

SEQ ID NO: 142546 - DNA, 563 bp, Homo sapiens
ttatagtgtataaataatctgagctaaatgttatttttctctattcagcaaagcaagaatctaataaatatggagagaaatgacttctggtgtgtgtccttgatgtttgacaaaatgagaaaaaaatgcaaccaaatagattagttttaaaatactgtgtgctgacagagatgagattctaaatctattttccacattttagctgaaaatgctttacctgccagaattggtattggccaagacttcaaaagcttcccaaacagtaattactacagtaaaaataagwaggctacaagaaaacaagtaggagcaatccagatttttctactgtttagcagatgtggaaaagtagtaaagggatattgttaagtaacttggatatagcctaaaatttaatatcaatcactgtttttttaataaaagaaaactgctttaagtatatactatgcagaagttattctgccaagtacttagtttgtcaaatattgtgctaaataaaaggagtttaaaacgtgaactgggcatttagtatgcttacagctgagatgaggagagaaagaaag

SEQ ID NO: 142547 - DNA, 456 bp, Homo sapiens
ctaaactctataagtatttttaaagctttaaacagtgattttaaagcatgggcagtgtctcttgttactgaatgtgtttaagtcttaggtcaactttttwaatgtataggtatgtacagatctatactgagtttggaccagaaagaaaaaagaaaaacacaattgctttttagcattttcagcaggttgaaaatcaattgtcagcctgatcatctttatcctgaagaaactgaaaatgctacaaatccctcacagagtttttcaaccactttgccaccaataggtatataaagataacatttaaaactattgcttcttttatctttttaattgcttcccgtattaggatttatcttcctgatacagaaaaacattttttctacagaaactgcaatgttttggaaaaaggaaaatatttccaaaagtattatattaacgaatgtttatgagtttcag

SEQ ID NO: 142548 - DNA, 433 bp, Homo sapiens
tcctttattttacacaaagaggatttttcacccttaagatgctggcccatctgttaaaacctctttctcttaagctgtacctctgcatggcttccgttataagcttggctaaagaattcttaatgaattcccctttatcagcaagactcagctcttgcaaggaggatttgctacttttaattctatayggaacacaaatgggtcaccaaattgttctgtgctataactgacaagatttgttgccatcatttaattacaataaattttcaatttttgagagacttctttaagttatataactgtacatattaggcataaggggtatggaaaaaaatgtgtccaaggtcctgaattggacttgggaaagcaattatttaaagaagggctgagttctgggatagcaagggccatgtaacacatgacttcagagtaa

SEQ ID NO: 142549 - DNA, 578 bp, Homo sapiens
tactgtcttgtgtcctttcatttctccttctggaacttcttgagtaggacaagtctagtagtaacaacatttttcaacttttctttgtatgggaatattttggttggcagatgcttggttgacaggattttagtcatcttttaacactttgaatatatagtctattttttatattcatgggttatacatctggagattcaatcaaccctgtataaagaatattttttaattccacctgtactgaacaagtgcagaagacattttttcttgtcatgattcccaaaataatggagaataacaattatttccataggatttacataatatttggtatgttgaaaaatctaatttgaatttaatctaattgaacttaaaattcaaaggaagatgtgcatttgttatatgcaaatacaatgccattttataycagagacttaagcatgcacaggttttggtatccatgggaggtcctggaaccaatcttccatggatagcaagggacaactgtattggtccattgcattctgaactccaaaatttttaataagaaatctgataattttatagagaatcccatg

SEQ ID NO: 142550 - DNA, 594 bp, Homo sapiens
tcattgctccccagggcatgccaaatgaatctatctgcaaaactagactactgatatctcttacgtgctccgacccttctttctttctctgtgattttaaaagaaaacatgattttaatgttgctgtgagataggcacaggtggagagaagggggtcttgttgatttactattatataaaaagtgatgctttatctacttgatcaacttggtattagactttggtttcatttctctttttcaaattttctaatagtcaattgtcctgggtgctggcacctccttgcttttgcccctagttcacatttaacacggaggctttgaacttcaacttttaaaattttctcattccagaatttgtyagatggccatttgagcaagaggtaaatgagtttcatgtttcaaaaccagggatttaaccaaaagatctctaagggcattttcaggtgagaaaatctatgttaaattttgaggctgattagggtaaatcttttgaagcagatgaagactagatcttcctgctcaaagtaggattccaaacacaggtcttcaaacaaaagactagaaatccagagatgtttcttgtgctgttcct

SEQ ID NO: 142551 - DNA, 647 bp, Homo sapiens
ttgcctttgctatatattactaactttaataaatgtttgtttattaatcaatccattcattccagaaacaattagaagacagtatcttgagttagatgtacttagaatgagtcccaactccaaaattgcaaactttgcacaagtcattcaacctttttgtgactaggtatactcaccaccagtaaattggaaaagtatagtactttagggttattgtgagggttaaatgactacctataagtgtcagaacagtgtctagtatttagtgaatgctatagaggttatgcctcatatgcatcaatgggttgagatctgcctttgtggtatgattgtgatgggcatatccctgttaaatttccatcctggacctcctgtaaatagcagctattattgactacactagcctgaaaaaaactgtttttcatgatattatagcatttgagatttattctcttttctggaagactttttaaccttccagagtcccattggagaggttgatatggagctgagttacgtaaaaattttctaataacattagttcagaaaaagatgtatrgagatggtaagttgattggagataaggtaattaaagaggctatggtcaggcagaagcacatagctgtaagttgtgaccacatgaaaca

SEQ ID NO: 142552 - DNA, 580 bp, Homo sapiens
tgcacattgatggcatagcacagcaggtgtcacacagagccacagacccatttatggtaaccatcaccttcctctttcctgtggccctgtcctttgaggttattttcttaacctccctgaccatgcacattttacatccacatcatgccatccttagtatttaactacgaggtggaatgtatcccaacacatttagataatttatttttagtgctaaaatgtttttataacctagcccagattagatggaaccttttcctcttttccagtgcaagacaagcgattgaaagaagtggatgtgttattgcgggcacaatggagccactgaactgcagtgcaaaaatgcagtaaggsatacagatagaagaaggagaatgtcagggaaagacagcagaggttccatagctaaggtcagaagggacaaggaaagagtgctgcttctctgccctatcccagagagatgaggcaggtaaaaggagggccattgagttggagctttatgcaatctaaggttctttgctttgggagtggatgtatgccttgcaaagaggagatattcctgcctctacttctggggagg

SEQ ID NO: 142553 - DNA, 542 bp, Homo sapiens
tagtgccacacttggtatatgcagcacatcttatcaaagattccaatgatgataattctgtacccttgcatttctacacatcatgactaccacaattcattgtggcattttgatagttaagaattaagctattaaatataaactgtaaatatatgccacaatcgggcacctgtaatcctagctactcaggaggctgaggcacaagaatcgcttgaacccaggaggtggagtttgctgtgagctgagatcatgccactgcactccagcctgggcgacagagtgagactttgtctcraaaaaaaaaattatatatatgtgtgtgtgtgtgtgtgtgtgccacaattattagagaccaggtttagcatgactgttttttaatacagcaagtgaccctgatgtctcttgaactccccgttttagccctagaagattgttaagagaagccaaatgtattgcagcctttgataatgtgattcaaaaagcatctatttcaccagttattctcatatcagcctccatagccaccagtctttgctcatctc

SEQ ID NO: 142554 - DNA, 619 bp, Homo sapiens
ttgcctaagccaatatccacaagaagttttacattgttttcttctagaatttttatggtttcaggtcttagatttaagtctttgatccatcctgagttgatttttatataaggtgagagatgaggatccagtttcattcctctacatgtggcttgccaattatcccaaaaccatttgttgaatagggtgtccttcccccactttatgtctttgtctgctttgtcaaagatcggttgactataagtatttggttttatttctgggttccctattctgctccattggtctatatgcctatttttataccagtaccatgctgttttggtgactatggccttagtttgaagtcaggcaatgcgatgcatccagatttgttctttttgcttagtcttgatttggctatgcaggctcttttttggctccatatgaattttagaattgttttttctagttctgtgaagaatgatggtgacattttgatgcacaatgcattgaatttgtagrtttcttttgaccatatggtcattttcacaatattgattctacccaagcatgagcatgggatgtgttttcacttgtttttgtcatccatgatttctttcagcagtgttttgtagtt

SEQ ID NO: 142555 - DNA, 587 bp, Homo sapiens
gaactaacagtttttcaagaaaagacaaaagattttatgcaaattctctttttaatgcttacaagaaagttaaaactctgttcaggccaaacaaaatgtrtgtctctgggcatcattatgtaacctttgtttatgaaagtggagagaaaacagaagcagagagcatgtattggagaccaaggcttggagatgggtggaagagaaataagaatgaaaaactccaggaagtgtagtagagtcaaagtcgaagttggtttccccaagccatccatgtccactgtgacaatatagaagctaactcacttttagctttaattagtcaccttgcaattaaggaatatggctagtaagcaaggctagtcgggaggccaagagatggcaatggacaaggcaagaggataaacaaaaatgttttctacacctcagcatggcagtgcatgtatctttttaggagagcctcacactgagtacagagaagcaaatggaacctactcaagattgactaacaagtcactgaccagagctaaatattgctattacgacttggttaaagcactcaagagacaagaccaatattgaatgctttc

SEQ ID NO: 142556 - DNA, 587 bp, Homo sapiens
gaactaacagtttttcaagaaaagacaaaagattttatgcaaattctctttttaatgcttacaagaaagttaaaactctgttcaggccaaacaaaatgtatgtctctgggcatcattatgtaacctttgtttatgaaagtggagagaaaacagaagcagagagcatgtattggagaccaaggcttggagatgggtggaagagaaataagaatgaaaaactccaggaagtgtagtagagycaaagtcgaagttggtttccccaagccatccatgtccactgtgacaatatagaagctaactcacttttagctttaattagtcaccttgcaattaaggaatatggctagtaagcaaggctagtcgggaggccaagagatggcaatggacaaggcaagaggataaacaaaaatgttttctacacctcagcatggcagtgcatgtatctttttaggagagcctcacactgagtacagagaagcaaatggaacctactcaagattgactaacaagtcactgaccagagctaaatattgctattacgacttggttaaagcactcaagagacaagaccaatattgaatgctttc

SEQ ID NO: 142557 - DNA, 551 bp, Homo sapiens
gtttgccaagcagctatgatcctagaagttcacttcactagtagcttcttttgcttctactcttaaattaaatgtctgtcttttttgctttcatgccacgtattggtaaagaatatcttcttcctaagaaaagatacagggtgatctatttttggattgttcatattggaaatgtattcaattytcttatacttgattaatagcagggctatgtatggaaacaattttccctcaagattttgaaagcattacttcactgtctcttagtttttggtgctgcttagagaattctgtgccattctgaatcttaccctttgaatatggtgtactttatttctctggatgcacatatatattatctttacgccagtgttctaaagtttttgattcataaagttttgtccaaattataaagttttgtccagttttgaagattagcaaaaataacaagtcagattcgtcacttgtttcactatgaattcaaaaaaagaaaaacaaaaaaaaagacttacaaaacaaagaatctcatgatagcaaggttccctgatgct

SEQ ID NO: 142558 - DNA, 551 bp, Homo sapiens
gtttgccaagcagctatgatcctagaagttcacttcactagtagcttcttttgcttctactcttaaattaaatgtctgtcttttttgctttcatgccacgtattggtaaagaatatcttcttcctaagaaaagatacagggtgatctatttttggattgttcatattggaaatgtattcaattttcttatacttgattaatascagggctatgtatggaaacaattttccctcaagattttgaaagcattacttcactgtctcttagtttttggtgctgcttagagaattctgtgccattctgaatcttaccctttgaatatggtgtactttatttctctggatgcacatatatattatctttacgccagtgttctaaagtttttgattcataaagttttgtccaaattataaagttttgtccagttttgaagattagcaaaaataacaagtcagattcgtcacttgtttcactatgaattcaaaaaaagaaaaacaaaaaaaaagacttacaaaacaaagaatctcatgatagcaaggttccctgatgct

SEQ ID NO: 142559 - DNA, 538 bp, Homo sapiens
gtttgccaagcagctatgatcctagaagttcacttcactagtagcttcttttgcttctactcttaaattaaatgtctgtcttttttgctttcatgccacgtattggtaaagaatatcttcttcctaagaaaagatacagggtgatctatttttggattgttcatattggaaatgtattcaattttcttatacttgattaatagcagggctatgtatggaaacaattttccctcaagattttgaaagcattacttcactgtctcttagtttttgstgctgcttagagaattctgtgccattctgaatcttaccctttgaatatggtgtactttatttctctggatgcacatatatattatctttacgccagtgttctaaagtttttgattcataaagttttgtccaaattataaagttttgtccagttttgaagattagcaaaaataacaagtcagattcgtcacttgtttcactatgaattcaaaaaaagaaaaacaaaaaaaaagacttacaaaacaaagaatctcatgatagcaag

SEQ ID NO: 142560 - DNA, 569 bp, Homo sapiens
tttaggtttgccaagcagctatgatcctagaagttcacttcactagtagcttcttttgcttctactcttaaattaaatgtctgtcttttttgctttcatgccacgtattggtaaagaatatcttcttcctaagaaaagatacagggtgatctatttttggattgttcatattggaaatgtattcaattttcttatacttgattaatagcagggctatgtatggaaacaattttccctcaagattttgaaagcattacttcactgtctcttagtttttggtgctgcttagagaattctgtgccattctgaatcttaccctttgaatatsgtgtactttatttctctggatgcacatatatattatctttacgccagtgttctaaagtttttgattcataaagttttgtccaaattataaagttttgtccagttttgaagattagcaaaaataacaagtcagattcgtcacttgtttcactatgaattcaaaaaaagaaaaacaaaaaaaaagacttacaaaacaaagaatctcatgatagcaaggttccctgatgcttcctgagtctgtt

SEQ ID NO: 142561 - DNA, 538 bp, Homo sapiens
gtttgccaagcagctatgatcctagaagttcacttcactagtagcttcttttgcttctactcttaaattaaatgtctgtcttttttgctttcatgccacgtattggtaaagaatatcttcttcctaagaaaagatacagggtgatctatttttggattgttcatattggaaatgtattcaattttcttatacttgattaatagcagggctatgtatggaaacaattttccctcaagattttgaaagcattacttcactgtctcttagtttttggtgctgcttagagaattctgtgccattctgaatcttaccctttgaatatggtgtactttatttctctggatgcacatatatattatctttacgccagtgttctraagtttttgattcataaagttttgtccaaattataaagttttgtccagttttgaagattagcaaaaataacaagtcagattcgtcacttgtttcactatgaattcaaaaaaagaaaaacaaaaaaaaagacttacaaaacaaagaatctcatgatagcaag

SEQ ID NO: 142562 - DNA, 617 bp, Homo sapiens
tgtcttttttaaacagacgtttttaattttaaggaagtgtagtacaatttatctttttttcttttctagtaagagctttttgtatcctgcctaaaaatctttgcctcctcaaaacattgcgaggatagtctcctctgtgttctttcagaagttttagcttttataattatgtttatgattcatctcaaattaagttttaaatgtggtatgagatagtggtcaaggttcatttaaaaaatatggatatccagttgtgccagcatgaygctttcaaaatactttccttttgctttaatttgctttggtaccatttaaaaaacattgtgaccatatgcttgtcattctgcttctagacttttgattttattccattgatttgtacatttattcttaagttaatatcacattgtcatgatccctgtaactttaccgtaaatcttaaaatcaggtagtatcaatgctccagttttgttctttttgaagattgttttgttattataatgccttttgaaattctgtatatattgagaatcagcctgtcaaaatttcttttaaaaagcctgctggatacttcccactctacagcttttgcacacttattgttaaatttatgcctg

SEQ ID NO: 142563 - DNA, 667 bp, Homo sapiens
tttaaatgtggtatgagatagtggtcaaggttcatttaaaaaatatggatatccagttgtgccagcatgacgctttcaaaatactttccttttgctttaatttgctttggtaccatttaaaaaacattgtgaccatatgcttgtcattctgcttctagacttttgattttattccattgatttgtacatttattcttaagttaatatcacattgtcatgatccctgtaactttaccgtaaatcttaaaatcaggtagtatcaatgctccagttttgttctttttgaagattgttttsttattataatgccttttgaaattctgtatatattgagaatcagcctgtcaaaatttcttttaaaaagcctgctggatacttcccactctacagcttttgcacacttattgttaaatttatgcctgagtattgtgtacttactgattctattgtagatgctattgttactattttattttttttcaactgttcactgctcacttgttgaaatacaatatatttttatatattaaccttgcttcttgtgaccatgctaaaatcacttaatgggtttaggaattttgttgtagtttccttaggatttttgtgtgtgtgtgtgtgtgtgtaatcattatatcatctacaaatgaagataatattctttcttact

SEQ ID NO: 142564 - DNA, 667 bp, Homo sapiens
tttaaatgtggtatgagatagtggtcaaggttcatttaaaaaatatggatatccagttgtgccagcatgacgctttcaaaatactttccttttgctttaatttgctttggtaccatttaaaaaacattgtgaccatatgcttgtcattctgcttctagacttttgattttattccattgatttgtacatttattcttaagttaatatcacattgtcatgatccctgtaactttaccgtaaatcttaaaatcaggtagtatcaatgctccagttttgttctttttgaagattgttttgttattwtaatgccttttgaaattctgtatatattgagaatcagcctgtcaaaatttcttttaaaaagcctgctggatacttcccactctacagcttttgcacacttattgttaaatttatgcctgagtattgtgtacttactgattctattgtagatgctattgttactattttattttttttcaactgttcactgctcacttgttgaaatacaatatatttttatatattaaccttgcttcttgtgaccatgctaaaatcacttaatgggtttaggaattttgttgtagtttccttaggatttttgtgtgtgtgtgtgtgtgtgtaatcattatatcatctacaaatgaagataatattctttcttact

SEQ ID NO: 142565 - DNA, 618 bp, Homo sapiens
ctgactatatggagcttacaatctagtaggagagccagatgatacacacaaacatagtggagcaaaatattctcatcttagtctgtcatttccttcactaccatagaagactcagaaggaagagtagtgttttttcttctcctactctgagaagctttatctgcatttgggctgtgcaatctttaataaatacagtgatgcaagctttcctgaagccgatcccccacctccaacaaataaatgaataggcttttgtttggcaagtaaaggacaaatgacagaggctgctactgagagtagagagggagtactggccttcccagaggaaaaagtgctggtgtgtgtgtttgatctgggagagctgtgtactttaggggtttaggggagtggataggaagggggccatcagctatagcgtgacmggattggtaccttcttcctattcctatggtgtacatatgaaatgctttgaggggtgacaggggttccaaaggaatggcacatggaagcccggagggcatcaccaggaggagcagttttcagagcacaactaaagatgctcagacagcaagaggcagtaacattgacagggctcttacagtgttctggacactgttg

SEQ ID NO: 142566 - DNA, 621 bp, Homo sapiens
aaaggtgctgccaaaggcgtcccctagggacctctcacttgtctgacaccacctttgagagaggtttctgctctctaaaagtctgtagttagaaagcaaaggttccagctgctgatggagtgctcagcctctccagccccacatctatgacaacatttggctmgccagccagccctgccctcctgctcagttctttctgttccacggacctgggaaggacttttctcggttggtgagcatgtcttcatcagaaagtcttcgcaactctgacaagataaaaggcatgaaccaaagaagaacatgatagggagagcaattcaagtaacatgcagagaggtcccaggcaggcagaaacacagggaaagggatgggtatcctcagtggtaaaactggcagccatggccaaggttcatgtcctttcctctcttactgtttgattattagagttttgctctttctcaaatgacactcatggctcaggccagcccaccaacacactagtgctcagtgaagcttcaaggaaggctattgggtgctgagttctttcatcagtctctaggctttcactctcagtagtaattgacttctcaagttctatctgccttcaaagacgagaaaaaa

SEQ ID NO: 142567 - DNA, 560 bp, Homo sapiens
aattgaactaccacaggagcattgcgatgtgtttggtggtcaggagggtggtgagacacggagattcgttgagcattagcagatggccctgaagcttcttaccacgggaccatctgcaggtctgcttgatttataatctcttcctttgcctgctttaagagtgttgattgaaactatacatcctgaaatacacctacctgtttttgctttaaatatccactatgagaaacaccaataacataagcacgactcaaaagaaggagaaactcagactgcctcttccctagccacaggagcttgccttggctctttttactgaatcctcctattcttggtgaattccacaaggaaaagggataaggaggcagctctcgctatatctcagaaaccraaaataaaattgagacaaacctttccatttcttttttgagacggagtctcgctctgtcgcccagactggagggcagtggcgcgatctcggctcactgcaagctccgcctcccgggttcacgccattctcctgcctcagcctcccaagtagctgggactacaggcgcccg

SEQ ID NO: 142568 - DNA, 618 bp, Homo sapiens
aactcaacatttgtaaggcaggactcttcaatttttcctcattttgatctcctcccataccctttaattgtcaaggacatacttttaggtgtccagattcaaaattttagaagcatcctaaatagcctctttcccttaatccccacttatccactcagtgacttaatcttgtatatcattatgatcattttcatatatgtccttttatttttaaaatgacttttgaagattttttttcctataaaagccattttttttctgtacattgcaggaaacaaagctgaaaaatataaaaaagcatacagaatatatcttctataattaaactgcacaaagataactatccattttcagtcctcatttcctgtgtgtttatrtagtaaaaagactgaatcacaatgtttgcagttactatatttcttaatgagaaattgtaaacattttaaatgttgctaaataatttttgtttgctttatgctcatagttgtgtcacaatttatgcaaatatataatgctacgaatttattacccttattttcactattaaaatagttgatatgtaccaacaagacacataggaaaaaattgacagatttttctccatacaaattaaaactt

SEQ ID NO: 142569 - DNA, 618 bp, Homo sapiens
aactcaacatttgtaaggcaggactcttcaatttttcctcattttgatctcctcccataccctttaattgtcaaggacatacttttaggtgtccagattcaaaattttagaagcatcctaaatagcctctttcccttaatccccacttatccactcagtgacttaatcttgtatatcattatgatcattttcatatatgtccttttatttttaaaatgacttttgaagattttttttcctataaaagccattttttttctgtacattgcaggaaacaaagctgaaaaatataaaaaagcatacagaatatatcttctataattaaactgcacaaagataactatccattttcagtcctcatttcctgtgtgtttatatagtaaaaagactgaatcayaatgtttgcagttactatatttcttaatgagaaattgtaaacattttaaatgttgctaaataatttttgtttgctttatgctcatagttgtgtcacaatttatgcaaatatataatgctacgaatttattacccttattttcactattaaaatagttgatatgtaccaacaagacacataggaaaaaattgacagatttttctccatacaaattaaaactt

SEQ ID NO: 142570 - DNA, 565 bp, Homo sapiens
aaccagcacttggataagccatcctacagaggctataaccggtgaacttttcttttgccctaaaaacacccagcactggagatctaaccctcagcatagtctgttcctaagggagaggggagtgtagcctgccaaagccccccttgtgcccaaggaaatgcaagtacagcaccagctgctgaaggcggcaccaccataacccagaaacggatatgaagaggctgtcatctctcaccctctggcctccttagtgtgtgcactcttgcaggctcaacagtggctcttatcagagcacagggagtgtggggtgaaagaaaatgcttcttaggcttatacagtggttccaaccccattgaaggtgaagaatgtatgctggggaagggtgcttttcatgcttctccattccctttgccctgcccttattggctgrctcttactcttaactgccacctaatggactgcagtttcaattcaataaaaagacttaacgattttaaataaatacgcatccaacattggagaatccagatttactaaaaaaattacttctaaacttaaaaaaaga

SEQ ID NO: 142571 - DNA, 567 bp, Homo sapiens
tataaaataactgtatcattagttgcatagcaaaacaagattgtgaagtgtcctttataatcttgtattattacaaaatataaattgtaaagaatattctccttgttgtggccatccagcatcttatgcacaacattgctattaatggagaaattcccaccttgtatattccttttgtccaagaagagccagactctctcccctagattaccttctaggtgcatcacaagggatgtagtaaattgagttctgccaatcagatacattcatgaaagtcttttgtaattgattcatgtgaaaagagagtatgcagagtctgtctttcagtaagcaaggcagaagaggtaccagccttttgatgcaaagaatgaaaaactttgtgtcttgtagtcaccagcatcttcactgcaatctggaaggtctgggctgcagcagsccttgatgtgtggcttgggtaccattcctagttgtatagcccctactttggttctctggctctctaagaaaactggtgagcatcctaatttcctttggcaaagttcttttctgtttaaactaactagagta

SEQ ID NO: 142572 - DNA, 626 bp, Homo sapiens
actaagcagtgggattcggtgtcccatttactaatcactgtctggtttgttaygctctgctcttgtcttccagcaatgataggcctgtagcttgctcaaagctgcagactcatgctggtctagtattacttccatcttctgagtacagaatgacttcaagcaccttcaagggtagtgtttccctgacctgcatgaagcagttttaatcttgtgtatcctgcaggagctaaggtcctactatcatcactcactgcagactcagagcccagcacatctgagacttcagccttacacatggattttaggtttcagttctgtttctggtccccagagtcctctcttgtttctcagtttatttatattgtttttgttggctatttatatattattattgtgtgtttcgagtggaggagatgcattatgtttctaatttactgtagaaaatttggctacgagttcataatgtttaatttttctgaaaaaaaaaatctagcatttcattaattgctttattcccctgccttccttaaaggctacacgctaccttcctcacctatctaaatattgttttgaggaaattacaaagaataagcaggaaagggaaacacagccagtaggaaacaagt

SEQ ID NO: 142573 - DNA, 626 bp, Homo sapiens
actaagcagtgggattcggtgtcccatttactaatcactgtctggtttgttacgctctgctcttgtcttccagmaatgataggcctgtagcttgctcaaagctgcagactcatgctggtctagtattacttccatcttctgagtacagaatgacttcaagcaccttcaagggtagtgtttccctgacctgcatgaagcagttttaatcttgtgtatcctgcaggagctaaggtcctactatcatcactcactgcagactcagagcccagcacatctgagacttcagccttacacatggattttaggtttcagttctgtttctggtccccagagtcctctcttgtttctcagtttatttatattgtttttgttggctatttatatattattattgtgtgtttcgagtggaggagatgcattatgtttctaatttactgtagaaaatttggctacgagttcataatgtttaatttttctgaaaaaaaaaatctagcatttcattaattgctttattcccctgccttccttaaaggctacacgctaccttcctcacctatctaaatattgttttgaggaaattacaaagaataagcaggaaagggaaacacagccagtaggaaacaagt

SEQ ID NO: 142574 - DNA, 626 bp, Homo sapiens
actaagcagtgggattcggtgtcccatttactaatcactgtctggtttgttacgctctgctcttgtcttccagcaatgataggcctgtagcttgctcaaagctgcagactcatgctggtctagtattacttccatcttctgagtacagaatgacttcaagcaccttcaagggtagtgtttccctgacctgcatgaarcagttttaatcttgtgtatcctgcaggagctaaggtcctactatcatcactcactgcagactcagagcccagcacatctgagacttcagccttacacatggattttaggtttcagttctgtttctggtccccagagtcctctcttgtttctcagtttatttatattgtttttgttggctatttatatattattattgtgtgtttcgagtggaggagatgcattatgtttctaatttactgtagaaaatttggctacgagttcataatgtttaatttttctgaaaaaaaaaatctagcatttcattaattgctttattcccctgccttccttaaaggctacacgctaccttcctcacctatctaaatattgttttgaggaaattacaaagaataagcaggaaagggaaacacagccagtaggaaacaagt

SEQ ID NO: 142575 - DNA, 626 bp, Homo sapiens
actaagcagtgggattcggtgtcccatttactaatcactgtctggtttgttacgctctgctcttgtcttccagcaatgataggcctgtagcttgctcaaagctgcagactcatgctggtctagtattacttccatcttctgagtacagaatgacttcaagcaccttcaagggtagtgtttccctgacctgcatgaagcagttttaatcttgtgtatcctgcaggagctaaggtcctactatcatcactcactgcagactcagagcccagcacatctgagacttcagccttacacatggattttaggtttcagttctgtttctggtccccagagtcctctcttgtttctcagtttatttatattgtttttgttggctatttatatattattattgtgtgtttcgagtggaggagatgcattatgtttctaatttactgtagaaaatttggctacgagttcataatgtttaatttttctgaaaaaaaaaatctagcatttcattaattgctttattcccctgccttccttaaaggctacacgctaccttcctcacctatctaaayattgttttgaggaaattacaaagaataagcaggaaagggaaacacagccagtaggaaacaagt

SEQ ID NO: 142576 - DNA, 284 bp, Homo sapiens
cggttattctcaattgtctcatcaatcaataatcatttcttgagcacctactgtgtgccaagccctgataaatctgaagcgtacataaataaaagaggccacaatttgtgcttttagaatctgagaatctrccacaggaggctaaatagattcaaatgcctgcaatgcagtcaagtacagtggttaatagttgcggctatgaacagaagtgggacataatattccaggctaggcagctgggctcattctttgaattaatcctttagattccaataagactgctg

SEQ ID NO: 142577 - DNA, 572 bp, Homo sapiens
tgagtttgaccattctgtcttctcttaataaaagtcagaaaaatcttccamgtcaactctcttgattgaaacacaatccctgccctctcttctgctaggctatacacactttagcctctagaatgtcatcactccccctacttaagtcctctgttgcacgggtctattttcccctgaacacaccagaaagcatcttgcttccataccattgcttcagaagatgatctgaagtaaagtgtgcagggaattcatattatctctttaagtggtatccagttcaatcatttattgtgttgatttattttcttttcttgtcctctattgccctcacgtatgttacaagacccttagaggtttattttgcatataatcagccctaacttgtttattgttgactgttttctaaatatactcatactctcacaatacttttctccattcctctttttcttgaatgtgtttgtgcctgtgtgagtgtgtatgtgtattcatttttctcctatatcttttttctcacctttagactcacaatccataaatcaaaacatatggctgctgtgcttctgagctgt

SEQ ID NO: 142578 - DNA, 572 bp, Homo sapiens
tgagtttgaccattctgtcttctcttaataaaagtcagaaaaatcttccaagtcaactctcttgattgaaacacaatccctgccctctcttctgctaggctatacacactttagcctctagaatgtcatcactccccctacttaagtcctctgttgcacggktctattttcccctgaacacaccagaaagcatcttgcttccataccattgcttcagaagatgatctgaagtaaagtgtgcagggaattcatattatctctttaagtggtatccagttcaatcatttattgtgttgatttattttcttttcttgtcctctattgccctcacgtatgttacaagacccttagaggtttattttgcatataatcagccctaacttgtttattgttgactgttttctaaatatactcatactctcacaatacttttctccattcctctttttcttgaatgtgtttgtgcctgtgtgagtgtgtatgtgtattcatttttctcctatatcttttttctcacctttagactcacaatccataaatcaaaacatatggctgctgtgcttctgagctgt

SEQ ID NO: 142579 - DNA, 537 bp, Homo sapiens
caagtcaactctcttgattgaaacacaatccctgccctctcttctgctaggctatacacactttagcctctagaatgtcatcactccccctacttaagtcctctgttgcacgggtctattttcccctgaacacaccagaaagcatcttgcttccataccattgcttcagaagatgatctgaagtaaagtgtgcagggaattcatattatctctttaagtggtatccagttcaatcatttattgtgttgatttattttcttttcttgtcctctattgccctcacgtatgttacaagacycttagaggtttattttgcatataatcagccctaacttgtttattgttgactgttttctaaatatactcatactctcacaatacttttctccattcctctttttcttgaatgtgtttgtgcctgtgtgagtgtgtatgtgtattcatttttctcctatatcttttttctcacctttagactcacaatccataaatcaaaacatatggctgctgtgcttctgagctgttacacctgtgacc

SEQ ID NO: 142580 - DNA, 520 bp, Homo sapiens
tacattaaattatagatacctaaaggagcaatttgatgaagagagtttcttgaactaggatttctagattaggtacagatataaaagtggcttttaartgtctgatttgagattccttatgaaaatttttaagaaggttaaggaggcttagatgataaattaactttttcctttccttacatagataatgaggccaagtttaatgaaagtattgttttgtggtcaatattaatctttctttgagatgattctttttaataaaaactagaaagactacagggaaaagttgtgttttgatggaaaagtatgcattgcttagagcacacccttctgggttatctgattccaaacagatggggaatttgttctttcgttgcctttgagacattttacaactccgtaagttttattggttaacaggaatcaaagtaattcatgtatggagacacgtaactaaattctgtctcatagaggttccatggactttcttctactgtggaagcatccattcctatactta

SEQ ID NO: 142581 - DNA, 520 bp, Homo sapiens
tacattaaattatagatacctaaaggagcaatttgatgaagagagtttcttgaactaggatttctagattaggtacagatataaaagtggcttttaaatgtctgatttgagattccttatgaaaatttttaagaaggttaaggaggcttagatgataaattaactttttcctttcctkacatagataatgaggccaagtttaatgaaagtattgttttgtggtcaatattaatctttctttgagatgattctttttaataaaaactagaaagactacagggaaaagttgtgttttgatggaaaagtatgcattgcttagagcacacccttctgggttatctgattccaaacagatggggaatttgttctttcgttgcctttgagacattttacaactccgtaagttttattggttaacaggaatcaaagtaattcatgtatggagacacgtaactaaattctgtctcatagaggttccatggactttcttctactgtggaagcatccattcctatactta

SEQ ID NO: 142582 - DNA, 589 bp, Homo sapiens
gaggcttagatgataaattaactttttcctttccttacatagataatgaggccaagtttaatgaaagtattgttttgtggtcaatattaatctttctttgagatgattctttttaataaaaactagaaagactacagggaaaagttgtgttttgatggaaaagtatgcattgcttagagcacacccttctgggttatctgattccaaacagatggggaatttgttctttcgttgcctttgagacattttacaactcygtaagttttattggttaacaggaatcaaagtaattcatgtatggagacacgtaactaaattctgtctcatagaggttccatggactttcttctactgtggaagcatccattcctatacttatatgcaaattcacatcaacattcctcctatgactatgtctgttctgtgaattctccttctaagtagttgtagcatttgccacatttcctcacttaaaaaataaattacatgagaacatctttaatggattttttataccgtttaagcaccatgatttgcctttttataaaaattaagtggtttacatttttgtatgggagagagaaaaaat

SEQ ID NO: 142583 - DNA, 542 bp, Homo sapiens
gagtgagtacatgatttgacacatgattttctgtgcctattgagatgaccatgcaatttttgtccttttttctaatgtgtattagttgatgttgaaatacaaaaccaactctgcacttacgcataaattccacaaaatcacagtgcagaatttttttttyatgtagccaaatttaatttgctaatattaagaatttatatgtctatttacttcaggaaaatttgtcagtgctatgttttttgttatgatttggctttagaatcaagattacactctacttctggattgagtaggattttataaaatccttctctatttttaaagcattatgagaagcattagttattatttcttcttttaatatgtgatctaattcacccatgaaatcatctggaccttggcattttttagtaggaagagttttaattagtaattgactttatttgttataggtctgtttagaattgctatttcttcttgagtcagttttataatttttatttttctaggattttaaaaatttcaactaattgtctaatagt

SEQ ID NO: 142584 - DNA, 484 bp, Homo sapiens
agtccttcttgttaaaattataaataatatttggatattacatgtgaggagaagctaattctcaggtttttattttgggaaattgattaatggtggcaccaacaactgacttagggaacaaacgagtgtcttattggttttgctattgacataaattcctcttcactgtttcctaactgatgactctgaaagaggcattaagatgtgtctgttaagatctgctttgrattatttgaatttaaattgcctggaacatccaaggtaagatgaacctagaaggatctgggaatatatattagtaattcatctgtttgtagactcgagttgatgtcatgagagtagataagaccacttaggaaaataaagagggccaaggaaaaatatctcaaaaatataaacatacacttagatagaagaaataagttataatgttcagtagccaagtagggtgactatagttaacaacaatgtattgtatatttca

SEQ ID NO: 142585 - DNA, 484 bp, Homo sapiens
agtccttcttgttaaaattataaataatatttggatattacatgtgaggagaagctaattctcaggtttttattttgggaaattgattaatggtggcaccaacaactgacttagggaacaaacgagtgtcttattggttttgctattgacataaattcctcttcactgtttcctaactgatgactctgaaagaggcattaagatgtgtctgttaagatctgctttggattatttgaatttaaattgcctggracatccaaggtaagatgaacctagaaggatctgggaatatatattagtaattcatctgtttgtagactcgagttgatgtcatgagagtagataagaccacttaggaaaataaagagggccaaggaaaaatatctcaaaaatataaacatacacttagatagaagaaataagttataatgttcagtagccaagtagggtgactatagttaacaacaatgtattgtatatttca

SEQ ID NO: 142586 - DNA, 601 bp, Homo sapiens
gggtaaaagaactcttccttgagagcactttaattatsttatgttactctctcctggcctgtaagtttcaagtgaaaagtctgctgtcagatatattggtttcttttctcttgcagcttttaggatcctttcattatatttgattttggggaatttgattattaaatgctttgaggtgttattttgggggttaaattgattcggtattctctaaccttcttgtacttttatattaacaactttctctaggtttgggatgttctctgttattatctctttaaataaattttctaactcttatctctttctccatctcctctttaagaccaataactcttagaattgccctttgaggctattttctggatcctgtaagtacgctttgttgttttttattcttttttgttttgtctcctctggctgtgtattttcaaatagcctgtcttcaggctcactaattctttgttctgcttcattaattctgtgattaaaggactctaatgcattcttcagtatgccaatcgcatttttcagccccagaatttctgcttgattctttgtaaatatgtcaatatcactgttaattttttctgatgtagtt

SEQ ID NO: 142587 - DNA, 535 bp, Homo sapiens
cttaatatctcagaccctcacgttcagaagggawattgttcagcccagtaactttgaaaattagaaataaataaattgtataattctgctggcaagttgtgcaggggcatatgattttcagataaagaaaatagaaaataagatttagcaaaatactattggcctgaaacaaagtatatcacataaatgaaccaacttagatagccgacaatgatgacttcatcttcaggttaatacaagaggtgatgtgatggagttgggggctgtagtaatcagttaggacaggcagaaaagtggagaaaagagtccagtaaactagcagacttatactataacatgggcctagttggcttaacaccgctgaagatttgataatatgcagagctctgataaagctgtaaaccctacttaaggtcagaatttttttggtatttagtagccttttactgcaagatcatgccagtagaaatacagtcaggattatgatacctaatattctgccttcaggaaaatgtcagtcctagttaaacactgt

SEQ ID NO: 142588 - DNA, 475 bp, Homo sapiens
ccatttgacccagcgatcccattactgggtatttacccaaaggtttataaatcatgctactctaaagacacatgcacacgtaagtttattaaaaaaaattgtttaagtctatagtgctaagtctccaaaaataacaattatttatttatttattttttaaattttactttaagttccgggatttggccagcaccccttatattgcctcgtacagcaatgaggatggtctgggtatgcatttcaaggtacccctgaagctgggggactgtccccacgacaatttgagggtgatatacaggggcaagtgacagaaagacttcggctcaaacagaatatacaaaacagcttggaaagtctgggacaggcaaagggggacagagatataggtggaccccrgatataggtggttttgaatttttaccatactctacatacaagtatttgttttgagcaaacctatatcttattctctggc

SEQ ID NO: 142589 - DNA, 488 bp, Homo sapiens
ccagagatgggaaccaggcaaagtctccaagattttggagggaggattggcattaaattctgagttgcagttattcctcttcatgcagataactgtccttcctactagaatcagatccagaaagaggaaaactccccatctgctttccttttgcctgagtctcagctctcctcttccctggagtctggatctgcagcagctcyttacctaccccagggtcctgcagtttcacacacacccaggctgagagaggaattacaagtaatccacaggtcagggctttatattgaaccccatagagacttgttcagtttccccaggtccatcaagattggagaaaagggagaactttgagaaaaaataaataaataaagcatgttttgccaagtgggcaacagattgtcatctgagtaagatttcctcaggcaaaaccctagtgcctccccaataaaatcaataagatggagcccctgatctggagacatgtc

SEQ ID NO: 142590 - DNA, 596 bp, Homo sapiens
cactgtaaactgaaagaggaaaaagagctgagattgtggtacattgctgatagatcccatcctactctcataggaagttcactgcattttcatcagttgtgagagccagagatgggaaccaggcaaagtctccaagattttggagggaggattggcattaaattctgagttgcagttattcctcttcatgcagataactgtccttcctactagaatcagatccagaaagaggaaaactccccatctgctttccttttgcctgagtctcagctctcctcttccctggagtctggatctgcagcagctccttacctacyccagggtcctgcagtttcacacacacccaggctgagagaggaattacaagtaatccacaggtcagggctttatattgaaccccatagagacttgttcagtttccccaggtccatcaagattggagaaaagggagaactttgagaaaaaataaataaataaagcatgttttgccaagtgggcaacagattgtcatctgagtaagatttcctcaggcaaaaccctagtgcctccccaataaaatcaataagatggagcccctgatctggagacatgtccct

SEQ ID NO: 142591 - DNA, 488 bp, Homo sapiens
ccagagatgggaaccaggcaaagtctccaagattttggagggaggattggcattaaattctgagttgcagttattcctcttcatgcagataactgtccttcctactagaatcagatccagaaagaggaaaactccccatctgctttccttttgcctgagtctcagctctcctcttccctggagtctggatctgcagcagctccttacctaccccagggtcytgcagtttcacacacacccaggctgagagaggaattacaagtaatccacaggtcagggctttatattgaaccccatagagacttgttcagtttccccaggtccatcaagattggagaaaagggagaactttgagaaaaaataaataaataaagcatgttttgccaagtgggcaacagattgtcatctgagtaagatttcctcaggcaaaaccctagtgcctccccaataaaatcaataagatggagcccctgatctggagacatgtc

SEQ ID NO: 142592 - DNA, 554 bp, Homo sapiens
cctatggttcaatgtggaaatgtaggcataggagcctagaaactgggtgtaaagttttccctctttattgtgaccataatgatcccagtgaacagtggtttcttttcctatcttgccagtacacttataatccagagacaatgatgtacatctctctattccccaatgctatgaacagtgtgtaaattttctatttatatgyataatttggtttattttcctctgcatttaatgtccctgtggaccacaggttacttggattagtaactaaaaccctctgggattacacactcctgccctctaatttttatagatagggagagagggtggtttcttttttgctctgtctttggctgcagagagacataaatcatacaaataatctcacagctcaattctaccttactataaagtccatggctccagaactgtagtctattcttcctcatctagcaaagacagagaaggttcctctttccacgtaaagctggtaagaaggtagatagatatatttatcgtgttgacttttactttgttacctattcacaaatagt

SEQ ID NO: 142593 - DNA, 554 bp, Homo sapiens
cctatggttcaatgtggaaatgtaggcataggagcctagaaactgggtgtaaagttttccctctttattgtgaccataatgatcccagtgaacagtggtttcttttcctatcttgccagtacacttataatccagagacaatgatgtacatctctctattccccaatgctatgaacagtgtgtaaattttctatttatatgtataatttggtttattttcctctgcatttaatgtccctgtggaccacaggttacttggattagtaactaaaaccctctgggattacacactcctgccctctaatttttatagatagggagagagggtggtttcttttttgctctgtctttggctgcagagagacataaatcatacaaataatctcacagctcaattctaccttactataaagtccatggctccagaactgtagtctatycttcctcatctagcaaagacagagaaggttcctctttccacgtaaagctggtaagaaggtagatagatatatttatcgtgttgacttttactttgttacctattcacaaatagt

SEQ ID NO: 142594 - DNA, 554 bp, Homo sapiens
cctatggttcaatgtggaaatgtaggcataggagcctagaaactgggtgtaaagttttccctctttattgtgaccataatgatcccagtgaacagtggtttcttttcctatcttgccagtacacttataatccagagacaatgatgtacatctctctattccccaatgctatgaacagtgtgtaaattttctatttatatgtataatttggtttattttcctctgcatttaatgtccctgtggaccacaggttacttggattagtaactaaaaccctctgggattacacactcctgccctctaatttttatagatagggagagagggtggtttcttttttgctctgtctttggctgcagagagacataaatcatacaaataatctcacagctcaattctaccttactataaagtccatggctccagaactgtagtctattcttcctcatctagcaaagacagagaaggttcctctttccacgtaaagctggtaagaaggkagatagatatatttatcgtgttgacttttactttgttacctattcacaaatagt

SEQ ID NO: 142595 - DNA, 489 bp, Homo sapiens
gaattccttagttaaagcacaggtgggagatggctatgtcacgtaacctacagctgcagttcctgggaaaagtagagcctgtctrttgctctacagcatcgcttgtctcagaagcaacttggctgtttctcctagttctcttatggctcattgtctttgccaatgctgattccactgctttaaatttcctttccgtgtttatcaatctaatgaattaaaacttctcaatttacaatacagaataaacattacctctttagggatatcgtttctgatcctcagatagaattgccttctcatttgtatcctgttcatgaagtcaatatattacttgaagtacatgtattgcatttctgttctgttttcaagtctatctttcctgactacattgtaaggactaagtccagtggttagagtctgtcttcaccatgcccaacatagctgcattctggatgtttcaggacattgatcaataaatctttcgtatca

SEQ ID NO: 142596 - DNA, 573 bp, Homo sapiens
tgaacaggatagaaaaaaaagtcaagagatatataagatatagaggtttaattaacattttaagggaagttgaaggaaaatacttctgtgatggagcagctggatttgagtcaacccataaagaatgaatacaatttgggcagattgagattaccattcagttagtatctattaaaaatacagatgatatacaaagtctaatctcatactgtcaaggaaaggtaaaatagctatgaaggatgctgatctgattacaatagaaagtgaaatttaacagatagcaagtgatattttggrtaaaataagtgaaccagattttggagcacctaaaaaaagctttgaaaagtctaaattcaggaggtgttggaatgccaatttcttctctacatgataaatttcattttaagaagagcgtgcctgtaaacatggattgaatttgggagagatgaggaaggaagattaacaggagaaagcacaataatcctgctgtgaagtgatgactcagaataggcagggagagaacaagatcatttagctgctgttgttatttttctgttataaaaccaacatgta

SEQ ID NO: 142597 - DNA, 574 bp, Homo sapiens
ctgactgcattttgagacaccctccttctctcagtttaccacttgaatattcttgacaagaattatttataatggtctttgtcatcaagaaatgacaaataatgatttcagcaaataatggactttgttatctctcagctttttctcagaatatttgctttgcttaggatgctatttttccttaatttcacctggataccttctggctgactttcaggaatcagtagatcatcccaagttgcaaaatgtgccagacatccccactagacaaatccttgagggtgggaaatgtgtcttgttcatcaatttattcctattaatttttacagaaattgatcagtgagtgttgaatactgaataaatgcataaatgtcagcctctctctcaaccatcttcaattcaccaattaatgtagcttccagcttacttcgmtccagtcacaccggtcctcttgctgttcctagaacactcaggttcatttctacttcaggactgctatacttgttctgccattctgcaatgttcttccctcaagttttatttttcaaatatctaactccatcatattgttcac

SEQ ID NO: 142598 - DNA, 562 bp, Homo sapiens
agaaaatgaatctgagagcaaacaggtgaatagacagcatagctagaattagcaacacaatatctctaataccagccaataacatgcccaataggttagaggattatactaatggctaaaactttctcccattcctcttcatcactacctctatacttacctctatttcacagatgaaatgaaaggtgctctcccctaaagaaaagcaagttctgcttattagtcagggttcagttagaagacagaaacctacaagtgatttgaccagrcaaaacttaatatgaaggattgataagtatgtaaaagtgattcactactaaaagggatgaaaaagagctctaggggctaacagaggtggcaactgtagaaagcaactaactaccacctctcaggttgaagaaaaagtgatcaagaaggaacttggaaattcagaggaggactcctgaggctgagacccagccttctctgcccagatgacaaggaaatgaagtcctttgcagggtgccagcttaaatatcacatagtaggacaaaaacaagttggggttgcagccgagaagcaa

SEQ ID NO: 142599 - DNA, 574 bp, Homo sapiens
aaacgctggaaaccagatatggacagcctaagtgttccagattagaacagggctaaagcaaaattatagaatacatttatcttcagtgctgttagtcctccctttccagaacttcatagtaggcaaagacccatggtccttgtgtttctctagagtctctactgttactgagaagaacaaactaacagactgtttgaaaatacggattttattgaaaatatggttttcatagggtgagtatataatttgttatttaatgtaactttcacgaatgaaatgaattcctattaattattataagacaatagacaaacagagtgtctggggccaggcagkgtgtttggtcatcctaaattttaaagactaaatatatagccttttagagacacttcagtgtacatttaataagagctacctctagatttgagcccttttaactcacaaataaaaagaccaaatgagaagacaatgattcacccaaattgacacatctctagtgatagaattttagatactttattctaggatgtagaaaatatttataggtagatcatattaccagtgcctgttgaat

SEQ ID NO: 142600 - DNA, 533 bp, Homo sapiens
ggtggctttcatcaatgttgttaaaaactatcaggtttacaactttaaggaattgacagtcctcactctagggaaactgagagacacaatggccatatttgggaggagctgggccctgatgccctagcactgaccttactgaacarcttctgggagatgcagagaagttggaatttcaagaataatctgtttgctttaaggtcagcctcaaaatgctttagggagagagagagaactagtcaagtagtctacaactgcatgagagagctaagtagaaattaaaggacagaagagttccgattgtattaacactttaatttctgtacggactctttcatggaccagtgatttctgctgaaacagacatttgaggatgagggagtcagaaaggtattaatattgattgaacacaaactttgccctaggtaagaagaagagagagaccactgtgaatggctctttcctcagggatttcacgtatgaaatttaagagcaacttgtcaataagtagaaatgtataacatacatacttc

SEQ ID NO: 142601 - DNA, 537 bp, Homo sapiens
tacatttttaggagaatattttgagagattagtatttgtgcaaattgttctggaaaaaaatttataacaaatcagcattgtattaataatactataaattcaacaggctggggcttaaggatgaaggaaaggttataaggaatattcagtcaatcaggggagatttccagatcttctttaagtaacactgtaaacacgatatgtctttccaaatgtacagcagtattcactctgtgtggtgttggaggagataattggatagagtttcaagcttmcctaaaatttattatttattttaatcccaggtgcctttgaagaacatacaggtaaagaaaaagtattttatatatagttgctcacaaaacacctttgatgattccttccaaatgcaagatactttgtgaaacatctttcaaacccaaacctgtcccagtttcccaaattactcaggaatgattcttttgttggctctttcttgatcatgtacattaaacacaaaaagataaagcatgctctctagcattgcataatggatat

SEQ ID NO: 142602 - DNA, 534 bp, Homo sapiens
accactgaactgattgaccaggtgtcccagcaaatatcaaaaggtggagagtgaaactacaagagaatgagttcagtctctcttctctctctctctgtctttctacttctcttttgttcagcgtcagcacttttttctttctctctgaagaaactttatttccctttaagagtggcctcaaaattactgttaattttctacaaggaaactgttctttgaaatacatcatataccattttcttttcttttttttcctccctctttgtgatgatggcaatgcgttggctgtgaatgtgtaagtatagttgcttttgaatgctgcaaggtaaatgcagaaaatgacagcttaaatggaatcattaaagcagatgtaggtaatatctgaatgctaccaagccttctttgcaaggcaattttttttcagttctagtgccttgcaccttttcagggaatctgacaacctatcatttyctactttttttccccatttccagcatgaactcaggggcctcatttctatcttaagttacaacc

SEQ ID NO: 142603 - DNA, 573 bp, Homo sapiens
agaaagaaagaaagagaaaatgcaaatggcatgcaatagtcaaagcaattttagcaaataacacactagctgacttcacaagttattatgaagctgtagcaaagtagtagtagtgttggtgaaaagacagacttatacatcagtggagtagaagatagagtccagaaatagatccacataaaagtggttgatttttaagaaagttgccaatgtaattcaatcgaaaaaatggtattttttttaaacactggcactagaacaactggatatatgtatggggaaaaaaaatcacctactcttaccacataacatacaaaatttaactctaaatggattatacatctgaatgtaaattctagaattttaagacttctaagaaaaaaggataagagaaaawcttgccatcttagagtgggcaaagatttcttaggacacaaaaaatataaagagtaatagaaaaatagaaaaaaaaaaataggctgggagtggtggctcacccctgtaatctcagcactttgtgaggccaaggtgggaggtctgtttgaagccaggagtttgagaccagcctgggca

SEQ ID NO: 142604 - DNA, 581 bp, Homo sapiens
catcctgtaaatgaaggtgctctaaagaaaactactgaagcactgattatcccatttaaagatgcttctaaattttagtgtctttaacatcagataaaaataaaaaatttgatggcataaatagaaaataaagtctttcttagctatgttaggatcagatcctgttaagcacacagtgaaaatatttttaaaagccctctaaaaaccaggaggcagatgttcaggtaaaaccaaagccaagggattgtttattttaataaagctattatatgtgtagmcccaaattaggagtggcactcaggccaggagatgtctaaaccatcaccacctgtttgccctgaaaaatcaattaaagtcacactttcatagcagcccccttctaaacaataaaactttgcttcatcatgagacttgaggcgctcagagggaacatgtttgaaacctaaatccttagtctcacattacttataaactaaccacagtaaaaacagccttcggggtagtggtagaaatgggagggagaaggagatgacaaagacgaggaaggggagaaatcccttttcccatttatttcatactga

SEQ ID NO: 142605 - DNA, 386 bp, Homo sapiens
aaccatgtgaaccattcagcacagagagcagcaaaaggcgagaagtcgaatcgctgtcatttgaggttacatagaaaagcttgaccaacaacttaatttaacaaataaagaagtcrtgactcatactccacaaatgtttttgaagctcaatagatttgaatattactgaatcagcataaaatcatttgaaagaaataattgtgtaaataggtgctttatgtgaaagaaattgctcaagtctgcctcttttttgctatgactctatttgaaggagcatgactgttatagtcatacttctgcttattaagcattttgctttgccaggagattgtttcaaagcaggaaataaataaagataaattagaaaatgaaaatgtcctgtacct

SEQ ID NO: 142606 - DNA, 392 bp, Homo sapiens
tttatgaaccatgtgaaccattcagcacagagagcagcaaaaggcgagaagtcgaatcgctgtcatttgaggttacatagaaaagcttgaccaacaacttaatttaacaaataaagaagtcgtgactcatactccacaaatgtttttgaagctcaatagatttgaatattactgaatcagcataaaatcatttgaaagaaataattgtgtaaataggtgctttatgtgaaagaaattgctcaagtctgcctcttttttgctatgactctatttgaaggagcatgactgttataktcatacttctgcttattaagcattttgctttgccaggagattgtttcaaagcaggaaataaataaagataaattagaaaatgaaaatgtcctgtacct

SEQ ID NO: 142607 - DNA, 385 bp, Homo sapiens
tcttgagcaatattgcagtaatatttctacttcggaatactttgctaagcattattttacactgttatatacactttcatttagtaaagctctttcttatggaaaggtaaataatccaaatttgtagaarttttctctgctaatcacaatgttacaaattaacaatagcctattgatggcacattctttttaataccattaataatggcaatttatttttgtcctttaaacatctgcctttgggatggtggttttgttggttctttgagcagccaaaatttatttagatacaagtgctctgacagctaataatgtttgaaggttaaaaataatatataagtaagtgctactaaaatttttcttggataattcaaaatgaacctga

SEQ ID NO: 142608 - DNA, 385 bp, Homo sapiens
tcttgagcaatattgcagtaatatttctacttcggaatactttgctaagcattattttacactgttatatacactttcatttagtaaagctctttcttatggaaaggtaaataatccaaatttgtagaagttttctctgctaatcacaatgttacaaattaacaatagcctattgatggcacattctttttaataccattaataatggcaatttatttttgtcctttaaacatctgcctttgggatggtggttttgttggttctttgagcagccaaaatttatttagatacaagtgctctgacagctaataatgtttgaaggttaaaaataatatataagtaagygctactaaaatttttcttggataattcaaaatgaacctga

SEQ ID NO: 142609 - DNA, 610 bp, Homo sapiens
gcctcagctactgaaccaaataaataaataaatatcataaagaaaaaaacagatatatttgcctacaatgaaatgaaaaacttctaaaggacaaaagaggccatacaattaaggataagcaacagactgggagaaaaatatttgcaatatataactaatgtcaatgctgaaaattatgaagaattataaaaatttagaagaaaacactcaattgaatactggacrttatataagttaatgcctgccatcttcccaacagcctgtaaggtaggtgaatcttactatccttgttttacaaataaacaacccaaggcatcaagtggtcaagcaacatttctcagatccaacagccatgaatggagaagccaagatccgggcccaggtagtctagctcaactgtctgctcttaaccacatgccattttaatataaggtttagccttatctgtgcacagaagcatatacaatatgttcattacagcatcatttatagtgcaaagacagaaggaaaaaaacagctaccaccagtagagaaatagataaacaaaacattatacattatacataatgcacatagttatacattaaataatacgtagtatttaaaagaa

SEQ ID NO: 142610 - DNA, 626 bp, Homo sapiens
tgtgaggacagctgcctgcaatgagaggcagagtggagggggsacatgggcaaatggcctcccagcaatttgaggatattcctgtttggcacattagccaggactgattgcgtcaatgaaaaccacggaatttcccctccaaagacgactggataacttcattgctatgggccaatttggagatgagaggcagccccggagacaatgcttaggaaaccatgagccactgcgggtaggggcactgatgacatttgtcctttccatgcacagtgaccacctggacatgactcagacatccagcttgatggcaggctaccttccgagacacacattcgctctgtccagtgcagcttcaagaagcaacaaaacatccagaccagggggcaaatcttcagcacccacgagaaatggtgaggagctgcaaacaaggacgggctttctggcccactgcctctgcatgcagtgacatcgagaaaggctgcaactgggcagaaacgagccctgagtacaagaaggaatggagcctcatggggctaggacaaagaggccctaaggttcttgtaatctgcggttcttacccttgcctctttccccatcagtcccaggtttaatgtccctagactgtg

SEQ ID NO: 142611 - DNA, 440 bp, Homo sapiens
gaattcaggcattgctgatatttggggtcctgtcccactgccacaggcttactctctgcctatctgagtcttactaattctcaaaaggagttctcttcaagcctttcctgaccaccctgctcagagtaayctccccacttatctcaactggcaccagagaagcgctggtacacaacagaagaggcaaacccctagggatccctcaggccacagatgctcactccttgcctgacccctctggaaagctaaaaacaaagtaagttaaactgagaacactggacaaaaatctgattgtccttgctgtacaccaggcttgccacatgccaactccttccttcttcttcatttcttcctcattccacacaaggtatagaaagccaccagctattaactaggaagaaacagataagccatatctaaaacacagaggaaccaattcc

SEQ ID NO: 142612 - DNA, 466 bp, Homo sapiens
aataagccaggcacagaaagacaaataccacatgattgcatttatatgtggaatctaaaaaaatcaaacttatacaagcagagaataggatggtggttacagagcctaggggtgggagaaatgggaagttgatggtcaaagggtacaaagttttagttagaaaagatatcttattcctccaggaggactaggttctcaaactctattatacagcatggtgactagggcataataatgtattatatacttgaaaattgctaagggaacagattataaatattctcatcaccaatgataaggatgtgagktgataaactaatgttagtttgttttatatgtatacattcaacagtgtatacatgtatcaaaacatcatgttgtatctcgtaaatacatacaatgttttatttgtcaattaaataaataaacaataaagtaaattgcatagatatataaataaataatt

SEQ ID NO: 142613 - DNA, 553 bp, Homo sapiens
agcactgtccaatagaactttctgcaaagataaaaaacttcatatgcacagtctccaagagagtaccctagtcacatgtagctrctgaatacatgaaatgtggctaattcaactgagtaactgaattttaaattttacttagtcattttaattaaaatgtatataaccccatgtgaccagtggttatcatattggacagcataggtctggagcttagcctaaggctgggatagagatagtgaaaagaaacttcgtgctaaattaaacaatttctaatttacaattttgccaaaggtcaaaatatttctttgttattaagaatcatagtatcagatcttgatatcatgctagcagggagagttgtaaaattgataaaatgtattttactaatagttcctctattattctgccagtcacataaattgccttcagtacagaagttattgagatgtattgtcaggaaatcttgatgacggtttggcaaatgatagacagacaaaaaaaattggtagtaaatatccttagtacatgcttcaaagtctttcaagctaaa

SEQ ID NO: 142614 - DNA, 590 bp, Homo sapiens
taatgtctttcgtctatatttctgattttattctctttgtaagaattctttatatagccttaatatttgctgcaaatatccttctttggctgcattctttttattttacattgattttccttcaccaggagaatggccaaatttgtcaatatatttctttgtggctacacctataatttcaaatgtataaagtgtttaatccttcagggttctataactataaaatcatttttggtagtttttcaattgttttggctagttttttgtagttttaatcaaacactttaaatcagcacttatagagtgttgacttacagtttttcaagtgctaataaatggtcccaacatcatttatttacatattgtttgatgcttcctttaatcatatatacatgtatacatatatatatgtattcacatacacatattaacatatatagtatatgtatgtttatgttattcttgaatttattatcttattctcttggtttgtacatctgtctagaagtttgtacatctggctaaaatactacactattttagttatcattgctttaaktttaatgaattgcaatattttatgttagtac

SEQ ID NO: 142615 - DNA, 606 bp, Homo sapiens
aaatgttccacaattcatggaagcagttcttcaaaacataaaatctttaaccaattaaagattacctttgagattaacaaacatgttgagaagaagacattaaacctaaaactcatgctcacctgatgacaaattgtgacwtcagattttctaatacctgaaatttcaattttgaaaaaaaaggtgttgattagaaaggagcagttaattctaggttacaggtctgtcgtaggaaaaatagatctagtcagagccatacatttggggctttgaatcatctcagaatgaatcagagtgtctggggagagaggtctgtggaagggctcttggcagacatcttttacctgttgcaattttgtatggtgccccagtatttgtagcacaagcatttatttttgagccatggtatcagttcctgctttgattcttaacattcttttttatctcagttaagatctctattatccactgctttatattttttatcatttcatcagtggcatgattatcagtagctttctctatatcattcattatactacacatataatttgtgctggctcctggattgtatattttacatgtatgattttatttactccccag

SEQ ID NO: 142616 - DNA, 606 bp, Homo sapiens
aaatgttccacaattcatggaagcagttcttcaaaacataaaatctttaaccaattaaagattacctttgagattaacaaacatgttgagaagaagacattaaacctaaaactcatgctcacctgatgacaaattgtgacatcagattttctaatacctgaaatttcaattttgaaaaaaaaggtgttgattagaaaggagcagttaattctaggttacaggtctgtcgtaggaaaaatagatctagtcagagccatacatttggggctttgaatcatctcagaatgaatcagagtgtctggggagagaggtctgtggaagggctcttggcagacatcttttacctgttgcaattttgtatggtgccccagtatttgtagcacaagcatttatttttgagmcatggtatcagttcctgctttgattcttaacattcttttttatctcagttaagatctctattatccactgctttatattttttatcatttcatcagtggcatgattatcagtagctttctctatatcattcattatactacacatataatttgtgctggctcctggattgtatattttacatgtatgattttatttactccccag

SEQ ID NO: 142617 - DNA, 548 bp, Homo sapiens
atggcatatgaattatatttcgaatagaattgttgcaaattaaaaaaatgaaccgcaggtaaagcacaacacaatggcgtcaagattcactgtactctcaacatgggacattttgtagcatatcactctagcgcctttccctttctaaagcagaactgcttttttaaacctttcaccgcattttcctatagaactgcatacttcaatattgggattgccatcttatttcatcattttcccactatgaatatctgacagtcggtcagtttaagaagatacttgtttgggttacctaatactctgaatttcaaggatgtctctaaatctaagaatcttgtggtatctattatatctttaagaccaaataaaagagcagagtgttaattaggtagacagtaatttcagaagcactttacttttaaaatattttttaaaaatacttagtactaaagcctttgcaaaagcatatctactccaaggttgggagcaggacttgccttttgtagaaaaaraaaaggcttactgtcctcccacaattagcaaggcca

SEQ ID NO: 142618 - DNA, 613 bp, Homo sapiens
gaaatgcattaaatacccagaagccccttaggaccaaaccagcttgtagtgatggagtggcagataaagatgtggaggagcatccacctgtcaacctagatgccatttaggtacctgtcagtaagaaaatatcaaaagaaggatactactcctttcccccacctcttagacatatccattgccaaattcatatctttttcttgtaggagagaggggaaactctactcaaaatatctgtgtagacttgcyttaccaaatgctctttagttgatcatgactttgaaacaaccattgggaaaaaacaaaaaaggaacatacggatcagttatcaggtcctgcccacaatcacttattttaatgttcacaacactttatcttatgtaatctctgcagcaaccctgatatacagatgagaaaactgaggctcaggaagattaagtaacttggacaagggcacccataacagaaatgtaatccaggtatcttataggttgaataagattcctattaagcattgggttgccaacaaatgtagtaggtgttaaaatacctaaaatgtaagtttaaataatgtcgtttaaataatatcatttaaaaagaaaaaagaaaccaa

SEQ ID NO: 142619 - DNA, 520 bp, Homo sapiens
gaaatatcatttgaagaaatcaaaacaaagttgttttcagacatataaaaactamagtattcatcatcaggagacaaactttgtaagaaatgctaaagggagttcttctgcaagaagtaaaatgataccagacagaaatatgaatctatacagaggaacgaagaacaccagaggccaggtgctgtggcccacacctgtaatctcagcacttttggaggccgaggcaggaggattacttgagcccaggagtttgaaacaagcctgagcaacatagcaagactctgtctctacaaaaaaatttaaaaaactagctgggcatggtggcacatccctgtagtcctatacactctggaggctgaggtgggaggattgcttgagcctaggagttcaaggctgcagtgagctgtgattgccccactgcactccagcctgtactttagtctggacaacagagtgagaacctgtcaaaaaaaaaaaatcaccagaaatgctatctatctgggtaaatataatagaattc

SEQ ID NO: 142620 - DNA, 582 bp, Homo sapiens
gaatgacaccagtgacacaacctatcaaaacatgtggaatacaccaaaggcagtgctaagaggaaagttcatagccctaaatgtctgcatcaaaaagtctgaaagagcacaaacagacaatctaacgtcacacctcagggaactagagaaacaagaacaaaccaaacccaaacccagcagaagaaaggacataaccaagatcagagcaaaactaagtgaaattgaaacaaaaaaatacaaagataaatgaagcaaaaacctggttctttgaaaagataaataaaattgatagaccattaggaagattaaccaagaagagaagacagaaaatccaaataagctcaataagcaacgaaatggaagatattacaactgacacyacagaaatacaaaagatcattcaaggttactatgaacacctttatgcacataacctagaaaacctagaagaaatgcataaactcctggaaagatacaaccctcctagcttaaattaggaagaattagataccatgaacaaagcaataacaagaatcaagatgcaagatttaaatggtaatttaaaaattatcaacaaaaaat

SEQ ID NO: 142621 - DNA, 532 bp, Homo sapiens
ttacctcccatcaggtccctctcacaacaagtgggaattgtgggagctacagttcaagatgagacgtgggtgggcacacagccaaactatatcagccccagacccgtatgtcttctgtatctttacatctcctcttggaagtctcataggcctctttatgctaacatgttcaaatctaagtacatcatctttcctacaaattccagattctgtctccttcttgtgtcctctgtctcagcaaagtgctctgcttacccractgtgtaaaccagaaacctgggttcattaacatagttcaaatttccctcttcagcttattttcttccacttgttttagtgcagtttttcatctgctcaggactggattattacaacatccctttctctccttcactttaccttcatacggctgaccgcatgacctttccagtgtccacattgttgttcacccatttaaaatcctttaatgactttctttcagtttcaagataatggtcaaacttcacagcatggtctattatttatgtattgt

SEQ ID NO: 142622 - DNA, 582 bp, Homo sapiens
tgaccgtgacttctccttctttcccctcttattttagaaaagagagactcaatgcatttaggaggcaaggagggcaagcaccagtggagaagacagtatacaaagtagagaaaacaaggccaagcgcggagtctcacctatagtcccagcactttgggagccgaggtgtaatgaatgcttggtgtagattagggactactgaaatgcttgttctgtgaacctctgcttctaaggacagttgtgacctggaggtattttatactgctggaggagctcagggatggggcacacctkgggggtcatggaatgcacctgcagtcaggttccacagaggctgaaggcctgctttgcacagtctcactgggctgtcatccagggtgccttacccacctgcagccatcttgctcctgtctctgactccttaagactctgtgttttctctcttatcccatctcatgacccctaatccaaactgcccttagcttcagcttctctgggccactggctatgaaaatttagcccctcatcttgctcctagtcttaccctttcttgcacacgctgttctcttgacctggaagggc

SEQ ID NO: 142623 - DNA, 582 bp, Homo sapiens
tgaccgtgacttctccttctttcccctcttattttagaaaagagagactcaatgcatttaggaggcaaggagggcaagcaccagtggagaagacagtatacaaagtagagaaaacaaggccaagcgcggagtctcacctatagtcccagcactttgggagccgaggtgtaatgaatgcttggtgtagattagggactactgaaatgcttgttctgtgaacctctgcttctaaggacagttgtgacctggaggtattttatactgctggaggagctcagggatggggcacacctggggggtcatggaatgcacctgcagtcaggttccacagaggctgaaggcctgctttgcacagtctcactgggctgtcatccagggtgccttacccacctgcagccatcttgctcctgtctctgactccttaagactctgtgttttctctcttatyccatctcatgacccctaatccaaactgcccttagcttcagcttctctgggccactggctatgaaaatttagcccctcatcttgctcctagtcttaccctttcttgcacacgctgttctcttgacctggaagggc

SEQ ID NO: 142624 - DNA, 579 bp, Homo sapiens
taattttaaaaagtggtgtatgcattgctgcatgcttcagctttatttgctttggtaagccaatatgctggaaacttgacatctccagagctgcagcacctctccactgtaccccctgcatctcccacaagaggcatgatatgaggtcccgttgcctcccatccccatgactgctgcctaggaggctacatgtttgtcctccctgaaaccacgggtagctgagccatatgcttttgcagggtacttgggttctcttcctttaagttccgtgcttaaaagagcaggatagttggtgttggtgccacacgtggtactgccacttctctagttatttagaactcactgcagtttgaccatcagggatgctrtagtcaccagatttgagtgcatctcctccttaaaatgtcctcatgttccaacctccagtattattatccccaagcaggcaagtttattcctctgcttccaactttgtatacccatcttgcaactttaaaagacctgtgtacattactgccttggacgccatagacttctgtcaaattataagcacactctctatcctgcaaaggaaaaaaa

SEQ ID NO: 142625 - DNA, 381 bp, Homo sapiens
taatattcactagggaagtgggagaatagctacaataaagtctaagaggaaatgtttgaataactcatggtatacccaacccctgaaataccgtcctgctgccaaaaattattttgtgagaaatatttaacaggacagcacycacagatcactttaaatagattgtaaaatggttcttatggtacaattccaatcatgaatcatattacagtttttacacacacatacatatgcacccatatataagactggaaaaatacagtaaatctgaaaagttttttctatatgatggaatgatgaatattttctatcatcttaataattttccgtatttcctaaaatttctttcagtgggagagagaaatagttcacaaaaaaatt

SEQ ID NO: 142626 - DNA, 585 bp, Homo sapiens
aagtcatgttaaaagagaaagatttccttttaatgttgttaaaatcatgtggcatcctttataagagaaagagtgtattaattcttttatcactattattttgctattaatattttaacattataaaatgtgaaggtcatattaactactccccttgaaaacagtttcaaatatataaaatgattatgagatgtgcatatcaaaaaaatagagcaactccatcagacttcgaattctcagwgctatagaatactattttttttctgatttccattttactttagactcaaggggtacctatgcaggtttgttacaggctatattgagtggtgcttaagtttgggcttctattgatcctgtcacccagatactgaacatagtacccaataagaagtttttcagcccttgccccttttctccctccctccttttgcattccccagtgtctactgttcctagctttatgtccatgtgagcccaagatttagctctcacatataagtgacactactcagaatttggttttctgtttctgcatcagttcacttaagataacagcctccagctgcatccatgttgctgcaa

SEQ ID NO: 142627 - DNA, 585 bp, Homo sapiens
aagtcatgttaaaagagaaagatttccttttaatgttgttaaaatcatgtggcatcctttataagagaaagagtgtattaattcttttatcactattattttgctattaatattttaacattataaaatgtgaaggtcatattaactactccccttgaaaacagtttcaaatatataaaatgattatgagatgtgcatatcaaaaaaatagagcaactccatcagacttcgaattctcagagctatagaatactattttttttctgatttccattttactttagactcarggggtacctatgcaggtttgttacaggctatattgagtggtgcttaagtttgggcttctattgatcctgtcacccagatactgaacatagtacccaataagaagtttttcagcccttgccccttttctccctccctccttttgcattccccagtgtctactgttcctagctttatgtccatgtgagcccaagatttagctctcacatataagtgacactactcagaatttggttttctgtttctgcatcagttcacttaagataacagcctccagctgcatccatgttgctgcaa

SEQ ID NO: 142628 - DNA, 585 bp, Homo sapiens
aagtcatgttaaaagagaaagatttccttttaatgttgttaaaatcatgtggcatcctttataagagaaagagtgtattaattcttttatcactattattttgctattaatattttaacattataaaatgtgaaggtcatattaactactccccttgaaaacagtttcaaatatataaaatgattatgagatgtgcatatcaaaaaaatagagcaactccatcagacttcgaattctcagagctatagaatactattttttttctgatttccattttactttagactcaaggggtacctatgcaggtttgttacaggctatattgwgtggtgcttaagtttgggcttctattgatcctgtcacccagatactgaacatagtacccaataagaagtttttcagcccttgccccttttctccctccctccttttgcattccccagtgtctactgttcctagctttatgtccatgtgagcccaagatttagctctcacatataagtgacactactcagaatttggttttctgtttctgcatcagttcacttaagataacagcctccagctgcatccatgttgctgcaa

SEQ ID NO: 142629 - DNA, 585 bp, Homo sapiens
aagtcatgttaaaagagaaagatttccttttaatgttgttaaaatcatgtggcatcctttataagagaaagagtgtattaattcttttatcactattattttgctattaatattttaacattataaaatgtgaaggtcatattaactactccccttgaaaacagtttcaaatatataaaatgattatgagatgtgcatatcaaaaaaatagagcaactccatcagacttcgaattctcagagctatagaatactattttttttctgatttccattttactttagactcaaggggtacctatgcaggtttgttacaggctatattgagtggtgcttaagtttgggcttctattgatcctgtcacccagatactgaacatagtacccaatargaagtttttcagcccttgccccttttctccctccctccttttgcattccccagtgtctactgttcctagctttatgtccatgtgagcccaagatttagctctcacatataagtgacactactcagaatttggttttctgtttctgcatcagttcacttaagataacagcctccagctgcatccatgttgctgcaa

SEQ ID NO: 142630 - DNA, 437 bp, Homo sapiens
ggttttatttttctttaagtagtattaaattttcttttggcagtaagttatttatatgtgagctccatatttttaaagcttattttaaaacttgttaggatgggtttaggccaacctttattctagaagcagtttagctttattagtaagactggagtgtcttgggtgtctcctgaatattctgggtgtttcaagagtatactccacactagctggatgaatctcaaaggtgtctcactcctgtgtgagctctgggaattattctgcacagagctccatgctttttgttgtttttcttcagaagttgttttttattgcctagtcttgtggattctcacagtrtgctcatgttattcaggcaaagactagagaggattccatgcagatttggggaatgtttttatctgcatagcttgcttctctagcaacctgcacca

SEQ ID NO: 142631 - DNA, 437 bp, Homo sapiens
ggttttatttttctttaagtagtattaaattttcttttggcagtaagttatttatatgtgagctccatatttttaaagcttattttaaaacttgttaggatgggtttaggccaacctttattctagaagcagtttagctttattagtaagactggagtgtcttgggtgtctcctgaatattctgggtgtttcaagagtatactccacactagctggatgaatctcaaaggtgtctcactcctgtgtgagctctgggaattattctgcacagagctccatgctttttgttgtttttcttcagaagttgttttttattgcctagtcttgtggattctcacagtatgctcatgttattcaggcaaagacyagagaggattccatgcagatttggggaatgtttttatctgcatagcttgcttctctagcaacctgcacca

SEQ ID NO: 142632 - DNA, 551 bp, Homo sapiens
ttgacccacagtccatgaaaccaatgaatacaatagcagtgtctctggtgtaacacagtgtgcatgatcaaagaatgtcctgctgcttgggcgtctgatccaacagccacctgaagagtgatctgctgctgcctgtcatagacaaaggcccatgcagctactaaggagttcatgtagtgatgcccaagcactaagttgtgcagctcaaatagkggtggaatgatagggtagatgagcaagaatctgcccaggcagcagccctaaatttctgctatcacgtattttggatacatccatgcctttgtggttgatgtgccttccaagccagcagccagcaccctgtctgttctaatgatgtacatgtaacccacaaattagagctttatagttatttaaaaatattgatataaaaactttaattacatgtaaacccattttctttatcacaatttatatcagaatgtatttgggaaataaaagaaagaactgttaatatcattgaatataattttaactgttgtaaaattttgagtgtttattttcaaattttt

SEQ ID NO: 142633 - DNA, 577 bp, Homo sapiens
ccaactggtctaatcaataaagtcctcattttcctcaacactgcactgtgtattattgccttgtaccattgcttgcaagtaaagtatttatgtcttctatcagcaattagaatatagaccagaagacaagaactgtttaggcaagaccttctccccatgcccagcacttaggccagagttattcaattagtaggcattaatctttgtttggagatttactgacttgtctcatgtctatcagcctattaattctcggtatttaacatgattggtagaactrctgactttcctttatcacctttttgtcttctcaagttctgtcagtcagaactactcttcactcacattttcttctgatgagtatatgaatcttctctgtgcctcagcttcaacattacctgttctatggtggtgcttttcttctttcccagcctcattcagtcccatctgtttgctggctttccagagtaacttgtatatggttctatcgtggcatttcccatgctatgaataaactttcttctggaatctgagcttaacaagggcaagatgtatgtcttatgtctacaacatgcaa

SEQ ID NO: 142634 - DNA, 570 bp, Homo sapiens
taggcagttttcaaggagcaccaaaagctgcctatctcttattcttgcaataaccttgtaaatagccattatactatctccatttaataatgggcctgaggcataggtttttaaatgatttgcccacagtcaytcaacgcaaagaagtcaaagccatttccagtacttatagttccctcccctggatgctctgtgaattctagttttacaaccctgtcccatgcccacctttcctgaagtgattatatttttgaaataattagtacattatgtagtgtttcttgtttcctaattgcctgtgcatgtctgtatacaacgttgagtgcaagtagtgtttttccagtttaatttgctattcttttgcaataatctatcacttttctttaatggaaccaggttgtaaaagatactattttctcagcttcccagtaaaatctggccctgaggttttatttaattaaccttagccattgtatgcagataacaacctccattttaataagagaataacaagaagaagtcctttgggaagtgaagataggtaagtggcaaaacatttgccatttttcc

SEQ ID NO: 142635 - DNA, 548 bp, Homo sapiens
tgttcctaacactgtgatacatttacctccagaacctttgtgaaacattttacttttcatccagatttctgggattccaaaatgtcaaaaatttccccctcttagttgcctctgggagccagaatccagccagttctcagagatttctacctggttgaagaactcgcataagtcaccgtatgcaatggctaacaaaaaaattcttctgttgatttgaatttgaaaaactcttacaaatatctgtgataaataaaatgcttcsttcaaaattttcaacattaagaaatcatggctagtgcaataccaaaagctatgaggttttcccaggccactccttatcgcacccatcttactcttacttgttataatgggcatacaaatgcacaatgacattaatagcaccattgaaaatattccctgccattaagcacgcatctgccttcttaaccttgcccttaacaatagatatcaatatcactgtcagtaacagtgctttctcacacaaagaaccaccaccacaagcatttatctctgtcatttatttgtta

SEQ ID NO: 142636 - DNA, 609 bp, Homo sapiens
gatatgtgaatgagtcaaccttcagatgattccagcccccaggcatcaagtcacctcctgcattcaggctgttccagctaatgacatgtagaacacagatacacagtctcttctgagtccttccagaattgcagacttatgagcaaaataaatgattgttggtgttttaaactactaagcttcaggtgctttgttgccttatagtagatcactgaaacacctggcattattaggcttttgaatcctacaactaacctaacttcttgtgaccatatttggctcacaatatatttttaatgattatttatgcaataattagttgaatctatactgtgctcacaaagaagttctagatttggtttgtcaaatrttacaaaccctgtaatgattgtccattaatcaattagcattctgcatcatgcatcagctttcatgagtatgttaaaagtggagtctgctcttcagagatagatctaccatctattgccgaacatactgaacttctaagcctaagagacccagaacctgaagggtggtaaattcatcactataggccaggcacgttggctcatgcctgtaatcccagcactatgggaggccgaagcaggc

SEQ ID NO: 142637 - DNA, 541 bp, Homo sapiens
attaataaagcaaaattaagtttattggaatttattacagttggagagaacatcaccttgatagagtatcagaagcagctcagaaggggaagtcagaagtagagtatttatagcactttggggttttgggcttaagcaatckaaggttggtctttcgaagtgggtaactgactaaactgggcaaaattcatgctataatggccatattggttgtcagtgaagcatgtgttttgaagtgtgtctgcacagatgcctctgtttgctaagcaagcatttgccaaggtgagaaggctatcgtctttgataaattgagttttagaaatttcttcaagcaaacagtggagttatttatattatcttctgggcaaagttttcctggaagaaatcagtaagtcatgttgacataggtgatcaaaagtcttatgtgagtcatattgacatagaagttctccaatttaacttgtttagactcaaacttgtattcacaccaaattaaaaagttattctttgcaagctatacactcaaaatacctcaggaatt

SEQ ID NO: 142638 - DNA, 542 bp, Homo sapiens
attaataaagcaaaattaagtttattggaatttattacagttggagagaacatcaccttgatagagtatcagaagcagctcagaaggggaagtcagaagtagagtatttatagcactttggggttttgggcttaagcaatctaaggttggtctttcraagtgggtaactgactaaactgggcaaaattcatgctataatggccatattggttgtcagtgaagcatgtgttttgaagtgtgtctgcacagatgcctctgtttgctaagcaagcatttgccaaggtgagaaggctatcgtctttgataaattgagttttagaaatttcttcaagcaaacagtggagttatttatattatcttctgggcaaagttttcctggaagaaatcagtaagtcatgttgacataggtgatcaaaagtcttatgtgagtcatattgacatagaagttctccaatttaacttgtttagactcaaacttgtattcacaccaaattaaaaagttattctttgcaagctatacactcaaaatacctcaggaattt

SEQ ID NO: 142639 - DNA, 447 bp, Homo sapiens
tgggcaatgatcagacttgagaaatagctttttttagtataaagatcatccattatttatctagagctatatgtacatatgtcaagacttgtatttgaatgtattgtatttcagatgcattatattctttaaccctcacaacaactgggtaagtaataattactgtatctcttataatcttttcagctatagttacagaagacctagctaaaaytggtgtaacattaaggaccattattgtctcttataagaagaagaagatgacaggagaggggaatatgccagagctggtgcagtaatttatgaatgtcattaagaatttaggggagtggggggaaaataaaataaaataaaataaatagaagaaaaacaaaagaatctagggtctttacaactctccaataagtcaccgtttttatatttgcttccttctcaccgttatctatc

SEQ ID NO: 142640 - DNA, 447 bp, Homo sapiens
tgggcaatgatcagacttgagaaatagctttttttagtataaagatcatccattatttatctagagctatatgtacatatgtcaagacttgtatttgaatgtattgtatttcagatgcattatattctttaaccctcacaacaactgggtaagtaataattactgtatctcttataatcttttcagctatagttacagaagacctagctaaaactggtgtaacattaaggaccattattgtctcttataagaagaagaagatgacaggagaggggaatatgccagagctggtgcagtaatttatgaatgycattaagaatttaggggagtggggggaaaataaaataaaataaaataaatagaagaaaaacaaaagaatctagggtctttacaactctccaataagtcaccgtttttatatttgcttccttctcaccgttatctatc

SEQ ID NO: 142641 - DNA, 570 bp, Homo sapiens
tgagatatgtagcaaataaattacaatataacaggttatatgcaacatatatcaggtactgttatagcatagagcaagtgattaactttatctaatggttggagaaagggtttttaaagaaacttcatacaggtatgagtgagaaagggtcattttaagtagaagaatatgaatgcaaagtataaaaacatgaaacaggccaggcgtggtgactcatgcctgtaatcccagcactttgggaggccgaggtggctggattccctgaggtcaggagtttgagatcagcctggccaacatggtgaaaccccgtctctactaaaaatacaaaaaaaacaatttgccaagtgtagtggcacacacctgtagtccagctactcaggaggctgaggcaggagaatcgcttgagcccgggaagcagaggttgcagtawgccaagatcccaccactacactccgacctgggcaacagagcaagacccaatctcaaaaataaataaataaataaaaataataataaataaaaatatgaaacagcctggggaggtgctgaaggcatagaaatcattcaata

SEQ ID NO: 142642 - DNA, 579 bp, Homo sapiens
agtgactgataggttaattagcaaattagtttggagaaaaagacaccttttcttcattgagaaaggtgccacaaaaatcacccacgttaaggcatatacattttcccttgcaaaaggatacctacacttcttagaagttctgaagccccttgaagataatggcccaggacattttctaggaaaggctcttctgcctaaggtttagacaaaagaaaaaacgaatttatgtgaatagacatttctccaaagagtgcatacaaatggccagcagtgtattaaaagatgctcaacatcactaatcatgggaaaatgcaaatcaaaaccatgatgagatgtcatattgaaaagagccagcttggtttaggcagacactaagggcagggtccccccaccccacaaatgtttaaaccagacattttgtgtataagggaacttgcacaggggacttgcctaaacatrcccacagtggaaaattccattccttaattcatgcacagtaagggaaataaatcaatatggagcgtctcagtgtatgggctggcaggcacattgaaagggttgggtggagccaccaggaat

SEQ ID NO: 142643 - DNA, 579 bp, Homo sapiens
agtgactgataggttaattagcaaattagtttggagaaaaagacaccttttcttcattgagaaaggtgccacaaaaatcacccacgttaaggcatatacattttcccttgcaaaaggatacctacacttcttagaagttctgaagccccttgaagataatggcccaggacattttctaggaaaggctcttctgcctaaggtttagacaaaagaaaaaacgaatttatgtgaatagacatttctccaaagagtgcatacaaatggccagcagtgtattaaaagatgctcaacatcactaatcatgggaaaatgcaaatcaaaaccatgatgagatgtcatattgaaaagagccagcttggtttaggcagacactaagggcagggtccccccaccccacaaatgtttaaaccagacattttgtgtataagggaacttgcacaggggacttgcctaaacatacccacagtggaaaattccrttccttaattcatgcacagtaagggaaataaatcaatatggagcgtctcagtgtatgggctggcaggcacattgaaagggttgggtggagccaccaggaat

SEQ ID NO: 142644 - DNA, 568 bp, Homo sapiens
ttaattagcaaattagtttggagaaaaagacaccttttcttcattgagaaaggtgccacaaaaatcacccacgttaaggcatatacattttcccttgcaaaaggatacctacacttcttagaagttctgaagccccttgaagataatggcccaggacattttctaggaaaggctcttctgcctaaggtttagacaaaagaaaaaacgaatttatgtgaatagacatttctccaaagagtgcatacaaatggccagcagtgtattaaaagatgctcaacatcactaatcatgggaaaatgcaaatcaaaaccatgatgagatgtcatattgaaaagagccagcttggtttaggcagacactaagggcagggtccccccaccccacaaatgtttaaaccagacattttgtgtataagggaacttgcacaggggacttgcctaaacatacccacagtggaaaattccattccttaattcatgcacagtaagggaaataaatcaatatggagcrtctcagtgtatgggctggcaggcacattgaaagggttgggtggagccaccaggaattc

SEQ ID NO: 142645 - DNA, 581 bp, Homo sapiens
aagaagcagtagcagcagcaacagcgatggcacagcaccacctaggcagcatctcagaccccacccaagacctactgaatctgaatttttttttccttctttttttagagataggctcctgctgtgtcacccatgttggaatgcagtggcatgataatagctcactcttacctcaaattcctgggctcaaacaatcctcccaccttagcctcttgagtagctggaactacaggtggcaccaccacacttgggctaatttttttttttcttattttgtagagacgaggtcttgccatgttgtgcagggtgatcttgaactggcttcaagcaatcctcctacctcaagctcctaaagagctcagattacaggcgtgagccaccgcgtggtcctgaatctgcgatttaaacaagatccccagttgacattaaagtttgcaargtactctcattaagactcacaggtatagtggtatctcctttcctcaactaaataatatatcaaaatattggcatttgaaatattgagtgttaaataccaacagggtagctgagaccatgccatttcttaggacattatatag

SEQ ID NO: 142646 - DNA, 601 bp, Homo sapiens
ccagggacacgaattaccctagctctcataagttcccctcaggcaacataaaatcagacaaattattagacaatgtaaaccagactagtctttaagtgacctaagttaccatggaaacatagtactatggaaatgggtactgaataggaagtcctttaagaggtaatattaggaactcaggatcaatgtgaaaatatatatctctaggtatgtgtacatataatgtgtctgtagggatatgtgtatatagatgtgttctgccttgagcactcttcctccggaccgccacaaaattgacttctcttcactcaggtgctatcttaaatgtcacctcagtggggttttccctaaaaatcccatgtaaaatagctccactactcctgcctgtcattcctcatgacattaccctattttcttcaaaacatttatcactttcttaaattatcttattcattttttaaaatgtatagtctttttccttcttcatttccagtatttataacagtgtctggaatatagtaattgatcaaaaaataattattaattgaatatgcctaaatagtarcaaaaattacctcttcagaaagataagaggacactg

SEQ ID NO: 142647 - DNA, 601 bp, Homo sapiens
gcaatggtaaaaataaatgaaagagttgagaacaaaactgaggaactcccccagaatgtaaagcaaaaaggaaatggaaaatagttgggggggggggggggaagggaaaaaaaaagaggaccagtacaaaaagtccaagatccagataagttccagaaagaacaaatgaaacagagaaggaaaaaacagaaggaaatgaatctacaagctgcaagggtccaatgagtacgagtccaattaatgaaaaagacccacaccaaagcacatcatccagaaaggaaaaatcagtaaacagaatggcattagtgttctcaaatgtaacaccrgaagctaacagacaaaagaaacacctcccaaattctaacggaaaatgttaaccagccaaacttgaaagtgtggaagtagaataaagacatctcttccaggcaggcaagatctcaaaaattttacctcctatgaaacctttcccataaagcactggatactgtgcaccatcccaaaataatagcataaaacaagaaagaaaaagatgtgagatccaagaacaaggagctccaacacagcagaggcaaaagaattcccacgatgatgatgatcacaa

SEQ ID NO: 142648 - DNA, 393 bp, Homo sapiens
gggtttttttgtgaggtttagaaaaataaacagaatctaacaataactgtctgaaagtgctaaattaccaagaaagacgtaacagattagcagtgcaaactgagcctgggtgggagacagccagcacacgagggatctgagaacgacccatagggtggtggtttctctgctcttcctcctcccgcagaatgagctgtcttcacacactgcagcctctctggtggagctgaaggctgagctgcattgtccagagagcctgaggtttagaaatggggtaccatgtmcactttcaaaccagcaacacccccagacttgaaaagatctggctcatgccatcaagtccatctctggctctcaggtaggactgctcctgtcaccctggttggaggtgaa

SEQ ID NO: 142649 - DNA, 567 bp, Homo sapiens
gagttgtaaccaaaaatgagacaacattcaatcccacgtccagcacacagcaacgggtcaacattagttgactctgaacacaacacacatgtaaggtccctgctaggggtcttaacgttctgtgagcatgtcagtcagcagctggctccttttgctcccttctagttgggagaattcagaccgtgtggcttgaggggaaagggagggatcaacccatgtggagaagcagagtttaggtgatcactcccaggacaccctcattcccaatgcagtgacaggcctcgtgtccccaagatccattctcaccttcaaagtcattggtgaatggctgtggtttcagtgtcatttttaaaacctttcaaacactgacttgcggtgacagacagaaaatacctcagagtcacagccagaccacgcagcctggcctgaggcacgaaacaaagcacctgttatcccaaagcaacaggaaggcgyggggcattgccacgggcaggcggtgccgagggggtgccaacctcaacactgcaggtcctccctgtccattaacatttgtttatggtgaaaact

SEQ ID NO: 142650 - DNA, 516 bp, Homo sapiens
acctcaagacttggacaggaacaagtggggaacagcaacagcgaaggcccggtggcgaggggtcctggttccccctgggagtggtatatgcagccgaaggatagggtgcctggggcctgggagtgtggggagaaaggaggaggggacacagttctgagagagaggtggggccggcccggaggcctcaatagctgcaggagcaggagggtgygagagtccacgatggccacggtgctcacgtgggaacagagccactgcagcaaggatacagcttcctcggctctggcaggaaataaggtcctgtggaccaggcagttgggagacagtcttaagtggtggacagagctctggccagagacaggagtcctgggtgctggctttgccagttactcatggcgggactctgggcatgcttggaacatgggagtcccatctgggagccagtgtgcttggagcagagcaggcaagtggcacagtgcgtgcagcaatcacacagggcctcgtgggccactaaca

SEQ ID NO: 142651 - DNA, 516 bp, Homo sapiens
acctcaagacttggacaggaacaagtggggaacagcaacagcgaaggcccggtggcgaggggtcctggttccccctgggagtggtatatgcagccgaaggatagggtgcctggggcctgggagtgtggggagaaaggaggaggggacacagttctgagagagaggtggggccggcccggaggcctcaatagctgcaggagcaggagggtgcgagagtccacgatggccacggtgctcacgtgggaacagagccactgcagcaaggatacagcttcctcggctctggcaggaaataaggtcctgtggaccaggcagttgggagacagtcttaagtggtggacagagctctggccagagacaggagtcctgggtgctggctttgccagttactcatggcgggactctgggcatgcttggaacatgggagtcccakctgggagccagtgtgcttggagcagagcaggcaagtggcacagtgcgtgcagcaatcacacagggcctcgtgggccactaaca

SEQ ID NO: 142652 - DNA, 468 bp, Homo sapiens
ttctctattgtctctgccacttgcattctttcaggccctctggcagctcctaggtttttgtcatcccagtttcctaatgagaaaacagggcttccctctcctggattcagtgagaacattcccagcaaaggattctgcattggtccagcttaaggggtgcccaccaccccaggaccaagcacggcagccccgcaaatagaagacccggtggatgcctggactacagggtaaaggatgctgacaaggagagggttccccgtgaggaaaacatcacagacaccacccctgggtggctaatgagctggscaaccaccccaagttgagtcactacaaagggaactttcgctacagcattgtttgtaataatgaaattttataaactatccacacgtttatcaacagggaaacaagtgaatacattgggatgcctcttaggaaattctatgcagccgtggaaaagattgaggt

SEQ ID NO: 142653 - DNA, 342 bp, Homo sapiens
tggggcaccatgaattgtgctcatataagacactgaacttattaagtgttgtatgtgtactgacggcttcatcaaacaactatttaactatttccccatctctgtccttctcctcaggccttcctactacctaagacacaacaatattgaaattagaccaattaataaccytacaatggcctctaacttttcatgtgactaagtgtttttagtctagaaatgattaagcttagtgaggaaggcatgataagagctgagataggctgaaagctaggcctcttatgtcaagcagttagctaaactgtgactgtaaacaaaaagcttctgatggaaatcttttcc

SEQ ID NO: 142654 - DNA, 342 bp, Homo sapiens
tggggcaccatgaattgtgctcatataagacactgaacttattaagtgttgtatgtgtactgacggcttcatcaaacaactatttaactatttccccatctctgtccttctcctcaggccttcctactacctaagacacaacaatattgaaattagaccaattaataaccctacaatggcctctaacttttcawgtgactaagtgtttttagtctagaaatgattaagcttagtgaggaaggcatgataagagctgagataggctgaaagctaggcctcttatgtcaagcagttagctaaactgtgactgtaaacaaaaagcttctgatggaaatcttttcc

SEQ ID NO: 142655 - DNA, 490 bp, Homo sapiens
ttagtgaggaaggcatgataagrgctgagataggctgaaagctaggcctcttatgtcaagcagttagctaaactgtgactgtaaacaaaaagcttctgatggaaatcttttccaatgagtacacaaatgataagaaagcaaaacagccttattgctgatatggagaaagtttgagtggtcgtgaaagaaaaccaaaccagccacaatattcccttaaaccaaatcctaattcagcacaaggcactactcttttcaattctgcgaaggctgagagaggtgaagaagctgaagaagaaaggttgaaagctagcagaggatggttcatgcagtttaaggaaagacaccgtctccataacataaaagtgcaaagtgcagtagcagtgttgatggagaagctgcaacaagttatccagaaggtctaactaagataattaatgaaggtggctacactaaacaacagattttcactggagacaaagcagccttctat

SEQ ID NO: 142656 - DNA, 461 bp, Homo sapiens
gagctgagataggctgaaagctaggcctcttatgtcaagcagttagctaaactgtgactgtaaacaaaaagcttctgatggaaatcttttccaatgagtacacaaatgataagaaagcaaaacagccttattgctgatatggagaaagtttgagtggtcgtgaaagaaaaccaaaccagcyacaatattcccttaaaccaaatcctaattcagcacaaggcactactcttttcaattctgcgaaggctgagagaggtgaagaagctgaagaagaaaggttgaaagctagcagaggatggttcatgcagtttaaggaaagacaccgtctccataacataaaagtgcaaagtgcagtagcagtgttgatggagaagctgcaacaagttatccagaaggtctaactaagataattaatgaaggtggctacactaaacaacagattttcactggagacaaagcag

SEQ ID NO: 142657 - DNA, 490 bp, Homo sapiens
ttagtgaggaaggcatgataagagctgagataggctgaaagctaggcctcttatgtcaagcagttagctaaactgtgactgtaaacaaaaagcttctgatggaaatcttttccaatgagtacacaaatgataagaaagcaaaacagccttattgctgatatggagaaagtttgagtggtcgtgaaagaaaaccaaaccagccacaatattcccttaaaccaaatcctaattcagcacaaggcactactcttttcaattctgcgaaggctgagagaggtgaagaagctgaagaagaaaggttgaaagctagcagaggatggttcatgcagtttaaggaaagacaccgtctccataacataaaagtgcaaagtgcagtagcagtgtygatggagaagctgcaacaagttatccagaaggtctaactaagataattaatgaaggtggctacactaaacaacagattttcactggagacaaagcagccttctat

SEQ ID NO: 142658 - DNA, 461 bp, Homo sapiens
gagctgagataggctgaaagctaggcctcttatgtcaagcagttagctaaactgtgactgtaaacaaaaagcttctgatggaaatcttttccaatgagtacacaaatgataagaaagcaaaacagccttattgctgatatggagaaagtttgagtggtcgtgaaagaaaaccaaaccagccacaatattcccttaaaccaaatcctaattcagcacaaggcactactcttttcaattctgcgaaggctgagagaggtgaagaagctgaagaagaaaggttgaaagctagcagaggatggttcatgcagtttaaggaaagacaccgtctccataacataaaagtgcaaagtgcagtagcagtgttgatggagaarctgcaacaagttatccagaaggtctaactaagataattaatgaaggtggctacactaaacaacagattttcactggagacaaagcag

SEQ ID NO: 142659 - DNA, 506 bp, Homo sapiens
tttcaaagcttcaaaggacaagttgactcgcttgttaagagccaatacaacgaatgactataagttgaagccagtgctcgtttagcattctgaaaaccttaggtcccttaaaaagtacattaaatctaccctacctgtgctctaggaatacagtaacaaaccctgcaagatggcacatctatttatagcatagtttactgaatattttaagcccaccatttagacctactgcttaaaaaaaaaaagtgcttcaaaatattgctgctcatcaacaatgtacctagttacccaagagctttgatggagatgtacaaggagataaatgtggttttcatgcctgctaatacaacatccattctgcagccattcttgatccattctgcagtgcatggatcaaggagtagttttaaatttcaagtcctattaagaaatgcattttgtagggcgatatctcccatagatagwgatggatcattcctctgatggatctgggcaaagtaaattga

SEQ ID NO: 142660 - DNA, 607 bp, Homo sapiens
gtctcaaaaaaaaaaaagtgtgagaattagttagggctaaagtatctgatatttttcgagaaggttgtttgatccagaagaaactcaatggtgrataagtgagaaggcagtagtagaaatgtcaggcaaaaatgggaagttttcttggaaatccacttcctaaaacctgtgctattgttttaaaggcctgaaatatcagagtatgtttaaagcaaacgattactgacccttctccctccacttccagaaaaatgtgtggattgctgtcctgaaaatgaataaaccaggttaaatagtagaaatgggaaaagttgtgattttgaagtatagtccacaggctggctgtcacagcaggaagctactaatttaatttatatcgttcttaaagtaatctacagagataactagtaaagataaagaaaatgattctatataggaagtcatcattccaggatttgaggaatccttccaagtaattttggcagaagcagcaagcatcatactttcaaagctaataaagaatgcaaggaaacaggacacattttgcaataagtagcaggaaaaataacagaaaaaagtcacaaaaattgctgttctggtattatta

SEQ ID NO: 142661 - DNA, 556 bp, Homo sapiens
aatagcaaaagctattcaggatgtaaaaaataggatcactcatacgttgctagtggaaaagtaaaataatagagtcactctgaaaaatagttgacagttttttaaaaatacagacatgttattcattctttccacatwttttttctgctgattaaccttctctacctcctctccaatgccccagtatccttactagcttctgtgggcactcaatgtacccacaaaattttaagaaaataattaaaaatttttcaaagtaaaataaaaaccagatgtgcatagaccatagatcccagcaattgcagttgtgggtgtttaatttggagtaatgaaacttgtgttcccacaaaaacttgttcatgaatgtctacaacagcttaatttgttacagttgaaaaggtcaataagctcaggtgaatgtttaatttgtggtgaatttatacaagaaaccatgaaatactattcagtcatcaaaggaacaaaatattaattaacgcaatcatttggatgtatttttaggaaattttgtcgagtgaataaaagtcaattatataca

SEQ ID NO: 142662 - DNA, 607 bp, Homo sapiens
gtctcaaaaaaaaaaaagtgtgagaattagttagggctaaagtatctgatatttttcgagaaggttgtttgatccagaagaaactcaatggtggataagtgagaaggcagtagtagaaatgtcaggcaaaaatgggaagttttcttggaaatccacttcctaaaacctgtgctattgttttaaaggcctgaaatatcagagtatgtttaaagcaaacgattactgacccttstccctccacttccagaaaaatgtgtggattgctgtcctgaaaatgaataaaccaggttaaatagtagaaatgggaaaagttgtgattttgaagtatagtccacaggctggctgtcacagcaggaagctactaatttaatttatatcgttcttaaagtaatctacagagataactagtaaagataaagaaaatgattctatataggaagtcatcattccaggatttgaggaatccttccaagtaattttggcagaagcagcaagcatcatactttcaaagctaataaagaatgcaaggaaacaggacacattttgcaataagtagcaggaaaaataacagaaaaaagtcacaaaaattgctgttctggtattatta

SEQ ID NO: 142663 - DNA, 428 bp, Homo sapiens
tacttttttactgagattattcacacttcagtcttcctgttttggtacaaaatattttagacaaactattatacttgttcatgtataactgtcactttagttataaaaaaagatgcttaagttaaaaataaaataattttaataaagaagtgtgagaagtaatatataacctctgagtcagtcagaatctagcaaagctttataggtcacattcattaaacattcttacattcactgtcagtggctctaattaagaatgatcatataaaaagatcttttcatttttcttgtytttttctagtttgcccaaatcgcaccaattatttcttctatactgttggttcatgagtttgtgactgtacatagttagtaattacttaaaatcagattttttttttacattttactgaaacatagtttaattcacc

SEQ ID NO: 142664 - DNA, 555 bp, Homo sapiens
  misc_feature (1)...(555): n = A,T,C or G
nnnnnnnngaattctcagtaaggataatccaggtacttcacttccatttatcctttgtaacatttacttaatacacactttgtgctcttatcraacctttctgttatatttttaaaaggtttatttgccctccagtttaactggagaaatagtgttttattcaaagttatgaaaaaggacttcctcattctattatttctacacaaatatttattacaaatatatagattacttaagtagctacttatctgatgacttacaaaatgatttgagaacaatttaaagttacgtggtgtgctttctgtacacataacccacatactaagtaatttataaaaatacataaaataggaaattaacttaaaggtcactaggctctcagaagaataaatgacctttgatgctggaaatcactatttttttcaggttttgcataatatattatgtatcactgctctcaagatatttcttataaaaattaaaagaaaactcatacagaatgaactgttataaaatatgtaaaattttagaaactctcataattatatgaatact

SEQ ID NO: 142665 - DNA, 555 bp, Homo sapiens
  misc_feature (1)...(555): n = A,T,C or G
nnnnnnnngaattctcagtaaggataatccaggtacttcacttccatttatcctttgtaacatttacttaatacacactttgtgctcttatcaaacytttctgttatatttttaaaaggtttatttgccctccagtttaactggagaaatagtgttttattcaaagttatgaaaaaggacttcctcattctattatttctacacaaatatttattacaaatatatagattacttaagtagctacttatctgatgacttacaaaatgatttgagaacaatttaaagttacgtggtgtgctttctgtacacataacccacatactaagtaatttataaaaatacataaaataggaaattaacttaaaggtcactaggctctcagaagaataaatgacctttgatgctggaaatcactatttttttcaggttttgcataatatattatgtatcactgctctcaagatatttcttataaaaattaaaagaaaactcatacagaatgaactgttataaaatatgtaaaattttagaaactctcataattatatgaatact

SEQ ID NO: 142666 - DNA, 555 bp, Homo sapiens
  misc_feature (1)...(555): n = A,T,C or G
nnnnnnnngaattctcagtaaggataatccaggtacttcacttccatttatcctttgtaacatttacttaatacacactttgtgctcttatcaaacctttctgttatatttttaaaaggtttatttgccctccagkttaactggagaaatagtgttttattcaaagttatgaaaaaggacttcctcattctattatttctacacaaatatttattacaaatatatagattacttaagtagctacttatctgatgacttacaaaatgatttgagaacaatttaaagttacgtggtgtgctttctgtacacataacccacatactaagtaatttataaaaatacataaaataggaaattaacttaaaggtcactaggctctcagaagaataaatgacctttgatgctggaaatcactatttttttcaggttttgcataatatattatgtatcactgctctcaagatatttcttataaaaattaaaagaaaactcatacagaatgaactgttataaaatatgtaaaattttagaaactctcataattatatgaatact

SEQ ID NO: 142667 - DNA, 555 bp, Homo sapiens
  misc_feature (1)...(555): n = A,T,C or G
nnnnnnnngaattctcagtaaggataatccaggtacttcacttccatttatcctttgtaacatttacttaatacacactttgtgctcttatcaaacctttctgttatatttttaaaaggtttatttgccctccagtttaactggagaaatagtgttttattcaaagttatgaaaaaggacttcctcattctattatttctacacaaatatttattacaaatatatagattacttaagtagctacttatctgatgacttacaaaatgatttgagaacaatttaaagttacgtggtgtgctttctgtacacataacccacatactaagtaatttataaaaatmcataaaataggaaattaacttaaaggtcactaggctctcagaagaataaatgacctttgatgctggaaatcactatttttttcaggttttgcataatatattatgtatcactgctctcaagatatttcttataaaaattaaaagaaaactcatacagaatgaactgttataaaatatgtaaaattttagaaactctcataattatatgaatact

SEQ ID NO: 142668 - DNA, 573 bp, Homo sapiens
aagcttgctctgaaattgctttacaatcctgtactctttctatccaccaattttgacaccaatgggatatgaaactttacgtttaaactcagtatcaccctttcatgtgaattcagaaattccaagttggtgatcatttttatatgacgttagcaacaattaaactaacgtctctttgcctggacttcttttccagaaagtgtcctatgtggtggagggtggaggagtgaaagggggctaggaagagagtgtctaatttagtcttgaaatattacagtggcttcaatactgttgtgtacagggatctttactgttttacatattatttcatgtgtacatgggctcaattacttttgaaacaaattagccaaaaaagataactgatgcttaagcctatcacttagctaaatacatataagaatagctgtatttcaataggcatgaagacaagaataaggatgagatcatgtccttgggtgaagcaaattttgrcttaattctctattgaatattttatcaggggaatcaaaaagttgagaagattctgttctgccatgtaaactaaaagccatc

SEQ ID NO: 142669 - DNA, 579 bp, Homo sapiens
tagatctggtgacatgaacagtgtgagatggtgagtttttgaggcacagaaagctcaaataccactgacacctctaaacttgtcagttaaaatgtggactgcattgtttcaagccrtcacaaaatccaaagtaggcagacattacctaatgtattttgaagagataatttcacatccttgaaaggaatccagactgaagactgccttcgttggcacctgagatgacccctcagagagccagtgaaaatgtagaaaagacacagaagccttaaagtttttacataagttatacttaaaaaaaaaaagatggaaagataagctgtgtagccaaagagaagaatgttctttagaaagagtgaattacaaaagggacatgaacgcatggggtattagagtaagtgctgacaatattctgatgacgggaaaattgagactaagattagtgatatggtttggctctgtgtccccatccaaatctcatcttgaattgtagttcccacaatccccaggtgttgtggaagtgacctggttggaggtaattgaatcatgggcgtggttacccccatgctactcttcttg

SEQ ID NO: 142670 - DNA, 581 bp, Homo sapiens
ttagatctggtgacatgaacagtgtgagatggtgagtttttgaggcacagaaagctcaaataccactgacacctctaaacttgtcagttaaaatgtggactgcattgtttcaagccatcacaaaatccaaagtaggcagacattacctaatgtattttgaagagataatttcacatccttgaaaggaatccagactgaagactgccttcgttggcacctgagatgacccctcagagagccagtgaaaatgtagaaaagacacagaagccttaaagtttttacataagttatacttaaaaaaaaaaagatggaaagataagctgtgtagccaaagagaagaatgttctttagaaagagtgaattacaaaagggacatgaacgcatggggtattaragtaagtgctgacaatattctgatgacgggaaaattgagactaagattagtgatatggtttggctctgtgtccccatccaaatctcatcttgaattgtagttcccacaatccccaggtgttgtggaagtgacctggttggaggtaattgaatcatgggcgtggttacccccatgctactcttcttgt

SEQ ID NO: 142671 - DNA, 553 bp, Homo sapiens
atgaacagtgtgagatggtgagtttttgaggcacagaaagctcaaataccactgacacctctaaacttgtcagttaaaatgtggactgcattgtttcaagccatcacaaaatccaaagtaggcagacattacctaatgtattttgaagagataatttcacatccttgaaaggaatccagactgaagactgccttcgttggcacctgagatgacccctcagagagccagtgaaaatgtagaaaagacacagaagccttaaagtttttacataagttatacttaaaaaaaaaaagatggaaagataagctgtgtagccaaagagaagaatgttctttagaaagagtgaattacaaaagggacatgaacgcatggggtattagagtaagtgctgacaatattctgatgaygggaaaattgagactaagattagtgatatggtttggctctgtgtccccatccaaatctcatcttgaattgtagttcccacaatccccaggtgttgtggaagtgacctggttggaggtaattgaatcatgggcgtggttacccccat

SEQ ID NO: 142672 - DNA, 562 bp, Homo sapiens
agtttttgaggcacagaaagctcaaataccactgacacctctaaacttgtcagttaaaatgtggactgcattgtttcaagccatcacaaaatccaaagtaggcagacattacctaatgtattttgaagagataatttcacatccttgaaaggaatccagactgaagactgccttcgttggcacctgagatgacccctcagagagccagtgaaaatgtagaaaagacacagaagccttaaagtttttacataagttatacttaaaaaaaaaaagatggaaagataagctgtgtagccaaagagaagaatgttctttagaaagagtgaattacaaaagggacatgaacgcatggggtattagagtaagtgctgacaatattctgatgacgggaaaattgagactaagattagtgatatggtttggctctgtgtccccatccaaatctcatcttgaattgtagttcccacaatccccaggtgttgtggaagtgacctggttggaggtaattgaatcatgggcgtkgttacccccatgctactcttcttgtgacagtgagtacgtt

SEQ ID NO: 142673 - DNA, 591 bp, Homo sapiens
ctgtgtagccaaagagaagaatgttctttagaaagagtgaattacaaaagggacatgaacgcatggggtattagagtaagtgctgacaatattctgatgacgggaaaattgagactaagattagtgatatggtttggctctgtgtccccatccaaatctcatcttgaattgtagttcccacaatccccaggtgttgtggaagtgacctggttggaggtaattgaatcatgggcgtggttacccccatgctactcttcttgtgacagtgagtacgttttcatgagatctgatggttttgtaaggggcttttccccttttgctcagcacttccccttcctgccaccatgtgaagaaggaagtgtttgcttccccttttgtcatgatagtaagtttccagaatcctccccagtcctgaggaactatgagtctrttaaatctcttttctttctaaattaccctgtctctagtacatgtttattagcagcatgagaatggactaatacaactagtcttgactttcttggggccctgaatgaaaagcagctttgtatttgtgcttcctcataaagtgcccattgactgtaaagaaaa

SEQ ID NO: 142674 - DNA, 604 bp, Homo sapiens
acactccagcctggtggcagagcaagactccatctcaaaaaacaaaaaaagaaaaaaaaaacactctatcattctgtctctttatagacacattatatactctggaagtagaatctagagtccataaaaaagattacaaataataaatgaaatatttagaataacgactaacacacagtggccattcagtatgtaatagttttccttataataattgttatatcatatttttcacaatatagattgggaaaaagcttctgagtgactaagtatatcacacaaaatctatggtacaatttatggggctattttaacttattcgcatttcgaatacatgttcttatctggtttctagggccacttattagaagcagcaaattaggacagaaaagagggactgttacagaaaaggagagtggtaartgtgagaaatggtggctaaaggctattagtggttttgtgaaaactacaaaattataacattgggaacataaactgaaacattaagaaaaacagcccactggaaccacttcgtttaggagtaagataaacactagttcaataatccctgaggacaattcagtcctaaccgtgttcctggatc

SEQ ID NO: 142675 - DNA, 504 bp, Homo sapiens
ctttccaaaacatgtgtggctcttcagtagctattttgctgccttctacctactccggtgtgctgttggctatgtccagtgctgaggactggggaggaggcttttcttcccgctttaggatcatggtgatgtccttgctgasgactggggaggaggcttttcctcccactttaggatcatggtgatgtccttccagaatttgaactgtgctttggtcctgagcatgtcctggggtgcaacattcattgttctcatttgttagagaatacaagatcagaatttaaatagtcactgttttccaagatgcaaagtgatacgctcttggtgttttaaaatcctatctgttgatctgattggctggtattccagtcttccctgtttattgctctgtgactggtgggatttgccaataggtccaagtactttctctttccagaagcataccataatattggtgtaggatttgtggccggaacttactgggcatcaccccagttactgtcc

SEQ ID NO: 142676 - DNA, 504 bp, Homo sapiens
ctttccaaaacatgtgtggctcttcagtagctattttgctgccttctacctactccggtgtgctgttggctatgtccagtgctgaggactggggaggaggcttttcttcccgctttaggatcatggtgatgtccttgctgaggactggggaggaggyttttcctcccactttaggatcatggtgatgtccttccagaatttgaactgtgctttggtcctgagcatgtcctggggtgcaacattcattgttctcatttgttagagaatacaagatcagaatttaaatagtcactgttttccaagatgcaaagtgatacgctcttggtgttttaaaatcctatctgttgatctgattggctggtattccagtcttccctgtttattgctctgtgactggtgggatttgccaataggtccaagtactttctctttccagaagcataccataatattggtgtaggatttgtggccggaacttactgggcatcaccccagttactgtcc

SEQ ID NO: 142677 - DNA, 481 bp, Homo sapiens
ctggctgctccgtgatggccattaaatccctgctaggaattaggaatccattcctgtttcagggtcctcttcatcaccttcaaattgtttatgtacagtgtacttttgaaggctatacactttatatttttaacatttaaaagacaaatattgatgctatttattcacagctaagtatatacgcatttaaatattaatccaatatatatgtatttggtgcacattacacgctgagtacttttctaggccctgaggctagagctgggcacaacggagacaagtccttgctttgtgaagcagaaaacagatgacttccagtaaagtgctaagttgtgcttgggaaaaataaaattagaaaagcagccagaaggtgtactggagatgacaagaaactgagaagagaggttgctgttatatagaaagggcrgagaaggcttctagcaaaaagcagcattttaccagctatctgaaggatatgtga

SEQ ID NO: 142678 - DNA, 475 bp, Homo sapiens
taaatatgtgaatacttaatggyttaaactttccaaaatgatgaaagatacatgtgtccattcaagaaacacagtaaatttcaaggaaaaaataaccactgaattaacacttaacaataaatctgatgtgagagaaagagagaaaacaagagccggaaagacagagagagacagagaaaaagaaatccttaaaacaaccataggggaaaaaaaaagacactttaaaatgtggcagctggactacttattaagagcaacatagtaacctaaatacattttataatttacttcctttcatcacactaaagatatcttgatttacaatcttgatttttaaacccaacatataaatccttaatttatgaacacctgatactcaccaaggaaaccctaaaagacagaagagccaaaatggccagcaagacagagccaggaagatcctccactgaaagagctgactctcaagaaaaccagc

SEQ ID NO: 142679 - DNA, 519 bp, Homo sapiens
cagtactgcccttgctgccctccaactggggagggaacaagaccccaagtgctttactcacacctccagcacactgcagctaccctacagagaagagatgaatctrtcttctcacaagccctgacaccctctgctcatcaccagtagtgtcccccagattggttccaaaatgcacaggccccatcaaaggttgaccactccatttggcagcatctctgcatttctgtatggtggagctgcaaaagacaagtgatagacctccagacattaccactgccaaggtcctcacctcttttgtccccaagcttgtgaggaaacaaaaaccttgagctcaccacagggctgtgatgtgcagcactgcagtgacaagccaagctatgcagccagcatttcagtaggagggaagcctacacacacagaatactgacacggagcatggctgcaaatgtgagaaaatacacatttgtgtatgaacaagagcctacctatcagccattataggtaggtaggctgaacaag

SEQ ID NO: 142680 - DNA, 519 bp, Homo sapiens
cagtactgcccttgctgccctccaactggggagggaacaagaccccaagtgctttactcacacctccagcacactgcagctaccctacagagaagagatgaatctatcttctcacaagccctgacaccctctgctcatcaccagtagtgtcccccagmttggttccaaaatgcacaggccccatcaaaggttgaccactccatttggcagcatctctgcatttctgtatggtggagctgcaaaagacaagtgatagacctccagacattaccactgccaaggtcctcacctcttttgtccccaagcttgtgaggaaacaaaaaccttgagctcaccacagggctgtgatgtgcagcactgcagtgacaagccaagctatgcagccagcatttcagtaggagggaagcctacacacacagaatactgacacggagcatggctgcaaatgtgagaaaatacacatttgtgtatgaacaagagcctacctatcagccattataggtaggtaggctgaacaag

SEQ ID NO: 142681 - DNA, 519 bp, Homo sapiens
cagtactgcccttgctgccctccaactggggagggaacaagaccccaagtgctttactcacacctccagcacactgcagctaccctacagagaagagatgaatctatcttctcacaagccctgacaccctctgctcatcaccagtagtgtcccccagattggttccaaaatgcacaggccccatcaaaggttgaccactccatttggcagcatctctgcatttctgtatggtggagctgcaaaagacaagtgatagacctccagacattaccactgccaaggtcctcacctcttttgtccccaagcttgtgaggaaacaaaaaccttgagctcaccmcagggctgtgatgtgcagcactgcagtgacaagccaagctatgcagccagcatttcagtaggagggaagcctacacacacagaatactgacacggagcatggctgcaaatgtgagaaaatacacatttgtgtatgaacaagagcctacctatcagccattataggtaggtaggctgaacaag

SEQ ID NO: 142682 - DNA, 519 bp, Homo sapiens
cagtactgcccttgctgccctccaactggggagggaacaagaccccaagtgctttactcacacctccagcacactgcagctaccctacagagaagagatgaatctatcttctcacaagccctgacaccctctgctcatcaccagtagtgtcccccagattggttccaaaatgcacaggccccatcaaaggttgaccactccatttggcagcatctctgcatttctgtatggtggagctgcaaaagacaagtgatagacctccagacattaccactgccaaggtcctcacctcttttgtccccaagcttgtgaggaaacaaaaaccttgagctcaccacagggctgtgatgtgcagcactgcagtgacaagccaagctatgcagccagcatttcagtaggagggaagcctacacacacagaatactgacacggagcatggctgcaaatgtgagaaaatayacatttgtgtatgaacaagagcctacctatcagccattataggtaggtaggctgaacaag

SEQ ID NO: 142683 - DNA, 505 bp, Homo sapiens
aaggaatcaatacatgtgataaaggccttcacagaaagggagactcattatctaaaggacagatatagagaaaggccaggtatatttctttgatgaaaggacattgcaaatccaatgtcttgggctgaatggcagagtcagaaatgggaccaaggtctcagggtccccaaatggaggccaaaggccttatatttctgtcaaggtaagaggagaaaagaaagaaattcagacttttttttttgatacatgagtccacataatatttccaggtcctcttagggagaaaaactggtgacactggaaggttttagaatgaatgcattgaccagtagtgcttatctacctgtgatgtggctttggtccatattggatgtyagtgaccatggttctcacttgtgagtgcattattggcattgatcccccgacttcttgtagcacaaaaatcaccattgcctaaggggacatactctttgacaactcagaattcaagccataacagtggggc

SEQ ID NO: 142684 - DNA, 505 bp, Homo sapiens
aaggaatcaatacatgtgataaaggccttcacagaaagggagactcattatctaaaggacagatatagagaaaggccaggtatatttctttgatgaaaggacattgcaaatccaatgtcttgggctgaatggcagagtcagaaatgggaccaaggtctcagggtccccaaatggaggccaaaggccttatatttctgtcaaggtaagaggagaaaagaaagaaattcagacttttttttttgatacatgagtccacataatatttccaggtcctcttagggagaaaaactggtgacactggaaggttttagaatgaatgcattgaccagtagtgcttatctacctgtgatgtggctttggtccatattggatgtcagtgaccatggttctcacttgtgagtgcattattggcattgaycccccgacttcttgtagcacaaaaatcaccattgcctaaggggacatactctttgacaactcagaattcaagccataacagtggggc

SEQ ID NO: 142685 - DNA, 505 bp, Homo sapiens
aaggaatcaatacatgtgataaaggccttcacagaaagggagactcattatctaaaggacagatatagagaaaggccaggtatatttctttgatgaaaggacattgcaaatccaatgtcttgggctgaatggcagagtcagaaatgggaccaaggtctcagggtccccaaatggaggccaaaggccttatatttctgtcaaggtaagaggagaaaagaaagaaattcagacttttttttttgatacatgagtccacataatatttccaggtcctcttagggagaaaaactggtgacactggaaggttttagaatgaatgcattgaccagtagtgcttatctacctgtgatgtggctttggtccatattggatgtcagtgaccatggttctcacttgtgagtgcattattggcattgatcccccgacttcttgtarcacaaaaatcaccattgcctaaggggacatactctttgacaactcagaattcaagccataacagtggggc

SEQ ID NO: 142686 - DNA, 373 bp, Homo sapiens
ataactttgtggaaaaatgtcatgaccacaactaacgaatctttggtgggcaggtgctttgatgcaccagkctcctttaattacaaagatgtgtgttcatgatgatgaagagaacaagtatcggagagtgctagccctctgcgtagaggctttaggattgtatggggtaaactgtatgaggaaaactcaggcaactactgccatcaatgagacttagctagtgagtgccaataccttcatcctcataaataatactagcacagggggtctgtgtgtgccagagggctacatctttatctgtgggcaatctggggtgactcaaatacggggtgggcaaagtcatgcctggaaaacttacaggtcctgccccatt

SEQ ID NO: 142687 - DNA, 400 bp, Homo sapiens
atcttttaacttaaataactttgtggaaaaatgtcatgaccacaactaacgaatctttggtgggcaggtgctttgatgcaccaggctcctttaattacaaagatgtgtgttcatgatgatgaagagaacaagtatcggagagtgctagccctctgcrtagaggctttaggattgtatggggtaaactgtatgaggaaaactcaggcaactactgccatcaatgagacttagctagtgagtgccaataccttcatcctcataaataatactagcacagggggtctgtgtgtgccagagggctacatctttatctgtgggcaatctggggtgactcaaatacggggtgggcaaagtcatgcctggaaaacttacaggtcctgccccattgagtgtgctaggg

SEQ ID NO: 142688 - DNA, 373 bp, Homo sapiens
ataactttgtggaaaaatgtcatgaccacaactaacgaatctttggtgggcaggtgctttgatgcaccaggctcctttaattacaaagatgtgtgttcatgatgatgaagagaacaagtatcggagagtgctagccctctgcgtagrggctttaggattgtatggggtaaactgtatgaggaaaactcaggcaactactgccatcaatgagacttagctagtgagtgccaataccttcatcctcataaataatactagcacagggggtctgtgtgtgccagagggctacatctttatctgtgggcaatctggggtgactcaaatacggggtgggcaaagtcatgcctggaaaacttacaggtcctgccccatt

SEQ ID NO: 142689 - DNA, 400 bp, Homo sapiens
atcttttaacttaaataactttgtggaaaaatgtcatgaccacaactaacgaatctttggtgggcaggtgctttgatgcaccaggctcctttaattacaaagatgtgtgttcatgatgatgaagagaacaagtatcggagagtgctagccctctgcgtagaggctttaggattgtatggggtaaamtgtatgaggaaaactcaggcaactactgccatcaatgagacttagctagtgagtgccaataccttcatcctcataaataatactagcacagggggtctgtgtgtgccagagggctacatctttatctgtgggcaatctggggtgactcaaatacggggtgggcaaagtcatgcctggaaaacttacaggtcctgccccattgagtgtgctaggg

SEQ ID NO: 142690 - DNA, 367 bp, Homo sapiens
ttgtggaaaaatgtcatgaccacaactaacgaatctttggtgggcaggtgctttgatgcaccaggctcctttaattacaaagatgtgtgttcatgatgatgaagagaacaagtatcggagagtgctagccctctgcgtagaggctttaggattgtatggggtaaactgtatgaggaaaactcaggcaactactgccatcaatgagacttagctagtgagtgccaataccttcatcctcataaataatactagcacagggggtctgtgtgtgccagagggctacatctttatctgtgggcaatctggggtgactcaaatrcggggtgggcaaagtcatgcctggaaaacttacaggtcctgccccatt

SEQ ID NO: 142691 - DNA, 545 bp, Homo sapiens
ctgcactgatatcacaattttgtttcttcagtgtgagcattggcagcctgtggcctatggttttggtacagcctgcaaggtaataatggtttttagagatttaaatgattgaaacaattttttaaaataacattttgtagcatataacgattgcataaagtaaaaactgcagtgttttcataaataacaaggttttttttttggacacaagatcattcacttacatgtggtctatagatgttttcaggctattatgtcagagttgagtggttgcaacagaaactgyatgattgtcaaagcctaacatacttaaaatctgacgctttgtagaaaaagctaacatttgatctaaagttttctgtaaagatacatctacattatgtttatcgtaatttatatttatttatctgcctactggttgcagttttgaaaaactataatcttccagaaaatagaaactataatatttttaattagacctcaagcaaaattattttaaaatgtggtctcaatttttaagaaagtggggaagaatgctttttttt

SEQ ID NO: 142692 - DNA, 545 bp, Homo sapiens
ctgcactgatatcacaattttgtttcttcagtgtgagcattggcagcctgtggcctatggttttggtacagcctgcaaggtaataatggtttttagagatttaaatgattgaaacaattttttaaaataacattttgtagcatataacgattgcataaagtaaaaactgcagtgttttcataaataacaaggttttttttttggacacaagatcattcacttacatgtggtctatagatgttttcaggctattatgtcagagttgagtggttgcaacagaaactgtatgattgtcaaagcctaacatacttaaaatctgacsctttgtagaaaaagctaacatttgatctaaagttttctgtaaagatacatctacattatgtttatcgtaatttatatttatttatctgcctactggttgcagttttgaaaaactataatcttccagaaaatagaaactataatatttttaattagacctcaagcaaaattattttaaaatgtggtctcaatttttaagaaagtggggaagaatgctttttttt

SEQ ID NO: 142693 - DNA, 423 bp, Homo sapiens
ataaggctcagtactcagtaggtgctgtgcaaatacttagtgaggagtcaagagcccatgtgcatgggacagatagtgaagcacagttagagatttgaaaggaagtcacaccgttggttacagctgtcatccagcaagtagggcttaagcttgttcagaaaaacagatagggtgtggcttaggcaggataagaaagcataaaaaacaaaagatggaaaaacattttgggaaaagtgagctaattaaagatatgatcagtgartagaggagccgcaagttttaagcaaagcagaccatttcctacacataaaattaacagtagaaaaattaaaaaataatttattgctcacatttttggctttgaaggccatatagttaagttgttgcaactacttcactctgcttttgtgttgtgaaagcagc

SEQ ID NO: 142694 - DNA, 423 bp, Homo sapiens
ataaggctcagtactcagtaggtgctgtgcaaatacttagtgaggagtcaagagcccatgtgcatgggacagatagtgaagcacagttagagatttgaaaggaagtcacaccgttggttacagctgtcatccagcaagtagggcttaagcttgttcagaaaaacagatagggtgtggcttaggcaggataagaaagcataaaaaacaaaagatggaaaaacattttgggaaaagtgagctaattaaagatatgatcagtgagtagaggagccrcaagttttaagcaaagcagaccatttcctacacataaaattaacagtagaaaaattaaaaaataatttattgctcacatttttggctttgaaggccatatagttaagttgttgcaactacttcactctgcttttgtgttgtgaaagcagc

SEQ ID NO: 142695 - DNA, 578 bp, Homo sapiens
ttccttgagtttattataaacatcaatgccgttagggaatcagaagaggactccaggaagcaaagagaagaaaagggttccttctctcccgtttccaagactggaagagcccctctgtgtggagcagggcacgctagtgttaggtaggggttcctagagaggaaaggcctgctttttgtctatcagccacagctctgggttktctgcaaatcctgagaaagctttgtgagatctgagagcagagatgacctctgtctggaaagagtggtgaggaggtggagggagagggctgcagagagcctgggcataaatgccatagaaacagtcatgaagtctcccataatgttgggtggcacagaaatgtaaggccagatcctgtgtctccatctgtggtatagaagcagtcaagatatccaccaaccagaaagagaacacatgtacagaagtgtgtgaccataggtggcatgtgtgtgtgtgtggatgagggagcaccccaagaggatggcagcatctcattggatgctgaagtgaacagatgacatctaggaccaggtgctcccccaaaccatggtgccctg

SEQ ID NO: 142696 - DNA, 505 bp, Homo sapiens
ttattataaacatcaatgccgttagggaatcagaagaggactccaggaagcaaagagaagaaaagggttccttctctcccgtttccaagactggaagagcccctctgtgtggagcagggcacgctagtgttaggtaggggttcctagagaggaaaggcctgctttttgtctatcagccacagctctgggttgtctgcaaatcctgagaaagctttgtgagatctgagagcagagatgacctctgtctggaaagagtkgtgaggaggtggagggagagggctgcagagagcctgggcataaatgccatagaaacagtcatgaagtctcccataatgttgggtggcacagaaatgtaaggccagatcctgtgtctccatctgtggtatagaagcagtcaagatatccaccaaccagaaagagaacacatgtacagaagtgtgtgaccataggtggcatgtgtgtgtgtgtggatgagggagcaccccaagaggatggcagcatctca

SEQ ID NO: 142697 - DNA, 578 bp, Homo sapiens
ttccttgagtttattataaacatcaatgccgttagggaatcagaagaggactccaggaagcaaagagaagaaaagggttccttctctcccgtttccaagactggaagagcccctctgtgtggagcagggcacgctagtgttaggtaggggttcctagagaggaaaggcctgctttttgtctatcagccacagctctgggttgtctgcaaatcctgagaaagctttgtgagatctgagagcagagatgacctctgtctggaaagagtggtgaggaggtggagggagagggctgcagagagcctgggcataaatgccatagaaacagtcatgaagtctcccataatgttgggtgrcacagaaatgtaaggccagatcctgtgtctccatctgtggtatagaagcagtcaagatatccaccaaccagaaagagaacacatgtacagaagtgtgtgaccataggtggcatgtgtgtgtgtgtggatgagggagcaccccaagaggatggcagcatctcattggatgctgaagtgaacagatgacatctaggaccaggtgctcccccaaaccatggtgccctg

SEQ ID NO: 142698 - DNA, 411 bp, Homo sapiens
ttcctagagaggaaaggcctgctttttgtctatcagccacagctctgggttgtctgcaaatcctgagaaagctttgtgagatctgagagcagagatgacctctgtctggaaagagtggtgaggaggtggagggagagggctgcagagagcctgggcataaatgccatagaaacagtcatgaagtctcccataatgttgggtggcacagaaatgtaaggccagatcctgtgtctccatctgtggtatagaagcagtcaagakatccaccaaccagaaagagaacacatgtacagaagtgtgtgaccataggtggcatgtgtgtgtgtgtggatgagggagcaccccaagaggatggcagcatctcattggatgctgaagtgaacagatgacatctaggaccaggtgctcccc

SEQ ID NO: 142699 - DNA, 526 bp, Homo sapiens
aggactccaggaagcaaagagaagaaaagggttccttctctcccgtttccaagactggaagagcccctctgtgtggagcagggcacgctagtgttaggtaggggttcctagagaggaaaggcctgctttttgtctatcagccacagctctgggttgtctgcaaatcctgagaaagctttgtgagatctgagagcagagatgacctctgtctggaaagagtggtgaggaggtggagggagagggctgcagagagcctgggcataaatgccatagaaacagtcatgaagtctcccataatgttgggtggcacagaaatgtaaggccagatcctgtgtctccatctgtggtatagaagcagtcaagatatccaccaaccagaaagagaacacatgtacagaagtgtgtgaccataggtggcrtgtgtgtgtgtgtggatgagggagcaccccaagaggatggcagcatctcattggatgctgaagtgaacagatgacatctaggaccaggtgctcccccaaaccatggt

SEQ ID NO: 142700 - DNA, 576 bp, Homo sapiens
agtttattataaacatcaatgccgttagggaatcagaagaggactccaggaagcaaagagaagaaaagggttccttctctcccgtttccaagactggaagagcccctctgtgtggagcagggcacgctagtgttaggtaggggttcctagagaggaaaggcctgctttttgtctatcagccacagctctgggttgtctgcaaatcctgagaaagctttgtgagatctgagagcagagatgacctctgtctggaaagagtggtgaggaggtggagggagagggctgcagagagcctgggcataaatgccatagaaacagtcatgaagtctcccataatgttgggtggcacagaaatgtaaggccagatcctgtgtctccatctgtggtatagaagcagtcaagatatccaccaaccagaaagagaacacatgtacagaagtgtgtgaccataggtggcatgtgtgtgtgtgtggatgagggarcaccccaagaggatggcagcatctcattggatgctgaagtgaacagatgacatctaggaccaggtgctcccccaaaccatggtgccctggaact

SEQ ID NO: 142701 - DNA, 635 bp, Homo sapiens
gttgctactgtaatatggggagaaaccacaaaccatacctttaagagatagcaacttaatcaatacatattgtgtgtcctctgactactccactgagcagaatttccctgtctctctccctctcttagtgactccaatttgtgagacacaacaatagtgaaattaggccagttaataaccttataatgggctctaagtgttcaagtgtaagaaagagtttcatgtgtgttactttaaatcwaaagctggaaatacttaagcctagcaaggaagacatgtcaaaagccaacttagatctaaagctagaactcttgtttttaacagttagccaagttgtgaatgcaaagaaaaaattcttgaaggaaatcaaaacttctactccagtgaacacaggaatagtaagaaagagaaacagccttattgctgagacttggaatgttttagtggttcggccagaaagtcaaatcagccacaacattatcttcagccaaaacgcaatctagaccaaagctctaatgctcttcaattctgtgaaggctgagagaggtaagagaaaactgcagaagaaaagttggaagctgacaaaggttggttcttaaggtggaaggaaaggagccatcttaacaacataaaag

SEQ ID NO: 142702 - DNA, 578 bp, Homo sapiens
gccatggtctcaggtttttcacatgcaaatgaacagtttggacctgataatctctgaggacccttccagctctgacaatgtgattctttgagctgaattgttggtagtgttaccaacagatgagatgagatgttggatacaaagcacatagctygaagcttggcacttatgtggtcaaaaaaatactaattcctgatatcctcccagtggtattatctagtgagccttctttcaaattcaaaggttttatttctcagatataatttacgtgaaaggctgtgattttctcctttctctgagttccaagtgcaggttttgttctgaagaagtcacacaatggactgatttgtcagtgtatttgtttccaaggatttcccttctacagttcttttcataaaagtggcactggttgacctgaattcatgaccaggctgagacagggctttctgcaaccctgttgaggccaatctcgctgtctgcttctattgcattcttcaataggacacttagtccattgggccagtgcaccatgccaaaaggagttactaaattgttaaagggggcctcagcgagttcac

SEQ ID NO: 142703 - DNA, 610 bp, Homo sapiens
ccacacacacaaggagcaaatcccatcttcacttcctatttcttgccaggtattaatccagctagctatgccccagtttccttactaagtaatacctacttatgccggtgctttagtagaatgatacagagcagaaggtggttaagacaatacatggctcacagcaggggtttgaagagacaactattattaattaggtcttccataaatatgtgtgatttggtgctcttactagctagtgtccagggggcctctcttgtacttttttttgtagtagtctaggaaaattggagctaaataaggtgaaagcctgcagagaggtgcagcacggagcattcccatacattttagcgactgtttattgtggatgtgtcatgtctatttgcctccttcctctttcaaagaattgatgccatccagcrttggcgtgttttctcttcagttcttagagccctgcttactaagtcagtgaaattgtttatattgctttcaaagggccaagaagtgaaaccatttgaaaagagataggattatgttggggttttagaaagctgacatgtaacactaattttttccatctcgcattcacaatatattgagagaggaccca

SEQ ID NO: 142704 - DNA, 578 bp, Homo sapiens
gtctctttgttccaatggctatcttgggtaatcagccgtccacaggtttggttggtgttttcttgaattctcaggatagttctgaactagctgtttgcaactctctcaaacaaatgggcaaagattggccaatcagagctccatgcctactttgttcaagattagcctttggaatgtcttaagcaaaaccataattggataggcatacattgccagaggggagtgtctagagagggaaggaatgaaagagtgagagggaaaaaggaagggggagaaaagagaacgtgtgattaaagtrtatttttaaaaccaaggtctatagttacaatcaaataatgtgaatacttattctgcaaccaagtgactcttctatttatttatccataataagtaggtatgtcttttgaaggaccttataattaaataatgattgtttcattaaataaatgttttttatattacaaatatagaagtgaggttgataattctaaggtcatttctgataattgtatacatttaagtattttttttatcatctaagtcttcatcttgtgtatcctttaaaagtttatattttt

SEQ ID NO: 142705 - DNA, 563 bp, Homo sapiens
tttccggtgcttaccacaaaatgtggcttaaaatagttgtttaacaaataatactttgtgattaagtgaggttaaaaaagacaacaatatccacttaaagccattaaagtagcagcatttattgagatagctcgttgttcayattattggtatagaaacacagtagctttcctatatgcagaagttaattcttaaaataaaaattggacaacttgtccatttatagcattaaaaagattaataataatattaacaaatatatacattgaatatactatagaaatgacactttaaactctacagagatgtaaatgaagtaaaaaaaaaatggaaggtaccaacatgctgttacctatacaaagacataatcttcaaatatatttattttatttcaattaaattgcatatttaaagctatcccaatataaatcctgacaatattatttttaggactagaaataaaccaccaaagtttcaccacacagagacattaaacaggtaagaaattacagcaaaagcaaaatagctatgtctaactaagttatcttaatacgttctaaaga

SEQ ID NO: 142706 - DNA, 563 bp, Homo sapiens
tttccggtgcttaccacaaaatgtggcttaaaatagttgtttaacaaataatactttgtgattaagtgaggttaaaaaagacaacaatatccacttaaagccattaaagtagcagcatttattgagatagctcgttgttcacattattggtatagaaacacagtagctttcctatatgcagaagttaattcttaaaataaaaattggacaacttgtccatttatagcattaaaaagattaataataatattaacaaatatatacattgaatatactatagaaatgacactttaaactctacagagatgtaaatgaagtaaaaaaaaaatggaaggtaccaacatgctgttacctatacaaagacataatcttcaaatatatttattttatttcaattaaattgcatatttaaagctatcccaatataaatcctgacaatattatttttagractagaaataaaccaccaaagtttcaccacacagagacattaaacaggtaagaaattacagcaaaagcaaaatagctatgtctaactaagttatcttaatacgttctaaaga

SEQ ID NO: 142707 - DNA, 591 bp, Homo sapiens
gttttgctttgtttttagccatttatgtattgaggggcattttggtaattttaaactctgagcaattacaaataaagctgctatggataaatgtgtacaaatttttgtttggacatatgttttcatttctttgaggcaaatggccagaggtgcaattgcagggttatatagtttaagtgtatattttgtttattttacaaacttctattctccagagtgactgtatcattttatattccccatcagcaatgtccaagtgatctattttctctgcatccttaagagtatttcacaatgtcacaatgttttagttggtttttagatgtgtagtgagatctcatagtagtttctactttcatttcactaatgccaatgatgtttagcattgtttcatgtgtttatttgccatctctatytttttaggtgaaatgtatcttcatgccttttattcatattttaattggctggttttttatagttgaatgttgagagctctttatatattctatgtggcagtcctttattagataaagggtttgtaaatatttttcctcagtctgaagcttgtcttttcatcatcttagggtattt

SEQ ID NO: 142708 - DNA, 558 bp, Homo sapiens
gtgtatattttgtttattttacaaacttctattctccagagtgactgtatcattttatattccccatcagcaatgtccaagtgatctattttctctgcatccttaagagtatttcacaatgtcacaatgttttagttggtttttagatgtgtagtgagatctcatagtagtttctactttcatttcactaatgccaatgatgtttagcattgtttcatgtgtttatttgccatctctatttttttaggtgaaatgtatcttcatgccttttattcatattttaattggctggttttttatagttgaatgttgagagctctttatatattctatgtggcagtcctttattagatamagggtttgtaaatatttttcctcagtctgaagcttgtcttttcatcatcttagggtattttacaaagtcaatattttaaaatttgaatttagtcctacttagtgattttttttccatttacagattgtgtattaggagtcaagtctaagaattctttgctcagccctaggttctgaggattttctcctatgctatcactgaaa

SEQ ID NO: 142709 - DNA, 549 bp, Homo sapiens
ccctgttgggaggtgtctccttgtcaggaggcacaggcgtcagggacccacttcaggaggcagtytgtcccttagcagagctcgagtgctgtgctgggagatctgctgctctctttagggttggcgggaaggaaagtttaagtctgctgaacctgtgcccacagccacccctttccccaggtgctctgtcccagagagatgggagttttaactataagcccctgactggggctgctgcctttctttcagagttatcctgcccagagaggaggaatctagagaggcaatttggctacggtggctttgtggcactgtggtgggctctgccaagtctaaacttcccagggctttgtttacactgtgagggcaaaactgcctactcaagcctcagtaatggtggaagcccctcacctcaccaagctcgagcttcccaggttgacctcagactgctgtactgccagcaagaatttcaagccagtggatcttagcttgctgggcttcgttgggggtgggatacactgagcaagaccacatggctccctggcttca

SEQ ID NO: 142710 - DNA, 549 bp, Homo sapiens
ccctgttgggaggtgtctccttgtcaggaggcacaggcgtcagggacccacttcaggaggcagtctgtcccttagcagagctcgagtgctgtgctgggagatctgctgctctctttagrgttggcgggaaggaaagtttaagtctgctgaacctgtgcccacagccacccctttccccaggtgctctgtcccagagagatgggagttttaactataagcccctgactggggctgctgcctttctttcagagttatcctgcccagagaggaggaatctagagaggcaatttggctacggtggctttgtggcactgtggtgggctctgccaagtctaaacttcccagggctttgtttacactgtgagggcaaaactgcctactcaagcctcagtaatggtggaagcccctcacctcaccaagctcgagcttcccaggttgacctcagactgctgtactgccagcaagaatttcaagccagtggatcttagcttgctgggcttcgttgggggtgggatacactgagcaagaccacatggctccctggcttca

SEQ ID NO: 142711 - DNA, 545 bp, Homo sapiens
tcccaaaccccttgcacttcctgggtgaggcgatcccccactctgcttctgcttgccytccgtgggctgcacccactgtctaaccagtcccaacgagatgagccgggtacctcagttggaaatgcagaaatcactcgccttctgtgttagtcttgctgggagctgcaggccagagctgttcctgttcagccatcttgacttttctccctcttttttcttaatctaaccaaaagttcttcaattttatcttcaagtttatctttgttcattttgactccttagctaaaatcaaaaaaggaaagaaatataagttacttttctgcttttcttgctagcaatgcttcatcaaattacagagcttcagggacttgcacatgaaagttaatggaattggatcagtcttgtgagtccttatacgcctaagaaagagatctttctccctgtccccatcagctcttctattcctctgagattcattggccaatttaacttcaatttctttatctttttgtaaaacttttccccactttaaccaaagagaaaat

SEQ ID NO: 142712 - DNA, 545 bp, Homo sapiens
tcccaaaccccttgcacttcctgggtgaggcgatcccccactctgcttctgcttgccctccgtgggctgcacccactgtctaaccagtcccaaygagatgagccgggtacctcagttggaaatgcagaaatcactcgccttctgtgttagtcttgctgggagctgcaggccagagctgttcctgttcagccatcttgacttttctccctcttttttcttaatctaaccaaaagttcttcaattttatcttcaagtttatctttgttcattttgactccttagctaaaatcaaaaaaggaaagaaatataagttacttttctgcttttcttgctagcaatgcttcatcaaattacagagcttcagggacttgcacatgaaagttaatggaattggatcagtcttgtgagtccttatacgcctaagaaagagatctttctccctgtccccatcagctcttctattcctctgagattcattggccaatttaacttcaatttctttatctttttgtaaaacttttccccactttaaccaaagagaaaat

SEQ ID NO: 142713 - DNA, 568 bp, Homo sapiens
ttcatgcatttattcattttaaaagtaattcttttaatgaaagtagtacacattgttgagaatatgaatgtgagcactggtttcaaggtgcttttacattaagaatgaaaaacaagataaggatttgcacaattgcagaaacttgatatctcaggctgtttttagttagaataaaatatcctgaaaaagtgcctctcaaactttagtgcgaaggttagtaagaaccgattctgatttattaggtttggcatggggcctgagactttccatttttcgtaagccastcaaagtgacacagtttgagtaacaagggcctaggtaatttcaactgaacagatctttttctacatgacttaagcaaaaatcctttaaaataatataaaacaagtaaaacacaagctaggatgaagtgcacactatgtgtaaaaaaaataaatattaatttatatttaattttgtcaccatcatttttccttttattttgcttttcaactagctccactcaacttgaatcaagaattcatagtcttgcctattcccatgtgtctgtcagaaaattatcaaagtg

SEQ ID NO: 142714 - DNA, 580 bp, Homo sapiens
ccaccaacagtgaaaaagcgttcctatttccccacatcctctccagcatctgaatatacttttgtgtctatctaccaaaatgagaaagttgttctttatattaaatagctgtgtatcttgctgaarattgacacagaaaaatttaaaaatatatgtttattttcaagattccaatattatgagaatttaacttctaagaagaaactgaaattaccaccacacccaaaaatcttgtatggcatctaatggtcaggtggcctatgagcttatgaagtttaatttgcatcactattgtactagctacgttcaatatcaaccaggcagcaagtgtttactaatcttttacctctagtaattctactcatgatatcccttcaaggtggtaaatatatgaaatgtagttacacagtaataaatttttaaatacagatactcagaaagttcactttggaaaactagccattgattttagaaagagctttgtaatctatcgttttttttaattttctttggttgacacaaaggtcagagctacagttttagtgccggtataattgccttagttcattcagatcttcca

SEQ ID NO: 142715 - DNA, 580 bp, Homo sapiens
ccaccaacagtgaaaaagcgttcctatttccccacatcctctccagcatctgaatatacttttgtgtctatctaccaaaatgagaaagttgttctttatattaaatagctgtgtatcttgctgaaaattgacacagaaaaatttaaaaatatatgtttattttcaagattccaatattatgagaatttaacttctaagaagaaactgaaattaccaccacacccaaaaatcttgtatggcatctaatggtcaggtggcctatgagcttatgaagtttaatttgcatcactattgtactagctacgttcaatatcaaccaggcagcaagtgtttactaatcttttacctctagtaattctactcatgatatcccttcaaggtggtaaatatatgaaatgtagttacacagtaataaatttttaaatacagatactcagaaagttcactttggaaaactagccattrattttagaaagagctttgtaatctatcgttttttttaattttctttggttgacacaaaggtcagagctacagttttagtgccggtataattgccttagttcattcagatcttcca

SEQ ID NO: 142716 - DNA, 580 bp, Homo sapiens
ccaccaacagtgaaaaagcgttcctatttccccacatcctctccagcatctgaatatacttttgtgtctatctaccaaaatgagaaagttgttctttatattaaatagctgtgtatcttgctgaaaattgacacagaaaaatttaaaaatatatgtttattttcaagattccaatattatgagaatttaacttctaagaagaaactgaaattaccaccacacccaaaaatcttgtatggcatctaatggtcaggtggcctatgagcttatgaagtttaatttgcatcactattgtactagctacgttcaatatcaaccaggcagcaagtgtttactaatcttttacctctagtaattctactcatgatatcccttcaaggtggtaaatatatgaaatgtagttacacagtaataaatttttaaatacagatactcagaaagttcactttggaaaactagccattgattttagaaagagctttgtaatctatcgtttttyttaattttctttggttgacacaaaggtcagagctacagttttagtgccggtataattgccttagttcattcagatcttcca

SEQ ID NO: 142717 - DNA, 602 bp, Homo sapiens
gtgttacttccctgctctgtgatttagttcccttatcagaaataacgagagtaatgctaccttttaggtttgttgtgatgattagcaagctaatatatataagracttattccagttccggaaaaagataagtattcggtaaatgttaactattattatatgatacaggcatttgtgttaatgttttcatggtgtcaatgctaaaagtttacttcctgtatgaagatagtcaattactgggtaacatatttaagattcttaaatatttattgcaattatctgaatactattttgttataaattgtaattaataaaatatttaaatgataccctgacattttggttcatatttgcttcatttcaaagtaaattctatgaattttctcaagtcctcttcatttaaatgatattaattttatttgtgttctacaaacttctctgtcactcatatacagtggttaggattagcttcttgcccttcggcatcagtggtctgttgccagattgcccttccacaatacaaaatagagtaaatggtcatatttaatgagtcagtgaatcagcagcactcttaggaagaaggcaattatggacatacactg

SEQ ID NO: 142718 - DNA, 605 bp, Homo sapiens
gtgaatcagcagcactcttaggaagaaggcaattatggacatacactgtcatcattcatgagataattagatgcaagctgattgtggtctcagatatgagtaaccaaagcactcatatctgacctcacacttagataagctcttgtacctttgactttagatttgcataccttccacagagcaaccaaggcaaagtataaaaatagatgtggaaacgtacaatctctttgtgccatgttaaatacatgagcaggataagcagattataaacctaaaaccaaataagtggaaggaatccaagcagttaatgggatattacatgcagaatttcagttatcgctgtatactctaattcaatgcatctgattttgtttgttggcttgttttccaaactagaattcctttaactgaagggagaatgggcaatgtttaacaaatgactgtgaatcagctatacataatcagaaaaacacacaatgatgyaaaattgggaagaggtactaatcaatacataagggacatactgtgctgtatgattgcttgaggaacccaaataattagtataaatacacaacaaactatcttgtatttttcttcacaaagta

SEQ ID NO: 142719 - DNA, 505 bp, Homo sapiens
cttccctgattcatacatcccagttttcttataattaacatagatgtttgtttttcatatttttctctgattatacttgaaaatttccaactattgtcaatgaaagctcacgtttgttcccttctattttccatatagcatttttagttataaaagaacttggaagtaaaagatacatataaaaatatttatgcatatatgtgtatgtacaatgttttattatttgaattataatacaagcgtatgaaacaagattcacaaacagatattaaaacattttaaatatttttttgttatgtmtatttttcatgataaaatagttttccacagagtcatttaagtcacagagtgctaaaacactaaatctgtatcatttgcaaaattaaacatgctttttaactattaaagtaaaactatttaattattaaagcttacaattagttgctattttatatgaagtatgtggatacttagtctattttacttttcttcataatattttgat

SEQ ID NO: 142720 - DNA, 602 bp, Homo sapiens
atggtactggcataaggatagaattgtagatcaatgaaatcatattaagaatttatggttcattgacgttcaacagtgacaagacaatttaataaagtaaaagatgtcttcataataaattctgctgggatagtaggctatttacatgaaaaagaatgaagaaggagactgacctctcatcatactcaaaactaacaaaatggattatagaatcaatatgagacttaaacctacaaaactccttgaaaaaaatgaggaagtaaatctttattaacttgagttagctaatgtattcttaggtataatatcaaagcacaagcaaaaaagaaaattataaataagttgggctatgtccaaattaattatttttgtgtgggcagcaaacaatgtcatcaagaaagtgaaaaatttttcaaatgattcaaaatcagatgtaagaaccctttatcatrcataaaggaaaaatttaaaaaattggtaactttattatacataaagaaaattaacaaaaattggtaactattaaacatactgctcatattttaagataatattttacttattagaaataatattttagaattcaaatgtaaataaaagaa

SEQ ID NO: 142721 - DNA, 583 bp, Homo sapiens
gtaataaaaaagtttcccagcaaagacaagcccaggacctgatggcttcactgctcaattctaccaaagtttttkttttctttttttaaaaaaactaataccaatgctatttaaactattctaaaaaatagaggagatagaaatactttcaaactcattctattatgtgagtataccctgataccaaaaacagagaaagacacatcaaaaagaaaaaaaaactatatgcaaatattactgatgaatgtttcttcaaaaatccccaacaacatactagcaaaccgaattcaacaacatattaaaaagatcattcaccatgaccaggtgcattttatcccagggatgcaagaatgattcaacatacacaaatcaaacaatgtgatacataatattaacagaatgaaggacaaaactcatataatcatttcaactgatgctgaaaaagcatttgataaaattcaacatcccttcatgataaaaacctttaagaactggttatagaaggaacagacctcaatataataaaagccacatatgacaaactcacaggtagtaaattattgaatggggaaaactaaaatgc

SEQ ID NO: 142722 - DNA, 583 bp, Homo sapiens
gtaataaaaaagtttcccagcaaagacaagcccaggacctgatggcttcactgctcaattctaccaaagttttttttttctttttttaaaaaaactaataccaatgctatttaaactattctaaaaaatagaggagatagaaatactttcaaactcattctattatgygagtataccctgataccaaaaacagagaaagacacatcaaaaagaaaaaaaaactatatgcaaatattactgatgaatgtttcttcaaaaatccccaacaacatactagcaaaccgaattcaacaacatattaaaaagatcattcaccatgaccaggtgcattttatcccagggatgcaagaatgattcaacatacacaaatcaaacaatgtgatacataatattaacagaatgaaggacaaaactcatataatcatttcaactgatgctgaaaaagcatttgataaaattcaacatcccttcatgataaaaacctttaagaactggttatagaaggaacagacctcaatataataaaagccacatatgacaaactcacaggtagtaaattattgaatggggaaaactaaaatgc

SEQ ID NO: 142723 - DNA, 289 bp, Homo sapiens
aatatgtgacttttaattcttccttctttcacctagtaaagkgcatttaagatccattcatgtggtgggtgcatatgcatgactcaacagctcatttctttgatcactgaatagtgtttcatggaaaggggtgtgtatttatccctctgttgaaggtcatagtttctcaaagatgggcaactgaaggagcagaaacttgttccacacttttgagaaagacatactcctgacatgacttaccagggtggagagttcgtgtcccacaaagatagcattcagtagagaattc

SEQ ID NO: 142724 - DNA, 289 bp, Homo sapiens
aatatgtgacttttaattcttccttctttcacctagtaaagtgcatttaagatccattcatgtggtgggtgcatatgcatgactcaacagctcatttctttgatcactgaatagtgtttcatggaawggggtgtgtatttatccctctgttgaaggtcatagtttctcaaagatgggcaactgaaggagcagaaacttgttccacacttttgagaaagacatactcctgacatgacttaccagggtggagagttcgtgtcccacaaagatagcattcagtagagaattc

SEQ ID NO: 142725 - DNA, 615 bp, Homo sapiens
aaaattaccacatgcttctctaaccccaacttacctatgttaaatcataactggaaatggaagcatgtatgaatatttaacatttttacatgtgttcctgtacaactcaggttgtgatctacttgacagtatgatttgtattctttttggctacttctaactctctatatctctccctagaaaactctggataaaaattgtacattatctattatatgtcagacatcaaggatacagttatgaagtagcaacacagaccctgttcacattggacacacaacctagcgtgaaaaaacaattaaacaatttccaaataaaattaaatgcagttgtaacraatgacataaaggagaaatatcagattttatgccagtacataatagagtcttaactataaaaagagtggaatgatctcagcatatgggaataagtttagataaaaaagaacgtgctttaatggacactatacgtaagctcaagtaacctgaaaaattgttcaaattctcacctaattaatttcaaacatatttttatttatacaattactatgtcaacgtatcatccaatatcaccttcctgcctgatgatggactcatccatgatgtcttcgtcaga

SEQ ID NO: 142726 - DNA, 582 bp, Homo sapiens
caagactataaaggtggcacctctatgattctgcaagaaccacagtgttactgggcttcgggtgtcctcaatgcagatatagcttagaccacaacatctgattcctttctaatacctggaaagccttcagaagaaggactgcaaagactgcagtaaatacctaacgcttatgcccagacacagaaaacttccaaaagagcactcaggacaaacaggacatcaccacacaaagtaaataaggtactaggaaacaatcctggagaaatagagatatgtgacttttctttctttctttctttctttctttctttctttctttctttctttyttttttttttttgagatggagtcttgctctgtcccccaggctggagtgcagtggcaccatctcggctcactgcaacttccgcctctgtctcagactcctgagtagctgggatgcaggtgcatgccaccatgcctggctaacttttgtatttttagtagagatggggtttcaccatgttggtcaggctggtctcaacctcctgatcttgtgatccacccacctcggcctcccaaagtgctgggagatatgtgacc

SEQ ID NO: 142727 - DNA, 582 bp, Homo sapiens
caagactataaaggtggcacctctatgattctgcaagaaccacagtgttactgggcttcgggtgtcctcaatgcagatatagcttagaccacaacatctgattcctttctaatacctggaaagccttcagaagaaggactgcaaagactgcagtaaatacctaacgcttatgcccagacacagaaaacttccaaaagagcactcaggacaaacaggacatcaccacacaaagtaaataaggtactaggaaacaatcctggagaaatagagatatgtgacttttctttctttctttctttctttctttctttctttctttctttcttttttttttttttttgagatggagtcttgctctgtcccccaggctggagtgcagtggcaccatctcrgctcactgcaacttccgcctctgtctcagactcctgagtagctgggatgcaggtgcatgccaccatgcctggctaacttttgtatttttagtagagatggggtttcaccatgttggtcaggctggtctcaacctcctgatcttgtgatccacccacctcggcctcccaaagtgctgggagatatgtgacc

SEQ ID NO: 142728 - DNA, 616 bp, Homo sapiens
attgtagtattcaaattttcctatttacagtggtggcccacaaaggacaacacccaattcagggaatatgttcacagtatactccagtgactctttagactcaggtacagcaggacccgcatccttgctctcccaagttcttcctgtggaaactccaccaggttcttgaacctctttaaatacctttcctcatctgtaaaataaaaacactactagtacatacttcattcacttttyataaagcttaaataaggcattgtttctaaagtaattagcatggtgtctaacagtgggaaaagtcaataagtgagtagaaattacttagtaattgttgccattagtggtgtagtaatgataggtaaatacaatgctttggacgataacccagatttctccctatatagctatttctttttatatgtcattcagctggatctttcaaagaatatattaaacattgtttcttacatatattctggaaataaattaaaaaaaactaatgcagaaaattcctcaatatcacaagatttttacagtctgtttttatttttccatctaccatctttggcaaatttgcttgtgtggaacagtatactggatttgattttaaacaaat

SEQ ID NO: 142729 - DNA, 616 bp, Homo sapiens
attgtagtattcaaattttcctatttacagtggtggcccacaaaggacaacacccaattcagggaatatgttcacagtatactccagtgactctttagactcaggtacagcaggacccgcatccttgctctcccaagttcttcctgtggaaactccaccaggttcttgaacctctttaaatacctttcctcatctgtaaaataaaaacactactagtacatacttcattcactttttataaagcttaaataaggcattgtttctaaagtaattagcatggtgtctaacagtgggaaaagtcaataagtgagtagaaattacttagtaattgttgccattagtggtgtagtaatgataggtaaatacaatgctttggacgataacccagatttctccctatatagctatttctttttatatgtcwttcagctggatctttcaaagaatatattaaacattgtttcttacatatattctggaaataaattaaaaaaaactaatgcagaaaattcctcaatatcacaagatttttacagtctgtttttatttttccatctaccatctttggcaaatttgcttgtgtggaacagtatactggatttgattttaaacaaat

SEQ ID NO: 142730 - DNA, 605 bp, Homo sapiens
tgtatgtatatatgttatatgtgtatatatatatttagagtttctatgtgtgtgtgagtgtgtgtatatatggtgtagataaaatacacgcaatttttttccacatagatggtgtgagaatgagtacatgtaaagaaaactttatccaaaaacatcaatattgaatcaaattttaatttgcaaattttaattcatatataaaatatttcctaaatctaaaaatgttatgtttttctatttttacattaatatttatttcaaaattaaatacatggaagaattatgaatattactgattaatgaataatttatactaaaatagcttgtgtgtttaaagaaggtgggttttgaaaagcaatttctttggatatttagaatcttgattctcttattggtaaaatgatgttaataacaattgctctgccttactcataggttgctgtgtgagtcaattcagatatgatatgtaacagtggtttggataaagtagatgacccaaaccaaatatatgtggttgttattgggtatgttaatctaccaaaatttgatatcagctaggagttttgtytagtgcaaacaaacgatagatgaagaaggagggttgg

SEQ ID NO: 142731 - DNA, 524 bp, Homo sapiens
ctttcatatgcatctcttcagtgctgggacagtgactttgtctctgtgtccccatccaaacctcatgttgaattgtatccccagtgttggaagagggacctggcggragtttatttaatcatggggtgaactttctctatgatgttctcatgagatctggttgtttgaaagtttatagtgcttccccctttttttctctctctttcctgctggccatgtgaacacatgcttgtttcccctttgccttctgccatgactaagtttcctgaggccttcccaggcatgcctcttgtatagcccgcagagctttgagtcaattgaacctcttttcttcataaattacaaagtctcgggtagtagtatatagcagcatgagaacaaactaacacaggcaagaaaatgtatatctccagctctggcttttgttatgcctggaatatgctctttctggggagttcacaaataattctgacaacagtagtttgagggaaaggtaatcagttccagattagaagttttgtatg

SEQ ID NO: 142732 - DNA, 610 bp, Homo sapiens
tgatctgaagctgatagtctaagtggcaatccattttttaaaaattcaactttcttctgttcagataaaaaaattcatagaatgaaattatagaattagtgttaaagctgtatagatttgttcagaagaagccatcaccccttattaaacatgagcagggtgatatggcttggctgtgtgtccccacccaaatctcatacaaattgtaatccccgcttgtggagagagggacctggtgggaagtgattggatcatgggaacggttcccccatgctgttcttgtgatagagaggaagtcctcatgagatctgatggttttaaaaatggtagtttcgatgacggagaggatgtggagaaataggaatgcttttacactgttggtgggagtataaattagttcaaccattgtggaagayagtgtggagattcctcaaggatctagaactagaaataccatttgacccagcaatcccattactgggtatatgcccataggattataaatcattctactataaagacacatgcacatatatatttattgtggcactgttcactatagcaaagacttggaaccaacccaaatgctcatcagtgacagactggataa

SEQ ID NO: 142733 - DNA, 640 bp, Homo sapiens
atgttgatgcctctgcatataagaagacatccacctcttctggcatttgaacatgttctttggtgatgataagcctgtactatttgcctgaaattctagagaggccaggtggttgcayctatggacaggcaaacttttgtactgggttatctaggttatctatatataagattatgtaatcagcaaatagagacacgtttatttttccttttctattaggatcatttttatttctttctcatctaattgctccagctaggacttccaatactttgttgaagagaagtagtgagagtgggcattcttgccttgtccctgatcttaaaggaaaagctatctgggttatctaggtgggatgggttgcttccagtgttctgaggttgaacggtacttctgactgtgctctgtggttcagtgtgactgctggatggattccgttgtcaggagcagcttttggctgagttctgtgatcatctctaactgggaagggttgcaggttgtcttccctgtctgagtgatactgttgattgacatctgtagctgggcagggccgaatgcttggctctatggctgagtaagatctctggggttcctgctcaggaaaacagggtgaacaaggccagagggcatgttccacaga

SEQ ID NO: 142734 - DNA, 640 bp, Homo sapiens
atgttgatgcctctgcatataagaagacatccacctcttctggcatttgaacatgttctttggtgatgataagcctgtactatttgcctgaaattctagagaggccaggtggttgcatctatggacaggcaaacttttgtactgggttatctaggttatctatatataagattatgtaatcagcaaatagagacacgtttatttttccttttctattaggatcatttttatttctttctcatctaattgctccagctaggacttccaatactttgttgaagagaagtagtgagagtgggcattcttgccttgtccctgatcttaaaggaaaagctatctgggttatctaggtgggatgggttgcttccagtgytctgaggttgaacggtacttctgactgtgctctgtggttcagtgtgactgctggatggattccgttgtcaggagcagcttttggctgagttctgtgatcatctctaactgggaagggttgcaggttgtcttccctgtctgagtgatactgttgattgacatctgtagctgggcagggccgaatgcttggctctatggctgagtaagatctctggggttcctgctcaggaaaacagggtgaacaaggccagagggcatgttccacaga

SEQ ID NO: 142735 - DNA, 601 bp, Homo sapiens
gagcgagaccctgcctcaaaaaaaaaaaaaaaaaaaaaaaaaaaaaaattcctcttctcccgcctcctataacctgttttgccaggatccaagcccccattttttctgtaacctcaaaatggtatataagyttctgagccctcattggggggcaggtaatcactctgtgcttctctccgtgtactcattaataaatgtgtgtacattttctccaattaatctgcctttgtgagttgatttttttcagcaaaccttcagaggatgaaggggacattttcccttggcccctatgacatcaataaaaagtcttctttttgcaggcgccatggtaggtgctgtgcatatcatctggcatgggcctcacttcagctttgttgtgcccattttatagaactttcctggcagaagaaacacgtgcaaaggccctggggcaggaatgagtttggcgtgtgtgagaaacagaaaaaggccagtgtggcaggaacacagtggacaactagaaggacgccatgggatgaggataaatgctccctgaatgcagggcctcctcttagtccagtcacttctccccatctccgccctgcactgccccagggactga

SEQ ID NO: 142736 - DNA, 561 bp, Homo sapiens
gaattcaagtcttcccataaaaacccctcaccatatgaccttggacctctgtgtatttcagggtgacaagggctttgaaatcaggtggtctgtgatgaggcaactgagacccatagcgagaaaatattggcccaaggtcaggagctaggatgcctgcctgtccttgtgcactcaaatccttgatctttttcctactccaccctaactcctgttccaggcacagataagtgygtggagcagggcaggaatgagggtggggcaggccggggcacagcagtgtcatctagatcttttgataagaaaagcaagactctacggctatctttctaaagaaaatccttttgatgatgagcaatagctcagctaattaagatgattggagactagatactaatagaaacttcactgggcaccatttacaaaatgataatggaatcttcccgtcttcctgttcccccaggtcaggatgtccttagatacactgcataacctgttgtcagacaagctgcctagaagtcagcctcatccgactcagtccccacacttgactgtgacttcaca

SEQ ID NO: 142737 - DNA, 598 bp, Homo sapiens
aataggcctggtgcaaaggagacctacctgccctgaaggggaagagcacgcctggktgacctctggagtaacccaccctgacacaggctgtgcacaggccttgggggtcagcctagcttgggttcaagtccaattccacaactaacgttgataaccttgagcaagctgctacacctctatgggtctcggtttcctgtctataaaaatgggattattatactcacttccaagaatcatcatagggaggaaattaaacaacaccaagtatatgaagctcctggcacacatataccctgtggctaacatgtattgagtgcttactattagcattataaagttggtgctttctacagaaatacagctgggagggacccaaacatagttcaaagtggactgtttccacagtgctttctacccatgagctctccagagtctcacagcaaccctgtgcagggcaagattacgagcttgtttgagaggttctgtgagaattcaaaaagccagtgattatggagcagggcttcaaacccagggtgcaaaactgcaaagcccctgttcctcccactctcccgcccctgcctctcacaaggtactggaa

SEQ ID NO: 142738 - DNA, 460 bp, Homo sapiens
cttatgataacccaaatcctaaacactgttgcctctgccgcctcttccagacacagaaggcatgatcctgctgaacactggcctcgagggaactgtggctgaaaaccccgtgcccattgttcatactccaagtggcaacatcctgacgctggagtcctgcctgcagcagctggccacacatcccggacactggggcatccatttgcaaatagyggagcccgcagccctccggccatccctggccttgctggcacgcctctccagccttggcctcttgcattggcctgtgtgggttggggccaaaatctcccacgggagtttttcggtccccggccatgtggctggcagagagctgcttacagctgtggctgaggtcttcccccacgtgactgtggcaccaggctggcctgaggaggtgctgggcagtggctacagggaacagctgctcacagatatgcta

SEQ ID NO: 142739 - DNA, 553 bp, Homo sapiens
agctgaaaatgtgttaaataaaatatgtttgatcctcctacctcgagaaacaaaacttcmtaacaccttggaatgctgccccagggtgtgaggtcctggggggcacagggcctggcctgccccttttcttctcgcccaaggctccgtcctgccccttgaggggcctggtgcgcatgtgttaaatactttaaaaaacaaagcttcaaaacttatgtcacctaaataactcaatctcaaaattatctgctcatgccagattttgtcatgaaataaatgcaggcccaatgataagagcagtacacacctgttcctacttagggctttgcagaggtagggccttgtacgcctgagctcttttggaaactgtccagcctgcacatctgagtgctgtccacaacctggccctcctccctgccgcaaatagctccttaatggggtctagggttgcactcaggcatcaagacctgtcctctggaggtcctggagggcttgggacagagattgaagcaggcctggaaatccacctataggaccttgagcaagagggtcttgg

SEQ ID NO: 142740 - DNA, 483 bp, Homo sapiens
cgagaaacaaaacttcataacaccttggaatgctgccccagggtgtgaggtcctggggggcacagggcctggcctgccccttttcttctcgcccaaggctccgtcctgccccttgaggggcctggtgcgcatgtgttaaatactttaaaaaacaaagcttcaaaacttatgtcacctaaataactcaatctcaaaattatctgctcatgccagattttgtcatgaaataaatgcaggcccaatgataagagcagtacacacctgttcctacttagggctttgcagaggtagggccttgtaygcctgagctcttttggaaactgtccagcctgcacatctgagtgctgtccacaacctggccctcctccctgccgcaaatagctccttaatggggtctagggttgcactcaggcatcaagacctgtcctctggaggtcctggagggcttgggacagagattgaagcaggcctggaaatccacct

SEQ ID NO: 142741 - DNA, 551 bp, Homo sapiens
gacatcctctgttctagtcctgccattgttcatgaatacacgtacattaatcttctgtcaaggcacattttccaaaatgtataagtaagagtcaagataggacattttgttcaacatgtgtagtttgcatcatcacagagtttggattcagatataaatatactctgatttaattttttaatgtagttttgacgttcatttatcattgtattattattctgtgagctgttttttcaatagcaggcacaagaagattagaaaagtaccatatggccaaatagtttttctgacaatattctgtatagcattcatatttgttacttgtttcatgtattttcatgctgggatatcagaagtcatgaaaataaacaacttccacaaaagacatatatatatatatatatatacacacacacgcacacacacacacacacaaccaaaaggaaaataaacacctrattttttcctgactctcaggaacataagcctttggagaaagtaattttgttctgcttctgctcaaaagtcacctccacagaaaagctcacctg

SEQ ID NO: 142742 - DNA, 444 bp, Homo sapiens
taacaaggcaactgatctttaacaaggagcgaaggcaattaagtaagagaatggatagtttttcaaagaagctactggacatacataatgyaaaaacaatgaattgagacactgaccttacacctttcacaaaaatcaactcaaaatggatcatagacataaatgtaaaatgcaaaactataaaactagaaggttacatagaagaaaatctaggtgactttgggttgacaatgagtttttagatacaacagtaaatgcatgaaccatgaaaggaacattgataagctggacattattaaaattaaaatcttctccttggtctgtgacacttaagagaatgaaaagacaagccacaaactagaaaaaaaatattttcaaaatatatctgataaaggacttatatttaaatctaaaaaactcctaaaactcaacaaagaaagcaaa

SEQ ID NO: 142743 - DNA, 584 bp, Homo sapiens
ccctgaaggtgattgtttgacttatgtttcttgtcctcattattattctttctaatactcgaattttatttgttaagggagaaaaaaggcttaaaacaaagcctcattatcctcatctggataatgwtggcattgtgagactatgcaatttcttgctttgtttggcttaaagaacctctatatgtgcgtgaaataaatgccaatttaacgttttagatttctgctacaaggctggggcagctggaatcatccagcagttcctcctttatgctggtttgtggccattctcgttccaagagaagacaaacttgcatttcaaaattaaactctgaaatttaaaaataaaagcaggaaaaaaaaaaaaaccaaaactttcctaggccagaaggaatgatttaaattttcggagagctccttggcgtttcaagggtagtgataaaccattggaatttactttgatgtttcagctctagcacagcaccccctcagcctccccaggcctcctcctccatcccctgtgtctgactgggtagttactgctctggggcctggaacccttccagtctcattcccctgtttgtgta

SEQ ID NO: 142744 - DNA, 587 bp, Homo sapiens
ctgaaggtgattgtttgacttatgtttcttgtcctcattattattctttctaatactcgaattttatttgttaagggagaaaaaaggcttaaaacaaagcctcattatcctcatctggataatgatggcattgtgagactatgcaatttcttgctttgtttggcttaaagaacctctatatgtgcgtgaaataaatgccaatttaacgttttagatttytgctacaaggctggggcagctggaatcatccagcagttcctcctttatgctggtttgtggccattctcgttccaagagaagacaaacttgcatttcaaaattaaactctgaaatttaaaaataaaagcaggaaaaaaaaaaaaaccaaaactttcctaggccagaaggaatgatttaaattttcggagagctccttggcgtttcaagggtagtgataaaccattggaatttactttgatgtttcagctctagcacagcaccccctcagcctccccaggcctcctcctccatcccctgtgtctgactgggtagttactgctctggggcctggaacccttccagtctcattcccctgtttgtgtatctga

SEQ ID NO: 142745 - DNA, 550 bp, Homo sapiens
agacagtgcgattttcctccctcctcctttcatggtggtctttaacttgtatttattctgaagtttgttaaggctgttgggaactcagaacacatttactcataaaaaccagtagccctgggctttgtgaggtctgacccccaacccctgcctaactcaccatccccattctcttcccatcaccctcattcagggacttgactttcaagacatggtgggttcttctgctgtcttccaaatacccscttgggttccccacccataagcttttgctccttcaccccagaatctcagacctttgcttagaactgtccatcaaatcaatatccaggtgaaatccaaattctagctcctccatctcccagtgttatgcagaactgctttctttctcgtctgaattcttattctactttatctgaccgagtagtaatatgagctttataataaaaatcacaacatattgccttttgtggctgttactgtggggagtgtcacatattcttatatccctcacactgttcaataaccactttctgtgggataaataata

SEQ ID NO: 142746 - DNA, 559 bp, Homo sapiens
ttctatttatgatgctgatataatgtttctttcaaaaatttaagtaaatctatttaaagaaaaatattaggtaaacagtcatacagatggtgttccattataaaaatgatgggaagggataagtaagcaactcaagttaggagacaatgttctcaatcagggaccaccagattttttctgtaaaaggccagagagtgaataggttaagctctgggggccacagtcacaggctctgtcacattttttttaaagtaatctcttaaaatggtgacaaccattcttagctcaccaggccgtacaagaactccactgaacatggtctgctgacccctgatttgttgtttagcgtggcagctactagctacatgtggctactgggcacctgaaaggtggttcgtatgactgaggaactgaattktaaattttatttcattttaatttaaacagacatgtggctagtggttaagtcaatgtgtagagcagctctagccaataattaaggaaatgtattaactattaactactacacagcaggcttaaaagacaaacagaatggaag

SEQ ID NO: 142747 - DNA, 571 bp, Homo sapiens
ttcagggtaccacaggccacctatttgcctggaagcagaattagtggagtgtctggggtgcrgggagatagtcattggaaaatgcacgtgctgaggacactcacttggtctctggtagactccctctgaaggcggccacagtgggtggagatcacttgtggagatcacctttctcagcatcatcctggatatcacagtggacatttactgagcacttactggctggcaggcattgtgctaaatgccacatctgcttttttattttattttattttattaaactgttaaagatgttccatttattttttcagtttctgtaaaaagaagactgctccatagtttttactcacacctccctgtctggtctttgcttgagttgtcaccttagccagcccgttctggcatgtcacccacgcccccaaaacttactctgagcttgttgggtgagctttaggagacattgtgagctagagctgctgcagtggtgggcctagaaatgtcgctagctgatggtgtagcccctccagagggacatgctggacacaaccttccgtattctgcgcaggagagc

SEQ ID NO: 142748 - DNA, 571 bp, Homo sapiens
ttcagggtaccacaggccacctatttgcctggaagcagaattagtggagtgtctggggtgcggggagatartcattggaaaatgcacgtgctgaggacactcacttggtctctggtagactccctctgaaggcggccacagtgggtggagatcacttgtggagatcacctttctcagcatcatcctggatatcacagtggacatttactgagcacttactggctggcaggcattgtgctaaatgccacatctgcttttttattttattttattttattaaactgttaaagatgttccatttattttttcagtttctgtaaaaagaagactgctccatagtttttactcacacctccctgtctggtctttgcttgagttgtcaccttagccagcccgttctggcatgtcacccacgcccccaaaacttactctgagcttgttgggtgagctttaggagacattgtgagctagagctgctgcagtggtgggcctagaaatgtcgctagctgatggtgtagcccctccagagggacatgctggacacaaccttccgtattctgcgcaggagagc

SEQ ID NO: 142749 - DNA, 571 bp, Homo sapiens
ttcagggtaccacaggccacctatttgcctggaagcagaattagtggagtgtctggggtgcggggagatagtcattggaaaatgcrcgtgctgaggacactcacttggtctctggtagactccctctgaaggcggccacagtgggtggagatcacttgtggagatcacctttctcagcatcatcctggatatcacagtggacatttactgagcacttactggctggcaggcattgtgctaaatgccacatctgcttttttattttattttattttattaaactgttaaagatgttccatttattttttcagtttctgtaaaaagaagactgctccatagtttttactcacacctccctgtctggtctttgcttgagttgtcaccttagccagcccgttctggcatgtcacccacgcccccaaaacttactctgagcttgttgggtgagctttaggagacattgtgagctagagctgctgcagtggtgggcctagaaatgtcgctagctgatggtgtagcccctccagagggacatgctggacacaaccttccgtattctgcgcaggagagc

SEQ ID NO: 142750 - DNA, 571 bp, Homo sapiens
ttcagggtaccacaggccacctatttgcctggaagcagaattagtggagtgtctggggtgcggggagatagtcattggaaaatgcacgtgctgaggacactcacttggtctctggtagactccctctgaaggcggccacagtgggtggagatcacttgtggagatcacctttctcagcatcatcctggatatcacagtggacatttactgagcacttactggctggcaggcattgtgctaaatgccacatctgcttttttattttattttattttattaaactgttaaagatgttccatttattttttcagtttctgtaaaaagaagactgctccatagtttttastcacacctccctgtctggtctttgcttgagttgtcaccttagccagcccgttctggcatgtcacccacgcccccaaaacttactctgagcttgttgggtgagctttaggagacattgtgagctagagctgctgcagtggtgggcctagaaatgtcgctagctgatggtgtagcccctccagagggacatgctggacacaaccttccgtattctgcgcaggagagc

SEQ ID NO: 142751 - DNA, 408 bp, Homo sapiens
aggacagaaagagaagcttcttttaattcaaagttttacatttagaattctctgtcaatattcagttgagtaaacatttctctcagatgtccttttaggtatatactgtgttcacatktttaatcatgttttcattaaaatgtcatgtctcaagaaaatgtcatgatttgggaagtactactttttgtgagttttagaaatcgaaatactaaaatttaaacgtttcattatttttctattctaatttatagttgaaattaaagaaatggagaatgtagaaatcagcaatttataatggtttgagtgaagaaatcacactgtatgaggtcaaaatggatgttctttatgaaaagtcagttataacttgcaattttctatcctgtgtcctaaaaatataaattttctttc

SEQ ID NO: 142752 - DNA, 519 bp, Homo sapiens
cccctttgggcaactttagggccccagtagttgatatcacactctcttttacccttttttcctctcttctgtcatctaattagggggcctcctgaataatcccttagcagtgtctgacaggaaccatttttgggaaagaatactttacctgtagaaataacatcaaacatcacttacctggtataggggacactggaatggccccacagtgatcctccaaattaatattttctggctccaattactctgatttttccctaatctttaccgaattccaactgttacagtagaggctcagtgactgtctgtgatggggggaggatattgtactaattcctgcacaggaattagctgcaattccatccctgtcrtgatattttatgttatttttagattcctttcaatgctcttttttttattttatgttaacagttactaaactgtttatctctctcgaacaggggctttgtctattttcttttctctatgctccataataaaatttgtgcaagaaacaca

SEQ ID NO: 142753 - DNA, 514 bp, Homo sapiens
aggttttatagttctctgtagtatagggaatcattggaatacttaaagcaggggtaaggaccttttatatacctgagggtagcgaggttacctgactcttcatctctgctacctttggttgaccttgcattttgccctttgggttgtcagcagtcctatttgaatatttaacacaacttctcattcatttaactgactcaccctgtgttctgaaacttcayccctgacgtctctcaggagaatttattccagaactttctcacctctggtttaggatctcgatcaacactagaatgatgcgaccttgatttttatatgcatacttaactctgatttcattactcctagggatatcatcgttttgtggcctagtgtgtgcgctgcatacagaaatatagctagaattcaaaagtttatctctgaatttgatcaccctttcagacataagctattaagaacaaatcagcatttctgataaataactgtaaagtggtgcctacagtttttggatgta

SEQ ID NO: 142754 - DNA, 516 bp, Homo sapiens
agagggcaaggaaagatagtcagccttttaggcccataagaaattagatcatttttgtactaacttgtgaaataaagtaatagaccatgagaattgtattttcaaagcatttggtactaaatcccactgtaatcctyaagatatattccctcttttgccatttttctgctttgctggccttcacatgtttgtcacaaccattcacctaggaggatgagaaagtttatagccatcattcacttactaattcatgagctgtaacacacacacacacatacacacacacaattttagataaaatgtcgtatctttgtcacataaagtgtcatttctctatctcgacatttcaagtagtttgattagacggatttcacaccacttaaaatttaggaggagagaaatgtacagtatgtacaaattgttatttttaaaatccttctccattcagcacccaaatggcttcattttgcacttaaataatttcttggttttctttctgaatgtaatgattgagtc

SEQ ID NO: 142755 - DNA, 448 bp, Homo sapiens
caacttgcctgaattcaattattagttttaccaggactttttttaaagaatcttaagcattttctacatgtaagatcatgtcacctgttaacagagataattttgcttcttcctttccaatttgaatgccttttagttctttaacttgcctgattgcactggctgggatttccggtactatgttgaataggagtggcaagagcaggcatccttgctttgatcctggtcttagaggtaaagcttttattattcaccattgagtatgaataaagtaagctgtgggttttaaawttttcattaagatgaaataaaactgaaacattgtttgacagttttttttaaagctaaaaacctgtggtggtatttctgaggtctctgttatgttctgttggtgtatatgtgtgttttggtaccagtaccatgctgttttggttactgtagctttgta

SEQ ID NO: 142756 - DNA, 448 bp, Homo sapiens
caacttgcctgaattcaattattagttttaccaggactttttttaaagaatcttaagcattttctacatgtaagatcatgtcacctgttaacagagataattttgcttcttcctttccaatttgaatgccttttagttctttaacttgcctgattgcactggctgggatttccggtactatgttgaataggagtggcaagagcaggcatccttgctttgatcctggtcttagaggtaaagcttttattattcaccattgagtatgaataaagtaagctgtgggttttaaatttttcattaagatgaaataaaactgaaacaytgtttgacagttttttttaaagctaaaaacctgtggtggtatttctgaggtctctgttatgttctgttggtgtatatgtgtgttttggtaccagtaccatgctgttttggttactgtagctttgta

SEQ ID NO: 142757 - DNA, 582 bp, Homo sapiens
tagaagaaaagaaaaaagagaaagttaaagataacatgtcttgaattagtttagtgcaagtaatgtccattaaatgtgacagcattatcttatgggagaaaagttaagccatatattttttagtatgtaaatactattttgaatacaaatatgttccagtatcataatatgggtattacctgtatatttaattatcatgtttttgactaatttttgtttgctaggtttcacagggtttaatcagcacctttaaagttaaaaatggagatgtatacatggatctggaaaaataaaaatcattccatgacctttaatattttttagctacccaaagatttatacagagcgtatgattctgaacaatattwgaaatactaatgtaggacttttaaattagcatactgaatatcaaacattctgataaacctaataaagcctacctaaactgtttttttaaagttaaaagataacaggagcttcattataacaatgaagtcagaacataacagcaataaccctactttgatgaggaattcaatgttcaggatgtaatttatggccaaatgtacacaaaaatggtac

SEQ ID NO: 142758 - DNA, 582 bp, Homo sapiens
tagaagaaaagaaaaaagagaaagttaaagataacatgtcttgaattagtttagtgcaagtaatgtccattaaatgtgacagcattatcttatgggagaaaagttaagccatatattttttagtatgtaaatactattttgaatacaaatatgttccagtatcataatatgggtattacctgtatatttaattatcatgtttttgactaatttttgtttgctaggtttcacagggtttaatcagcacctttaaagttaaaaatggagatgtatacatggatctggaaaaataaaaatcattccatgacctttaatattttttagctacccaaagatttatacagagcgtatgattctgaacaatatttgaaatactaatgtaggrcttttaaattagcatactgaatatcaaacattctgataaacctaataaagcctacctaaactgtttttttaaagttaaaagataacaggagcttcattataacaatgaagtcagaacataacagcaataaccctactttgatgaggaattcaatgttcaggatgtaatttatggccaaatgtacacaaaaatggtac

SEQ ID NO: 142759 - DNA, 518 bp, Homo sapiens
ttttacaattttgccttaggttgacccaagtagatgcatactgaggattcacatatagttcagcaggcataaaaaggtagggatgaatatagcaggaatttattagtctacttcccagagaatgactggatacccaaagcaaaaactttggctctctaaagttgctcacaattctttgcaattgttttgtaagttgccwccaaagccttcccttccctgagagatgatattaaagtgcaagtaccctgggaagggcaatacagtgtctctttgctaacaaagataaataacaaagagcagagtcattactgtgagtgaacgtgataaaaacatataaacaagaatcttctgctatggatacagagaatgaatgtggaacaaggggtagaggacacacgtgaccatttagcagaagtcagtctattccaggattatagattctactgttttattttataactctcacgtcacaaggatcctatattctttccctgaaacctaaaagttataccttttca

SEQ ID NO: 142760 - DNA, 596 bp, Homo sapiens
tctagtgccaacccaatttaatgaaagcaaaactgaggccatccaataggaaatgtcttttctaaagtggcaaaggcttcattgctaggactgatcccaggtctgggcctctccaggatgcagtgaagtgcctgtcttgccaaatctgagcaatcacagtgcttaacgtccctacacaggactcartgctcattaatcacccatcaatgccagttgagtctgcctaccttgacagccatctatttgactcaaatttgtttccatcttcataacccttagcccaaagatggaagcactcagtggatgcttagtaatgcctgcataatagattgagcatggtaatattatacattgagcattttctattgcaatttagagacccagtctaagtgctaaattcgagtcttattccttagttcctgacagtgagcaagccaactgggggacaataatgacatttcctacaaaatagattatgtgaataccaaagccaagagatatttcataataaaatttcagccacaataaagaaaaaattagcacttttaccttcacttcatagtcataggttaaaggtattacacaaatataaaatt

SEQ ID NO: 142761 - DNA, 596 bp, Homo sapiens
tctagtgccaacccaatttaatgaaagcaaaactgaggccatccaataggaaatgtcttttctaaagtggcaaaggcttcattgctaggactgatcccaggtctgggcctctccaggatgcagtgaagtgcctgtcttgccaaatctgagcaatcacagtgcttaacgtccctacacaggactcaatgctcattaatcacccatcaatgccagttgagtctscctaccttgacagccatctatttgactcaaatttgtttccatcttcataacccttagcccaaagatggaagcactcagtggatgcttagtaatgcctgcataatagattgagcatggtaatattatacattgagcattttctattgcaatttagagacccagtctaagtgctaaattcgagtcttattccttagttcctgacagtgagcaagccaactgggggacaataatgacatttcctacaaaatagattatgtgaataccaaagccaagagatatttcataataaaatttcagccacaataaagaaaaaattagcacttttaccttcacttcatagtcataggttaaaggtattacacaaatataaaatt

SEQ ID NO: 142762 - DNA, 596 bp, Homo sapiens
tctagtgccaacccaatttaatgaaagcaaaactgaggccatccaataggaaatgtcttttctaaagtggcaaaggcttcattgctaggactgatcccaggtctgggcctctccaggatgcagtgaagtgcctgtcttgccaaatctgagcaatcacagtgcttaacgtccctacacaggactcaatgctcattaatcacccatcaatgccagttgagtctgcctaccttgacagccatctatttgactcaaatttgtttccatcttcataacccttagcccaaagatggaagcactcagtggatgcttagtaatgcctgcataatagattgagcatggtaatattatacattgagcattttctattgcaatttagagacccagtctaagtgcyaaattcgagtcttattccttagttcctgacagtgagcaagccaactgggggacaataatgacatttcctacaaaatagattatgtgaataccaaagccaagagatatttcataataaaatttcagccacaataaagaaaaaattagcacttttaccttcacttcatagtcataggttaaaggtattacacaaatataaaatt

SEQ ID NO: 142763 - DNA, 484 bp, Homo sapiens
tgaggccctcctatgtatgactaagttatgacaaattgagtgtcttctatacaacatgaagagagtttgtgggagttagtaaattcaaaaaattggaattcagcaactgtgatcccagatatgtgtggaggggtaaagtagggattctgtcctgcargaattcagtctagctgggaaaatgtgaagtggctacttgagcaatcctgatttgcacttgtggtttatagaacgaatagttagaaggacattcggatgatatgttggtggagaagtcaagaagaaacagtgttgaggaatatgggatgcaatgctggtagcactggaaaattggcaattcacttattccagggacctttcagcaaggactatggtcacaggtaaacaagtgccataacaattttcctgatgcagaaatttcacttccgacaggagcaaaaactagatgcctaaagatgtgtattactttgtttttggtaatagcaaa

SEQ ID NO: 142764 - DNA, 622 bp, Homo sapiens
ctggccggctaatgtttttcttttggtactttataaatgtctccattgtgtttggcttgcataatttctgatgaaaagtctgttgtcacttttatcttggcacttttttgtttgtttgtttctttttgagacagggtcttgctctgttgcccaggttaaagtgcagtggtatgatcataactcactgaagccccgaacttctgggctcaagcaatctttccacgtcagcctctcgagtagctgggactacagtcatgcaccaccatgcccagctaattaaaaaaaaaattctttttgtagagacaaggtcttaccatgttgcccacrctggtctcaaacccctgggctcacgtgatcctcccacctcagcctcccaaagcactggaattacaggcatgagccactgtgcccagctgtcattcttttctttatacttctatatatgatgtgcctttcccttcctctgtctgctttcagattttccttttatgactggttttagcaatttgattatgatgtgccttggtttgttgggattttttttaaagttattatgtctgggattcattgagcatcttggacatatgggcttatagttttcgtaaaaattggagacttcttt

SEQ ID NO: 142765 - DNA, 403 bp, Homo sapiens
tatttgctatcatggggtgggaaactaagaatatggcagtatgygtaaaactagctttttaaaacttttttttgagacagattctcactctgttacccaagctggagtgcagtggcatgatctcagctcactgcagcttccacctcgcaggttcaagcgattcttccacctcagcctcctgagtagctaggactacaggtgcatgccaccatgcctgactaattttattatttttagtagagacagatttttgccctgttagccaggctggtcttgaactcacagccccaagtgatccgcccacctcagcctcacaaagtcctgggattacaggtgtgagccaccacacccggctgtaaaactaacttttaaggccttattttaaccacatgggttgtagtct

SEQ ID NO: 142766 - DNA, 403 bp, Homo sapiens
tatttgctatcatggggtgggaaactaagaatatggcagtatgtgtaaaactagctttttaaaacttttttttgagacagaktctcactctgttacccaagctggagtgcagtggcatgatctcagctcactgcagcttccacctcgcaggttcaagcgattcttccacctcagcctcctgagtagctaggactacaggtgcatgccaccatgcctgactaattttattatttttagtagagacagatttttgccctgttagccaggctggtcttgaactcacagccccaagtgatccgcccacctcagcctcacaaagtcctgggattacaggtgtgagccaccacacccggctgtaaaactaacttttaaggccttattttaaccacatgggttgtagtct

SEQ ID NO: 142767 - DNA, 388 bp, Homo sapiens
tttctgaaaagaatattgacatgaaaattagaaactgtagtgtggaaatgacaaaaaaaagacagttttatggtatttaaatccatatctagaggtttttttttctgagagaaaatagaatggatttaaggagagtagagaacatatcgaggtagataaggcaaatggatagtgagtgacttgtctacagaatataaaatagactatcaamacacaagaactccttgctggataaaagccaattataatatttgtttaatcatgagcacctatgaacatcttaaaatatagattactgagttcacagcaatcatagattttagttttttggctattagataatatttccttaattaacagcagtcttgctgtcactaagggtggaatg

SEQ ID NO: 142768 - DNA, 596 bp, Homo sapiens
atatttccttaattaacagcagtcttgctgtcactaagggtggaatgtattttaagactagaattgctgaaaaaatatgaaaaagttttggctgcattgcaggagaatggatgctggtatgaggatgggtggctttctactttatgattagtaattggctcttgccttatatgtgggtgtttagctagactgagaaacaaatttgcttttgattatgaaatgaaccagtgacttggaatttattagggaaatgactcttaaactcacagttttgtaaacatttgaacaaacaaattattgaaatagctttcatggtccatgtatatcttatgcatgtattcaaatgcagatgaataaatcccatgacactgatgtggtaacagattctgacaatagatgcatatataatcagttaartattattaaaggtaattttccatttataaaattaagaaatacacatggttattagagagagaacaacaacttagtatggaaaggaacagtccatcattttatgaaaacactgttttcttaagcaatatacatctaagatggcatgcagagaagtgattctgtctcttctgtgttcattc

SEQ ID NO: 142769 - DNA, 532 bp, Homo sapiens
ggcttgttgtataaattaaattgttataatcagccgcagagagtaggctatggtaaataagcaggatagtggagagtagatggactgagcagtcctgtcaatgtttaacaagaagagtctaggctccctatactgccagagtattgaactttcagccactcaagtttgttcttaagatagtatcttctcaggcgttgtcttttaaaatcttctagagagagataaacattgtattgcttttcgtcacaaatatgttaaatagaacaccwcaggtgcctccctgagactcaacagcctggtggaaaagaagggggcacactgaagatctctctggaaatgttgaatcagccaacatttgcaatctcaaaccatccgcaaaaatatgctgtcagatttcattaattctatgattctaaaaacaattaagctaaaccccttagatttctcaattgagactcttctgtaaggccagctctctcttacctgccattttactcctggtgtatgttcattgcatttcttagctggatat

SEQ ID NO: 142770 - DNA, 595 bp, Homo sapiens
caggaaatccaagcatcaacagagttttaaggcttctgttgaatgatacatcacattaaccaactgaaagacaaaaaccacataatcatgtcatttgcagcaaaagcatttgtcaaagttcaatactctttcttgataaaaaaaacactcttaatggtttaggtrtagaaggaaagtttctcaatatattataataaaggtcctttattaaaaacacacagctaacatcacttagtggggagaaatggaaagcttttcctctaagatctggtacaaggcaaggtggcccactcctcctgcttctgttcaacatggtactggaagtactatcaagagcaattagacaacaaaaagaaataaaaggtatccaaataagaaaggaagaagtaaaatgatctctatttgcaaatgacatgatcctatgtgtagaaaacccaaaagatgccaccaagaaactgttagagctaatgaatgaattcattaaagttgcaggatatacaatgaacatacaaaaccctgttattctatacacgaataacaacatagctaaaaaagaaatcaagatctatcctatttatgataaaataaaatactt

SEQ ID NO: 142771 - DNA, 480 bp, Homo sapiens
tctgggtccagaacggctgccgctcctttgggggagggtgcgggatggtctcttttcttagaaagtggctcaggtcttattctgcgcctgggcatctcgcagccgacacacaggcacaccagacggacaaacagaaaaacccacagaaggcggcccctcccccaattcagagagccagtgacgggcgctcctccacccctaaccagacacacccgataacagacggccagacacagagtgacccgcacagagaagacaatacagaaatacgcagggacgagtacagaccgtcggacgctcggacacggacscaggcaggatcccctggacctctgggttccccaacggagaccctcggggaaggcccggagcatcgcaagcccctgtggagccccggacgccccgcttggcagcagcacgccccccgcgcacacccccctcgggctggctccgggagaccccctctccccagtcccgcaa

SEQ ID NO: 142772 - DNA, 480 bp, Homo sapiens
tctgggtccagaacggctgccgctcctttgggggagggtgcgggatggtctcttttcttagaaagtggctcaggtcttattctgcgcctgggcatctcgcagccgacacacaggcacaccagacggacaaacagaaaaacccacagaaggcggcccctcccccaattcagagagccagtgacgggcgctcctccacccctaaccagacacacccgataacagacggccagacacagagtgacccgcacagagaagacaatacagaaatacgcagggacgagtacagaccgtcggacgctcggacacggacgcaggcaggatcccctggacctctgggttccccaacggagaccctcggggaaggcccggagcatcgcamgcccctgtggagccccggacgccccgcttggcagcagcacgccccccgcgcacacccccctcgggctggctccgggagaccccctctccccagtcccgcaa

SEQ ID NO: 142773 - DNA, 569 bp, Homo sapiens
actttattttacatttttacatccatatatatacatacagacacttcagagaatatttctttgattctgttaagatttgtggatttatagaagagttgtaccagagctcctgtaagcttgctagttttgcctagtttaagtattaatttaatggaaggctatgtataacaaaacctctgcaaatattgactttagacagtcatggccatgaaacattgtgtccctgcaaataatcactaaccaaagttatactaattcatgcacgcctattctcattacctgtattaaaaaaaaamcccacaaaatagagtaaaatttgttcctggtggattatgaaataatactgaaaactttcttttccgtattttatgaacctttacttaagaaacattatttaaaatataatagaatgtgatttccaattaggtcagtgtaaataataaaacacatgacattttaaagatagggcacttgtattttatccccagtaggggaaagaaagagaaagagacaggcagacaaagagacagacagagatctgcataatccattcatttctgaagataact

SEQ ID NO: 142774 - DNA, 551 bp, Homo sapiens
aacagccatcactgcagaaatctacagttagtagagctcacccttgtaatatttagggacagcattttaaaaaactctttctctgcaatttctgatagcttttgccttgtttttcatattggccttcactgcyagccacttccctcaattaacatcctctccaaatcaatcattgatattatacttcctgcaagggggtaaagagatacaactttgcatgtttcccaaacccccgaggtcacatgtccatggagaagtagtgtacagtgatgatcttgaattctccaagcaaggaagaagttctctctctctgtgcatgtcctgagtcaagagggcttttgctgtgctgtgctgcattcctgcctagggatttagggcaaattgttgaaagagaacttaggctgaggttgaagagaaaaggccaacaagcggggaagggtgagtgagcaactgatttggatatctgcccattgagatttcagtatttgccccaaatggcctcattgggatgtgagcaggctgacctcctaggctcagggtagatgcttcca

SEQ ID NO: 142775 - DNA, 648 bp, Homo sapiens
ggctgtaagcaaaccactgcctttacttgtggcttgttccttgttttgatttgactgcttgatttccatttacacacaacttttttttgtatatttgtttatgtgtgtaaaatatttaaactatcagtaattaattggtggttccttcttccctggagtctgtgtcaccagtggaactctgcattagtttttcgtgcccatacaatcagttaaatgttcagtgaaggtgtccaaagtgaaatatttctctagggttatggccaaactcagaattgtttttctgtcttctcttccccttatatcatgatatccaggcttatcattctattattttcttttgaagttagctatgaattaactgtgtggccaatgattttgtacatttatctaagtgttagagttttaaaaagcattttaaaatctaacttgatctcaaaacaaacctttgaagtataatatgtgtgcatatatgtaccttcacaatttataggagaaatggaggctgaacatttaagaaatttttctcctggggattagtctaataattggcagagataagaataaaggccaggaatgtgtaygtttaaccaaggagtgtttgcaatctattgcaaagggagagagaagaactagctgagcaatttgcag

SEQ ID NO: 142776 - DNA, 558 bp, Homo sapiens
tacttctgcctacaggataatgtcaggccctgtcaaaccaacatctaaatcacctgtttagcttcctttccctccctccctttatttccagccacacacgaactaaatgctyctcctgcctgtgtcattttatacacgctgggatgcttatccccatgtggcatgatttctctgggctcagatattttcacatctgtaaggcattccctacccacttaggttaagtggtaaaacgtgttttaaaagccttacctggtgattagtgatgataggagtggtggtgcttctagcagcagcagcagcagcagcagcctgtgagatgggagaaccatcgtcaccactgctgttggacactgtgccaccaggacaggtttatattgaaaattctgttattgaggtttcctctaacctctcactgattgggtttttaggaggattcatctttaccattgtatgcatttcattttgccccaccttctcttaattgagttattacttctacctttcattgattctgttttttatattaatgctgagactaaactctgtcaggtgtca

SEQ ID NO: 142777 - DNA, 558 bp, Homo sapiens
tacttctgcctacaggataatgtcaggccctgtcaaaccaacatctaaatcacctgtttagcttcctttccctccctccctttatttccagccacacacgaactaaatgctcctcctgcctgtgtcattttatacacgctgggatgcttatccccatgwggcatgatttctctgggctcagatattttcacatctgtaaggcattccctacccacttaggttaagtggtaaaacgtgttttaaaagccttacctggtgattagtgatgataggagtggtggtgcttctagcagcagcagcagcagcagcagcctgtgagatgggagaaccatcgtcaccactgctgttggacactgtgccaccaggacaggtttatattgaaaattctgttattgaggtttcctctaacctctcactgattgggtttttaggaggattcatctttaccattgtatgcatttcattttgccccaccttctcttaattgagttattacttctacctttcattgattctgttttttatattaatgctgagactaaactctgtcaggtgtca

SEQ ID NO: 142778 - DNA, 558 bp, Homo sapiens
tacttctgcctacaggataatgtcaggccctgtcaaaccaacatctaaatcacctgtttagcttcctttccctccctccctttatttccagccacacacgaactaaatgctcctcctgcctgtgtcattttatacacgctgggatgcttatccccatgtggcatgatttctctgggctcagatattttcacatctgtaagrcattccctacccacttaggttaagtggtaaaacgtgttttaaaagccttacctggtgattagtgatgataggagtggtggtgcttctagcagcagcagcagcagcagcagcctgtgagatgggagaaccatcgtcaccactgctgttggacactgtgccaccaggacaggtttatattgaaaattctgttattgaggtttcctctaacctctcactgattgggtttttaggaggattcatctttaccattgtatgcatttcattttgccccaccttctcttaattgagttattacttctacctttcattgattctgttttttatattaatgctgagactaaactctgtcaggtgtca

SEQ ID NO: 142779 - DNA, 553 bp, Homo sapiens
gccctgccgctgtctgtgtgtttttgagcacgtcacttatgttctttaatactcagctttgccacctgtagaatggaaatggcactaccaccctcagtggggctgttttgggtaccagatgagataacttatgtaaacaacaagatgcttcgtgtgaaatcacctctcagtaactggcctctgtgggtattttaatcagtcccttatttagcacatgatactgactatcaacttttgtgcagaasaagatgttagcatggaggagctggcttacagaaaatattttagactttccgagacactgaaatgccagaggaagctggttctgtttaaaacaaaacaaagtgaaagacatacatacaaactatggcattggagaaggcatcttgggtgggatggaagttgtcttttactgtctgacatggtgttagaattcagaggacagaatgaaaggcaggggacatcccatgatccaaagcttacctgagtatatggtacttttataactgcatatccttgcaggatctgcagtaaatctgataaacagaaaagg

SEQ ID NO: 142780 - DNA, 553 bp, Homo sapiens
gccctgccgctgtctgtgtgtttttgagcacgtcacttatgttctttaatactcagctttgccacctgtagaatggaaatggcactaccaccctcagtggggctgttttgggtaccagatgagataacttatgtaaacaacaagatgcttcgtgtgaaatcacctctcagtaactggcctctgtgggtattttaatcagtcccttatttagcacatgatactgactatcaacttttgtgcagaagaagatgttagcatggaggagctggcttacagaaaatattttagactttccgagacactgaaatgccagaggaagctggttctgtttaaaacaaaacaaagtgaaagacatacatacaaactatggcattggagaaggcatcttgggtgggatggaagttgtcttttactgtctgacatggtgttagaattcagaggacagaatgaaaggcagggracatcccatgatccaaagcttacctgagtatatggtacttttataactgcatatccttgcaggatctgcagtaaatctgataaacagaaaagg

SEQ ID NO: 142781 - DNA, 585 bp, Homo sapiens
tctctgtaaaattgagggtctccatatatagattttcaagtgtrgaatcaatggcatcattgaggtaaaggcttaagtggaatatcaccactataatccttgctatgaattagattgccagatgaaaaacatggaattcactgcctgtcacaagggacacctccccactccaaacagaagaaacacacctcttacagactcatttttacacccctcaagagcaaatagtccatgcttattattatttaaaaaacctagagtccttccaaaatgtaatgcattataaaagccttcacatcatggctaatattgagaaaagattatttatattttcaactcagaagcagagcttggtaaaatgctatagttgtaaaattttgtggctatgttattctttttcaagccaaatctcaggcagaatctacgtatatagaaatatgacagaaaataaagagttgctctagttgaagttggaggcttggcccgtaactgtttggcctttttcttgctgccttggcacatcctggctttatccacacccaagtcaccacctcagaaagtgagagtcacacagtacatagtaga

SEQ ID NO: 142782 - DNA, 595 bp, Homo sapiens
tgagggtctccatatatagattttcaagtgtagaatcaatggcatcattgaggtaaaggcttaagtggaatatcaccactataatccttgctatgaattagattgccagatgaaaaacatggaattcactgcctgtcacaagggacacctccccactccaaacagaagaaacacacctcttacagactcatttttacacccctcaagagcaaatagtccatgcttattattatttaaaaaacctagagtccttccaaaatgtaatgcattataaaagccttcacatcatggctaatattgagaaaagattatttatattttcaactcagaagcagagcttggtaaaatgctatagttgtaaaattttgtggctatgttattctttttcaagccaaatctcaggcagaatctacgtatatagaaatatgacagaaaataaagagttgctctagttgaagttggaggcttggcccrtaactgtttggcctttttcttgctgccttggcacatcctggctttatccacacccaagtcaccacctcagaaagtgagagtcacacagtacatagtagagaacctaccagtagagtagaaa

SEQ ID NO: 142783 - DNA, 575 bp, Homo sapiens
ccatgtagatataatatacttaaggatgggagattcttgagaatgagttcacccattaattaatatgccaatttttcttcccttgtgtctgtttctaaatgagaatgctgcagcctgaaattgcctaaaataaaagaaacaaataacttacagggaaattaacaaaggaggattctgaaataatctcattcacagtcattatttattgaaagcctattacgtgccatgcattgggctaggtactgggggatggragggtgggaactaggcaagcacagactttaaaacctgcacagtctaatcatttaattaaaaaaccttaccctaacaccttgaaacaacccactagatgtagccagtgtttttggatgaaaatgttttgtttcctttaagttgtaaaaactaggagctatatactttattaattcagtaaacaagtcatatatgtacccaactttaaagtgatgactcagatattcagaaaaaaagtttggacttctaggagtttactcaaacacaatgtctgtcctttcacttatacctcagtgaactgtcaaatggtcacataggccact

SEQ ID NO: 142784 - DNA, 575 bp, Homo sapiens
ccatgtagatataatatacttaaggatgggagattcttgagaatgagttcacccattaattaatatgccaatttttcttcccttgtgtctgtttctaaatgagaatgctgcagcctgaaattgcctaaaataaaagaaacaaataacttacagggaaattaacaaaggaggattctgaaataatctcattcacagtcattatttattgaaagcctattacgtgccatgcattgggctaggtactgggggatgggagggtgggaactaggcaagcacagactttaaaacctgcacagtctaatcatttaattamaaaaccttaccctaacaccttgaaacaacccactagatgtagccagtgtttttggatgaaaatgttttgtttcctttaagttgtaaaaactaggagctatatactttattaattcagtaaacaagtcatatatgtacccaactttaaagtgatgactcagatattcagaaaaaaagtttggacttctaggagtttactcaaacacaatgtctgtcctttcacttatacctcagtgaactgtcaaatggtcacataggccact

SEQ ID NO: 142785 - DNA, 575 bp, Homo sapiens
ccatgtagatataatatacttaaggatgggagattcttgagaatgagttcacccattaattaatatgccaatttttcttcccttgtgtctgtttctaaatgagaatgctgcagcctgaaattgcctaaaataaaagaaacaaataacttacagggaaattaacaaaggaggattctgaaataatctcattcacagtcattatttattgaaagcctattacgtgccatgcattgggctaggtactgggggatgggagggtgggaactaggcaagcacagactttaaaacctgcacagtctaatcatttaattaaaaaaccttaccctaacaccttgaaacaacccactagatgtagccagtgtttttggatgaaaaygttttgtttcctttaagttgtaaaaactaggagctatatactttattaattcagtaaacaagtcatatatgtacccaactttaaagtgatgactcagatattcagaaaaaaagtttggacttctaggagtttactcaaacacaatgtctgtcctttcacttatacctcagtgaactgtcaaatggtcacataggccact

SEQ ID NO: 142786 - DNA, 546 bp, Homo sapiens
gggggttgattgggcctgtggatgcttttcttgactggcagccccgggcccagagtgctgtgtggtgtttggtgtcttgtggaaccactttttttccccactggaagctgtctctcttccaaaattcaagtccacaattctccaggaaggtcaagcccagcactggcccctcaccccagccagggcgtcagcctgtgtcctccatcttttttgtcagggtgagcctttatcatggagtaaaatgctctgaaatctgcagggtmtgtgtgtgaggatcacacttcccgtgttcctccatatcttcctttatctccagcttgctcactgtcctgattttctagcatctcattgaagcagcttgatgtgacagacattttggaggttttgaattcagaaagaactgggttcaagtcccacctgtgcctcctaacgagctaggtgaccttgggcaagttaatcttcgagagtctcagtttatttcacctttgaaagggaaagttagtgatatttagctcataacatggctgtgaggaatgaaaactactt

SEQ ID NO: 142787 - DNA, 428 bp, Homo sapiens
atcacacttcccgtgttcctccatatcttcctttatctccagcttgctcactgtcctgattttctagcatctcattgaagcagcttgatgtgacagacattttggaggttttgaattcagaaagaactgggttcaagtcccmcctgtgcctcctaacgagctaggtgaccttgggcaagttaatcttcgagagtctcagtttatttcacctttgaaagggaaagttagtgatatttagctcataacatggctgtgaggaatgaaaactactttgacacatactgggactttagtaaatggaaggtataagttgcaggcatgtagaatttcactaatttcctcaatttaagacaataaatgatagaaatgaataaactttatatgtccttctccctattcatgactgtagagttgttatgtggcacttg

SEQ ID NO: 142788 - DNA, 428 bp, Homo sapiens
atcacacttcccgtgttcctccatatcttcctttatctccagcttgctcactgtcctgattttctagcatctcattgaagcagcttgatgtgacagacattttggaggttttgaattcagaaagaactgggttcaagtcccacctgtgcctcctaaygagctaggtgaccttgggcaagttaatcttcgagagtctcagtttatttcacctttgaaagggaaagttagtgatatttagctcataacatggctgtgaggaatgaaaactactttgacacatactgggactttagtaaatggaaggtataagttgcaggcatgtagaatttcactaatttcctcaatttaagacaataaatgatagaaatgaataaactttatatgtccttctccctattcatgactgtagagttgttatgtggcacttg

SEQ ID NO: 142789 - DNA, 539 bp, Homo sapiens
agtaacttcccacagttgccagagttggaattctaaggttcatgcatttagtggatttgttagaagctatatgtaattggcctgcttatctctgcaactctaaggaatgaaaaatcagttcatgagcccaggataaagtgatatgtacaagaaggtttctttcgatcaaatgttgcatatctgaggctcatgaatgaagatgagaaaataaaaccctaagtatacattttagaaaaagtctactgtaatttgtattgtgttgaatgataaaagttcttttactgtatagcttttgttcaggatttaattacaggaatactttagcctctaactgtggatcattgtttgsttaatgtctgatggattgacatttttccagtatgttggataaaacggaaacctcgagaattgcatagtcctttaggcaaaagaagacaggatgctagaggtttttgtgatacttatgaattaaaatatgcactgatggtggagtattcctccaagaaacccttaacaagtaacggtttcataattcaaat

SEQ ID NO: 142790 - DNA, 515 bp, Homo sapiens
tgaaaaaattgagtctccacccaatagttgtatcacttttttttgaattaaaatcaaacattagctacatccatgttcgaatacagaacatattccaaaggacaatgcatatttttgagaaagggtttcactcggttgcccaggctggagtgcagtggtgtgatccatcatagctcactccaacctcaacctcctgggttcaaaggatcctcccacctcagccaccaactgcctgggaccrcagggatgcaccaccatgtctggctatttttaaaactatttttggtagaaatggggtctcactatgttgctcaggctggtcttgagctcctaagctcaagtgatcctccctcctgggcctcctaaaatgctgggattacaggcatgagacactgtgcctggcccagacttttaaaaacttatgactcactttggattactcaggttattttattcttctgtgtagataatctggatttgaccatcatagggaaaaatgattctagaatatagat

SEQ ID NO: 142791 - DNA, 535 bp, Homo sapiens
aaaatataatcatttcttttctttttttttgtgattatttaggtagaaataatcactaatgtgaacgttgccattccaggttgttaaattcaaatgaatataaatgtggttctttctaaattatccttctaatttgaggcacaaaatggctttttgccctcaccttcaaggtttgcctttaatattctctgaaagataaattacattattatcttaggaaagtctgctgaaaatcattgaatttttatttctagcagctgcagatatttcttgtttgacaaagtatatcaatatccgtcactgayaccaagattggatttttaaggcatttgtggtgcaaaagaaacaaaacaaattttaccttggcattctttttaaaacaaaacatctaaataaatcagacctggctaagaacatacctgaggccttggctggatttaattacacaaagaattggcaaatatacagtcgtaatcaacaagcagactgtggcactcctcaaatcatctcaacactgacatgtcacaggctgttg

SEQ ID NO: 142792 - DNA, 535 bp, Homo sapiens
aaaatataatcatttcttttctttttttttgtgattatttaggtagaaataatcactaatgtgaacgttgccattccaggttgttaaattcaaatgaatataaatgtggttctttctaaattatccttctaatttgaggcacaaaatggctttttgccctcaccttcaaggtttgcctttaatattctctgaaagataaattacattattatcttaggaaagtctgctgaaaatcattgaatttttatttctagcagctgcagatatttcttgtttgacaaagtatatcaatatccgtcactgataccaagattggatttttaaggcattkgtggtgcaaaagaaacaaaacaaattttaccttggcattctttttaaaacaaaacatctaaataaatcagacctggctaagaacatacctgaggccttggctggatttaattacacaaagaattggcaaatatacagtcgtaatcaacaagcagactgtggcactcctcaaatcatctcaacactgacatgtcacaggctgttg

SEQ ID NO: 142793 - DNA, 621 bp, Homo sapiens
tctgattatgtgttgacatacctgtttactcatgagactttgaactccttgtgcctgggtattcttagtcaactttgtaatggcagagcctagtacagaatctgacacaagtgtgtgtttagtaaacatttgtttaattggtttagttctcttctaaatgttttctatattggcaaattggttactaagaggattagaagattggatcttgggtgcctctatgatgtgttcttgtctgattagctcaattargagtacagtgttaatgaggccaaggtcttaactttcaattccatgtggaacaatttgtacctcgactgtcagtaacttcaatgagttgcatggtaagttgcctggtatcattggttccaaggcaaatgcagagagaggatgattaagctcaaggcaaatccatctcaactattagacaaatggaattaaatatactccttattgatgtgaaaagcatgacttcatacttcagtgtgaaatgagcaccttgtttggtccacagcacttgtccatgtgcactgatgtacttgacttaaagggctctttgctgcaatagaggtggcagaaataccacctggtcatcagagttttgcaataaaaacagtaatt

SEQ ID NO: 142794 - DNA, 466 bp, Homo sapiens
caaaccacattttcctttttggagaaccaaccaattgctcgcttggttacccctgctgtcctgggcattcctggattatcatgtttcctatcagccaatcttcctgtcttattttctttatcagtgaaagcaggttatgaggagggaccaggggagataggaaatgaataacragagcgtgctctcacctcaccattgagctcagatttgttcagtaggaggaatcatcaagaaattacttaaatcataactattctctgtcaaaaaaccttgggcaggatcttttaccgaagtggccccaataaagtagccaagatttccaaattatgtataaattctggaaaaatatgaaaggcctcaaattccaacacctgcagcctgagctccgaggtcataaacataaaggtagtgtatctgtttagggcttctatacaggtccctgagcagcaggggacaccaagaaact

SEQ ID NO: 142795 - DNA, 615 bp, Homo sapiens
atgtcagccttcactccagagaaagaggcctgtttcttatgatgtcatggatacctatgaattgtgtatatgtctttacacattttcctttcatttatgatgagagtgaaataacttcatttattcattcaatgaattttaactagaacttctatgtgcttgtcccagctagatgctgggaaacaatacagtgaacaagagacatcgggctggaggaagaagcagaaatagccacagacacttaycagatattcacccccaccccaacccccgcccccaccctgagctcagccctgagcatcttcctgcctcaccgggaatccacatagggcagggtaggaagatgaaggaggaaacagcctcttctaactgaaaggctcaaccacaaaaggctttgtataattaagtcttaagtgagagaacttccagaccaggtcatgggggccccaggtctgtggaaaggcaatggccccgaggtgagacagctctggtgggttggaggatgagctgagaggtcaggctgcagaggcaagggctgggctggcactggaggggctgtcctcaagagctggggaaaccacagagagcgaaagcccagatctgagtttctgaaaa

SEQ ID NO: 142796 - DNA, 615 bp, Homo sapiens
atgtcagccttcactccagagaaagaggcctgtttcttatgatgtcatggatacctatgaattgtgtatatgtctttacacattttcctttcatttatgatgagagtgaaataacttcatttattcattcaatgaattttaactagaacttctatgtgcttgtcccagctagatgctgggaaacaatacagtgaacaagagacatcgggctggaggaagaagcagaaatagccacagacacttaccagatattcacccccaccccaacccccgcccccaccctgagctcagccctgagcatcttcctgcctcaccgggaatccacatagggcagggtaggaagatgaaggaggaaacagcctcttctaactgaaaggctcaaccacaaaaggctttgtatarttaagtcttaagtgagagaacttccagaccaggtcatgggggccccaggtctgtggaaaggcaatggccccgaggtgagacagctctggtgggttggaggatgagctgagaggtcaggctgcagaggcaagggctgggctggcactggaggggctgtcctcaagagctggggaaaccacagagagcgaaagcccagatctgagtttctgaaaa

SEQ ID NO: 142797 - DNA, 615 bp, Homo sapiens
atgtcagccttcactccagagaaagaggcctgtttcttatgatgtcatggatacctatgaattgtgtatatgtctttacacattttcctttcatttatgatgagagtgaaataacttcatttattcattcaatgaattttaactagaacttctatgtgcttgtcccagctagatgctgggaaacaatacagtgaacaagagacatcgggctggaggaagaagcagaaatagccacagacacttaccagatattcacccccaccccaacccccgcccccaccctgagctcagccctgagcatcttcctgcctcaccgggaatccacatagggcagggtaggaagatgaaggaggaaacagcctcttctaactgaaaggctcaaccacaaaaggctttgtataattaagtcttaagtgagagaacttccagaccrggtcatgggggccccaggtctgtggaaaggcaatggccccgaggtgagacagctctggtgggttggaggatgagctgagaggtcaggctgcagaggcaagggctgggctggcactggaggggctgtcctcaagagctggggaaaccacagagagcgaaagcccagatctgagtttctgaaaa

SEQ ID NO: 142798 - DNA, 584 bp, Homo sapiens
atgtgaccgagttctaacacagtggttctcaaccaggacaattttgcctcccggggacatctagcaatgtctggagaggaggcaactgtggttgtcacaactagaggagagaggagagttctatgggaatctagtgagtctctgaggccagagagcatcctgctgaacattccacaatgcacaagacagctcctcacaacaataaacaccattcacaggctttgtggctttgttctaactctgattagcctttggccagctcaaatgcccatggtgccaaaaccctacactcaccctgtactaatagttgagaaacccagttctaaccaatggaatgtgagctaatgtgttggagccaattccttgcctgatccataaaaaccagccaagtgcagttgtccaagctctttcctcttccttagtctgggtggagatgatcccaggcaacttggaagccacacgcygaatacaatggggccacaaaaatgggaagagcttacatctgtcactgcttgaatgagagctgtctgcccatcagtaacacacattttacactacgaaataaactagcatgttagagatct

SEQ ID NO: 142799 - DNA, 592 bp, Homo sapiens
gttaggtatggccatgtgaccgagttctaacacagtggttctcaaccaggacaattttgcctcccggggacatctagcaatgtctggagaggaggcaactgtggttgtcacaactagaggagagaggagagttctatgggaatctagtgagtctctgaggccagagagcatcctgctgaacattccacaatgcacaagacagctcctcacaacaataaacaccattcacaggctttgtggctttgttctaactctgattagcctttggccagctcaaatgcccatggtgccaaaaccctacactcaccctgtactaatagttgagaaacccagttctaaccaatggaatgtgagctaatgtgttggagccaattccttgcctgatccataaaaaccagccaagtgcagttgtccaagctctttcctcttccttagtctgggtggagatgatcccaggcaacttggaagccacacgccgaatacaatggggccacaaaaatgggaagagcttacatctgtcactgcttgaatgagagctgtctgcccatcastaacacacattttacactacgaaataaactagcatgttaga

SEQ ID NO: 142800 - DNA, 421 bp, Homo sapiens
aaatccatgcctagagagatcataggcaaacttccaaaaatgaaaagacaaatcaaggagagagaaaccacaccttacttacattggggaaaaagcaattcaaataacagcagatttcatatgagaaatcagattttgtcatgagaaaccytgatagaaggaagaaagcaccacagaatgtcaggtgctaaaacgaaaaaacactgtcaaccccaaattctatatccagcaaaaatatcctgcagaactgaaggcaagaacaagacttcagatgcgggaaaactaagggaacatgtcaccaacacacctaccctaaaagactgtccaaaaaatgctcttgaaacagcaggaattactcaaacggagactaatggaatatcaggaaggaaaaaagaacaaaggaaaaagagaaaatgcgggt

SEQ ID NO: 142801 - DNA, 421 bp, Homo sapiens
aaatccatgcctagagagatcataggcaaacttccaaaaatgaaaagacaaatcaaggagagagaaaccacaccttacttacattggggaaaaagcaattcaaataacagcagatttcatatgagaaatcagattttgtcatgagaaaccctgatagaaggaagaaagcaccacagaatgtcaggtgctaaaacgaaaaaacactgtcaaccccaaattctatatccagcaaaaatatcctgcagaactgaaggcaagaacaagacttcagatgcgggaaaactaagggaacatgtcaccaacacacctaccctaaaagactgtccaaaaaatgctcttgaaacagcaggaattamtcaaacggagactaatggaatatcaggaaggaaaaaagaacaaaggaaaaagagaaaatgcgggt

SEQ ID NO: 142802 - DNA, 421 bp, Homo sapiens
aaatccatgcctagagagatcataggcaaacttccaaaaatgaaaagacaaatcaaggagagagaaaccacaccttacttacattggggaaaaagcaattcaaataacagcagatttcatatgagaaatcagattttgtcatgagaaaccctgatagaaggaagaaagcaccacagaatgtcaggtgctaaaacgaaaaaacactgtcaaccccaaattctatatccagcaaaaatatcctgcagaactgaaggcaagaacaagacttcagatgcgggaaaactaagggaacatgtcaccaacacacctaccctaaaagactgtccaaaaaatgctcttgaaacagcaggaattactcaaasggagactaatggaatatcaggaaggaaaaaagaacaaaggaaaaagagaaaatgcgggt

SEQ ID NO: 142803 - DNA, 483 bp, Homo sapiens
cggtgactttcgtatgagctatttaactttattttcttcagaatctgctgtagattgagctgtgcgtgaaattgctagtaagttctgacatgttaatgcgtctgtctttaaatctgaattgttaccataaacgtgtttaatggaacttgctggtctgtggactacaaaaaaaaaaaaaaaaaaamaaaaaccctttctacttaacattgtcttaacctcgtactctttatcctctttctttccaggcttctgaattcccttctgagttaatgtcaaatgacagcaaagcactgtgtggctgaataagcggtgagtgtttgcttgtgccacccgtgggtaaactgcccctcggtgtgtgtgcgcgcgcgcatgtgtttttgcttgtgtatctataaaatgtctgatttggtaaatgcatgcttacttcgcggtgttacccgtactacattgtctcactagacatgaaggagcttgtagctttgg

SEQ ID NO: 142804 - DNA, 187 bp, Homo sapiens
aagcttttcttttaagctgtttgtagcttttggccattgtgggggtgaacyaaccagtggtctgtgactacagttcagaagaaacagttgggccatcaaactccaaatggccatgcaaatggcggacgatggctctctacactggggaccctagataggcctctaagttaagagcagtcatcgtccc

SEQ ID NO: 142805 - DNA, 187 bp, Homo sapiens
aagcttttcttttaagctgtttgtagcttttggccattgtgggggtgaaccaaccagtggtctgtgactacagttcagaagaaacagktgggccatcaaactccaaatggccatgcaaatggcggacgatggctctctacactggggaccctagataggcctctaagttaagagcagtcatcgtccc

SEQ ID NO: 142806 - DNA, 609 bp, Homo sapiens
atcagatctcctgagacttattcactatcacgrgaacagcacagaaaaaacccacccccatgatccaattgcctcccaccaggtcccttctaggacacatgggaattacgggagctacaattaaagatgagatttgggtggagacacagacaaaccatgtcactgtgcaaatatgtagagctggatttgaagaccagtttcaagaaggagggagaaggctaaagcaactcattcaaggtgagactatgaaggggacccttggtctcattggggccgtgcctctcctctccatccacgccagtggaaggaaaccagccaggtccaatacggctatcgtgtggcaaagcagaaggcagagctccggggagaataccaaccctaccacactgctgcccgattgaggatgggctaagggcctctgcttcaggcttgtttttgaagctcccacagccttgtgtgactcttgggatcctggaagtcacagatgggctcctggctggccaagcagtgcaaagtgctagccagcccgcctttgtgcccacaagaagagggttgtgctgtccttgatctttttcattccctggtgggtttatttgggctttgatcttt

SEQ ID NO: 142807 - DNA, 584 bp, Homo sapiens
aacccacccccatgatccaattgcctcccaccaggtcccttctaggacacatgggaattacgggagctacaattaaagatgagatttgggtggagacacagacaaaccatgtcactgtgcaaatatgtagagctggatttgaagaccagtttcaagaaggagggagaaggctaaagcaactcattcaaggygagactatgaaggggacccttggtctcattggggccgtgcctctcctctccatccacgccagtggaaggaaaccagccaggtccaatacggctatcgtgtggcaaagcagaaggcagagctccggggagaataccaaccctaccacactgctgcccgattgaggatgggctaagggcctctgcttcaggcttgtttttgaagctcccacagccttgtgtgactcttgggatcctggaagtcacagatgggctcctggctggccaagcagtgcaaagtgctagccagcccgcctttgtgcccacaagaagagggttgtgctgtccttgatctttttcattccctggtgggtttatttgggctttgatctttaaccaaagatcaaatcaagatct

SEQ ID NO: 142808 - DNA, 495 bp, Homo sapiens
taggacacatgggaattacgggagctacaattaaagatgagatttgggtggagacacagacaaaccatgtcactgtgcaaatatgtagagctggatttgaagaccagtttcaagaaggagggagaaggctaaagcaactcattcaaggtgagactatgaaggggacccttggtctcattggggccgtgcctctcctctccatccacrccagtggaaggaaaccagccaggtccaatacggctatcgtgtggcaaagcagaaggcagagctccggggagaataccaaccctaccacactgctgcccgattgaggatgggctaagggcctctgcttcaggcttgtttttgaagctcccacagccttgtgtgactcttgggatcctggaagtcacagatgggctcctggctggccaagcagtgcaaagtgctagccagcccgcctttgtgcccacaagaagagggttgtgctgtccttgatctttttcattccctggt

SEQ ID NO: 142809 - DNA, 584 bp, Homo sapiens
aacccacccccatgatccaattgcctcccaccaggtcccttctaggacacatgggaattacgggagctacaattaaagatgagatttgggtggagacacagacaaaccatgtcactgtgcaaatatgtagagctggatttgaagaccagtttcaagaaggagggagaaggctaaagcaactcattcaaggtgagactatgaaggggacccttggtctcattggggccgtgcctctcctctccatccacgccagtggaaggaaaccagccaggtccratacggctatcgtgtggcaaagcagaaggcagagctccggggagaataccaaccctaccacactgctgcccgattgaggatgggctaagggcctctgcttcaggcttgtttttgaagctcccacagccttgtgtgactcttgggatcctggaagtcacagatgggctcctggctggccaagcagtgcaaagtgctagccagcccgcctttgtgcccacaagaagagggttgtgctgtccttgatctttttcattccctggtgggtttatttgggctttgatctttaaccaaagatcaaatcaagatct

SEQ ID NO: 142810 - DNA, 584 bp, Homo sapiens
aacccacccccatgatccaattgcctcccaccaggtcccttctaggacacatgggaattacgggagctacaattaaagatgagatttgggtggagacacagacaaaccatgtcactgtgcaaatatgtagagctggatttgaagaccagtttcaagaaggagggagaaggctaaagcaactcattcaaggtgagactatgaaggggacccttggtctcattggggccgtgcctctcctctccatccacgccagtggaaggaaaccagccaggtccaatacggctatcgtgtggcaaagcagaaggcagagctccggggagaataccaaccctaccacactgctgcccgattgaggatgggctaagggcctctgcttcaggcttgtttttgaagctcccacagccttgtgtgactcttgggatcctggaagtcacagatgggctcctggctggccaagcagtgcraagtgctagccagcccgcctttgtgcccacaagaagagggttgtgctgtccttgatctttttcattccctggtgggtttatttgggctttgatctttaaccaaagatcaaatcaagatct

SEQ ID NO: 142811 - DNA, 609 bp, Homo sapiens
tttgcattttacttttaggtatataacccattttgagttattagttgtgaaatgtgaaaagtcaatgttcagacaaacttttttgcatttggatgtctagttgttcccctagcactgttatggtctcaatatatctccccagatttgtgagttaaagcttaatagccartgtgacagtattaagaggtggggtcattaaaacgtgattaagtcctgagggcagaggcctcatggattaggacccttataaacaggcttaagagagtgggtttcctctcttctccttttctgccatgggaaagcacaacatttgtcaactgttttgaccttccgccctttcaccatgtgaggatacctagagggtgccatctatgaggacaggggccttcaccagacactgaatctgtcagcaccttgatcttgaacttcccagcctccaaaactgtaagccatacatttctattgtttatacacaaattatgcagtcttagatgtttcattatagcagcacgaatgaactaagagaagcaccatttgttacaaacactatcctttctccattaaattgcttttgctcctttgtcagagatacatcgactatatttttgt

SEQ ID NO: 142812 - DNA, 610 bp, Homo sapiens
ttttgcattttacttttaggtatataacccattttgagttattagttgtgaaatgtgaaaagtcaatgttcagacaaacttttttgcatttggatgtctagttgttcccctagcactgttatggtctcaatatatctccccagatttgtgagttaaagcttaatagccagtgtgacagtattaagaggtggggtcattaaaacgtgrttaagtcctgagggcagaggcctcatggattaggacccttataaacaggcttaagagagtgggtttcctctcttctccttttctgccatgggaaagcacaacatttgtcaactgttttgaccttccgccctttcaccatgtgaggatacctagagggtgccatctatgaggacaggggccttcaccagacactgaatctgtcagcaccttgatcttgaacttcccagcctccaaaactgtaagccatacatttctattgtttatacacaaattatgcagtcttagatgtttcattatagcagcacgaatgaactaagagaagcaccatttgttacaaacactatcctttctccattaaattgcttttgctcctttgtcagagatacatcgactatatttttgt

SEQ ID NO: 142813 - DNA, 513 bp, Homo sapiens
gttcattgatgccaatttggagtattgttctcaacgctgtttgtcagtgcatcctgttggtgaagctcttttgattttaaattaaacgctaatttctagcataccacttaatgtcctttaatcttccttttagataagattatgctttgtcaaaaatcagtggtatttagttaagacaaatggaagcagtatttttccagttataggaatcaaatgtagacttagcatctgcctaccaagctctgccaaataatgtagtcagtgcttaaagaaattctacttttgacrccagtactgagactgtgtcgacagttctttaatgaaaatttctggaaccaatcaatgacttttccctgtaacgcatcctcttcaggtaaatgctaagattaatgggttatgtttagacagttgaagtgttaaaagaattgtttctgttatgctgataatttttcctgtgccagatatatgaagcatactatccagacaataaaaattgaggatgtctcaaattaa

SEQ ID NO: 142814 - DNA, 399 bp, Homo sapiens
acgaacgtgttggaggttcctttttggaatttcctgatgagtaaatttctctctctctctctgagtctcctaatagccttgcataaatctctggcttacacagagttaatttatagtttttaaagcttgctcttaataatgctattgrtaaaatctaatttaaagggctactcttggtcaagtctaggtaaggccactgttaaagttggagtagaatttcattatagtatctgttttctgtgtcctagatcctgtatatttttcttaatcaaatgaaagtataggtgaattaactcatttgtatgagcactatataaataaagctgggttatttagctttagagattatttagaggttgtaatcctctaaatgtatcaactctttggtactagccagac

SEQ ID NO: 142815 - DNA, 399 bp, Homo sapiens
acgaacgtgttggaggttcctttttggaatttcctgatgagtaaatttctctctctctctctgagtctcctaatagccttgcataaatctctggcttacacagagttaatttatagtttttaaagcttgctcttaataatgctattggtmaaatctaatttaaagggctactcttggtcaagtctaggtaaggccactgttaaagttggagtagaatttcattatagtatctgttttctgtgtcctagatcctgtatatttttcttaatcaaatgaaagtataggtgaattaactcatttgtatgagcactatataaataaagctgggttatttagctttagagattatttagaggttgtaatcctctaaatgtatcaactctttggtactagccagac

SEQ ID NO: 142816 - DNA, 482 bp, Homo sapiens
aatttaaataaatacaaaagcctttctcatttttgtttcctcttccaacccaatgtaaaacttcttastaaggcgaatggtatagtttgtttttcttactttgagtttttgtaaacaaatacaaaatacacataagccagttagttttctaaaatggattagaattagcacaacaatatttctttacttactaatttttaaaaaatttgtctgttgtgagcagacttttgattaagcgctagaaatttaaagatgtgccatgagctttctttttcagtagagaagaatgatataaacaaccattattctggctgattatagaaaaaggcattcgacaagcaaagaaaagcaactggctaatgggttttttgagttagacaaggcttcctggagcaggtataacctgtgtgggtcttgcaggatgagacagagctcttaaatcccttacttaaattagttgaacacacatacctcacataatc

SEQ ID NO: 142817 - DNA, 494 bp, Homo sapiens
catgatctaggctcactgcaacctctgcctcctgggttcaagcaattcttctgcctcaggctccagagtagagggtttataggcacccaccactgagaggtgaagcgcagggcttctgggtygggtggggacttggagaacttttctgtctagctaaaggattgtaaatgcaccaatcagcactctgtgtctagctaaaggcttgtaaatgcaccaatcagcactctgtaaaaacgcaccaatcagcgctctgtgtctagctaaaggttggtaaatacacccattaacactctgtaaaaacagaccaatcagcactctgtaaaatggaccaatcagcgctctgtaaaatggaccaatcagcaggatgtgggtggggccaaataggggaataaaagctggccacctggcaacagcagcggcaatcagcttgggtccccttccacgctgtgggagctttgttccttcgctcttcacaataaatcttgctgctgctc

SEQ ID NO: 142818 - DNA, 681 bp, Homo sapiens
tgaaggagatcgtatgtgagagacagaaaaaaaccataagcatccttgagatatcctaaaacatacaaatataaaataaacataagtgacagttctatgagccttcagcctaaggatcttacagcaaacacctgtgaaactcgaccctttaacacctggctcctcttgaacaccagaggcacatggctaactattttttcattttaactgatctctgggttattggcattgatgccagttttcaagaagaaaaaatacaaggaataggtttgcagaaaccctgacaccacctttacacctgtaggtttttttcatgttcagctttcctgattaaaatagaagtgttaaaattgcatattcaatgttactaaataaatgtggtaattctaagcctgcacacactttgatttttaaaaggaaaaatcatcagatcacctgaggtcaggaatttgagaccagctctgctcaacatggcgaaaccccatttctactaaaaatacaaagaattagccaggcgtgttggcaggcgcttataatcccagctattcgggaggctgaagcaggagaatcgcttgaacccaggaggcagaggttgcagtgarccaagatgatgccactgcactccagtatgggcaacaaaagtgaaactctgtctcaaaaaaaaaaaaaaaaaaaaaaaag

SEQ ID NO: 142819 - DNA, 448 bp, Homo sapiens
aagactgcctgctgttggcatgcatgagtgtgtgtgtgtgtgtgtgtctgtctctgtgtgtttctatatgcatgtgtatgtgtatgtgcacatgtgttttctgtgacatggaatcattgtctagggaacaggaatctgtcgcagaaaatagtaaaatcttgcatccatgaaagagaaaaaaagataagaggaaacagaaaactatcagataacaactaaattccttgtgtttacaaaaataataataacagaacaaacatctcatattccctgttccagtttctgggacttctcctaggaaagacaattattatttttattgmttttagtttgcaaactttctctctaatgtgccaatggatagctccaaactagtaaataattacgtattatacacaaatactgtgtttgcctttctactgtaaacttcctagccccaaagcaaatt

SEQ ID NO: 142820 - DNA, 607 bp, Homo sapiens
atgcagaactgtcaaaaacttgtaggctgacagtgtttattcaatgcagattgtaaaacaagacaattattaccagagaggctttctctctctgtggacctggattggtagcacgctatcaccaaagcatcaacctgctttggtcatagttcaaaaaaatcaytggccatcataagaaacttgaatttccttctagataaggtcaagaaagaacaaaattagaatttgtaactttagaaatagatttaagaaatgttcagaatagaggggccatttggtatacacatcaaaaacaattcctaattacattatacatttaacaacaaatgattgagtagaagataaatttcaccaatgggatgaccgagaagccctctgcagattcatttgactgatttaatatggggatatactaaaagcacaacgcatatttacaaggctattgtacagcaagcaaactgtgaattgtgtgagtggccattgactctttgtgaggctttaagccattttgatggcagaactgtgggccttttaggttcccgggcaacattaaataagcatggatgctaatattggcaagggccctaaacagatcatgcagggtaaa

SEQ ID NO: 142821 - DNA, 547 bp, Homo sapiens
tgggtatcatgtcctctagctctaagttgcctttcattaataacctatcgcatctgactaggactgcgggaaatgaaagtataattctggctaaaggaattggtagaaataagtcataagccctagaaaaatgttgtaactgtaagttttatctgtagcgaaactatattaataaagttactaaaagtaaaaagtcatttacagcttgcagttgaggaaaytgtttttgtaggaaagctctttcctcagaatgttgaactggaagatggctcggtgggtgataggacttcaggtgctggacaaatgccaggagactcactccgttaaggtgtaagtgtggagctcatgaacatttgtatcccatcaagtagaaaattgctattccaccttgccatataaagttggccaaatgtcttcctactgtttttcatttgtttaaacttctctaatatgcagctaattttctaattattataatatgatacatttagcaataatattttgtgaaactggcctaagtaattcctcttgcaactggagactggac

SEQ ID NO: 142822 - DNA, 547 bp, Homo sapiens
tgggtatcatgtcctctagctctaagttgcctttcattaataacctatcgcatctgactaggactgcgggaaatgaaagtataattctggctaaaggaattggtagaaataagtcataagccctagaaaaatgttgtaactgtaagttttatctgtagcgaaactatattaataaagttactaaaagtaaaaagtcatttacagcttgcagttgaggaaactgtttttgtaggaaagctctttcctcagaatgttgaactggaagatggctcggtgggtgataggacttcaggtgctggacaaatgccaggagactcactccgttaaggtgtaagtgtggagctcatgaacatttgtatcccatcaagtagaaaattgctattccaccttgccatataaagttggccaaatgtcttcctactgtttttcatttgtttaaacttctctaatatgcagctaattttctaattattataatatgrtacatttagcaataatattttgtgaaactggcctaagtaattcctcttgcaactggagactggac

SEQ ID NO: 142823 - DNA, 480 bp, Homo sapiens
atgttttccatacaggtgtggtgcattctggatactgactcagggactctgggcatcttcccagagacacccctagatataaaacttgatgtagcttcttgtagttcctttatttccaactagggcatgggactcttggcaaggctctgaagtagaaagtaccctttatagacagataaagaagtacagacaatctgatagtgtaaaggtggttggggcatttgtcttttagggaaaataatccacataaaaccacctttctcatagttttgtatgtttagggagagcccaatattttcaaaaaatgtttgaaaggcagtaattccccagtgcaagcctacatttttatttttacctattatrtacctagttagctttctgtaacttcaagaatttgtccttattttcacctagctaatgtgaaaatttcatgcatttatcacttcacctcatcaccactgcaattcttttgtttttttc

SEQ ID NO: 142824 - DNA, 480 bp, Homo sapiens
atgttttccatacaggtgtggtgcattctggatactgactcagggactctgggcatcttcccagagacacccctagatataaaacttgatgtagcttcttgtagttcctttatttccaactagggcatgggactcttggcaaggctctgaagtagaaagtaccctttatagacagataaagaagtacagacaatctgatagtgtaaaggtggttggggcatttgtcttttagggaaaataatccacataaaaccacctttctcatagttttgtatgtttagggagagcccaatattttcaaaaaatgtttgaaaggcagtaattccccagtgcaagcctacatttttatttttacctattatgtacctagttagctttctgtaacttcargaatttgtccttattttcacctagctaatgtgaaaatttcatgcatttatcacttcacctcatcaccactgcaattcttttgtttttttc

SEQ ID NO: 142825 - DNA, 601 bp, Homo sapiens
tatctttgcattgtatctgttcattatatctattgcagcttccaatttgttaaaaattttgtttaaaatatttctctccttaaaataacttcgtttttctaacccggtagggttcatattttctaattagctattcttgggatgatcctcgagttaacatttctaatttcttctattcttttggttcctagttttaagatttctctataaatgcaaaaccattaccccttatgtcaaacaggatagaacaatgttggcratgctgatgaatgaatatgagaagtaggaacctggtgtcagggaaagaatctgtaggtcctgtttctttttgcacaagtctagttaaggttagttattcattgaataattatatttcattgaaagggcagaaaaacaacacagacaaaatcctggttccttaaaatgtgctgttctttccttatgggtaaggtcctcctttcagaactaaatgaggttacaaattgaacttgtattttagcttattaaagacttggtctcacttttagcactcaggacccttggaagcctttgaaagcctcctgctgcttttcccacaacctttgcaccatgacagcccggc

SEQ ID NO: 142826 - DNA, 601 bp, Homo sapiens
tatctttgcattgtatctgttcattatatctattgcagcttccaatttgttaaaaattttgtttaaaatatttctctccttaaaataacttcgtttttctaacccggtagggttcatattttctaattagctattcttgggatgatcctcgagttaacatttctaatttcttctattcttttggttcctagttttaagatttctctataaatgcaaaaccattaccccttatgtcaaacaggatagaacaatgttggcaatgctgatgaatgaatatgagaagtaggaacctggtgtcagggaaagaatctgtaggtcctgtttctttttgcacaagtctagttaaggttagttattcattgaataattatatttcattgaaagggcagaaaaacaacacagacaaaatcctggttccttaaaatgtgctgttctttccttatggrtaaggtcctcctttcagaactaaatgaggttacaaattgaacttgtattttagcttattaaagacttggtctcacttttagcactcaggacccttggaagcctttgaaagcctcctgctgcttttcccacaacctttgcaccatgacagcccggc

SEQ ID NO: 142827 - DNA, 504 bp, Homo sapiens
ttgatttggtagcaccaacaaatgggatccagcttccttctaaactgagtaatatgatctgagcttaaatgtttctttacttcttaaaatgcaaatttttagaataggtagtaagactgcaaaaatgttactgtgaatatcctaatgctctcccactgctaaacatcacgttgccacrttggcactaactcagacttactatagtcaggtgtgatgcccttctccaaaccacaagtctttggtgtcaactccagtaaactagcctttcaataagtttactgcaagcatgagaaatgaagtcgcagattgatgttggtacttatgcatatttatctagaagggctttttctcttgtagtcagttttggctttttttggattagggattaaaataacaaacagttgcctgaatataaagtaaaatttcttttgtaaatagaaatcaatatgtatttctgaatagttgcaagtggagaaataattagcatttattattcagtaatta

SEQ ID NO: 142828 - DNA, 423 bp, Homo sapiens
gttatggattctaaattgggcattttgaaagacaaaggtgaaggctaatagtttacatttagtacgaaactctggcattccaatggaaattggaatcaaataatgggatttgttttttaggtaataatataatgagttagctgaaagagctaacttgtaatagatttattaagccataaagtttcatttctttgaacaacatattgtcaaaatcttcacagacaacttcacttataagaaaattaaatgaaagaactatttctttaaaagttagatgtggattttctctatttggggaggggttgaaaatgccgcgtcartggatctggctgtgatccgacctcttaatcctgttttaattatgggttctttgctacttctgattttatagttatatgtgactgacattcagacattcatagt

SEQ ID NO: 142829 - DNA, 478 bp, Homo sapiens
tgaattcatttatgtaaagtcaattgaaagttaatattctcatgcctaaatatttactagaatttaatattaattttaaaaaccataaaaagctgattktctttgtccaaattattccaaagcaaatgggacatacacaattttgagagagatttgatgagtttttgaataatgagctcctcattgaatcaacttcattttaggtcaagactggacatagacgtgcatgtatggatgtctagctaagtaggtagacagccttttttttttttttttccctcctctgggttgctctgccatgcccctgcacagtttcctgtctccatatcttctgttgtgtgtcttgattttatattgtcttcccttccaggagatatctggtagcatattgtcctctctggttctgaaagtcttttttttcttgaagcattacccctttaggggcttgtcattgtcatctatgtagaatatagaatgg

SEQ ID NO: 142830 - DNA, 478 bp, Homo sapiens
tgaattcatttatgtaaagtcaattgaaagttaatattctcatgcctaaatatttactagaatttaatattaattttaaaaaccataaaaagctgattgtctttgtccaaattattccaaagcaaatgggacatacacaattttgagagagatttgatgagtttttkaataatgagctcctcattgaatcaacttcattttaggtcaagactggacatagacgtgcatgtatggatgtctagctaagtaggtagacagccttttttttttttttttccctcctctgggttgctctgccatgcccctgcacagtttcctgtctccatatcttctgttgtgtgtcttgattttatattgtcttcccttccaggagatatctggtagcatattgtcctctctggttctgaaagtcttttttttcttgaagcattacccctttaggggcttgtcattgtcatctatgtagaatatagaatgg

SEQ ID NO: 142831 - DNA, 478 bp, Homo sapiens
tgaattcatttatgtaaagtcaattgaaagttaatattctcatgcctaaatatttactagaatttaatattaattttaaaaaccataaaaagctgattgtctttgtccaaattattccaaagcaaatgggacatacacaattttgagagagatttgatgagtttttgaataatgagctcctcattgaatcaacttcattttaggtcaagactggacatagacgtgcatgtatggatgtctagctaagtaggtagacagcctttttttttttttttyccctcctctgggttgctctgccatgcccctgcacagtttcctgtctccatatcttctgttgtgtgtcttgattttatattgtcttcccttccaggagatatctggtagcatattgtcctctctggttctgaaagtcttttttttcttgaagcattacccctttaggggcttgtcattgtcatctatgtagaatatagaatgg

SEQ ID NO: 142832 - DNA, 519 bp, Homo sapiens
tgagttttacctattttactatttcactgtctttgtggtagttttaggatggttgaatttctgtatttagcctgccattaagtatatatttccatttttctgcttgtataatttccaatacatatcctgatagatagtatttcctacaaaatttacttttagaggaaaaattcaaaatgttagcagactaatcagcttatcctgcccaaagcttttgagatgagaatagaatggattwtgctttccatgactcttttgatttctggctgctttagaatgtagatttataagaaaagaagagtaggtgaaaatggtcagtagtatactgtctagggaatgagcttagaattctgaggattttagatttctcttggactgttgcttaaaagtaccactcacagcaaacacttgatagcttaacgcatacaaccgcattaaagagatagtgttttaactgcacatataacttaactatttctgtatttatcttcagttttcagtgtttaaacctgcctgttt

SEQ ID NO: 142833 - DNA, 630 bp, Homo sapiens
ggttcatccatgctgtagcaagtatcagtactttattttctttttactgccaaataatatttcattttatggatatrccaaattttatttgttcatttataagttgatggacacttgttgtgagcactctttagctattatgaatagtgatgctgtgaacattttgtaccagtttttgcatgtacacatgttttgatttcttccaaatatatacctaggagtggaatggctggggccacatgatacctctgtggttaattatttgaggaaccaccaggctgttacccaaacctgtggcaccactttacattcccaccagcagtgtatggtcccagtttctccacatcctcaccaacacttgttatgatgtcttttttcttatagccatcctagtgggtgtaaagtggtattcactgtagttttgattttcatttctctgaaggtagaatggatggtttttgaaagaaaagtttcagcacaacaaaggcggaaactttgtttcaaagttacagaaaggagaaaaagatattagggatggaaacatataagtcaaagttggttagagaactgtctgagagaatagggcatggcagaggaaatctccagagagctcatttgtccagattatag

SEQ ID NO: 142834 - DNA, 630 bp, Homo sapiens
ggttcatccatgctgtagcaagtatcagtactttattttctttttactgccaaataatatttcattttatggatatgccaaattttatttgttcatttataagttgatggacacttgttgtgagcactctttagctattatgaatagtgatgctgtgaacattttgtaccagtttttgcatgtacacatgttttgatttcttcyaaatatatacctaggagtggaatggctggggccacatgatacctctgtggttaattatttgaggaaccaccaggctgttacccaaacctgtggcaccactttacattcccaccagcagtgtatggtcccagtttctccacatcctcaccaacacttgttatgatgtcttttttcttatagccatcctagtgggtgtaaagtggtattcactgtagttttgattttcatttctctgaaggtagaatggatggtttttgaaagaaaagtttcagcacaacaaaggcggaaactttgtttcaaagttacagaaaggagaaaaagatattagggatggaaacatataagtcaaagttggttagagaactgtctgagagaatagggcatggcagaggaaatctccagagagctcatttgtccagattatag

SEQ ID NO: 142835 - DNA, 398 bp, Homo sapiens
taagtggaggggtatttgcaacctcccttcactctgtaagctaatttacatttaaaccttgrttgcctctcgctggcaactaaggctccacaacagccgtcaaggaattaatttctggggcccatgaaggcgtgcctgagaaataaaagtgctgtgggagaattttgccaacaggctgaagagcaaccttgctgccatgcacacagacatttaggatcccgctggcttgtgaatcctggcatagttgctgggggccacacagtcgggaggcaaacaaagctgctcagttagcactgcagtgcttttcctgggagtgggaactcgcaggagcaaaccaactagggaaacgtccctaaagtagacagcttcaccagagtggttattgttgacttcctctt

SEQ ID NO: 142836 - DNA, 434 bp, Homo sapiens
ttgctgaatttacgtactaagtggaggggtatttgcaacctcccttcactctgtaagctaatttacatttaaaccttggttgccwctcgctggcaactaaggctccacaacagccgtcaaggaattaatttctggggcccatgaaggcgtgcctgagaaataaaagtgctgtgggagaattttgccaacaggctgaagagcaaccttgctgccatgcacacagacatttaggatcccgctggcttgtgaatcctggcatagttgctgggggccacacagtcgggaggcaaacaaagctgctcagttagcactgcagtgcttttcctgggagtgggaactcgcaggagcaaaccaactagggaaacgtccctaaagtagacagcttcaccagagtggttattgttgacttcctcttctggttgtttaaagtgaca

SEQ ID NO: 142837 - DNA, 398 bp, Homo sapiens
taagtggaggggtatttgcaacctcccttcactctgtaagctaatttacatttaaaccttggttgcctctcgctggcaactaaggctccacaacagccgtcaaggaattaatttctggggcccatgaaggcgtgcctgagaaataaaagtgctgtgggagaattttgccaacaggctgaagagcaaccttgctgccatgcacacmgacatttaggatcccgctggcttgtgaatcctggcatagttgctgggggccacacagtcgggaggcaaacaaagctgctcagttagcactgcagtgcttttcctgggagtgggaactcgcaggagcaaaccaactagggaaacgtccctaaagtagacagcttcaccagagtggttattgttgacttcctctt

SEQ ID NO: 142838 - DNA, 490 bp, Homo sapiens
aaagttctgcctcttgctgctgctgaactcttgcactcaaagtaggagacagccttgtagatgttggaatccaccggcaagacctacagaccagcccatgtgtgagatgatcacaggctttgcgcagaggaactgtgagcatggatcagaatctagagcagaaagggaggtcaggtcaggcctatggtagcctttttcagatgaaagagcaccagcctgacgaatccataagaacaggaacaacatgaaagtactgagggcccaaatcaccaattttgttctctgggaataataaagacamcctgaagtaccaaaagtctaggcaagttataacagttaaagaattacaattctattaaaacacaccaaagactaactgtgtgtttaacttgaatgtaacttttcttcactgattctaaaagtatcctaggatcttagagtatctcaaggtcataattgtagataatactgtaatggatttggctactgt

SEQ ID NO: 142839 - DNA, 577 bp, Homo sapiens
atgcagtgtccccagtgcattgtgaaatgatagcaatggaacaatgctgcccagcacactctgtggccaggtcactgtggggacgggggatcagtagttayagcagcatcaccttctccatccaggcagcctccccagaatctcaggttgccctctgggttctttcattgcaccttgttcttgtttcatcacaacacttatcatactgctgaccattgcctcttggcttctctgcaggcactcagtaaaatgttctaaaccagtggcattttggggaggtgtgtctctctaccaaactttgatcatcatatttttgtgacttgcatgtttaggaatgtgggtgtgtgaaatgtttagagagaccagtacctaactttgtataagagtcaattcaagagggtttagagtcagtgtatgcctagaggtggacgtttatgatgataaaacagaataaagctgttgggtttttgtagagactaaacacaggaacttggttacatcagcatttatttgttctttcattagttcatcacccattcattcatcactattgagcatgtattgagcatgattttac

SEQ ID NO: 142840 - DNA, 511 bp, Homo sapiens
tgaattctcatttgcaggtttaatttattctttttttttttatttttgagatggagtctcgctctgttgcccaggctggagtgcagtgacatgatctcgactcactgcaacctctgcctcctgggttcgagcaattctcctgcctcagtctcctgagtagctgggactacaggcacccgccaccatgctcagctaatttttttgtawttttagtagaggcggggtttcagcatgttggccaggctggtctcaaactcctgacctcaggtgatccacccacctcacctcccaaagtattgaattacaggcataagccactgtgcccagcctattcaaatattttacacataccaaggaatgctaaaatataaatcccacataagattcaagatgctgctgggataattatgaagagtgatgtatgttttgtaagcaaagaaacaaaaaatatacaaaatttaaataaaagttaagaaatagtttctgcatattcctcctcttcctaaacaat

SEQ ID NO: 142841 - DNA, 511 bp, Homo sapiens
tgaattctcatttgcaggtttaatttattctttttttttttatttttgagatggagtctcgctctgttgcccaggctggagtgcagtgacatgatctcgactcactgcaacctctgcctcctgggttcgagcaattctcctgcctcagtctcctgagtagctgggactacaggcacccgccaccatgctcagctaatttttttgtatttttagtagaggcggggtttcagcatgttggccaggctggtctcaaactcctgacctcargtgatccacccacctcacctcccaaagtattgaattacaggcataagccactgtgcccagcctattcaaatattttacacataccaaggaatgctaaaatataaatcccacataagattcaagatgctgctgggataattatgaagagtgatgtatgttttgtaagcaaagaaacaaaaaatatacaaaatttaaataaaagttaagaaatagtttctgcatattcctcctcttcctaaacaat

SEQ ID NO: 142842 - DNA, 419 bp, Homo sapiens
ctcagccatgatcataaacttcctgaggcccttgccagaagcagatgctggcaccacacttcctgtacagcctgcagaaccatgagccaaaataaacctcttttctttataaatcacccagcctcggatatttatttatagcaatgcaaaaacagactaataccatctcccaaagctaatatgtaagaaatttaatccctaatgcagcagtattgagaggcrggacctttaagaggcagagttctcatgaatagattaacttcattaccacaagagtgggagtattgtaaaagggagctcggctccttcttgctatctcaccatggaatgcctcccgccatgttatgaagcagcaggaagggtctccccagatgcagcccctcgatcttgaactttccagcctccagaactgtgagcca

SEQ ID NO: 142843 - DNA, 591 bp, Homo sapiens
cttttaggcacatctttctctgcaggagtaaactagggatttaaaaaaaaatgaggaaacaggaaaactggaagatgccagaaggctgcatatttaaaacctgagctggaaaagaaagagaagcaaaataagtctgtatagtctgactttggagccatggcatgaggcagaagtcagactttggaaaagttatgagacatgaaagtgagagagatgagaagggaaagaggcttttaagaaaattttctgtgaataataaatatattctccctttggcgattcttctagtaagtaataaattgcttttcaatttttttggctatgggaggttttttattgcaatatcatgataatagagcctagagaaggggtggcctttatatgggtgatagaagcatgtctagatcctgaaaccactgttcccaggtggtggcttccccctgtaatgcacacgtgggtcactaaacccagataaaatagcttttgtgayataacagataaggaaaacagaattcttggaaagactgatagcgagagagctgtttactggccatagcacagggacagaagttggggaatcagagtggcgag

SEQ ID NO: 142844 - DNA, 567 bp, Homo sapiens
tgaaagcttttccatggagcccttatcggcctagatcatattctatgccataaccttcctcgtctcccatcaaaactgccctgaacccatttcatgaggtccttagtgtgaaccaaattcatactggtctctagtgacttacagcaataataatacctaacattattgaaggccaactatgccttaggtcctattttaaggtctctacctctgttagcttttctaagacttacgatacccyttttataaagttggtgatattatctgttcaaatcacttaaggtagacaactgactactgtgctaaaaatacaacacatttggcggccaggagcaatgtatgatctaataattatatgaaaactccagtcttgatttcaccaagatttcagatctcttcctgaaaattcttgatgattccctgtttatgtgcccataacagattaaaaaaaagagagcagaacaaaacactctttatattagcttccaattaaaaacttcaaaaaccaaacaaaaatggtgtataatttataattattttgatatagtacatcacataatgttccta

SEQ ID NO: 142845 - DNA, 627 bp, Homo sapiens
gatactttaaactctctcccacctctgcttgcaccaggattgcaacagcagaagcccagagagatgtcaagcggcttaaaggaaattgtatgtagtggaaaattcttttttttattaaaagctatttatctttcttatctttttgaatatacggctgcttctggcttgcctctgtgaatccacacggctgatcgaatctctgcctcattgtgctcatttattaaaagctgaattccaatatcagccataggtgattcctacatcaagggacagagtcctactatgataattatggcaggaggtcaggatgcagcctgggggaagacagcagtcagcctgaagcatcccaaagcctaaggatcctctcactgctggctttctcaaggagactgamggttcctacctttctctgagccaacccatgtgcctatgttatgctatttaatttttacaaaagttctatgacataggtgttataatcctcattttacacattaaaaaattgagtttcaaagatgctcaattcatgttagctagaggtagacccaggattcaaacctacatgtttgaccccaaaacttacactcttctgtaatgatgcttttaagaatgggaaaaagtggcgaa

SEQ ID NO: 142846 - DNA, 502 bp, Homo sapiens
aatgtggggacagaaatacctaccctgcctaagtcacagtggttttgtaaagacccaatatgataatggctgtgaaagaacaacataatcttaaaacactacattaatggtaagtcaaatcattacatcataracattctttcttatgcttatctatttcaatcccttcatatatattttctcctcaaaattctacattagcaataactggaaaaattaatacaggcatatctcatttcattgcaccttaatttactgcactattgtacttcactttttttaatacaaattgaatgcttatggcaatcctgaatcaagcaagtctattggtgccattttttcccaagagcatgcgctcatttcttatctctctgtcacattttggtaattcatattatatttcaaactttttcattatttttatatctgttatggtgatctgtgatcaatagtctttcatgttaccaatgtaattgttttggttgaggttacagtgaatcac

SEQ ID NO: 142847 - DNA, 502 bp, Homo sapiens
aatgtggggacagaaatacctaccctgcctaagtcacagtggttttgtaaagacccaatatgataatggctgtgaaagaacaacataatcttaaaacactacattaatggtaagtcaaatcattacatcatagacattctttcttatgcttatctatttcaatcccttcatatatattttctcctcaaaattctacattagcaataactggaaaaattaatacaggcatatctcatttcattgcaccttaatttactgcactattgtacttcacttttttwaatacaaattgaatgcttatggcaatcctgaatcaagcaagtctattggtgccattttttcccaagagcatgcgctcatttcttatctctctgtcacattttggtaattcatattatatttcaaactttttcattatttttatatctgttatggtgatctgtgatcaatagtctttcatgttaccaatgtaattgttttggttgaggttacagtgaatcac

SEQ ID NO: 142848 - DNA, 564 bp, Homo sapiens
  misc_feature (1)...(564): n = A,T,C or G
gctagcagaggttggtacataatgtttaaggagtaaagcatcttcataacaaaaagtacaaggtaaagcaacaagtactgatgtagaagtgtctktaatttatccagaagaatcagctaagatctttgaagnaaatattgacactaagcaagaggttttcaatgtagacaatgaaacagttttatattagatgaagctgccatctaggacttctcacagctagagagaagtcaatgttcagttttaaagctttcaaggacaagctgactaatttgttaagggctaatgcagctagtgaatttgagttgaaggcaatgctcactcaccatttcaaaaatcctaggacccttaagaattgtgctcaatctattctgcctgtgctttataaatgaatgaacaaagcctgaatgacagtatatctgtttgcaacatggtttactaaatattttaagaccaccattgaggccttctactcagaataaagattcctttcaaaatattactgtatatagataatgcacctggttgcccaagaactcacccaagagatgtacaagatgatta

SEQ ID NO: 142849 - DNA, 493 bp, Homo sapiens
agcagtagaatttctatacaccagtaacattctagatgagaatcaaagcaaagacacaatctcatttataataaccacaaacgaaatgaaatacctaggagtctatcttactaaggaggtaaaaagtctcttcaagcagaactacaatacattgctgaaagaaaccagagatgacataaataaatggaaaaatattccatgctcatggattggaagkattaatagagttattaatggccatactgcccaaagcaatttatatatttaatgatattcctaccaaaataccaacaactcccagaaccagagaaatctattctaaaattcatttggaacaaacaaacaaacaaaaagcctgtgcatcagtctgttttcacactgctgataaacacatacccaagactgggcaattggcaaaagaaataattttaactggacttacagttctacatggctggggaagacctcacaatcatggcagagggcaagaggc

SEQ ID NO: 142850 - DNA, 493 bp, Homo sapiens
agcagtagaatttctatacaccagtaacattctagatgagaatcaaagcaaagacacaatctcatttataataaccacaaacgaaatgaaatacctaggagtctatcttactaaggaggtaaaaagtctcttcaagcagaactacaatacattgctgaaagaaaccagagatgacataaataaatggaaaaatattccatgctcatggattggaagtattaatagagttattaatggccatactgcccaaagcaatttatatattyaatgatattcctaccaaaataccaacaactcccagaaccagagaaatctattctaaaattcatttggaacaaacaaacaaacaaaaagcctgtgcatcagtctgttttcacactgctgataaacacatacccaagactgggcaattggcaaaagaaataattttaactggacttacagttctacatggctggggaagacctcacaatcatggcagagggcaagaggc

SEQ ID NO: 142851 - DNA, 552 bp, Homo sapiens
aacattaacttttatatgcactgggaaaccaaaaattgtgtgactcactttactttgatatgtgttttattgtggttgtctggaatcaaacttgcagtatctctgaggtatgcttgtaacattgtttattttattttatttttcatccagagggctttcacgcatattatctcattcaattctcactaacrttgtaaatactagttagaatagaaatgaatatcgccattgcatagataatggcatacatgttccaaaaattagaaggcttgccaattctccacagacatcaaatgatggaataaatgtaaatttattacttctgccttctagtcctacccctgggttcattgcatacgttgacccatgatgtttgcatgcccagattaaaactcgtttgtcctgtctggacaaacctggaggagttacctttcctttttttccaatccctgtcaagagcatgaacttaaattcaagggaaaatccagctgattaataagtttactctgaggtatgaagggctcaagagactgctgaatgtgataaccctcc

SEQ ID NO: 142852 - DNA, 494 bp, Homo sapiens
tagttggaataagagatcttaattttcccaccctttgaatcactcagaactcatctattcaatatacatttacatatatatayacacacacacacatatatatatacacacacacacatacatatatatacggccaattttgagaattgtgggttagatttgggggaagcgctgattaagagttgaatcagtcaaagaaagtgcaaaatatactagaatttacaacaaaactctaacaaaaatgcagagtgaatctgcagagcaggcaatatcaatagacatatgtgaagatgaataggaaaactcctaggaggatacgagtatctgtagcactttaaagcaaagagcgctttcgaatagcagaacaaaggaagaaaggatgaatttcaggtgccaaaaggtcctagagattcttgctgttcacgaaagggtcaccaaaaggatgtctctatcccaaatggcaaagacacacttattctcagagttagcccagg

SEQ ID NO: 142853 - DNA, 494 bp, Homo sapiens
tagttggaataagagatcttaattttcccaccctttgaatcactcagaactcatctattcaatatacatttacatatatatacacacacacacacatatatatatacacacacacacatacatatatatacggccaattttgagaattgtgggttagatttgggggaagcgctgattaagagttgaatcagtcaaagaaagtgcmaaatatactagaatttacaacaaaactctaacaaaaatgcagagtgaatctgcagagcaggcaatatcaatagacatatgtgaagatgaataggaaaactcctaggaggatacgagtatctgtagcactttaaagcaaagagcgctttcgaatagcagaacaaaggaagaaaggatgaatttcaggtgccaaaaggtcctagagattcttgctgttcacgaaagggtcaccaaaaggatgtctctatcccaaatggcaaagacacacttattctcagagttagcccagg

SEQ ID NO: 142854 - DNA, 563 bp, Homo sapiens
ctaacaaggaaactgaggtgacatccccaccaccaaggaacagagttctgccaacaacctgaataagctggaaagcggagtctctcctacagcctccagacctgaataagcttgaaagcagagtctctcctacagcctccagaaaggagacactgaatttttcctagcgagacctgaagcagagaaccaataatccacagtgtacctggctatctaacccacagaactatgataataaatgtgtactgttttaagggtctgatttgcggtaatttgctcaggacgcaattaaaaacctcaacatttatcaaatcagcaataaaaatactttgctttcagtgcttttacttttttctatttttaaaaaactttttgttaaaatgtaacatacatacagaaaagtccacaaatggcaaatgtaaagtgcttaatgaattttcaataactgaatacattagtgcatccagagtccagaccagaaaatagtatattgtcagcatcctggaagatacyccccgtgttttcttccatggtgccttgacttcaaatatgtgaacaaattt

SEQ ID NO: 142855 - DNA, 620 bp, Homo sapiens
ccttcgtggttagcaaaatgtgaaccccaaatatatgagatgggtctcagtcaatttatagtgtttattttgccaatgttaaggatatgcccatgacatagcctcaggaaatcctgagacatgtacccaaggtgatcagkggtacagtttgcttttatacgttttagggagacatgagacatcattccatatgtgtgagatgtacactagttcagtccggtaatatgggacaacttgaagtgggagcttccagattagaagtagataagagacaaatgattgtaatcttttgagtccttgatcagcctccattgaatacacaatttactccagctcagtgaatctgcatttttacataaatgattagcagaggaagcaatgacacatgcatttgtctcaggtaagcctcagagggatgactgaatagaatgggaagcaggtttaccttaaacagttcccagcttgattttcttctttagcttggtgattttggagtctcaagatttattttcctttcacagtactctcagtcagatttcaaaaaagataatttccacacacttgtttttttattttttttattttttttatttttttgagacagggtctcactctgtcac

SEQ ID NO: 142856 - DNA, 620 bp, Homo sapiens
atgtttatttcatttgatacttgcaaaatcccatgaggctaacaactcttatgtaattctaaaattattcaaattaacagttaaaagtaaggaaaagaattccacaatgcatgttgggctgggggagaaactagcgatatgaagtgagttgtgtgaatttttccagggtaagtcagtgggagatcacactggggtcttacgactccttgtctacaattcctcccacatccacaagtggttcctaaaagctgtctctgcctaatacaagatactgagcatgccatgctacatctatgccacgcctgccggtttctgcaacagcactcagggtttactgaatactctatcctgtgagtgattcatgatgcaaaccaaaggccawgagccctagctttcaggtctccaggatgctgtaaattaagacgtccaactatggactcttctctctcttctttcagatgttcagttattgtacatcctctacttctacctcagatagagcttgaatagtcagaaattagcaagtatgttgccaaagaaatcataaaaacttccttctctttcaagctcatgggctcaattgttatttctttcctcactattcaaggaagagaagtgct

SEQ ID NO: 142857 - DNA, 620 bp, Homo sapiens
atgtttatttcatttgatacttgcaaaatcccatgaggctaacaactcttatgtaattctaaaattattcaaattaacagttaaaagtaaggaaaagaattccacaatgcatgttgggctgggggagaaactagcgatatgaagtgagttgtgtgaatttttccagggtaagtcagtgggagatcacactggggtcttacgactccttgtctacaattcctcccacatccacaagtggttcctaaaagctgtctctgcctaatacaagatactgagcatgccatgctacatctatgccacgcctgccggtttctgcaacagcactcagggtttactgaatactctatcctgtgagtgattcatgatgcaaaccaaaggccatgagccctagctttcaggtctccaggatgctgtaaattaagacgtccaactatggactcttctctctcttctttcagatgttcagttattgtacatcctctacttctacctcagatagagcttgaatagtcagaaattagcaagtatgttgccaaagaaatcataaaaacttccttctctttcaagctcatgkgctcaattgttatttctttcctcactattcaaggaagagaagtgct

SEQ ID NO: 142858 - DNA, 592 bp, Homo sapiens
ctgctataccttggcaagtggaacacggaactatcagagacaaaacaaatttcctgttgcaaaaatgtgcactcccacatggaaaggttctctcctgcctcctttcttttgctcccattctgttccctattcccttttcctattccttaccccttctcccttccctcggttaatcttaacttttgggttcagcttaaaggggacttccataggaagacttttcctgatcctcagtaagattccagttaaaagcacctgtagtgctctgcacttctccttcaaacaatgcattatggttagaattagttattcagtatttttccacgctttatgtttcaggaaacrtatttgtgttttcaccaccacaatcctaatgcctggcaaatacctggtacgtggaaggggcttaacaagcttcgttgctaaaaatgaataaataaggagcaagagtttgaaacaggacaggggcgaaaggaggaaacattcagatcctgtgacccctcccttcagagaatattagtgtctctctgtaatactgcaacaacaaatctatagtaactactgcacactatgccctctatagtaaaacata

SEQ ID NO: 142859 - DNA, 597 bp, Homo sapiens
ctgttcttttttatcaattaggaaatatcttcctaatcacatagggatctctgggctgaagacctacagatgtgggtttcttccaatgggcttcaaggagggatcttggacttctgagtataaaatcatgctattccatagtgtctagttattgacatcaataggacatacagggttgactgggtctttaatgcaggactatgtgccttattgagtgtctaggataagaatgatgtacttacaataagcatacttattagaaggttaaattgtaggtcaagaatgaatagctgaagagttaggttcagaaaaatgaggacaaaatagcaacagggttctttgtagcaaaataatactaataacrctaataataatagtctgtctcttcaggcaactgtgacaggggttaggtcaatattaatttttcattcctgttccctcaatgcttagcggagcaggccagagacaaaacataagccaatgcaacacaaagcaaaatgttttctgtatttaatcatgtttctagacagtctactgtcactttatttctgatagtctgaccaactttaatagactgagcaggaaaaaataaattgc

SEQ ID NO: 142860 - DNA, 592 bp, Homo sapiens
agagcctatatttacctcaatacctccgtactttccatctcagctttatgttcccatgtgagtattagctaatgttgatgagatatgctatatattgggtaaagagctacacagaagtwgctgcatttaatagtattaaatgatactgggacacttgctctgccccagtttatgactaaaaatataggagcttagtgagagcaaataatttgccccaaatttcctggttagtgagtgtcaagaatggtgaacggtctgagattgtaccttatctgcaagctgacaagttaacgtgacaccctttcatggacatacataaaagacatcagactcctaggtcagacctgaaggacaacttattattcacagcaatatcaatagccagaatatcatttgcatcagtttcccaagtcctgattcccactgggctatataaatagagccaggtgacacctgcgcattcaatgggttattatgggagagaaaccctgagtgcagagaacaaaaatattttttaatggaaagtgagcatgtcttccttttgctctgaagagagacatattatagtggacagtaagtatgtatgacattt

SEQ ID NO: 142861 - DNA, 311 bp, Homo sapiens
attttgttgcagagttcagaactgtcattgcttcttggtattcttctttttcctaaccttagtttactgcacctgccaactgcctgagaggaatagcctctgttgtctatggtcagaataagtgatacatatgtgcgtttaatttctccttaatcacctttactgatgggkaccacatgacctttaaagtcttatgagccattaagtagctctcatgcctagaaagtgtttttttgttgttgttacatgcacacagagatacacacaccacacacattgaaatattttctcatcagcatctactcatgata

SEQ ID NO: 142862 - DNA, 439 bp, Homo sapiens
ttgctgtgagtctttggaaaagcattgtccccctctgrgtcttggtattgttctctttaggtgaaatgatttacatggttctttccagttctgctaattatattcatgaacttatgcatatagggagagtttcactgcagtgaggtattctgagggtaactgggggcccctgaagaaaaaaggccagggaaatgagatgaagtggagttgaacatttcccaaagcttgatctgataacgaattcacatctgtgtcattctggctccctaacttctgggattagagtgaagttaactaaacaggggaagaagtagaagttgcagcataccattaattcctgaatgggtgtgggttgaatgtgtgtgcatgggcggtgggggagggcagtaaattctaaagaacatagaaaatatgggagagggcctagttcagtatccct

SEQ ID NO: 142863 - DNA, 636 bp, Homo sapiens
ttgcattatcttattttgtctatgctaaagtattttaaagcaaagtacagctgtcataacaaatgagactatcccaggagactgtcaggtgtatgtcagtctcagacatatccagaagaaaaaatgtagagatgatatatccaggaattcttccatcttctgacatataaaattatttcttatctccttcctyacacctgggcctatcctgctgaggtataacagataatcattacttatttggtatttggaccccaaattgccaggcatccacttcccctgttcttcctttctttcatttcctcccaggagccataagttgaagaaagtatttcccattacagagtgtgaacaacttgtgccctcaaacttaataagctcccatttactcagatgtgtggctactggtccctgtcttttgtccctaatttcaacctttctcctaaggaagtgaatacccaaaaagatttactaatttatcaagtgctttggctacattatttgtgaatagtctcctcccatggcagtgacttggacactagggaggatctggctggttcatgtgtcagttgtatttatttttatttattacatacatattcagaaagaaaattatttacctgtgcatttccatgg

SEQ ID NO: 142864 - DNA, 335 bp, Homo sapiens
tggagaggtatgcaggaaagctgttattacaggcattttatcatctagaaaaccaagatccaagaagagaagttgttgtgttgaaattacacagttaacatcttcttgagccagatgggagcccagrccaccagatccaatgctcttctcctctaggagaccagcctccccactatgtggttaggagacccctcaattgattatgcctgtacctctccatgaaggcctttgagatcatgatgtcataggatcaccatggaccttgttgcaattttgtattctacacttggtttttcaattaagtttaagggctttttaaaaacacaacttgaagc

SEQ ID NO: 142865 - DNA, 434 bp, Homo sapiens
ccatttttaaattggattatttgtttttttgctgttgagatgtttgagcttcttgtatattctggatattaacacaaatactttctcccattttgtagattgtcttttcactctgtggattgtttcctttgcagtgcagaagatttttagcttgatatawtcccatttgtttatttttgcttttgttccctgtgctttcgagctcttattcataaagccttttttcagaccaatgtccggaagcatttcccctgttttgtcttctagaagttttatagtttcaggtcatacatttaggtctttgatccattttgacctggtttttgtatagggtgagaggtgggagtctggtttcattctcctgcatatggataaccagttaccacctaattttgacattttcaaatccactaaatgtttcattttatggtttt

SEQ ID NO: 142866 - DNA, 610 bp, Homo sapiens
tactaatttatcaagtgctttggctacattatttgtgaatagtctcctcccatggcagtgacttggacactagggaggatctggctggttcatgtgtcagttgtatttatttttatttattacatacatattcagaaagaaaattatttacctgtgcatttccatggtttctattgccatggcagccaagatattgtattgcaaagacaagaaacagagagacagagttattagtaacgggattgagggggatgtttgmaagcccctggagcaatacttcagatacccagggcttttggggggtagagctcacctgtgggggtggttgattggctgttgttcagctcatcttagagaagtaaaacaaggagatcagataaaatgttggaaaggtaattatgttctacaggagttcagctctcatctttctgggttggtgccctttaaaaaattgatggttctttacgtgcttaattaaagtttggaatggctgctcacctccataaatcatttctcctacccaaggaagcagtgttggctgtggcagtgaggagtaaccagggctacactgaattccctggggctaaaaactgaatgctatttattggag

SEQ ID NO: 142867 - DNA, 542 bp, Homo sapiens
ccattctgtaggtcaacagtctgggataccttgacgggtttctctgttccaggtctcccaaggctgaaatcaagttttggtctgctggactcttattgcaaggctctgggaagaatttgctttcagattcactcaggttgttggcagaatctggttccctgaagttgcagaaccgaggacctcattttgttttaaccggggaccaacctcagcwcctaaaggcctctcttcagtccttgatgtgggcctatatctcagagccagcactgggcgcactgagtccctctcatgcttggaatctgacttcttcttttgctgcatctctctgtttccagccggagaaattgtctgcttttaagggctcccagattagactggcctcacccttataatccaaaacaatcttcctattttaaagtctgtaaccttaatgacatctgcaaaaccactcttgccaaattcacattttctagggattagggtgtggacaactttggtaggctgttgttctatctactgtagcccttaagagcacaagccat

SEQ ID NO: 142868 - DNA, 489 bp, Homo sapiens
gaagaaagaatgttgattttaaattcaaagttcaatattgcaattccatctacaattaggaacagtattcatctgcttggaacagaaactcaaattaacagtggtttacagaaattatggaattatttttgcattcacctaaaagaacactagaggtgggcagccccaggctgcatgaaccacctggatgatagtggtacatgataccttcagtgtctcaggsttacactattactgtggtttgcaatcctcataactacttccatcctcaaggccatccatggtcacaggacggctactgctatatagccttcaggtccacgtacaaggaagcagaaggagcaggtgaagcagagagagcaaagagcctttctggaagttacatcaacaaattccactctccctcccactgaccacctctttctgcagaggagtctgggaaacgtggttttaaaagctacactcactgtcattctcaacagcacagag

SEQ ID NO: 142869 - DNA, 569 bp, Homo sapiens
ggctcttcctcatccccacaaagtccgaggagaactagtgctttaaatgtaatttaaccaaatgagcactaaaaaggcaaatgagaaataactctatcttcttaggtaatcatggtaccttcttttcaacaataaactgaggtgacttttttttttatcatgtcctacactcttatcttcaactcactgtgcccttaaagagtctttccatatttctggcccagagytgcccctcccaagtggggagaaggttcttaccttcttgacctgaaacaaaatcattacagaatggggaaaactatagatctaaaaaaaaaaagtataaggagtgatttcttaccaaataacagagaaatcagccagctccagcagcaccccaagttggacacagagcacagcgtcaaagagatgtggctacaaatcaaccagaactgctacctgctgaacacctaatttttgccaaatgtttaattgtacatcctggactatgtcctccatcagtgaacagaaaaccggagatgttattggtgagaccagaatttcactgtttgataaaggaactcagtttc

SEQ ID NO: 142870 - DNA, 521 bp, Homo sapiens
acatatatcggggaaaccagcccccaaaaragccctgtaggtcctttctattttccctaagtgtcagttggtctgagaaataaagagaaagagtacaaagagagaaattttgcagctgtgtctccaggggtgacaccacatattggtaggaccatgatgacaaccctgagccacaaaaccagcaagtttttattagggattttaaaaggggagggggtgcatgaacagggagaaggtcacaaggatcacatgcttcaaagggcaataaagatcacaaggagaaggcaaaattagaattactgatgagcgtctatgtcctgctgtgcatgcattgtcttgataaacatcttaacaggaaacagggttcgagagcagagaactggtctgactagaatttaccaggctggaatttcccaatcctagtaagtgtgagcgtactgcaggagaccagggcgtatttcagtccttatctcaaccgcataagacagacactcccagagcagcagtctatagacctaccc

SEQ ID NO: 142871 - DNA, 520 bp, Homo sapiens
agtctctgataaaacagattttaaaccaacaaagatcaaaagagacaaagaaggccatctcactggaaattttatagaaatggcattaaatttaaatatcaatttgggaaaattgacatctttaagtcttccaatccataagtatgttctttctgttcacttatttagattatctttgatttatctaattatcattgtatagtttttggcatacaatcttatatatgttttgttagcttgacatctaaatatttattgtatacttatwtatggggtcgcagtaatttgcccatgtgggtctcaaactcctgggttcaagggatcttcccactatagcttccaaagtagctgggattgcagatgcatgccagcatgcctggattttaattttttgtgtgattataaatggcattgtcttttacattgtgctttccaagtatcaataaatttttaaaaatctatattgcatcaggctcactctcagaacacagtacaacagtgttcttggtcagtacaaaga

SEQ ID NO: 142872 - DNA, 520 bp, Homo sapiens
agtctctgataaaacagattttaaaccaacaaagatcaaaagagacaaagaaggccatctcactggaaattttatagaaatggcattaaatttaaatatcaatttgggaaaattgacatctttaagtcttccaatccataagtatgttctttctgttcacttatttagattatctttgatttatctaattatcattgtatagtttttggcatacaatcttatatatgttttgttagcttgacatctaaatatttattgtatacttatatatggggtckcagtaatttgcccatgtgggtctcaaactcctgggttcaagggatcttcccactatagcttccaaagtagctgggattgcagatgcatgccagcatgcctggattttaattttttgtgtgattataaatggcattgtcttttacattgtgctttccaagtatcaataaatttttaaaaatctatattgcatcaggctcactctcagaacacagtacaacagtgttcttggtcagtacaaaga

SEQ ID NO: 142873 - DNA, 553 bp, Homo sapiens
tctaccaagcaaatggaaaacaaaaaaaagcaggtgttgcaatcctagtctctgataaaacagattttaaaccaacaaagatcaaaagagacaaagaaggccatctcactggaaattttatagaaatggcattaaatttaaatatcaatttgggaaaattgacatctttaagtcttccaatccataagtatgttctttctgttcacttatttagattatctttgatttatctaattatcattgtatagtttttggcatacaatcttatatatgttttgttagcttgacatctaaatatttattgtatacttatatatggggtcgcagtaatttgcccatgtgggtctcaaactcctgggttcaagggatcttcccactatagcttccaaagtarctgggattgcagatgcatgccagcatgcctggattttaattttttgtgtgattataaatggcattgtcttttacattgtgctttccaagtatcaataaatttttaaaaatctatattgcatcaggctcactctcagaacacagtacaacagtgttcttg

SEQ ID NO: 142874 - DNA, 553 bp, Homo sapiens
tctaccaagcaaatggaaaacaaaaaaaagcaggtgttgcaatcctagtctctgataaaacagattttaaaccaacaaagatcaaaagagacaaagaaggccatctcactggaaattttatagaaatggcattaaatttaaatatcaatttgggaaaattgacatctttaagtcttccaatccataagtatgttctttctgttcacttatttagattatctttgatttatctaattatcattgtatagtttttggcatacaatcttatatatgttttgttagcttgacatctaaatatttattgtatacttatatatggggtcgcagtaatttgcccatgtgggtctcaaactcctgggttcaagggatcttcccactatagcttccaaagtagctgggaytgcagatgcatgccagcatgcctggattttaattttttgtgtgattataaatggcattgtcttttacattgtgctttccaagtatcaataaatttttaaaaatctatattgcatcaggctcactctcagaacacagtacaacagtgttcttg

SEQ ID NO: 142875 - DNA, 605 bp, Homo sapiens
gtcagcctcccaaagtgctgggattacaggtgtgaacttcacattcttcgtagcatgtacttttgaactatttagcgtacattttttttttggcctgtttctggaatcgaagcactatcttccaaattctgtagtattggtgacttgtccatgtttcttttagtctaatcagtcaataaaaagaggaatgtcaattgtgtatataaccataaagagtttattttattatagtaaaatgtatatarcatgaaatttgcaattttgaccatttttgtaaagagttaactttaattaacccatttatcttccacaaccacatttttctttctttccagcgcttccagaatgtcattttccaaagtgacagaataaagatttgattttaattttgattttagtttttctgatttcagtaaaagtaactgattatgggagttaaaagtagaccatcaaaaagtcaggcctgagtaagcaaaaggccagcttcagaatcaataaacaaatatatttccagcactactgcatattaggtaatgtgctaaaaatgtaaaatatatctgcacataaggcatcttgaacaaatatttatccaggtggagaattat

SEQ ID NO: 142876 - DNA, 574 bp, Homo sapiens
gacataagtcaatgtacagactccaaagtttttcacaaaaacactttctattttttgatccaagatagcacttctatgcaatagctcaaaattgccaccaagtggacggacaaacactattctggttgtagttgtagagtaaacagctgcttctgatttgaagagtgttgaactaatcacatcaaccagtgtttactaaatattaatacctactaagcacagggtgctcctctatgcrccacagatgaaaggcattctgatcagagtgagaaggctaaagccctgtcacgggcaccgcatcttgcgtgctaatgttctctggacttcaataggtaaattattccatttatctctttagaggaggaaaaataacctattaaggctactgtgagtgagcaaaacagcaacatccagtctgggaagggcattcatatcgctaataattgttgaatgatatgaataagctccagaaggtataaaattggagtcactcctaaaatcactgatagtgttcaagagactaataaattagaggttatgtggaccccaccttacaatctttcatggagacact

SEQ ID NO: 142877 - DNA, 574 bp, Homo sapiens
gacataagtcaatgtacagactccaaagtttttcacaaaaacactttctattttttgatccaagatagcacttctatgcaatagctcaaaattgccaccaagtggacggacaaacactattctggttgtagttgtagagtaaacagctgcttctgatttgaagagtgttgaactaatcacatcaaccagtgtttactaaatattaatacctactaagcacagggtgctcctctatgcaccacagatgaaaggcattctgatcagagtgagaaggctaaagccctgtcacgggcaccgcatcttgcgtgctaatgttctctggacttcaataggtaaattattccatttatctctttagaggaggaaaaataacctattaaggctactgtgagtgagcaaaacagcaacatccagtctgggaagggcattcatatcgctaataattgttgaatgatatgaataagctccagaaggtataaaattggagtcactcctaaaatcactgatagtgttcargagactaataaattagaggttatgtggaccccaccttacaatctttcatggagacact

SEQ ID NO: 142878 - DNA, 546 bp, Homo sapiens
aattaaagaaatctcatttccctaaattaaacataatgaaatgtttttcaagatcaaataaaactagaaaatgctatcagcctgatagaatttgcctctgaaagtggtgttctggagtttacagagaagcctcagttgccagcaaaagtcaatggtttatagggttacgggcaatatggaagccatttccactgtatcatatcaacttttattggctgataactgatctgaaagccagtatatggtacagcttcacattgcagtgcttatgcaaatgaagcagacactctaaaattcttcctttagtgcctttaaagagtttgttatttaattaaacgttgtcagcatatcttcagttcaacttayacatttcacactcttaatgttcaatttttacattacttttgcttttcttaaagtgaaatggcatttgggcatcagagtgaccatcttacccaggtctctcttaagcagggaagtgcttcaatttgctgtcttagtatgggctactataacaaaaatcctacagactgggtgacttaaaga

SEQ ID NO: 142879 - DNA, 583 bp, Homo sapiens
aaataacaacaataatattttttgaaaaaagattctactttggcattccctcttccaagaatagtccttctgctgtacctccactacactacattttattgtgctttcttggctatttctgcatcccagaccataagcttcttgggggccatatcttatttctgcttgtggggtcagtgccttcctctcctagggactcaatatgtgttggttgaatggttctgagcagtgggtgcagacagcatgtcacagggttgctgraagaattaaatgagtgcagtgttatttgtcatgtggtctgggttatgctgtgtgacagtcacaaattctcagtggcttaaaagcacaagattgtttttcctcactcacactatctatccggggaggggggtctgctcattatagtgactcggggattgcagatgacgcaggctcctccaatcttcatgcgaggcttccctggcaggggaagagaatatggagaactgcacgctggctcttcgtgcttccacctgaaagcagcacatgttctttctctcatatttcattgtcaaagcaagtcctgcagccacacctcaagagg

SEQ ID NO: 142880 - DNA, 613 bp, Homo sapiens
agtgagttatctcaacttatccaactccttgttctactctttacccccttctcactactgcacctgactagtctaaaataaaataaaataataaagatcacaggttttgaaataattgaatgcatgtgtacttgattcaatgaaatgtcttgtaagatggacaacatgggatctgtccaataaaaacccataacaaaaataggcaatgctcatggggtctgcttcttttctttctgaatactgtattccccatctctatcccatgtgggcagcccccaaaaggcaacatatcttcttctctttcagaaacttcagcatcttcatgaagcatgaatgctgaagcayatacaacttcaactatcacctccatgtgaatgactgaaaactgggtttctgctttatctttcctaatttccagtacatattcaataatctggtggccactttcacccagacatgctgctgtcatctcaactcagcttgttctaaagacttcaactactgctgtcctccgccatcccatccccaccttcagagcaatcaagctttcttcatgatatctttcacctcttccatctcttctttttaactgccaatgtgcctgctacaatgc

SEQ ID NO: 142881 - DNA, 390 bp, Homo sapiens
aatccctcttctgagcatacacccaaaggaaatgaaatcattactwtgtaaagttacctgtattctcatgttcattgcagtcctaaccataatagccaagatatggaaacaatctaagtgtccatcaatggataaatggataaagagactgtggcacacacacacaatggaatattattcagccctaaaacaaacaaggtcttgccatttgctgcaagatggatgaggctggaggacgtcatgctaagtgaaataaagcatacacagaaaaacaaatattgcataaacccatttatatgtgggatgtaaaaatgtaaataaataaatctacagagatagagagcaaaacattgtttaccaggggaggtgggagaggggaggaattgggga

SEQ ID NO: 142882 - DNA, 390 bp, Homo sapiens
aatccctcttctgagcatacacccaaaggaaatgaaatcattactatgtaaagwtacctgtattctcatgttcattgcagtcctaaccataatagccaagatatggaaacaatctaagtgtccatcaatggataaatggataaagagactgtggcacacacacacaatggaatattattcagccctaaaacaaacaaggtcttgccatttgctgcaagatggatgaggctggaggacgtcatgctaagtgaaataaagcatacacagaaaaacaaatattgcataaacccatttatatgtgggatgtaaaaatgtaaataaataaatctacagagatagagagcaaaacattgtttaccaggggaggtgggagaggggaggaattgggga

SEQ ID NO: 142883 - DNA, 390 bp, Homo sapiens
aatccctcttctgagcatacacccaaaggaaatgaaatcattactatgtaaagttacctgtattctcatgttcattgcagycctaaccataatagccaagatatggaaacaatctaagtgtccatcaatggataaatggataaagagactgtggcacacacacacaatggaatattattcagccctaaaacaaacaaggtcttgccatttgctgcaagatggatgaggctggaggacgtcatgctaagtgaaataaagcatacacagaaaaacaaatattgcataaacccatttatatgtgggatgtaaaaatgtaaataaataaatctacagagatagagagcaaaacattgtttaccaggggaggtgggagaggggaggaattgggga

SEQ ID NO: 142884 - DNA, 390 bp, Homo sapiens
aatccctcttctgagcatacacccaaaggaaatgaaatcattactatgtaaagttacctgtattctcatgttcattgcagtcctaaccayaatagccaagatatggaaacaatctaagtgtccatcaatggataaatggataaagagactgtggcacacacacacaatggaatattattcagccctaaaacaaacaaggtcttgccatttgctgcaagatggatgaggctggaggacgtcatgctaagtgaaataaagcatacacagaaaaacaaatattgcataaacccatttatatgtgggatgtaaaaatgtaaataaataaatctacagagatagagagcaaaacattgtttaccaggggaggtgggagaggggaggaattgggga

SEQ ID NO: 142885 - DNA, 363 bp, Homo sapiens
taacccacctcctttgaagatatggaacatttatcatccasaaagttctcctgtgctttcatcctgtccggcactcccccagcagctgatgaacatgctgaggacatttgtacaggattctggcctccccaaaagagctgctttgacaagcctgcttgccttacccagcactaaatcccttcctgttctctcaaaatttccatctttaaactgcttgtacctataaccctcccacatcaaatccatagataaaccagcccacagcctaatatttactgtatacccaagctttcagaaatacgactcccaggagtggggactggtggctgcatcccctcctcctcctggaagcctctaccagcc

SEQ ID NO: 142886 - DNA, 507 bp, Homo sapiens
gaattcttcttttttgacaatgctctaaaaaagataaaaattatccttaactagtgaaccacacaaaagtaggccacaagccwgcactggcccaccatccatagttcaccagctgtgtagttcaccattgacttgcattgtgaatttagaacatgaaaagtcaacaagaaacataggtagggacaataaaaggtgagaggtcagatcaaaagcactctccacactcaaactggtatacttccaaatagatgattctcagtggatgaatttttaaaacagaaaactgccctacagaagaaaacatgcctgtctggaccttggctctaaagaaaaaagaaaaaaaaaaaagaagtattatctgagattcctgatcaaaagcctgaacttgggactagaaaccacactatttgtgtgacacaaagtcctaagataaattactactataattaaaagattataaaagaaaagaaaaaacctcttaagtttgaggaggtgccaggtatataa

SEQ ID NO: 142887 - DNA, 507 bp, Homo sapiens
gaattcttcttttttgacaatgctctaaaaaagataaaaattatccttaactagtgaaccacacaaaagtaggccacaagcctgcactggcccaccatccatagttcaccagctgtgtagttcaccattgacttgcattgtgaatttagaacatgaaaagtcaacaagaaacataggtagggacaataaaaggtgagaggtcagatcaaaagcactctccacactcaaactggtatacttccaaatagatgattctcagtggatgaatttttaaaacagaaaackgccctacagaagaaaacatgcctgtctggaccttggctctaaagaaaaaagaaaaaaaaaaaagaagtattatctgagattcctgatcaaaagcctgaacttgggactagaaaccacactatttgtgtgacacaaagtcctaagataaattactactataattaaaagattataaaagaaaagaaaaaacctcttaagtttgaggaggtgccaggtatataa

SEQ ID NO: 142888 - DNA, 507 bp, Homo sapiens
gaattcttcttttttgacaatgctctaaaaaagataaaaattatccttaactagtgaaccacacaaaagtaggccacaagcctgcactggcccaccatccatagttcaccagctgtgtagttcaccattgacttgcattgtgaatttagaacatgaaaagtcaacaagaaacataggtagggacaataaaaggtgagaggtcagatcaaaagcactctccacactcaaactggtatacttccaaatagatgattctcagtggatgaatttttaaaacagaaaactgccctacagaagaaaacatgcctgtctggaccttggctctaaagaaaaaagaaaaaaaaaaaagaagtattatctgagattcctgatcaaaagcctgaayttgggactagaaaccacactatttgtgtgacacaaagtcctaagataaattactactataattaaaagattataaaagaaaagaaaaaacctcttaagtttgaggaggtgccaggtatataa

SEQ ID NO: 142889 - DNA, 507 bp, Homo sapiens
gaattcttcttttttgacaatgctctaaaaaagataaaaattatccttaactagtgaaccacacaaaagtaggccacaagcctgcactggcccaccatccatagttcaccagctgtgtagttcaccattgacttgcattgtgaatttagaacatgaaaagtcaacaagaaacataggtagggacaataaaaggtgagaggtcagatcaaaagcactctccacactcaaactggtatacttccaaatagatgattctcagtggatgaatttttaaaacagaaaactgccctacagaagaaaacatgcctgtctggaccttggctctaaagaaaaaagaaaaaaaaaaaagaagtattatctgagattcctgatcaaaagcctgaacttgggactagaaaccacactatttgtgtgacacaaagtcctaagataaattactactataattaaaagattataaaagaaaagaaaaarcctcttaagtttgaggaggtgccaggtatataa

SEQ ID NO: 142890 - DNA, 528 bp, Homo sapiens
aatatagactgaggtacagtgtctccagacacatcttcaattgctgctggaagattaagggaagctagcaccctgaaaaaatgagatactatgttatattgaagtctaaaacaatttaactcatcaatatttaytttatttaatttaatcttctataaccaaatcaacagcaatggagttagcacccagaaaaactggataagccctatcaatgaaaaacaaagcaaagattaacagaaaaacaaaaaaatcagtgattgatacaattaaaccaaaatcattaaaaaattaagttcacaattcagaattaaaagccaaaaaataggctggtgcagtggctcacacctgtaatcccagcacttgggaggccaaggcgggaggatcacctgaggtcaggaattcgagaccagcctggccaacatggtgaaaccccatctctactaaaaatacaaaaattagtcaggcgtagtggtgagcacctataatcccagctacttgggaggctgaggcacaagaatcacctgaagc

SEQ ID NO: 142891 - DNA, 539 bp, Homo sapiens
gtctccagacacatcttcaattgctgctggaagattaagggaagctagcaccctgaaaaaatgagatactatgttatattgaagtctaaaacaatttaactcatcaatatttattttatttaatttaatcttctataaccaaatcaacagcaatggagttagcacccagaaaaactggataagccctatcaatgaaaaacaaagcaaagattaacagaaaaacaaaaaaatcagtgattgatacaattaaaccaaaatcattaaaaaattaagttcacaattcagaattaaaagccaaaaaataggctggtgcagtggctcacacctgtaatcccagcacttgggaggccaaggcrggaggatcacctgaggtcaggaattcgagaccagcctggccaacatggtgaaaccccatctctactaaaaatacaaaaattagtcaggcgtagtggtgagcacctataatcccagctacttgggaggctgaggcacaagaatcacctgaagccaggagacgaaggttgcagtgagccgagatc

SEQ ID NO: 142892 - DNA, 539 bp, Homo sapiens
gtctccagacacatcttcaattgctgctggaagattaagggaagctagcaccctgaaaaaatgagatactatgttatattgaagtctaaaacaatttaactcatcaatatttattttatttaatttaatcttctataaccaaatcaacagcaatggagttagcacccagaaaaactggataagccctatcaatgaaaaacaaagcaaagattaacagaaaaacaaaaaaatcagtgattgatacaattaaaccaaaatcattaaaaaattaagttcacaattcagaattaaaagccaaaaaataggctggtgcagtggctcacacctgtaatcccagcacttgggaggccaaggcgggmggatcacctgaggtcaggaattcgagaccagcctggccaacatggtgaaaccccatctctactaaaaatacaaaaattagtcaggcgtagtggtgagcacctataatcccagctacttgggaggctgaggcacaagaatcacctgaagccaggagacgaaggttgcagtgagccgagatc

SEQ ID NO: 142893 - DNA, 528 bp, Homo sapiens
aatatagactgaggtacagtgtctccagacacatcttcaattgctgctggaagattaagggaagctagcaccctgaaaaaatgagatactatgttatattgaagtctaaaacaatttaactcatcaatatttattttatttaatttaatcttctataaccaaatcaacagcaatggagttagcacccagaaaaactggataagccctatcaatgaaaaacaaagcaaagattaacagaaaaacaaaaaaatcagtgattgatacaattaaaccaaaatcattaaaaaattaagttcacaattcagaattaaaagccaaaaaataggctggtgcagtggctcacacctgtaatcccagcacttgggaggccaaggcgggaggatcacctgaggtcaggaattcgagaccagcctggccaacayggtgaaaccccatctctactaaaaatacaaaaattagtcaggcgtagtggtgagcacctataatcccagctacttgggaggctgaggcacaagaatcacctgaagc

SEQ ID NO: 142894 - DNA, 528 bp, Homo sapiens
aatatagactgaggtacagtgtctccagacacatcttcaattgctgctggaagattaagggaagctagcaccctgaaaaaatgagatactatgttatattgaagtctaaaacaatttaactcatcaatatttattttatttaatttaatcttctataaccaaatcaacagcaatggagttagcacccagaaaaactggataagccctatcaatgaaaaacaaagcaaagattaacagaaaaacaaaaaaatcagtgattgatacaattaaaccaaaatcattaaaaaattaagttcacaattcagaattaaaagccaaaaaataggctggtgcagtggctcacacctgtaatcccagcacttgggaggccaaggcgggaggatcacctgaggtcaggaattcgagaccagcctggccaacatggtgaaaccccatctctactaaaaatacaaaaattagtcaggcgtagtrgtgagcacctataatcccagctacttgggaggctgaggcacaagaatcacctgaagc

SEQ ID NO: 142895 - DNA, 457 bp, Homo sapiens
tatacaacatatactctggtatcatagaaatataaactggtttttctaataagaacttgttgattcctttaaaaattcaatccattagtcaattcattattgaagaaggaaagaagaaagggaaggagggaggcraaggaagagaggaagaaggaaagaaaggaaattcttctaaagtattataatttcaccaatgtatcagcaatttctgtaacagttctttaaagggaagaacttttaagaaactcggtttatggggtttagaaacattaagttctaaactttctaactaaacctgcttagttaagttatacctagaatatcaattgaccttcctcctcttccttcccacatacctttttatctctttctctgtctctcctccttcccattctctcttcctttcactcttttcctctctgtctctctctctctcacacacacacgtaatgtgttt

SEQ ID NO: 142896 - DNA, 508 bp, Homo sapiens
atactggctgtactgcttcaggaaattctgggttcacttctccaggacctacttcccttccagctggataacttaaccatacttctccacacagcttctgtaatgcagcacttacatcattcaayacaggtctgggtggaagaatgactttctctacagtctccgaaatttccatttgagaagggtgtaccctagcctggggaacaagatgagcaccctggggaaaaagcatatcttggggagggctggccacatccccaaaagaaccctttctggaaagctgggaagttggatccaatggatgagaatcttctgcagccacctgaatcaaattctgtgtgcttagctggcactcaccactttcagctttcttgaggagagctgtatttccaaaagtttcatctctcactggaaaaggagctagtatttctctcttatcagctgaagtattgtgactctgttctatcccttttccaaaaaatctcccctcttccagcttagagttggt

SEQ ID NO: 142897 - DNA, 508 bp, Homo sapiens
atactggctgtactgcttcaggaaattctgggttcacttctccaggacctacttcccttccagctggataacttaaccatacttctccacacagcttctgtaatgcagcacttacatcattcaatacaggtctgggtggaagaatgactttctctacagtctccgaaatttccrtttgagaagggtgtaccctagcctggggaacaagatgagcaccctggggaaaaagcatatcttggggagggctggccacatccccaaaagaaccctttctggaaagctgggaagttggatccaatggatgagaatcttctgcagccacctgaatcaaattctgtgtgcttagctggcactcaccactttcagctttcttgaggagagctgtatttccaaaagtttcatctctcactggaaaaggagctagtatttctctcttatcagctgaagtattgtgactctgttctatcccttttccaaaaaatctcccctcttccagcttagagttggt

SEQ ID NO: 142898 - DNA, 570 bp, Homo sapiens
tttttgactgttcatttttagtttgttgtgaygagtgaccttctggcaacttggagctattaaacggattcttcctctgctggggacaaatattgtttattaaacttattttaaatgtcatgacagcaactcagtgttggcaaatgcctattatcttcaattttgatagttttatcccataaactccattatttggcatgtttgaaaaacagttgtcctgattaatctgcttagcacagagttaccatatatgccatttaaaaattatataaaatacatgcaaagccagagtcctacaaagttagctcagaatcagacacttaaatcaaaatcccacattttacaggtgaaaaaacttggccccggatatagcaaagaccagatcaaggtcaaaggaaacttgggtctctaatcaggtcagagtcccaccagtgattcttctaccataccagactctcagtgtgctagatcacaagtgtacaaaatacaactgtaattgacctttcctaaagattttggagacattttaggtatcttgaagtgcttcatagtcattattattatcatcaa

SEQ ID NO: 142899 - DNA, 570 bp, Homo sapiens
tttttgactgttcatttttagtttgttgtgacgagtgaccttctggcaacttggagctattaaacggattcttcctctgctggggacaaatattgtttattaaacttattttaaatgtcatgacagcaactcagtgttggcaaatgcctattatcttcaattttgatagttttatcccataaactccattatttggcatgtttgaaaaacagttgtcctgattaatctgcttagcacagagttaccatatatgccatttaaaaattatataaaatayatgcaaagccagagtcctacaaagttagctcagaatcagacacttaaatcaaaatcccacattttacaggtgaaaaaacttggccccggatatagcaaagaccagatcaaggtcaaaggaaacttgggtctctaatcaggtcagagtcccaccagtgattcttctaccataccagactctcagtgtgctagatcacaagtgtacaaaatacaactgtaattgacctttcctaaagattttggagacattttaggtatcttgaagtgcttcatagtcattattattatcatcaa

SEQ ID NO: 142900 - DNA, 605 bp, Homo sapiens
ccctctcactaaagggtaacaactatgccctcaaggaacagacacccatgagaagatccttaaatacctaaaaacaaatcattatggctcaaaaggtttatagcaatgtaggcccacaattggctgcatctcagcaaagatgtacaaatgtacattttgattggtcagataacaacatgtaggaaaaacaccaaaaaaccccaagactataatattgaagataatctatatccttaagaggcatttactgagtatctatcatgccaggtattctacataccttatcactaattcttgccatagcttttcaggtatatattattgttcctagctatagttaagaatatagactcagaaaggttaaatgtctygcccatagtcaaatggctaataaatcgcagattcggcaattgaattcacatctatctggttcttgtgcttgagcttcttccattgcactaggctgttacaatctgatcatagtttatcttttccctgaaatgacttattccttgatattcaaattgaagtacctcttcattctactctaaggagaaatccatgggagaaataaaaacggctcttgctggtactggaagaaatca

SEQ ID NO: 142901 - DNA, 463 bp, Homo sapiens
cctgctggccagcctcacacctccctctgtgcacatctgtcttcctgggaggatggtcctgcccttgagcttggggtgaggtccctggggtrttctgaacactggttgctattcagatgaagaacttggaatgctggggggttatgagagtggtatggaattattcagcaagtaggtggctgctgcgcttggatgagaagccatgtctgtggacccctaggaaagggccacagttgctgtcatgagccccctcccaaaagaccctgctggagagtcacaacacctggtgtggtgctctcaaggtctccctatccaggagcagggcctccccattgagcctctcacctctgcctgggtggagagcaggggtgcgtgtaccactcaatgctgtacacactgtgcagaggggtggggtcacccacacagacaggagccttattcctccagctgggctcagccatct

SEQ ID NO: 142902 - DNA, 431 bp, Homo sapiens
atgctgtaaaaaggaacaggacacaactggaggctgcggaaatggtagggagcatgccaacatctctcctgygaagggcaagcggagatactcacatccccagattaacatggtattaagtgctcaattcaagccaagatagactctaaggtccaaaggcaaatgaggtatccaagaaaggaagcagaggtcccacggggtgaggggtgggaacaggaagcaccactatattgcaccgtgtcaggtccgccatagtggaggtgtggagggccccaccttgtgaacgatttatgttttatcctagaatgcaaagtaggttccctcttgactgacaaagtacaatgctcttcctctgctggtaccactgatagcattcataatatgcttttacgaataatgcaatctggagacatctgaaggatacagctttt

SEQ ID NO: 142903 - DNA, 624 bp, Homo sapiens
tcactgttgtatctcaaaagcctagaataaaaagaatatctctgaaatgaatgagttgcttaaggacctatatacaagacattcaagaagaaagagagaaagctcacacttccargacctgaacaatatctgtgagttaaaatgtgaatgcacaaaagatctatgaaaaaaaaaaatagctgctgtaaatttaaggtagcaaattagaaggtgtcatcaactaagctcagcagaaaaagcaaatcctacagctacatcgaccaattatgagcctctaatcgctgccaggacctcaaacacattatcccagttaattctcacacaacacataacaactgcaggatgaggttctcacacccatttcacagatgagcaacctaagattagcctggaagctacaggagtgcacagaccctacctgttcccatcttgccatcataccaccagcatccagcgatatgctggcgggcagtaggtgtagaatatatagaagctgcataaaattaaaaaatatatatgctcagagaggttaacaaacttgaccaagaccacttatccagtaaatagcaaaatacaggatttgaactcagatcattttatttaaaaaccaatgctcttcccacc

SEQ ID NO: 142904 - DNA, 624 bp, Homo sapiens
tcactgttgtatctcaaaagcctagaataaaaagaatatctctgaaatgaatgagttgcttaaggacctatatacaagacattcaagaagaaagagagaaagctcacacttccaagacctgaacaatatctgtgagttaaaatgtgaatgcasaaaagatctatgaaaaaaaaaaatagctgctgtaaatttaaggtagcaaattagaaggtgtcatcaactaagctcagcagaaaaagcaaatcctacagctacatcgaccaattatgagcctctaatcgctgccaggacctcaaacacattatcccagttaattctcacacaacacataacaactgcaggatgaggttctcacacccatttcacagatgagcaacctaagattagcctggaagctacaggagtgcacagaccctacctgttcccatcttgccatcataccaccagcatccagcgatatgctggcgggcagtaggtgtagaatatatagaagctgcataaaattaaaaaatatatatgctcagagaggttaacaaacttgaccaagaccacttatccagtaaatagcaaaatacaggatttgaactcagatcattttatttaaaaaccaatgctcttcccacc

SEQ ID NO: 142905 - DNA, 381 bp, Homo sapiens
gattgtatttatacaatgctgagggcattttggcacataataatctcatgtttgctcagaatcatgaactgtgtccactcttcccccacacaacattttttaatwaaaaaaaataaagcttgtttctatttgtttataacatttattttcttaccagaggtgattgattgcaaggacagaagtgcctatgcttggtgacattttcagcaccttgtaacaaagtggaaaagtagagggtttactttgaacctgttaatccacaaaagcgtggaacattcacctcttgaagacactcatttttcaagtcttggttttttaattgtgcttatgtataccagctccattggtaatcagggtgaaaatcaagttccttcttgtaat

SEQ ID NO: 142906 - DNA, 397 bp, Homo sapiens
tttagtgcaagtaggtgttcaataaacatttgatagttaagtgaataaatcaatgagttaatgggagagagctgaatttcactgaagatgatttactccttcatctgcaagataagggaaagagccttgccacagaaaatctgttggaaagcaagaatggtagrggccagccctcttggtttcccatcccgtgtcctcttctctctgttgtgttgtgttgttaccttgaaaaacataacgtgaaggtggtgtttggtcctcaacccagctgaggtctgctgcctctgaagatgtctctgctgatccagtttctggagcgcctcttgggttgtgcttttactctcttatgtcaggtgtcatactggagtttctgagcaatcaaatagaaatcctatat

SEQ ID NO: 142907 - DNA, 413 bp, Homo sapiens
gcaagtaggtgttcaataaacatttgatagttaagtgaataaatcaatgagttaatgggagagagctgaatttcactgaagatgatttactccttcatctgcaagataagggaaagagccttgccacagaaaatctgttggaaagcaagaatggtagaggccagccctcttggtttcccatcccgtgtcctcttctctctgttgtgttgtgttgttaccttgaaaaacataacgtgaaggtggtgtttggtcctcaacccagctgaggtctgctgcctctgaagatgtctctgctgatccagtttctggagcgcctcttgggttgtgcttttactctcttatgtcaggtgtcatactggagtttctgagcaatcaaatagaaatccyatatagggtaaggagtcaataacatt

SEQ ID NO: 142908 - DNA, 502 bp, Homo sapiens
tttctactaacctttgcagctccgctttctgtgctgcaaccctgggttttaaaatctcatgaaaaagcatctatcctccaattctaatttagcttgcttgctctctccatccatggtcattataaacagtaaccatattgtgtggtatgtcactttaggaaaaaaagcacacaaasaaatgttataattgtgaaaaagacagaagtctttcagttttgttagttataatatatgttatcactttatcaaattattctttatttaaccaccttttttcttctgctagagtgtcctagtctctttttatagctaccatgttaaaacttctattttctgtccccaccttacttgataattgcctttttgccttattaggatgcaaggacaaccacatttgcctctatttgtaaaatgtttttggcttatcttttagatcatttatatttaggcaaataaatgaaatcagcttctgtctttttaaatttttctacctgtagcttca

SEQ ID NO: 142909 - DNA, 566 bp, Homo sapiens
cctgtgggtatggatcaatgacagtgacccacactagggaaaatggctgaaaatccccaggaagacccctacatgaacactgtccctggagccagagaggcttcactgstgccagaatctcagaactttagctttggaaaacccaagtcatccagagagcttcctactcaagtagaaaatctctgctatagcaccccgggcagataagtatggaagaaattagggcttgtgtatgggttgagatgccctcttattggtgtggatagccaatacgcctatgactaaccatactgattagcgtaattttttctcccccttttctccccagcccacaaggtctttagcaaatatcttcctgctaaatacagtgagggataaggaggaggagggtgttcgtatattctcttacagctgcacccaacagaagtgaacctgagggtccaagttactacagaggaaaggctgctttctcctggtggggtctaaaagctctagagcagttcagagtgtgctttccttttgcttgcagcagatcattcagatattgagaaagaatcatgtgaatt

SEQ ID NO: 142910 - DNA, 438 bp, Homo sapiens
gaggaacttaggctattaaggaaagcagcccagaacatgaagtgcctttgtgtgccgtgctaaggaatgtggaagtggaacttttatcctaaggacaagggggacctgctgacaggttttaacaaggatgatggtataggaagctcattctggcccagcatggagaatggaccagaggagtgagggtctgtcgccattgaraaggcttttgcaggcagcaaaggtgatgctgggctaaactaagaaatggtggcaggtctggagaggatggaatagagatgccaagagcaagcaggattcggtaatcgattggatgtagacatgaggaagagggtagtatcgagaactgccaggtttctgccttgattcactgtatgaaatagaagagggccacagagaggtagtgggctttggaggaaaggaagaaaatgccatatt

SEQ ID NO: 142911 - DNA, 550 bp, Homo sapiens
aaggactgaagactagattcatgacagacaacataaatgatagaattttcagaagaaaaaaaacagaaataggagagacagtaattgaataaattatttaagaaaattcccctgacatgaagaaaaaactaaagtctgtgcagcaaaaggactttaagagttctaaactaaactgatgaataaagaaacaaatctaacattttatcctggtgaaattcctaaagtcaaaagttttttaaatatagacacctccacatagaaataaaagttgtctgcaaggtttgtggagaaagtatgtttggcatggtatttcttattagtaatagttgacrctaaaaagggggaaaggatttataactcgagaattatgtagcaacctgagatattatttactttaaaaaacacaaaaatttagaatatgtaccacacaaatactctgcatgaaaaaattacttgaaaaaagactcacaccaatcaaaagggaatttaagaaataagaggaggaaggaaggtggtgatctatttacctatccacctatccattcattcg

SEQ ID NO: 142912 - DNA, 418 bp, Homo sapiens
aagctcaaagtaactatgtgaaaaaaaaaaggaaaagaaatacaatatagtagttggaagaaatgaaaaccaccaatactttggatgccttgggttcacttccttttcatatatttgttttaaaatcaatctgagagtatggaaaagtgtgcaaaggcttgatttggtgttcagaagacaaaatctcagtgacatcagagactaccacacacttagagtgagaatgatgaaggggcaggagggaaaaattcggctgcaatcaaaatgaaccagccacggasgctgtacgtgtttctcagatttcaagtagttctaatcctgaggagtaagatgacgcctagactagttgtattggtaagttcagaatcactctacatttatcatccacacacctgtacttgcacaagaagagttcaaa

SEQ ID NO: 142913 - DNA, 408 bp, Homo sapiens
tatgatttgatgtccttttctttttwaaaaaaaaactagttctccaataattggtctatgtccaggttatttttgctagcttagtatagacttagtgagactccagaattggaattgaggtgagattagttgatttctcaattaaaaaaaaaaaaactctaagataagctcctgacaaataaaagaataacattactttcttttcacaaagattccagtaaaatctttgctttttggtaataatgacaacaaaagttctcaattaccattacaataactgcaagctttgtgttttcttttttccttctccaatcaggagcatttgatccctccaaacaggaaatgagtgaaaaactcaaatgacatttccactgtcatttctggtgctaatgcctgtttactttttat

SEQ ID NO: 142914 - DNA, 592 bp, Homo sapiens
tgcacagacattttcagaggtcccctctgtgtgtgcaaacctaggcaagccaggtgcctccctgtgaaacaggagaatgttgtgtagtcagagagtgacaggacctcctgagggatttgggggaggatggggatttgacagaaagaggccagaactggagagagacagaaccagtctacgttgcagctctgtcccccttagtagctatttgagtgtgaggaagttactgaacttctgtttcccacatgagaaatggtgataatagattcagccttgcagagtagtcgagtgggttttctaagcttatgttgtaatttctcttgggtacagagcacccagcaccgkgtagaatcttcataagtgttagctgttactgtggtacaacattacttaaaggaagttggaagagttaactccgcaaatctggggaccctaagaggctgtgtgatgcctcagcacttgagcccacgtggaaaggctgtggccagggccctgacctgctgtgtctgcagtggggttgtcccagccctcatgggcagctgaccttgagttctggccttattttcccccctctcagggcttggagaagatc

SEQ ID NO: 142915 - DNA, 580 bp, Homo sapiens
ccactatttatttactttatattttaatataattttggatagttaagccaaagcaataagataaagataagaaattaagcgtaaaatattgtaaagaaagtgacagatcattattacttgcagaaaatataactatttaccgagaaaatcccaaaagatcaaatgaaaaacttattaraaccagtaaaagtgatagtggcaaaatataatataaatatagaaaaattaatagctgccttatatgccaacctgtttctaaacataatggcaggggtgaatgggggtgagaggaatcccattcaaatcagtaattaagattataaacaagtcaagaataaacttaacaagatatgtgcaaaacttatataattttatttcacttaaagttaaaaggaaaaattaaataaataaaaatgttaaaaattaccaaaaacatactactggcaaaattcaaattcttcactaattagcagacaaatacaatcaaattgtaatgaaaagcccaatgggatagtttcaatggatgcagttgtaagaggcattttaaataacaaaggaaacaatacattattcaattatt

SEQ ID NO: 142916 - DNA, 435 bp, Homo sapiens
atgccagaacaaaagtgcaaatacaataacaacagtataccatagagtgaactgatcacaaaaatggcttcagctgcttcaccacctccacagtgctggatttcagcaagtaaattgtttttcatgacatctgtcccgtgttacacaattccaagggcacaattcaccctgccttctacgtgcatggcattccctacagccaatgacagttgtactacatctggtctagatatgtccttttaccaaggacatttattctttattctctgctaaatcataatgcttttaaagaggctgaaattgtcctctttgagagtgaatcatggcatgtgtacggctggcccatcccatagccttgtagccacccttctatgctggcatgagttccaggttctgtgttagctgaagtggccamagagttattagcaagatatt

SEQ ID NO: 142917 - DNA, 609 bp, Homo sapiens
tttgtagaccagcatttcaaatattctgtgaattctgattcattatttttccacactctgcaaacagtaccattcaacagcaaaacattatcacttgattaataaaagcttactcctgacagttcatttttgagaaataccaactcatagtcacttgtctctattcgtgatcctgcagcacactaacttytttgctctcagtatttggcaaaatcttactattgcagcaactgttccccgaaattctcctgttgttcgtcacagacctgacagcccacgttcctcctgctgctcttgctgacacccgttttaagcttggtgcaccataaataggatcctcagcccctgctggctgcctcattatcttcatccgatttctactcctttacacctatcaggttttctatagccagtcaagcatacccataattaatgagtagttttctactttctccttctgcatataatatacagtttcttcctaacaggtcaggtatgtggttttactttttaatttttcctttttagctagctcagaaatctgccatccaacgtcatcactcacaatgtgacaaggcttggaaaccttgggcagcacatgaaagggac

SEQ ID NO: 142918 - DNA, 495 bp, Homo sapiens
accttcctttactgaatggtgtgtttggggcccagttggtggatggatgctcccaggttctccagctggctcatggcagccagcttgagggctcccaggctgccgcggcttctaccaggagcccttctcacactgggggccagtgtccggggcacagcagcctccctttatgtccaggtttcttgttgactgaagactgtcacagggcatctcttggcagtattatgccttgctgaaataaacccgagataataaaataggtgtttataatttgtattgtatgtaatctcaccatagcattttcttcaacaaaagtgtcacaaagatccctatatgaagaagttattgccacattcattgcagtaataataataaaaaaggaaacatcactgttccacataatttatggagcatctatatagagtaatgccatgtagctgtaaaacagttcaggtggaattttcatmctggcatggaaagatgtacacaatataa

SEQ ID NO: 142919 - DNA, 447 bp, Homo sapiens
tctgtccgtccttccttcctctcctctcctccctcctctctctcttcctttctcccctcctttcttccctcccctcccctccyctccctttcttatggagacatggtctagctctgtcacccaggctgaagttcagtggcctggtcacagctcactgcagcctcaaactcccaggctcaaacaatcctcccacctcagccccacaagtagctgggaccacaggtgcacaccaccacgcccagctagtttttaaaatgctttgtagagatggggtcttgctctgtttcccaggctggtctcgaactcctggcctcaagcaatccttctgcctcagcctcccaaagtgctgggattacaggcaggatccaaggcacccagcctaaacagctttattgagataatttacatactgtaagttttacttgcattaagtataaaagttagtgg

SEQ ID NO: 142920 - DNA, 560 bp, Homo sapiens
ttttagaactcctccaatgtgtgttttattaatgtgatttgtaggagaagaggagttcgtccctggtgtgaaggtacaggcatagtggctgacactcttcctctcctgtggccatcatgccttgaactgttggtcaagatagtgttaatttatacttgttgggttttaaaccttaagcaggatttctgaartggtttcatctatttcttccatttacacgtgaggaaagtataggtccagggagactcagtgcctgtgtctgtgcccatgacggggagttgctccaatgttgcatcagtgggatgaggcacagcacatgggcctgcaggtgcagcctggagtggtggtgcctgtgtgcctagcctttcaccgagcatgcagcagtgatcacatgtgctcttcatctgcttcttgaaggttgcaaagatgccttcttgggcacgtttaaaaattaaaaatcacctttgaaatacaactcttagccccacatctgttgaaatacaatgtaatcttgctataccctgtgccgtaattcatacccttatcctaaaatgtgattg

SEQ ID NO: 142921 - DNA, 433 bp, Homo sapiens
cttcttatgttttgaaattcagccaagtaagcatggtggtattaagcacatgatttcaattttgaaggtcagtttaatatagataaaagacaacaggcacctaaaaccggatgccatttgacccagccaccctacttcactggggaggaagttttacacatgggtgtgtgctcagaaggggttatgctaatctttgtcatagtgttatttgtaatggtgaaaattttgacttaacctgggtttttaacacaagaataaattaagttatatattgtattagtctgttgtcacgctgctaatraagacatattcaagtctgggtaatttataaaggaaagagatttaatggactcacagttccacatggctggggagacctcacaatcatggcagaaggcaaaggagaagcaaaggcacatcttagtggcggcag

SEQ ID NO: 142922 - DNA, 434 bp, Homo sapiens
attcagccaagtaagcatggtggtattaagcacatgatttcaattttgaaggtcagtttaatatagataaaagacaacaggcacctaaaaccggatgccatttgacccagccaccctacttcactggggaggaagttttacacatgggtgtgtgctcagaaggggttatgctaatctttgtcatagtgttatttgtaatggtgaaaattttgacttaacctgggtttttaacacaagaataaattaagttatatattgtattagtctgttgtcacgctgctaatgaagacatattcaagtctgggtaatttataaaggaaagagatttaatggactcacagttccacatggctgkggagacctcacaatcatggcagaaggcaaaggagaagcaaaggcacatcttagtggcggcaggcaagagagtgtgtgca

SEQ ID NO: 142923 - DNA, 530 bp, Homo sapiens
acgtgtgctgctgaagctgccacctaaactcccgagagaagcgccgtttctcctccatggcttctcgccgacgccctcgctgcggccttccgggcccctcggttgataaaaggactaaatagtgacggacatttttaaggctacttaagaaatggcaaaaatacatttagaggtgtgaacccgaacacactgcgcgctttaagccccgcgagagccggggccgcccgcttcygtgcgcccgtagctcctttctcgggtccgggattcgccggtgccggggacagaaacctcctgccttcttagttcatgacccttgtagatgaacttccctgttttctgcactgcttagaccagaagacgggaaaccgtgactgccgcacccttccctgaagcaggcactgcccgtcgtccatcaaacgcgaggactgcgcccacctcgtaggaaggacgccgcggtcctgctaaaagcctccgcctctgcctgcccgagggcacccttcccctccccgcttccgagggcggactccatt

SEQ ID NO: 142924 - DNA, 537 bp, Homo sapiens
gtgacaaagtccacaaactgccacaaattctatttctagtgaagctgaaaaaatgcacactttttaaatagcctgcctgtccctgagtgccacaaaacgcaatttaaggtaaacacgtgggtgcctcagtgacaacatttgcaacattaacctcgcttttaaaattaatttttaaattgaggaataacatacatataaaatgtaccatctgcaccattttaaagcgtacagctcagtgacgagaaacacgtttagatttccctcctttatcgcccctcygcctccttcctctgggaaccgccattccactctctgcctccacgggagcctctggtttagcttccacacgagtgacagcgtgagatgttggtctttctgtgcctggcttattgcgcctaacataatgacccccagttccatctatgttgctgaaaatgacaggatttctttcttttcgatagctgaataatattccattgtgtatatttaccacattttctttatccattcatccactgataagcccttaggttgatt

SEQ ID NO: 142925 - DNA, 540 bp, Homo sapiens
cgtgacaaagtccacaaactgccacaaattctatttctagtgaagctgaaaaaatgcacactttttaaatagcctgcctgtccctgagtgccacaaaacgcaatttaaggtaaacacgtgggtgcctcagtgacaacatttgcaacattaacctcgcttttaaaattaatttttaaattgaggaataacatacatataaaatgtaccatctgcaccattttaaagcgtacagctcagtgacgagaaacacgtttagatttccctcctttatcgcccctctgcctccttcctctgggaaccgccattccactctctgcctccacgggagcctctggtttagcttccacacgagtgacagcgtgagatgttggtctttctgtgcctggcttattgcgcctaacataatgacccccagttccatctatgttgctgaaaatgacaggatttcwttcttttcgatagctgaataatattccattgtgtatatttaccacattttctttatccattcatccactgataagcccttaggttgattcc

SEQ ID NO: 142926 - DNA, 436 bp, Homo sapiens
aaaatattctgaattgtactaattttgtaagtagctaacatgaacacaacaaagttgcctgcattgtcttatggttcaaatctttccttaatttgcaaatgtttgcttctttttgctttcagttcacacttttcagcctgtcctctattcttctgtccagtgccctctcttgagagctgtacttccttgtcttttaaatgttagagccctttaaaattcgttactggactgtcatccttttggcattctgaacgcttaatgtcattaactactgtgattttggtagtgctttatgttgatagtttccaaatctttatctctatcttagatttttcctaaaatggggatatgtatacttagctacctctgtaatgtttccatgtagatgacckacaatcatctaaaatttttaaaaaatgaagttttttttcccctc

SEQ ID NO: 142927 - DNA, 364 bp, Homo sapiens
tttatactttcttccaggccttgaaaattgcctggaagcagtagccatttgtaaacagtcacaataattctgtttgtcactattcagtattagatagaactgggctggtagattaagtgctgaatccttgggttcattgttctctgtgtgtgtgtgtgtgtgtgtgtgtgtgtgtgtgagrgagagagagagagagagagagataaaagaaaagagaaaggaactgaaggagaatatgagtgataaataaatttaattccttgtttcttgaatcatttttgctccttggtgatcctatacatgtatctagtttttctcatccttattttgtccacatcttcctttaatttactcctctccttct

SEQ ID NO: 142928 - DNA, 364 bp, Homo sapiens
tttatactttcttccaggccttgaaaattgcctggaagcagtagccatttgtaaacagtcacaataattctgtttgtcactattcagtattagatagaactgggctggtagattaagtgctgaatccttgggttcattgttctctgtgtgtgtgtgtgtgtgtgtgtgtgtgtgtgtgagggagagagagagagagaragagataaaagaaaagagaaaggaactgaaggagaatatgagtgataaataaatttaattccttgtttcttgaatcatttttgctccttggtgatcctatacatgtatctagtttttctcatccttattttgtccacatcttcctttaatttactcctctccttct

SEQ ID NO: 142929 - DNA, 364 bp, Homo sapiens
tttatactttcttccaggccttgaaaattgcctggaagcagtagccatttgtaaacagtcacaataattctgtttgtcactattcagtattagatagaactgggctggtagattaagtgctgaatccttgggttcattgttctctgtgtgtgtgtgtgtgtgtgtgtgtgtgtgtgtgagggagagagagagagagagagagataaaagaaaagagaaaggaactgaaggagaatatgartgataaataaatttaattccttgtttcttgaatcatttttgctccttggtgatcctatacatgtatctagtttttctcatccttattttgtccacatcttcctttaatttactcctctccttct

SEQ ID NO: 142930 - DNA, 609 bp, Homo sapiens
aaaataaaaggttgatattctactaactgctaattagtacgcagctaatatcttcagaatctgagtaattcaattgaagtacttttaaaaatatgcattcaaatgaactggaactttttaaaactcagattcctcatagacaaaatatttcccttattctaagtatttcactcacatttgatatgacatctatttatcttattgtgattccctaattttttgtcacttcattaatttttaggtaaaatgattgctttacttgtttggaattttgccatgmatatcatagatgcattaggagaccttttcatttaaatcaaagctaggatcaggaactatgttagtagttaaaaatgttttaaatatgaatattttaccattcttcaaatcaatttttaaaaattataatattcaaattttattcacttattcagcaaatatatattttggtacgtgcagtacaccaggaactgtaatttcacaacataatatataaaatgagaattccataaaagtgaaagagaaatatgtaatagtaaatattttaaaaggatgcatttatttaaaaatatttaaactccacaaaaatgaaactcaaatattgaagac

SEQ ID NO: 142931 - DNA, 462 bp, Homo sapiens
attattattgtgattattatgaccattggtgtgaaagttactaatacagtggtccgctgtgtgcttcagatttaaaatgctgtacaggtagattaatgcaaaatataattgacaatattaaagcctcaaaacccactgaaaatgaaaagacaatagttaacataagaaaaaggttttcaccaaatattgcatgttctcrcttataagcggaagctaaatgatgagcacacatggacacgtggtggggaacaacacatcctgtggcctggcagagggcagggactgactggtagaagggagaagatcaggaagaatagctagtggatgctgggcttaatacctaggtaatgggatgatctgtgcaacaaaccaccatgacacacgtttacttatgtaacaaatctgcacatcctgcacatgtaaccctgaacttaaaataaaagttggaaaaaaacaatgaaa

SEQ ID NO: 142932 - DNA, 435 bp, Homo sapiens
ggcggaggttgcagtgaacaaagatcgtgccactgcactccagccttggcgacagagcgagactcagtctcaaaagagagaaaaaaagaatattcttctaagggcagagttcaatttcattcaaagttatttacattatccctratacatcgtcaataaaatcattgaatcttatagctggcaggaatcttagagataatttaagttcaatggcattcttttatttaagtaaataagtattaggaagactaggaactggtagctcaaagaaatttagtaatttatcagagttatacacataggctttctgattccctgtctagctctttctaccactttttttttctttttgttttcctagtcaattgccacagtagcaattccagaatatattttcctcagaaattcccaagtccaacaatactttacatttta

SEQ ID NO: 142933 - DNA, 434 bp, Homo sapiens
ggcggaggttgcagtgaacaaagatcgtgccactgcactccagccttggcgacagagcgagactcagtctcaaaagagagaaaaaaagaatattcttctaagggcagagttcaatttcattcaaagttatttacattatccctgatacatmgtcaataaaatcattgaatcttatagctggcaggaatcttagagataatttaagttcaatggcattcttttatttaagtaaataagtattaggaagactaggaactggtagctcaaagaaatttagtaatttatcagagttatacacataggctttctgattccctgtctagctctttctaccactttttttttctttttgttttcctagtcaattgccacagtagcaattccagaatatattttcctcagaaattcccaagtccaacaatactttacatttt

SEQ ID NO: 142934 - DNA, 436 bp, Homo sapiens
ggcggaggttgcagtgaacaaagatcgtgccactgcactccagccttggcgacagagcgagactcagtctcaaaagagagaaaaaaagaatattcttctaagggcagagttcaatttcattcaaagttatttacattatccctgatacatcgtcaataaaatcattgaatcttatagctggcaggaawcttagagataatttaagttcaatggcattcttttatttaagtaaataagtattaggaagactaggaactggtagctcaaagaaatttagtaatttatcagagttatacacataggctttctgattccctgtctagctctttctaccactttttttttctttttgttttcctagtcaattgccacagtagcaattccagaatatattttcctcagaaattcccaagtccaacaatactttacattttac

SEQ ID NO: 142935 - DNA, 434 bp, Homo sapiens
ggcggaggttgcagtgaacaaagatcgtgccactgcactccagccttggcgacagagcgagactcagtctcaaaagagagaaaaaaagaatattcttctaagggcagagttcaatttcattcaaagttatttacattatccctgatacatcgtcaataaaatcattgaatcttatagctggcaggaatcttagagataatttaagttcaatggcattcttttatttaagtaaataagtattakgaagactaggaactggtagctcaaagaaatttagtaatttatcagagttatacacataggctttctgattccctgtctagctctttctaccactttttttttctttttgttttcctagtcaattgccacagtagcaattccagaatatattttcctcagaaattcccaagtccaacaatactttacatttt

SEQ ID NO: 142936 - DNA, 435 bp, Homo sapiens
ggcggaggttgcagtgaacaaagatcgtgccactgcactccagccttggcgacagagcgagactcagtctcaaaagagagaaaaaaagaatattcttctaagggcagagttcaatttcattcaaagttatttacattatccctgatacatcgtcaataaaatcattgaatcttatagctggcaggaatcttagagataatttaagttcaatggcattcttttatttaagtaaataagtattaggaagactaggaactggtagctcaaagaaatttagtaatttatcagagttatacacataggctttctgattccctgtctagctstttctaccactttttttttctttttgttttcctagtcaattgccacagtagcaattccagaatatattttcctcagaaattcccaagtccaacaatactttacatttta

SEQ ID NO: 142937 - DNA, 358 bp, Homo sapiens
ggaattattttgccaaaatatttaacctgaatctaataaaaaggaaacaagcagacaaatccaaattgttggatattctaaaaagtaacaggcctcaaaacttcaaaaatatcagttgtgatgaaaggtaaaatttcracgtggggaaaaccattgtaggttaatggtaataaagggcatgccaataaatgcaatatatgcccctttttggatcctggatttaaaaaatccaggaggaaaatagctataaaggatactcttgagacaattggtaaagtggtattgttatatttcttgagataatagtattgtaaacatataggtgaaagtccttttttgttaagaaattcatgccaga

SEQ ID NO: 142938 - DNA, 284 bp, Homo sapiens
ctgcttcattgggttccccaaaatccttagtttaaaccaaaactcttttgcaaactctttgaaaatattctctttaaccctgagtttctagcctccttgtccgccaatcgcataagaactctttactaacccaaccatagccattttccaaacatattttttgatgttaacaatttttttttcccrgagctttcagattttgataagatggtagtaggagaagacaatatagaatatatcacgaggcagaaatctgatgggagtacagggtagctccaccatca

SEQ ID NO: 142939 - DNA, 284 bp, Homo sapiens
ctgcttcattgggttccccaaaatccttagtttaaaccaaaactcttttgcaaactctttgaaaatattctctttaaccctgagtttctagcctccttgtccgccaatcgcataagaactctttactaacccaaccatagccattttccaaacatattttttgatgttaacaatttttttttcccggagctttcagattttgataagatrgtagtaggagaagacaatatagaatatatcacgaggcagaaatctgatgggagtacagggtagctccaccatca

SEQ ID NO: 142940 - DNA, 465 bp, Homo sapiens
atttgttcctgatcttggaagaatggatgttctgtgcacttagatgtataactttctgatattcagtcttttgagaaagcatccttttatatcctagctcttggcttgaacaaacagaataaacacaggatagaaaagaacagagggatatatttatgatgcctgaacttatagttcaaaatcatactcacaaacataactgtacaaaggacatttttctctcaaaggataactttgtcctgtaatagaaatcctgtcttttgasactaaagtatagaatagtaccaactttcccaatgttagggctactacttagtaaattgatttttcttgcatattaaatagaattgcaatgtgttaggagaccttattcacttaaaagaatggtaagttttttcttacttatttgtttttattaaatagaattatattctaaaataatgatgtaaggtcaggaagattaag

SEQ ID NO: 142941 - DNA, 525 bp, Homo sapiens
ggctacacatgagtcttctaaatagaccctgagataagcctgggtctgcagaggctatcctggagttttggtccttagggtctggcctgatacgaggatttactggtgggggcatggaccctggggccactggagcctggaaccgtggggactggcctggagccagtggccagccagctgctggggatggcatggaacctgggtccatgagactgatctggtacatggtatggtgggtactggcctggtgcctggaaccaggacgattggcatggagcctagggccrtgaggaccagcctggagcctgtatctgtaatggctggcctagaagctaggtctgagaggctgtcggcctgagtcctggagctgcggggctgacctggaacctgattacacaggagaggtcatagagtctgtttcattggggaccaagataacacttgggttaattgggatgggcctggactgtgagttggctgaagcaggcctggaacccaagtcttctagagcatggagccacaggg

SEQ ID NO: 142942 - DNA, 525 bp, Homo sapiens
ggctacacatgagtcttctaaatagaccctgagataagcctgggtctgcagaggctatcctggagttttggtccttagggtctggcctgatacgaggatttactggtgggggcatggaccctggggccactggagcctggaaccgtggggactggcctggagccagtggccagccagctgctggggatggcatggaacctgggtccatgagactgatctggtacatggtatggtgggtactggcctggtgcctggaaccaggacgattggcatggagcctagggccatgaggaccagcctggagcctgtatctgtaatggctggcctagaagctaggtctgagaggctgtcggcctgagtcctrgagctgcggggctgacctggaacctgattacacaggagaggtcatagagtctgtttcattggggaccaagataacacttgggttaattgggatgggcctggactgtgagttggctgaagcaggcctggaacccaagtcttctagagcatggagccacaggg

SEQ ID NO: 142943 - DNA, 525 bp, Homo sapiens
ggctacacatgagtcttctaaatagaccctgagataagcctgggtctgcagaggctatcctggagttttggtccttagggtctggcctgatacgaggatttactggtgggggcatggaccctggggccactggagcctggaaccgtggggactggcctggagccagtggccagccagctgctggggatggcatggaacctgggtccatgagactgatctggtacatggtatggtgggtactggcctggtgcctggaaccaggacgattggcatggagcctagggccatgaggaccagcctggagcctgtatctgtaatggctggcctagaagctaggtctgagaggctgtcggcctgagtcctggagctgcggggctgacctggaacctgattacacaggagaggtcatagagtctgtttcrttggggaccaagataacacttgggttaattgggatgggcctggactgtgagttggctgaagcaggcctggaacccaagtcttctagagcatggagccacaggg

SEQ ID NO: 142944 - DNA, 368 bp, Homo sapiens
tagggatgggtcagcctgcarctccctcccccatcaatattcataaactcttagtattacagagaacaaaggcttgagtgtgcattttcacctcaaagtatgcacttagcaaatacttactaatgagtatcaaggtagaagtttagaagaggcaccaaaatatatttttcaacaggtaagtaattttatggttcagttaagagtggttatttatacatatgcctacaaatacggttctatgcatacagagctactgtccaggggaaggcgctgtgacagtaactacattactggtactgccatgatattaccacactgcaaaaatagaattcaagatagcagcttagatattaagacccaaaggaaat

SEQ ID NO: 142945 - DNA, 657 bp, Homo sapiens
ctttagaaaaagaaaaagaaattctcagtagaaaacatttttaccaaattatgcaaatttggagctttactcttactgctctgatacattccaatcctccgatacatttctaaataactgtatccatgtttagatctggctctttccactcaggcatgaaagaaccccatatactaaatgtacttcacccaactctcaaamttcttccctaacttcctgttactcatgtcatacatatttcatttagatagtagaaagtaaacagtgattttgtttacatccatgaatgtatgattaatgacgtaattttccagggagtacttgttctttttccacagttgttgattcaatcatgtatatgtctaatttcagagttttaggaattgtggtaagtattcttcggcatggccctatggacataatatacctctttttcctatgaattaatctggtattagttctcaactgacctcttattatgtgcttattctttctattcattttgtgagaatattttttaaaaagacttaatataaatttactatgcactgcattaaaaattaatagtaagtcattcccagagtctgcatacacactttaaatgtaacatcttttaggaatgaattttctggaaaacatagcccttatacaatatgt

SEQ ID NO: 142946 - DNA, 523 bp, Homo sapiens
gagtgtatattgtgcattataaacagtttcatgcaacctttagaaaaagaaaaagaaattctcagtagaaaacatttttaccaaattatgcaaatttggagctttactcttactgctctgatacattccaatcctccgatacatttctaaataactgtatccatgtttagatctggctctttccactcaggcatgaaagaaccccatatactaaatgtacttcacccaactctcaaaattcttccctaacttcctgttactcatgtcatacatatttcatttagatagtagaaagtaaacagtgattttgtttacatccatgaatgtatgattaatgacgtaattttccagggagtacttgttctttttccacagttgttgattcaatcatgtatatgtctaatttcagagtttyaggaattgtggtaagtattcttcggcatggccctatggacataatatacctctttttcctatgaattaatctggtattagttctcaactgacctcttattatgtgctt

SEQ ID NO: 142947 - DNA, 657 bp, Homo sapiens
ctttagaaaaagaaaaagaaattctcagtagaaaacatttttaccaaattatgcaaatttggagctttactcttactgctctgatacattccaatcctccgatacatttctaaataactgtatccatgtttagatctggctctttccactcaggcatgaaagaaccccatatactaaatgtacttcacccaactctcaaaattcttccctaacttcctgttactcatgtcatacatatttcatttagatagtagaaagtaaacagtgattttgtttacatccatgaatgtatgattaatgacgtaattttccagggagtacttgttctttttccacagttgttgattcaatcatgtatatgtctaatttcagagttttaggaattgtrgtaagtattcttcggcatggccctatggacataatatacctctttttcctatgaattaatctggtattagttctcaactgacctcttattatgtgcttattctttctattcattttgtgagaatattttttaaaaagacttaatataaatttactatgcactgcattaaaaattaatagtaagtcattcccagagtctgcatacacactttaaatgtaacatcttttaggaatgaattttctggaaaacatagcccttatacaatatgt

SEQ ID NO: 142948 - DNA, 657 bp, Homo sapiens
ctttagaaaaagaaaaagaaattctcagtagaaaacatttttaccaaattatgcaaatttggagctttactcttactgctctgatacattccaatcctccgatacatttctaaataactgtatccatgtttagatctggctctttccactcaggcatgaaagaaccccatatactaaatgtacttcacccaactctcaaaattcttccctaacttcctgttactcatgtcatacatatttcatttagatagtagaaagtaaacagtgattttgtttacatccatgaatgtatgattaatgacgtaattttccagggagtacttgttctttttccacagttgttgattcaatcatgtatatgtctaatttcagagttttaggaattgtggtaagtattcttcggcatggmcctatggacataatatacctctttttcctatgaattaatctggtattagttctcaactgacctcttattatgtgcttattctttctattcattttgtgagaatattttttaaaaagacttaatataaatttactatgcactgcattaaaaattaatagtaagtcattcccagagtctgcatacacactttaaatgtaacatcttttaggaatgaattttctggaaaacatagcccttatacaatatgt

SEQ ID NO: 142949 - DNA, 657 bp, Homo sapiens
ctttagaaaaagaaaaagaaattctcagtagaaaacatttttaccaaattatgcaaatttggagctttactcttactgctctgatacattccaatcctccgatacatttctaaataactgtatccatgtttagatctggctctttccactcaggcatgaaagaaccccatatactaaatgtacttcacccaactctcaaaattcttccctaacttcctgttactcatgtcatacatatttcatttagatagtagaaagtaaacagtgattttgtttacatccatgaatgtatgattaatgacgtaattttccagggagtacttgttctttttccacagttgttgattcaatcatgtatatgtctaatttcagagttttaggaattgtggtaagtattcttcggcatggccctatggacataatatacctctttttcctatgaattaatctggtattagttctcaactgacctcttattatgtgcttattctttctattcattttgtgagaatattttttaaaaagacttaatataaatttactatgcactgcattaaaaattaatagtaagtcattcccagagtctrcatacacactttaaatgtaacatcttttaggaatgaattttctggaaaacatagcccttatacaatatgt

SEQ ID NO: 142950 - DNA, 599 bp, Homo sapiens
ccaccacaagctgcctcctgaaacccctgggcaggagtgcagaagctcacttgagctcacatacggggccgattgcgctgcctagaactcactaccctgaaaggctattcttagattcctcatctagtgagggaattgcactatttcatgtcagaagtgtaccagttaaaaacaaacaaacaaaaaaaagaattaggaatctaggacccttttaaattattctcctgctaccattagaaatccttttatcctatccactgtgtttttcatgtcctggccaaagcaaaactatagagaatgaaaatctccacttttacagtttcatttagcagggaaatgttctcagtgcctgagtggaacctcagtgcctgtgtgggaacctctaaaactgtgtagctaatttccaaaaaatttccaatrtatttatttaaaaaaaaacacatataagtggacctacacagttcaaactcatgttgttcaagggtcaactatcgtaacgactgagtaagagttaggataggtatatccttcttttagaccaaaaatgaaataatattgatactaatttaaagttcacatacttagatagctataaaaga

SEQ ID NO: 142951 - DNA, 650 bp, Homo sapiens
taacaaactgttatatttgtcattgtcaatagtctaatagccatagaatattcatcaaagtacagatcataatcttatcctagtatttagcacaatgcttgaccagtggttgacacaaagtaatatttgttgaacaactgtcatgggcataccactcacyttttccacattatttttattattttatgttattttattttggtttcagagacagggtctcactgtgttgcccaggctggtcttgaactcctggcctcaagcagtcctctcaccttggcctcccagagtgctgggattacagttgtgagccaccatgcctgtccttccactatgattattatttaactcttgacttccaaacaaaaaaattagtagggtatttcaatggcatctggttgcaatagtaatctaaactattttcagatgataaattaggcatattcaaaattactaatatctaatttgcagtccttgcctggccaaggagaaggaatacatgttggcagagaaagcgtttaaaagaacacacacacatacaatgtccctaacttttagtgactcagtaaacttagattttaagatcttctattatatgttcataaaatatttgattttgaccagcttccttacattgtgatcctataattttt

SEQ ID NO: 142952 - DNA, 650 bp, Homo sapiens
taacaaactgttatatttgtcattgtcaatagtctaatagccatagaatattcatcaaagtacagatcataatcttatcctagtatttagcacaatgcttgaccagtggttgacacaaagtaatatttgttgaacaactgtcatgggcataccactcactttttccacattatttttattattttatgttattttattttggtttcagagacagggtctcactgtgttgcccaggctggtcttgaactcctggcctcaagcagtcctctcaccttggcctcccagagtgctgggattacagttgtgagccaccatgcctgtccttccactatgattattatttaactcttgacttccaaacaaaaaaattagtagggtatttcaatggcatctggttgcaatagtaatctaaactattttcagatgataaattaggcatattcaaaattactaatatctaatttgcagtccttgcctggccaaggagaaggaatacatgttggcagagaaagygtttaaaagaacacacacacatacaatgtccctaacttttagtgactcagtaaacttagattttaagatcttctattatatgttcataaaatatttgattttgaccagcttccttacattgtgatcctataattttt

SEQ ID NO: 142953 - DNA, 537 bp, Homo sapiens
cctgggcacaaggctccctgtgcttggccatctggattctaaacctgagaaacctttctcagaacccctggcagctgtggactctactcagcactctatcagttgtctgcgttcaggtagagagacgcaaaggaagagtgttgtggaaagctccggaagagtctggttttgactggcgtctctgtcctctcacttaggtcgctgagattacgggtgttgtggaaactgccaaagtttaccaactaggtggcaccagaacaaacaaagggctgcaactacggtaggaggcacttctggggtagcttctgcttccacttcaaacaggcactggctttgggggctgctrttctctctgtgtgatgttccttgttaccatgaacgctatgtatgcaatccccacaaggtacacttggagggagacttgtattccatctttgtctatagggaaggtaggatattctctcctctagagggaaccaaatatatgaaggggtaggacacagagaaaggaaatgtgtggttatgagagaccctccc

SEQ ID NO: 142954 - DNA, 471 bp, Homo sapiens
tacctctgacctggctgtgatattcattttaggagtcaacttgactggggtaagtggcgcctagagagctggtaaaaaacatcacttctgggcgtgtctgtgaggctgtaatggccagccgggtgggtccaagctctcttcagcagtccccggggctggcagctagcaggtcttgtggtctctgaggccttggggggcacctcccgttgtttgcccccacctacatctgctcagaacacgcttcccacctccaccgccccttctccctgcaggaccacctgcctcttcctgcctccccgcccagcctgccttttccttgcacgacagccaaaatcccattcccccaagtttccagaagggatcagcacttgaatcagcagaccaagtagacaagtccaccctccccaatgtgggcaggtgtcacccaaaccactgaggccycccccgggacaaaggcaggggagggaattc

SEQ ID NO: 142955 - DNA, 406 bp, Homo sapiens
tcgggcggcagcaggcgacgcggacgccgggctggaggcggcagaaccagaagggacggcccagaggccgggagcggtagccgggagaaccaggcgctcgcccggcaatgaggaagcgcccaggccgcggctcacttacctctggcccatcgcgaccggagmgccgccgccgccacccggccaccccggaatcggaaaccgatctcaccgccctcgaggacccgacttccggaacaaccggaaggaaaacagtgcggcgggaagcgggcccagaaggaggcgcgagaggcccgcggcgccggcctgatgcctgcagcgccccatggcggcgggaggcgggctggccggcgccgcgcgcatgtggtccggtccaggtgggtcggcggcgcggggcaggcgctggcct

SEQ ID NO: 142956 - DNA, 567 bp, Homo sapiens
gtttttattagcaacttaagtcaatttccttttctaattaaaaaataactgataaaattatgatataattattgtatcacccgaaagttacaaatcactcaatgcttttttttttttgagacggagtctcgctcttgtagccaaggctggagtgcaacggtgtgatctcagctcgctgcaacctctgcccctgggttcaagtgattctgctgcctcagactcccgagtagctgggattacagctgccaccccgcccagctaattttttgaatttttaatggagacggtgtttcaccattttggccaggatggtttcaaactcctgacctcaggtgatgtgcctgacttggcctcctaaagtgctggaattacaagcatgagccaccgcgcccggcccatgctatgttctttaatgttaaaaaatctcccaattccttgggaaagttcacttaaatattttagtagctacacatgataatattaatattacattarcatatgataagctacagggctgggctcattagaatgatcttaataatgatttcttcctacattagaactgga

SEQ ID NO: 142957 - DNA, 589 bp, Homo sapiens
aaacacgagtgtttttcaatctagaataataaatataagatattaagactttactagcctgggtgcggcagatcacacctgtaatagcactttgggaggcagaggcaggtgggttacctgaggtttggaagtcaagaccagcctggccaacatgttgaaaccccgtctctactaaaaatacaaaaaaattagccaggtgcagtggcacgcacctgtaatcccagctacttgggaggcagaggcaggagaatcgcttgaacccaggaggcggaggttgtggtgagccgagatccagatcrcactactgcactgcagcctgggctacagagcaagacttcatctaaaaaaaaaaaaaaagaaaaaagaaaaaaaaaaaaagactttactgaactgtaaattctttatctgcttacttttttttttcttttgtcaataactgatctgtatctcctagaataacagtttgcatctaggagctcttaaatggtatttgtttcttgaaggaggaagctatgttgcctaactactatatgacagacattgtgctgagtgcttttacatcataatttgagtaaactcacaacaaaat

SEQ ID NO: 142958 - DNA, 589 bp, Homo sapiens
aaacacgagtgtttttcaatctagaataataaatataagatattaagactttactagcctgggtgcggcagatcacacctgtaatagcactttgggaggcagaggcaggtgggttacctgaggtttggaagtcaagaccagcctggccaacatgttgaaaccccgtctctactaaaaatacaaaaaaattagccaggtgcagtggcacgcacctgtaatcccagctacttgggaggcagaggcaggagaatcgcttgaacccaggaggcggaggttgtggtgagccgagatccagatcacactactgcactscagcctgggctacagagcaagacttcatctaaaaaaaaaaaaaaagaaaaaagaaaaaaaaaaaaagactttactgaactgtaaattctttatctgcttacttttttttttcttttgtcaataactgatctgtatctcctagaataacagtttgcatctaggagctcttaaatggtatttgtttcttgaaggaggaagctatgttgcctaactactatatgacagacattgtgctgagtgcttttacatcataatttgagtaaactcacaacaaaat

SEQ ID NO: 142959 - DNA, 589 bp, Homo sapiens
aaacacgagtgtttttcaatctagaataataaatataagatattaagactttactagcctgggtgcggcagatcacacctgtaatagcactttgggaggcagaggcaggtgggttacctgaggtttggaagtcaagaccagcctggccaacatgttgaaaccccgtctctactaaaaatacaaaaaaattagccaggtgcagtggcacgcacctgtaatcccagctacttgggaggcagaggcaggagaatcgcttgaacccaggaggcggaggttgtggtgagccgagatccagatcacactactgcactgcagcctgggctacagagcaagacttcatctaaaaaaaaaaaaaaagaaaaaagaaaaaaaaaaaaagactttactgaactgtaaattctttatctgcttacttttttttttcttttgtcaataactgatctgtatctcctagaataacagtttgcatctaggagctcttaaatgrtatttgtttcttgaaggaggaagctatgttgcctaactactatatgacagacattgtgctgagtgcttttacatcataatttgagtaaactcacaacaaaat

SEQ ID NO: 142960 - DNA, 643 bp, Homo sapiens
gtttttgcttggcgttttatatgtagcgctatgggcccattcaatgtgactttttaattggttacttacatactaaaaatgtttcacttgatttttcatatctgtgttcttctaaggcttttatrttcttaacttttgagatttctattttgcagatgtcaagatatcttctttagattttaaactcattatccatgtatctggtaggctctttagtctaccccccccccatttttttgccttattaattcaaatccttggcctaattttgttatttatcccatctattgagttttttatttgaagttacatatgtatcattcccttttgttggttcttcaagaatacttattgtttcacattgtcaatctcaatctctatttattcaaatatattgttgggttttactacttaatttgtaatttatcatgtccattagttatgctttctctcctataggttgtctattttgggtttctcttttatgttgcatatatgccatagatgcctcatacatttttcttttaaggtcatattcttttgaagtatctactgctatttatgctgttgggcacacacaggggtgatcaaaatcaggatccagttacagactggccagaatggaagtgtagaaatgtccatt

SEQ ID NO: 142961 - DNA, 608 bp, Homo sapiens
gggctaaatgccccaattaaaagacacagaatggagactgggtgctatggctcaygcctgcaatcccagatctttgggaggccaaggtgggcagatcacctgaggtcaggagtttgagaccagcctggccaacatggtaaaaccccatctctacgaaaaatagaaaaattagccaattagccaggcatggtggcaggcacctgtaatctcagctactcagaaggccgaagcaggagaactgatggaacccgggaggcagcagttgcagtgcaccaagatctcgccactgtactccagactaggtggcgacaagagtgagactccatctcaaaaagaataaagatacagaatggcaagctggataaaaagtcaagacccatctgtgtgctgtgttcaggaaacccatctcacatgcaaaaacacacagactcaaaataaaagaatagaggaaaatttaccaagcaaatggaaaacagaataaaagcaggagttgcaatactggtttctgacaaaacagactttaaaccaacagagatctgaaaaagaaggatattacaaaatagtaaaggggtaaattcaacatgaagagctaaatatcctaaatatat

SEQ ID NO: 142962 - DNA, 608 bp, Homo sapiens
gggctaaatgccccaattaaaagacacagaatggagactgggtgctatggctcacgcctgcaatcccagatctttgggaggccaaggtgggcagatcacctgaggtcaggagtttgagaccagcctggccaacatggtaaaaccccatctctacgaaaaatagaaaaattagccaattagccaggcatggtggcaggcacctgtaatctcagctactcagraggccgaagcaggagaactgatggaacccgggaggcagcagttgcagtgcaccaagatctcgccactgtactccagactaggtggcgacaagagtgagactccatctcaaaaagaataaagatacagaatggcaagctggataaaaagtcaagacccatctgtgtgctgtgttcaggaaacccatctcacatgcaaaaacacacagactcaaaataaaagaatagaggaaaatttaccaagcaaatggaaaacagaataaaagcaggagttgcaatactggtttctgacaaaacagactttaaaccaacagagatctgaaaaagaaggatattacaaaatagtaaaggggtaaattcaacatgaagagctaaatatcctaaatatat

SEQ ID NO: 142963 - DNA, 385 bp, Homo sapiens
tcaaagtgagtggtcaaaatatgagaacagaagttctccaattggacaaggtggagaaagaatattggagggccaacaacyaaatatgcttaagtactcatagcaccattccctctgagaagggaactatgaaatgcacaagagcagaataggtatctgcatcttgggaactgccataaggacagtgatgatgataaacagctgcttcatctacttatgcttgtgcacagagctgctgtttcaggaagcccttttaggagcattgcacgacaatctttatttcccatttatctccaggtgggaccactttagcttagtttctacaagtaaaggcaatgacactgtgtcattgggtcctgcatttaaaatatagcaaaaagccatt

SEQ ID NO: 142964 - DNA, 550 bp, Homo sapiens
ataccaaaattcataaagcttgaattggggataaagatgagttaaaatagctttcctcgttatctgtactctgaaggtgatctactaacaaacccccaggacttacatatccaagaaaaaaaagaagtattgtatacattttttttctgctamttccttgatttacacagctatctgtaaatatattctgttattcattaatatactgctgattattttattactcttgatggttaattgtcttcttgcctcaagtgctctgttgggtccatgtagagtaaggtgaatcagaatgagtccttactgcaaaggacttacagttacagagtagcaagtggaagttatcagagctcagaacatagtatcatgtagcagatggaatttcccctgacttttgaggcatgcctaagtaagtgacaggcagacaagggaaagaaaacacattcaaaggaataacgtaattgtaaatatgggattaaagtgcaagtcccaatttgagactatggcgagtggattttatataggattggagaaaatggcagtaggataa

SEQ ID NO: 142965 - DNA, 555 bp, Homo sapiens
aaagctggaagagctttgtaacattggggttacaggcacacactcctagacactagcatggggccgaaccccaaaacactggccctgggctctgcacctgcccctctgcatgctccccctcccagtaggggtttgagcagcagggtgacccaacaggtgagccacacctctgtcacatgtcttgcgaaagggatcagggaactctaccatttcaattccacagataatttgtggtttgaaaatgtacttgttcatcaacaattacaaagaatacttcattaaacattcctgcatatggataatatacatgtatgtatctgtgtttgaatgcttctatgtattttgccatgattcaatcccaccagtaaaatagtttcatcaaaagttaagcgcccgggcgtggtggctcackcctgtaatcccagcactttgtgaggctgagacgggtggattacttgaggtcaggagttcgagaccagcctgaccaaaatggtgaaacccccttctctactaaaaaatacaaaatattagcctggcatggtggcgcatgcctgt

SEQ ID NO: 142966 - DNA, 555 bp, Homo sapiens
aaagctggaagagctttgtaacattggggttacaggcacacactcctagacactagcatggggccgaaccccaaaacactggccctgggctctgcacctgcccctctgcatgctccccctcccagtaggggtttgagcagcagggtgacccaacaggtgagccacacctctgtcacatgtcttgcgaaagggatcagggaactctaccatttcaattccacagataatttgtggtttgaaaatgtacttgttcatcaacaattacaaagaatacttcattaaacattcctgcatatggataatatacatgtatgtatctgtgtttgaatgcttctatgtattttgccatgattcaatcccaccagtaaaatagtttcatcaaaagttaagcgcccgggcgtggtggctcacgcctgtaatcccagcactttgtgaggctgagacgggtggattacttgaggtcaggagttcgagaccagcctgaccaamatggtgaaacccccttctctactaaaaaatacaaaatattagcctggcatggtggcgcatgcctgt

SEQ ID NO: 142967 - DNA, 430 bp, Homo sapiens
ggatgatgtagaaatgctctaacacctgaaaaattttggaggaaaaggaaaattgttttctaaatttctcatcattgcatccacttcagaactttaagattattatcatcacgaaccaatatggatgtgacataccacataataatcaataaatttaaagaaaatttttaaytgttagtttaatttctttgatcaaatatgctcttgttattttatgccagtgctgtttttatagtgtatttagaagattagttgtcctacagtaacatttatttaatcactggagtgctaattgcattttacattccataacatcttaatggttgggctggccatgacatgctgattgaaatttaaatgaaatagtgaaaaaaatagcatactctatttaaaacaatggaagttgagaacactctatagattaactggc

SEQ ID NO: 142968 - DNA, 343 bp, Homo sapiens
actcattgctttctctactacagtacccatccatccctttgccattttttgactgttatataccaatgatgcttttcttttaaatggtaatactaccctggtattagccaagtttaatggccttttatgaaatcaatrttattgagatacaccttacaaacaatagaattctccgattataggtgtgcaattcatgcattttaacaaatgtatacagttgtttaaccccacccgaatcacaatatagaacactctcatcaccccaaaaagactcctggttcctgtactcctctgcatgaggaattctcctttttatttttaattattaaaattcctaagacta

SEQ ID NO: 142969 - DNA, 606 bp, Homo sapiens
caagcgattctcttgtatcagcctcctgggtagctgggactacagttgtgtgagaccacgcctggataatttttgcatttttagtagaggcaggttttcatcatgttggccaggctggtcttgaactcctgacctcaagtgatctgcccgacttggcctcccaaagtgccaagattatatgtgtgagccactgcacccagccaaaaatatttttaaatgcctactatataataggcactttttttagcctgtgaaatcacaaggatttataagatgtgcataattactaccttcatcaagtttacactttgatggaggagaacacactataaacaagaaagtagacaaataaaatattttcagttttaataaatgctttgaargaaacaagcaaagggaagagatggaaaataatacaaatataaggacttagagggtgaggctattctggctttgtataggaatgtcaggaagagaatgagtctttcttaagccaaactctaaaggtagagaaataagtagccatttgaacagttttgtgaaagaatgctgggatgaacagaggcactccaggcagagataacagcatgtgcacaggccctgaga

SEQ ID NO: 142970 - DNA, 441 bp, Homo sapiens
ataaattgttattagagattagagacattgtgatctttttattcaggggcaaagatttcagtatagttgcaaatggaaaatatgtttaggaacaggtggatttcaagaaggagacttccaggcgtaatgttctaagtgctaactggctttttttagccatatatggaaaggtatggatatagagacatgaaccaaaaaaagccctattcaattttctaagaagtttcatagaaaatataaagaatttaagacttgctgagttaaaagataggattattttcatcctcacattttacaactgatggggacaaaaagtaaaaaatgccttagggcacgtatcaaattcagggcattgycagtaaattgtagccccagggtaaagttgagatcaagggtgtggctgagagaaccctttagatgcagccaaaagatttaagacat

SEQ ID NO: 142971 - DNA, 563 bp, Homo sapiens
aagcttccacagtgtagaaggggacctgagcaggttgctgctgttggctggggtggccagcttttattcctttatttggccctgcccacatcctgctgattggtccattttacagagcgctgattggtccattttacagagcrctgattggttcattttacagagtgctgattggtgcatttacaatccttttgctagacacagagtactgattggtgcatttttacagagtgttgattggtgcatttacaatcgtttagctagacacagagggctgattggtgtgtttacaatcctctagctagacagaaaagttctccaagtccccacttgacccaggaagggtggcttcacttctcactggtagggggaaaaaaagagacattaatctctggttttgttacagtaggtatctagtctggcataagcagggcaggagagggctcaccctaatcaagaatgtcaggtgaccatcagttgatggtcaggctgttgttaaactgtctctctgaaataataattgatcacagccagcaccaggaaaaggcagtctcccagtagat

SEQ ID NO: 142972 - DNA, 556 bp, Homo sapiens
gaaggggacctgagcaggttgctgctgttggctggggtggccagcttttattcctttatttggccctgcccacatcctgctgattggtccattttacagagcgctgattggtccattttacagagcgctgattggttcattttacagagtgctgattggtgcatttacaatccttttgctagacacagagtactgattggtgcatttttacagagtgttgatwggtgcatttacaatcgtttagctagacacagagggctgattggtgtgtttacaatcctctagctagacagaaaagttctccaagtccccacttgacccaggaagggtggcttcacttctcactggtagggggaaaaaaagagacattaatctctggttttgttacagtaggtatctagtctggcataagcagggcaggagagggctcaccctaatcaagaatgtcaggtgaccatcagttgatggtcaggctgttgttaaactgtctctctgaaataataattgatcacagccagcaccaggaaaaggcagtctcccagtagatagaaaatac

SEQ ID NO: 142973 - DNA, 581 bp, Homo sapiens
gaaggggacctgagcaggttgctgctgttggctggggtggccagcttttattcctttatttggccctgcccacatcctgctgattggtccattttacagagcgctgattggtccattttacagagcgctgattggttcattttacagagtgctgattggtgcatttacaatccttttgctagacacagagtactgattggtgcatttttacagagtgttgattggtgcatttacaatcgtttagctagacacagagggctgattggtgtgtttacaatcctctagctagacagaaaagttctccaagtccccacttgacccaggaagggtggcttcacttctcactggtagggggaaaaaaagagacattaatctctggttttgttacagtaggtatctagtctggcataagcagggcaggagagggctcaccctaatcaagaatgtcaggtgaccatcagttgatggtcaggctgttgttaaactgtctctctgaaataataattgatcacagccagcaccaggraaaggcagtctcccagtagatagaaaatacctgaaactggtgatcagcagcttcc

SEQ ID NO: 142974 - DNA, 456 bp, Homo sapiens
ttcctcttataacaaggtggaggagaataaaaaataacgaaaacgtttattttactcatttcatcctgaaaatgtcctattttggttatttgattaaaatttttaaagaggtttgaaataaattggaggtgcagatgaattcttcccacagagggttttgtgtgacatttttttcttaactgtcctttctatacaacttccagattgaattaaagctaaccaaatatcatggatatgacttatataaacatctttacatatgtttgtggcaagggagccctttcttatgtcattacctcataggagaatagtaacytgtattatttggcagcagatgtgattggcatatattaaagcaagttatctacaagtagaaaaatatcgaatgggcttattttgcttgtgaataaaggtaaagacacaactgacataactggtgctcaattttaacacaat

SEQ ID NO: 142975 - DNA, 431 bp, Homo sapiens
ctaattattttgttttttttttcttcctttacttttaggtttygctatcctaaaatcagatagtaaatctgcatttgatctcaatattacatgctttcatttattttacactttaattagtctggaattaatttttctgtagcacataattagggtgtggtattttaaaaagtatattttcagagctttttcttcttatgtatgatgaccttattattattagtatgctttgccatcaaatagtatatacattacagcaggttcatggaagtcaatgctctttgaatttattttattatctgcactgtaacgaaagaccttaaacactcaacttaattcttatttgtaaaaattggataaagcagagctcactatagtaataaatccattggactctgcaaataatttgtacatttttagagtcagcagag

SEQ ID NO: 142976 - DNA, 431 bp, Homo sapiens
ctaattattttgttttttttttcttcctttacttttaggtttcgctatcctaaaatcagatagtaaatctgcatttgatctcaatattacatgctttcatttattttacactttaattagtctggaattaatttttctgtagcacataattagggtgtggtattttaaaaagtatattttcagagctttttcttcttatgtatgatgaccttattattattagtrtgctttgccatcaaatagtatatacattacagcaggttcatggaagtcaatgctctttgaatttattttattatctgcactgtaacgaaagaccttaaacactcaacttaattcttatttgtaaaaattggataaagcagagctcactatagtaataaatccattggactctgcaaataatttgtacatttttagagtcagcagag

SEQ ID NO: 142977 - DNA, 613 bp, Homo sapiens
tttaacccctgttttaaaaatttctggctattattttctttgcttttggatttcttttcttttttgctagtagcaaacatgaaaacttcctttgacaagtagttttgagttaaagtcagtcttggattgagtaactttctaaatccctttcctgttgagggttctctcatgtgttgactggcagtggacatttcagtgaggagggctgaaaygcgtagctgtctttgtcttctttttctcagaatgagttatttggcaatgagcttctgtccatttcttttaattggcattttgtgacttccagtaaggctctcccctactttaaaaacccataattgtatgtgaaagacagagggcaagatgtaaagaacagattcactagaaagcaaatatgttcatgcctcttcttagttactttattcctacattgatagaaaatgacttaatatatacaaagaaatgggtatcagcccactgaatttgcaagggagctgaatgaacaaaatgctctgctgggtcagtcagctggaaaaaagtggtttagtactgtgtgtaaacagaataatgaagctatgtaattttaattgtgcattttatatctatctggtgagat

SEQ ID NO: 142978 - DNA, 613 bp, Homo sapiens
tttaacccctgttttaaaaatttctggctattattttctttgcttttggatttcttttcttttttgctagtagcaaacatgaaaacttcctttgacaagtagttttgagttaaagtcagtcttggattgagtaactttctaaatccctttcctgttgagggttctctcatgtgttgactggcagtggacatttcagtgaggagggctgaaacgcgtagcygtctttgtcttctttttctcagaatgagttatttggcaatgagcttctgtccatttcttttaattggcattttgtgacttccagtaaggctctcccctactttaaaaacccataattgtatgtgaaagacagagggcaagatgtaaagaacagattcactagaaagcaaatatgttcatgcctcttcttagttactttattcctacattgatagaaaatgacttaatatatacaaagaaatgggtatcagcccactgaatttgcaagggagctgaatgaacaaaatgctctgctgggtcagtcagctggaaaaaagtggtttagtactgtgtgtaaacagaataatgaagctatgtaattttaattgtgcattttatatctatctggtgagat

SEQ ID NO: 142979 - DNA, 546 bp, Homo sapiens
ataggacaatttttaccaagctgtttggcttcatgttctctgggattggaatgttgttaaagtcagtgagcctaagtggatccctagaagattaaagctgagtaccttttggagcgttttcataggctatttagaaagttttctcatgccttcgattctggaatctagtttacccgagaggatgcatatatcttctttgtgattactggtcytccttgcccatctactgagcatcctgcagtccacttctcacctcattctgctgaaaccttttaaccaacaagaggacctattagacaggaagagagcttgtgatgctctgccatgtactccatatttgggtcatagcaactcctgcttcaacaaactctgtgaacacaggatgattttgatgcttcagcagcactctcccaccacaaaagcaggtattcatcacttctctaatcctttgataccccggtaggaggaaaagttggtgttagctttctgaggcatagaactggtcttctatatttcgaaaatatttgtgtggttttatgctttgaa

SEQ ID NO: 142980 - DNA, 607 bp, Homo sapiens
cacaggatgattttgatgcttcagcagcactctcccaccacaaaagcaggtattcatcacttctctaatcctttgataccccggtaggaggaaaagttggtgttagctttctgaggcatagaactggtcttctatatttcgaaaatatttgtgtggttttatgctttgaactaaaaggggataacaggcacaggatattccattatatcttaaacaactaaaaatagatcaacatataagaaatagtgattttcaatctgagagagagtaaccaaaggaagtaaaatcaataatttccccagctaactgcctcaaagagtttcccagaagcatcacatgaaagcrgaagccaagcagaggccatcaaattccctgagttaaacaaataagcccagagcctgggagcggcctaaggaaactagagttctcaagacagagtacaggatggagagagctctacgcagacctctcacagatctacagggggtctgcatttgagttttcacctggaagactggaagacttcaccagtgtaaagaaactacccaaaaatgagaaaatcgcccagaaagagcagcaggaacaatctccatggctaacacaaggc

SEQ ID NO: 142981 - DNA, 607 bp, Homo sapiens
cacaggatgattttgatgcttcagcagcactctcccaccacaaaagcaggtattcatcacttctctaatcctttgataccccggtaggaggaaaagttggtgttagctttctgaggcatagaactggtcttctatatttcgaaaatatttgtgtggttttatgctttgaactaaaaggggataacaggcacaggatattccattatatcttaaacaactaaaaatagatcaacatataagaaatagtgattttcaatctgagagagagtaaccaaaggaagtaaaatcaataatttccccagctaactgcctcaaagagtttcccagaagcatcacatgaaagcggaakccaagcagaggccatcaaattccctgagttaaacaaataagcccagagcctgggagcggcctaaggaaactagagttctcaagacagagtacaggatggagagagctctacgcagacctctcacagatctacagggggtctgcatttgagttttcacctggaagactggaagacttcaccagtgtaaagaaactacccaaaaatgagaaaatcgcccagaaagagcagcaggaacaatctccatggctaacacaaggc

SEQ ID NO: 142982 - DNA, 607 bp, Homo sapiens
cacaggatgattttgatgcttcagcagcactctcccaccacaaaagcaggtattcatcacttctctaatcctttgataccccggtaggaggaaaagttggtgttagctttctgaggcatagaactggtcttctatatttcgaaaatatttgtgtggttttatgctttgaactaaaaggggataacaggcacaggatattccattatatcttaaacaactaaaaatagatcaacatataagaaatagtgattttcaatctgagagagagtaaccaaaggaagtaaaatcaataatttccccagctaactgcctcaaagagtttcccagaagcatcacatgaaagcggaagccaagcagaggccatcaaattccctgagttaaacaaataagcccagagcctgggagyggcctaaggaaactagagttctcaagacagagtacaggatggagagagctctacgcagacctctcacagatctacagggggtctgcatttgagttttcacctggaagactggaagacttcaccagtgtaaagaaactacccaaaaatgagaaaatcgcccagaaagagcagcaggaacaatctccatggctaacacaaggc

SEQ ID NO: 142983 - DNA, 450 bp, Homo sapiens
ttctttatggttgaatagtactccattatgtatatgtaccacattttgttttttatccattcatctgttgatggacacttaggttgcttctaaatcttggctattgtgaatagtgcttcaataaacatgaaagtgcagatatcgctgtaatatactgattttcttttttttgggtatatacccaagtgtgggattgctagattgtatggtagtgtcatttttagatttttgaggaatcttcaaattgttctccataatggttatactaatttacattcttatcaaaagtgtatgagggtttccttttccccatgttcttgccagcatttgttattgyccttcttttgtataaaaaccatattaactagggtgagatgatatctcattgtagttttgatttgcatttctctgataagcaatgatatttagcactttttcaaatacctgttt

SEQ ID NO: 142984 - DNA, 609 bp, Homo sapiens
gggtatgcacagggcaagagttaaggcttgggagtctccacctagatttcagaggatgtatggaaacacctggatgtccagatagaagtctgctgcaggggcaaaggcctcatggagaacctctattaaggcagtgcagaaaggaaatgtggggttggatccctcatggagagcccccaatggggcaatggctaatggagctgtgagaagagagccactgtcctccagacccagaatggtagatccgtcaatatcttgtaccatgcacctgsaaaagctgcaggcactcagaaacagcctgtaaaagcagttgcaggggctgtagctgtactctgcagagccacaggggcagaactgcttaatgcctttggagctcaccgcttgcatcagtgtggcctggatgtgagacatggagtcaaaggagattattttggagctttaaattttaatgacttctgttttagtccattttcacactgctgataaagacatacccaagactgggaagaaaaagaggcttaattaaacatacagttcaacatggcaggggaggccttagaatcatggcagaaggtgaatggctcttcttacatggtggcagcaagagaa

SEQ ID NO: 142985 - DNA, 609 bp, Homo sapiens
gggtatgcacagggcaagagttaaggcttgggagtctccacctagatttcagaggatgtatggaaacacctggatgtccagatagaagtctgctgcaggggcaaaggcctcatggagaacctctattaaggcagtgcagaaaggaaatgtggggttggatccctcatggagagcccccaatggggcaatggctaatggagctgtgagaagagagccactgtcctccagacccagaatggtagatccgtcaatatcttgtaccatgcacctgcaaaagctgcaggcactcagaaacagcctgtaaaagcagttgcaggggctgtagctgtactctgcagagccacaggggcagaactgcttaatgcctttggagctcaccgcttgcatcagtgtggcctggatgtgagacatggagtcaaakgagattattttggagctttaaattttaatgacttctgttttagtccattttcacactgctgataaagacatacccaagactgggaagaaaaagaggcttaattaaacatacagttcaacatggcaggggaggccttagaatcatggcagaaggtgaatggctcttcttacatggtggcagcaagagaa

SEQ ID NO: 142986 - DNA, 590 bp, Homo sapiens
tgttagaggaggtgcctggtgggaggagactgaaccatgggggaagacttctgctttgctcttttcataatagagttctcacaagatgtgtttgtttgaaattgtgtagcacttcccccttcactctcttgctctctctctcctgcctggcatgtaagatgtactgacttccccttcatcttccaccatgattgtaagttccctgaggcctccccagccatgtgtcctgtacagcctgcagaactgtgaatcaattaaacctcttttttttttaaatgaattacccagtctcaggtagttctttatagcagtgtgaggacagactaatacactatttttgctttaattgcctgttcttctgaagtcttacacacaaaaatttgcccagactaatgttgtggagtatttctccaatatcttcttctattagttttatagttttaaatcttaaatttaaatctttgatattttttattggatttatatggatttgagagacrggtctagtttcatttctctgcatatagttatctagttttcccagcaccatttattgaagatactgtcctgtccccattgtatgttattgg

SEQ ID NO: 142987 - DNA, 609 bp, Homo sapiens
cttattgttttcctttgtggttatgtgatttctttggtagtatgtttaaatttattgctttatatttttatgaataggttgtaggttttyacactgtggttactatgaagtttatgaatattatattataacaagttattttagagagttgacaactcagatcacaacaaaaaggacaaaaacaaagaaaaaaataaaacattctacaactcaagtccatctcccccacattttcatttttacctatctcaatttacatattttgtcatttcctgtctcttgccaggttactatagttattatttttgataaatttgtctcttggatttcatactagagttatgagtaaatcgtactccacagttacagtattagagtattctgggtttttctgtgttcacctcgatctcactttttccagtgtagaatctatgagttgactggagattttccgcacatttagtgctgggaagaatggggtcaggggtgtcacaaatgaggaagtcctattctcttatgctctgcttgaattttttttttatttctgtgtgaccccaggaacagtctcatcctcatatttgagtgccacgttattgttgatgataatct

SEQ ID NO: 142988 - DNA, 609 bp, Homo sapiens
cttattgttttcctttgtggttatgtgatttctttggtagtatgtttaaatttattgctttatatttttatgaataggttgtaggtttttacactgtggttactatgaagtttatgaatattatattataacaagttattttagagagttgacaactcagatcacaacaaaaaggacaaaaacaaagaaaaaaataaaacattctacaactcaagtccatctcccccacattttcatttttacctatctcaatttacatattttgtcatttcctgtctcttgccaggttactatagttattatttttgataaatttgtctcttggatttcatactagagttatgrgtaaatcgtactccacagttacagtattagagtattctgggtttttctgtgttcacctcgatctcactttttccagtgtagaatctatgagttgactggagattttccgcacatttagtgctgggaagaatggggtcaggggtgtcacaaatgaggaagtcctattctcttatgctctgcttgaattttttttttatttctgtgtgaccccaggaacagtctcatcctcatatttgagtgccacgttattgttgatgataatct

SEQ ID NO: 142989 - DNA, 609 bp, Homo sapiens
cttattgttttcctttgtggttatgtgatttctttggtagtatgtttaaatttattgctttatatttttatgaataggttgtaggtttttacactgtggttactatgaagtttatgaatattatattataacaagttattttagagagttgacaactcagatcacaacaaaaaggacaaaaacaaagaaaaaaataaaacattctacaactcaagtccatctcccccacattttcatttttacctatctcaatttacatattttgtcatttcctgtctcttgccaggttactatagttattatttttgataaatttgtctcttggatttcatactagagttatgagtaaatcgtactccacagttacagtattagagtattctgggtttttctgtgttcacctcgatctcactttttccagtgtagaatctatgagttgactggagattttccgcacatttagtgctgggaagaatggggtcaggggtgtcacaaatgaggaagtcctattctcttatgctctgcttgaattttttttttatttctgtgtgaccccaggaacagtctcatcctcatatttgagtgcsacgttattgttgatgataatct

SEQ ID NO: 142990 - DNA, 530 bp, Homo sapiens
aaaatcctgtgtcattttagggtcttgcccaggatacctgaggggggcactttttcctgacacttcttgccctcagattttctattgaaggcagatgaagcaccaaatctctgactagccaattgaaaaagaatgcacaactatagaggatggggtgtgaccctgctatctctctctctctctctctctctctctctctctctctgtctctctctgatgaaaggaatgttggctttgtttcccttcatggaggtctagccattgtgtgagaccagaataagaccctgggrcaactgatgggatctggctgaggccacacggtggtgttgccagaaggtccctgaactggttccatccccaccgcccgttagggcatcaaccaagaccctcagtcttttctatgacatgtttccttacgtctttcatggtttgaaatggctcctatctctttttttaataatgttaaaggtattgctgcaaacagcagagatatttctgggtagaatgagcattcagcccaaccatcagat

SEQ ID NO: 142991 - DNA, 597 bp, Homo sapiens
ttctaggactgcataagcctgctggtcaagccagtccagcaaactagtcagtaacgaactttgctgcaggtgtccatcttgtttcatgttcttgggagcttaaccgtgtaacatggtagtactttgttttggtctctgccattttacaatggcagtcagggttcaagcctggcttaggggatgagtactttctggttaatatcatttgctggttctctttccctccatgaacaacttctagcttctgttcttaaatccttctttttctgagctacctataaagattccaggttttgtaaaaactgcttaccacatcttyggaaatacctcacacacttgtggttaagtcataaccttagttgaggattgttggtttcccctgtaaggttacttttgatccagttcaaaagccagaaatatcagccacttggcatggctaaggtcaggtagtaagggatttaaaaggattttcttaaagagcagtatggttaaagtcagcacaattaaaagtggatatctaagttataggtatatttaaaaggcctttatgtttttcttttcttggaccttgttttgctggaaagttttttttttttt

SEQ ID NO: 142992 - DNA, 597 bp, Homo sapiens
ttctaggactgcataagcctgctggtcaagccagtccagcaaactagtcagtaacgaactttgctgcaggtgtccatcttgtttcatgttcttgggagcttaaccgtgtaacatggtagtactttgttttggtctctgccattttacaatggcagtcagggttcaagcctggcttaggggatgagtactttctggttaatatcatttgctggttctctttccctccatgaacaacttctagcttctgttcttaaatccttctttttctgagctacctataaagattccaggttttgtaaaaactgcttaccacatcttcggaaatacctcacacacttgtggttaagtcataaccttagttgaggattgttggtttcmcctgtaaggttacttttgatccagttcaaaagccagaaatatcagccacttggcatggctaaggtcaggtagtaagggatttaaaaggattttcttaaagagcagtatggttaaagtcagcacaattaaaagtggatatctaagttataggtatatttaaaaggcctttatgtttttcttttcttggaccttgttttgctggaaagttttttttttttt

SEQ ID NO: 142993 - DNA, 597 bp, Homo sapiens
ttctaggactgcataagcctgctggtcaagccagtccagcaaactagtcagtaacgaactttgctgcaggtgtccatcttgtttcatgttcttgggagcttaaccgtgtaacatggtagtactttgttttggtctctgccattttacaatggcagtcagggttcaagcctggcttaggggatgagtactttctggttaatatcatttgctggttctctttccctccatgaacaacttctagcttctgttcttaaatccttctttttctgagctacctataaagattccaggttttgtaaaaactgcttaccacatcttcggaaatacctcacacacttgtggttaagtcataaccttagttgaggattgttggtttcccctgtaaggttacttttgatccagttcaaaagccagaaatatcagccacttggcatggctaaggtcagstagtaagggatttaaaaggattttcttaaagagcagtatggttaaagtcagcacaattaaaagtggatatctaagttataggtatatttaaaaggcctttatgtttttcttttcttggaccttgttttgctggaaagttttttttttttt

SEQ ID NO: 142994 - DNA, 554 bp, Homo sapiens
ttcagattcttcaataaaattgatattatcaggagttcctgcctggctgttgacttcttttttataataacctcaatgtgttagcatgtttttggatatgggtgggtggctcactttggttgacaagtattttgtttgtatcttctctatctctgtccctactgctttgctcattcctttccatcttcgagttttgtatttgcttccactgacccctagttttgaataagaacttayggcgatttggagtcttgctccacataatatcagagatattacaaagccaatcacgaggtcagaagctgcctttactcagatcttgaatcctctcttcctagatgtgcagccatcatgggatatctactggggccgtgtgttttgctggtatagttgttccccttattcatcgtttcactttctacagtttcagttacctgcagtcaaccaggggtctgaaaatattaaatgaaaaattccagtgataaacaatttatgttttaaattacatgtcgttctgagtagtgtgatgtaatcttatattgtttcattccatc

SEQ ID NO: 142995 - DNA, 554 bp, Homo sapiens
ttcagattcttcaataaaattgatattatcaggagttcctgcctggctgttgacttcttttttataataacctcaatgtgttagcatgtttttggatatgggtgggtggctcactttggttgacaagtattttgtttgtatcttctctatctctgtccctactgctttgctcattcctttccatcttcgagttttgtatttgcttccactgacccctagttttgaataagaacttatggcgatttggagtcttgctccacataatatcagagatattacaaagccaatcacgaggtcagaagctgcctttactcagatcttgaatcctctcttcctagatgtgcagccatcatgggatatctactggggccgtgtgttttgctggtatagttgttccccttattcatcgtttcactttctacagtttcagttacctgcagtcaaccaggrgtctgaaaatattaaatgaaaaattccagtgataaacaatttatgttttaaattacatgtcgttctgagtagtgtgatgtaatcttatattgtttcattccatc

SEQ ID NO: 142996 - DNA, 551 bp, Homo sapiens
ttatttagatattctcaaagatcttgaacccacaacagtggacattgctaacacacatgaaaatactctcatgcttctagggagcggggtgggcatgaggtagaatctgaagcccacagcattgaaaaagagcaaaatccaaatcatttgcctaatattttcattgcaatccacctgcagaaacgctggtttcataataaattttgttaaataatttttttttcaaaagaccttyagagaggagtattcagtgtattgatgggttgatgataatttccagaaaaattattcaaaacttgaacataactaagagagactactgggtattctttcagagaagtccagactgctttattttccattgactagatcttactacgattctagtcttactattagaatatatatatacactatgtatataagcatgctatatacattcataatgcatatacatatataatgtatatatatatcccttgtatatatatataaatgtgactttttcataaattaagttttctgctgatgtcacgtcagcaatttaggaa

SEQ ID NO: 142997 - DNA, 551 bp, Homo sapiens
ttatttagatattctcaaagatcttgaacccacaacagtggacattgctaacacacatgaaaatactctcatgcttctagggagcggggtgggcatgaggtagaatctgaagcccacagcattgaaaaagagcaaaatccaaatcatttgcctaatattttcattgcaatccacctgcagaaacgctggtttcataataaattttgttaaataatttttttttcaaaagaccttcagagaggagtattcagtgtattgatgggttgatgataatttccagaaaaattattcaaaacttgaacataactaagagagactactgggtattctttcagagaagtccagactgctttattttccattgactagatcttactacgattctagtcttactattagaatatatatatacactatgtatataagcatgctatatacattcataatgcatatacatatataakgtatatatatatcccttgtatatatatataaatgtgactttttcataaattaagttttctgctgatgtcacgtcagcaatttaggaa

SEQ ID NO: 142998 - DNA, 536 bp, Homo sapiens
ttcgtaaatgttatgattgaaaatgctcttaggcattctctaagccaccactttaccagacaaataagaaaatggagacctacaaagacgtaggtgtttgccaaagccatgcagtgccacagactctgggctctgtggcatttgttctttgcactgatgactcacgtttaatactttaatttcacagtgccaagagaattacaaaagaaaacttcccaatttatcttcttaaccatttatacattactggttattagaggagcatatgattaatatacttgtgtamaatgtttatttttaaaaattaagaaggattgtccctacaatgtataacacattttgtcaaggtagagcaacattcctgcccagaccactttgcaattgagctgcttgaaagagataatgtggttttagaaataagtgaatcagtctttatataacatattcatttcataagttggaaaattgtcttggagtttaaagctcctctttgaatagcgatgatgtctaggatagtgaagattaaattgcagcat

SEQ ID NO: 142999 - DNA, 602 bp, Homo sapiens
atgctcagagtcttaatagctttaagaaaataggataataagcaaactctacattctactcacaaagttaaaaaatatactcaaaatacccataaaaaaaataatgaggattttaggtagaatgtgcacaagagatatttgcacaaaatgggaaaagacaatagatggaacattatctaaataattaatgaaaaataatatcaatatacaaaaaaatgataataatcctaaaagtaaaataatcacagacatagaggtcatacaactactcaactttctccctctttctttctgtcttatttttgtaactaagtttatttcatttayatttactgaattacaagtgttatggttttagtcctgactaaacaaattttaattttacatctttagttctttatggttatttggtttatatctagtatattacagtctgattttactttccctgtgtgtgtgctgtgtcgttgtgggtgtcctgcagttaaagaaaatacataattataataaattcagttgtaatagttataatgtcatttacactctattatttagactacctattggattctcactaagcacaagaacaaatttaatatcgt

SEQ ID NO: 143000 - DNA, 541 bp, Homo sapiens
ggagcagctgcttaaatgggataaatatgcaagaatcagaggggaaaaactttgaagaatagagaggaggcagcaagataaaagtgggggtgaacagagccgttagatcacaagtcatgtctaattcctgtgaatgagagaaggaagatgtggcaagaaatgtcttagaatgcagaggagctctaatgaagtttyagtcagagcaaggggaaattttgggacagtcactccttaagggagtcccacattttgcaggaaaagggcctgcactgttactctacagtgctcaggtatttgctggaaaatcctgcaggaagcatgaacttggcatggatgtaggatacagagcaaccacagctaaggtcatcagctgcttcccatagcaggagaactgactggcctcttttcttggccactacatgctcaaataaatacacttaaacctttatcttagtaatatctaaactttaaattatatttgttgaccaacaatgtgattataaaagatatgctaccttctacttattaaaatttagttatt

SEQ ID NO: 143001 - DNA, 580 bp, Homo sapiens
ggagccaggaagccagtccaagtcccaaaacctcaaaagtagagaaggcaacagtgcagccttccatctgtggccaaaagcccaagagtccctggcaaatcactggtttaagtccaaaagtccaaaagctgaagaacgtagaatctgatggttgagggcaggaagcatccagcacgtgggaaagatgaaggctggaagactcagggtctgtttatcccactttcttctacctgctttattctagccatgctggcagctgattagatggtattcacccagattgaggatgggtctgcctctcccagtccactaactgaaatgttaatttcctttggcaacacctcacagacacactcgggwacaatactgttcacccttcaatccaatcaagttgacactcaatattaaccatcaaaacaactttagcagcaattattattgcataccaaatatccatgttcttctatttgtttttcagtccttttgcctctagattatgtcacaaaattagttatctcaatcaaatatgagaagtgatgtgtcatttcctgtctgaggacattaagaatgtatttaatat

SEQ ID NO: 143002 - DNA, 593 bp, Homo sapiens
tcctgcggcaaagtttgttactaaccagtttgctggtctggcttgaacagtgggattatggggtccttgacccatgtgctatcctaagatatttttccttatgacagaaccatgcagaaagacacacaaagcacaaagtacaacagattcaacacagcttaagactagcctaacaaatcttttttttccattaattaaaactttacagaggatataaacagtgatctttatcattccytttgccagttcgcacagggagagagagaccaccagtctgactagttaaaaacttttacccttttgctgacatgtcaggcttctgggttcccttcccatgaactcaatttaaagccaagccatttaatgtttggggaaataaacttttcccagcttggggatgcatctgaggggagtgtcaggtggtacagcaatgcaattacccatgcacaaaggggacagaggagcaaaaagagaaaagaagggctttttgttgtggttgttgtttcttcaatggagtcccagtgattcacaaggcattcaagagaagtaaagattgaagatgataggttacccatctggaaagatgtcaaaaa

SEQ ID NO: 143003 - DNA, 341 bp, Homo sapiens
tcctgggtgagcccccaaaatgatgtaggatttttcttttcagtcactttgtaagccagagacccctggtggtgatgcccaactcgagccatgctcagccatgctggcatgccccagctcatctgtggtattgcttgtgcccacattcagcgattcctgagctcttataccatgaccaagaagaatgagaatatactggacattgaagcatgaggagaataattttattgagtgatggaacagctctcagtgcagaggggatttggggggtggtctaccacccccacagttggrtggttctctcctcttatcaactgagtctggggtctttataggaacag

SEQ ID NO: 143004 - DNA, 614 bp, Homo sapiens
aatgctaaataaaaaataacatctctttctctctcttttccacttctccctcctttcctcactgcttctcttttcttttaaaaatagtgagctcagcaaatataagaatgaggaaacactattaaccctcaaaactctgcacatgtgttaataacattacttgtttctggtacttgtggttttttaattgatgcataatacacatgtatgttttgggggtacatgtgataatttaatacattcatataatttgtaaagatcaagtcaatatatttggaatctccatcaccttaaatatttagctttgctttatgctatgaacattcaaattattgtcttctagcaacttgaaaagtacaatagaataatgttaactagagtcactctgctaatctgtcraacaataggtcttatcaattttattacaccatatatttggttccattaatcaactactatgcatccatcacccacacttctcaggctctggtaaccaccagctactcagtcttcatgagatacaattttttttagccccacatgaatcaggaaatgtggtatttgtctttctgtgcttggcttacttcacttaacataatgacttccagtttcat

SEQ ID NO: 143005 - DNA, 559 bp, Homo sapiens
ctatgaacattcaaattattgtcttctagcaacttgaaaagtacaatagaataatgttaactagagtcactctgctaatctgtcgaacaataggtcttatcaattttattacaccatatatttggttccattaatcaactactatgcatccatcacccacacttctcaggctctggtaaccaccagctactcagtcttcatgagatacaattttttttagccccacatgaatcaggaaatgtggtatttgtctttctgtgcttggcttacttcacttaacataatgacttccagtttcatccttgttgctacaaatgacaggatttcattcttacttatggctgaataatagtccatttctgtttcataccacattttctttattctttaatcaattgatgtgaacatacattgatctactgtgaatagcactgccataaacwttagtacagatatctcttcaagacattgacttcctttcttttatatccagtattgaaattgctagatcatatcatagctctatttttttttttgaggaaccgccatacttttctcc

SEQ ID NO: 143006 - DNA, 408 bp, Homo sapiens
acagccctgttctctcccagtccaktcagcaaagttaagagccatgcagaggagcatggagaacccttggatatcgatgcctattaccatattttgttgcagctgtccccatgcaaaaaccccctgggctttacacatgctcaagtttggtctctgtctactctctgggcagtcccccctaccagctcaactgtctgtaggggtggtggcatcttgtgcagccaggatcccagaagtccatggtaagtgtgggtttctctacaggttcctcacttaccacttccttaggagccattcagggccaaggagtccttcctgtaggtcggccatcccatgcagtgctcttagtttcctctctctttagccttggtgcctgcgttgcctctctgtcaactcttagtgttttct

SEQ ID NO: 143007 - DNA, 397 bp, Homo sapiens
tatcttaggaaagacagccctgttctctcccagtccattcagcaaagttaagagccatgcagaggagcatggagaacccttggatatcgatgcctattaccatattttgttgcagctgtccccatgcaaaaaccccctgggctttacacatgctcaagtttggtctctgtctactctctgggcagtcccccctaccagctcaactgtctgtaggggtggtggcatcttgtgcagccaggatmccagaagtccatggtaagtgtgggtttctctacaggttcctcacttaccacttccttaggagccattcagggccaaggagtccttcctgtaggtcggccatcccatgcagtgctcttagtttcctctctctttagccttggtgcctgcgttgcct

SEQ ID NO: 143008 - DNA, 413 bp, Homo sapiens
tatcttaggaaagacagccctgttctctcccagtccattcagcaaagttaagagccatgcagaggagcatggagaacccttggatatcgatgcctattaccatattttgttgcagctgtccccatgcaaaaaccccctgggctttacacatgctcaagtttggtctctgtctactctctgggcagtcccccctaccagctcaactgtctgtaggggtggtggcatcttgtgcagccaggatcccagaagtccatggtaagtgtgggtttctctacaggttcctcacttaccacttccttaggagccattcagggccaaggagtccttcctrtaggtcggccatcccatgcagtgctcttagtttcctctctctttagccttggtgcctgcgttgcctctctgtcaactcttag

SEQ ID NO: 143009 - DNA, 563 bp, Homo sapiens
atctatgtctgtgtctaaatctgtatcttaatatatcaggaaccaccgatattcrtgagatatgccatatatttttattttcccatcgcacaaggcataatgtgtattgtatgtagtaaacgcttgattgatgttttattatttatttatttatttatttagaaatggagtttcactcttgtcacccaggctggagtgcaatggtgcgatctcagctcactgcaacctccacctcccaggttcaagtgattatcctgtctcagcctcctgagtagctgggattacagatgtgtgactccatgcccagctaatttttgggtttttagtagagatggggttttgccatgttggccagggtgatcttgaactcctgacctcaggtaatccacccacgtcggcatcccaaagtgttgggattacaggcatgagccactgcgcccggcctgacgatgtctaatatttcaaaagtatagaattagttgtttataaaaatatatttgatcataaagcctgacttccttttccattaggactccatcattttagggtggctgcacttatat

SEQ ID NO: 143010 - DNA, 560 bp, Homo sapiens
atctatgtctgtgtctaaatctgtatcttaatatatcaggaaccaccgatattcgtgagatatgccatatatttttattttcccatcgcacaaggcataatgtgtattgtatgtagtaaacgcttgattgatgttttattatttatttatttatttatttagaaatggagtttcactcttgtcacccaggctggagtgcaatggtgcgatctcagctcactgcaacctccacctcccaggttcaagtgattatcctgtctcagcctcctgagtagctgggattacagatgtgtgactccatgcccagctaatttttgggtttttagtagagatggggttttgccatgttggccagggtgatcttgaactcctgacctcaggtaatccacccacgtcggcatcccaaagtgttgggattacaggcatgagccactgcgcccggcctgacgatgtctaatatttcaaaagtatagaattagttgtttataaaaatatatttgatcataaagcctgacttccttttccattaggactccrtcattttagggtggctgcactta

SEQ ID NO: 143011 - DNA, 613 bp, Homo sapiens
tcactttggatcttcaagtgcttataggccagtttaaaaaagttgtacaaccattgtatttaatatagcttctacttttcatataaaaatttaattgatttttagaataacactaggtcttctgtacagaaaaagagtgtgaagataagcccaattcctgagcacttctgaaatacaaatcttcattattttgttaatatttaaaatttatttcagaaagtatacttgcttttttttccaagtcagaaagttatcattattaaaatctattttaaataytattaatttgctcaataattaatgactggtccatttttttcagtaagaacttctaagcaacttaataatttgtaaagctttgagataagaaaatattaaagggctataaatgagtaatgtaatatatcatgcatcttggcaagtatatgaaaactgataaatagactactctggtaccacttattacaactttgaagaacttcatgtaaccattcattgtgtcttaataataacaatgatgactatgataataataattgagtgtttactatggattacagtaacaagttacaggtgacaaatgtctgacttatgttcacccactcctcttact

SEQ ID NO: 143012 - DNA, 606 bp, Homo sapiens
agcaataagaaatcatttgaaagtacaaaactcactggtagtagtaagtatggagaaaaacacagaatattataaaattgcaattgtggtacataattaggtggtacataattactcatatcttgagttgaaagattgaaaaatgaaccaatcaaaacaaataactacaacaactattcgagacatgcacagtataagaaataaacagaaagaattaaaagttaaaaagcaggagggtgaaatttaaagtgtagagttattcattttctattttcttgtttattaatctttttctctcagtgataagttgtcatcagtttaaaataatgggttatgaaatattatttgcaagcttcattataacctyaaactaaaatcatataaaagatgtacaaaaaataaaaagcaagaaattaaaacatacaaccagagaaaatcaccttcactaaaagacaggaaggaagtaaagaaagaagaccacaaaatgaccagcaaacaacaaaatgtcaagagtaagtcattatttataaattataatattgaatataaatggactaaattctccaataaaaacattgagtggctaaataaaaagaaaaaaaagac

SEQ ID NO: 143013 - DNA, 378 bp, Homo sapiens
gtgaataccgctaagtcttcagatatttgaggtatcttttctaaactttacaatagccctgaatttggttttaagttagaacaagaaagccacataggaacaatatttcttttaawttactccatgctatgagattacatggggagcagatgaaggcagaataatagagttcaaaatattgtatttcaagaacaagaaatagtgtttagcaggacttctgaacattttgaacatgtctaaaagcaaaaaacaagagcctaacctaaacattaaacattaggagaaggttatttattcagatctctgtttcatgttacacaaataaataataaacaagggtgctgggttttcaaataggatgcattctgcattacgaat

SEQ ID NO: 143014 - DNA, 461 bp, Homo sapiens
ataatgctgtgcacagtgagatggaatatgcctacttttgtgtatctaaaaatgattaagaagttctgtcctgaatgtgaaagccagaatgaaatgatacacattaggcacaaagcaaagaagtaaagtaccacctggagagcaaaaaatatgggttttgacatgggcatatctgtaggtctatcaaaaatatgataaggcagaaaaagctgcttgcattaagatccatgtctctgaattctcccagaatccaggcacagtcaagtgtggggagattggcacttccctagggaggtcttctaggcagaatgagcagaaacgttaatcattaactccaatgcraacccgtgtgttaagagttcatatttgtaaatgttttttgatcctcagttaagctgtttcatataccagcactccctaggtaactccaaaactttttcttttttttttttttcagttga

SEQ ID NO: 143015 - DNA, 604 bp, Homo sapiens
aagcttaaaatacatgctctgttgaactgagactttcatatcaatacttatagcagttaagataaagggaacaggctgggcagagagattatcatcaattatatgtttaatatttcacctaaatttcacggtatcctttttagctatttggagccctgacaaatctctttacaatgtttctagttttcactattaatgtttttgtggtgggcatcagtttcgagttgcagaattttgcctgactctttttcaggacaagaatggtctctaaagaattacaattcattaacctagattgtagttttaaatgttttagtatttctgcttttctagggtcctgagcttttgtttccacatggtaaatccttgttacatgtagggtgacaaagtcttctcttctgctgtctgtattaaaatatgccagaacaccataaagatagcaccagtcttaactatatcaaaattttacagtatctggattccattagagttacggattatgaattgatggaaactcacaaaccttaaaagatggaggaggtttcttagcatttccttattcaaagtaactaactacatgtrtttctaccgaagaatgaataaa

SEQ ID NO: 143016 - DNA, 531 bp, Homo sapiens
ctcccaggttccagtgattctcctgcctcagcctccccagtagctgggattacaggcacrtaccaccatgaccggctaattttattttattttattttatttttgtatttttagtagagacagggtttcacaatgttggccaggctggtctcgaacttctgacctcaagtgacctgtacgccttggcctcccgaagtgctggaattacaggcatgagccactgcacccagccccattaactttcttctcctgagagagcctctccaagaatgttctctgagaagtaaaaaatcaaatccctcttcagtgtggctttgtgttctacctactttgttctctttagctttagtgttccttattttccgagatacaatgaaaagtaggagcaaaaagggagaaaaagcccaagagctgcatccctttcttctaaagtatcaaaccatatgtcttctattcccaagtgctgtcttatggttttacctgctcttcaagataattttgtcctcaccagctgatgttggactagatcta

SEQ ID NO: 143017 - DNA, 443 bp, Homo sapiens
aacactgtatataaacttagtcaatcaaactgtccttaagtatttaaaattaaaatgtcaagattactactagtgaatcgctctaaatattttaaataaaaactacaagccttaagtcgatttcccaatgtgtcagattctcttaaacatttcatacacttgaaataacaaatgaaatatccacagccctaacaaaattatgaaaattattttcaccaatttttttttaatgtattctctccccttttctgtttgtagagtcacctacctatagggcagagaattaccctctcagtcctgccaaagctgaggatacaaggctgctggccagattgggaattaaatacctgggtgttaatcccaggatggatctatctgagctgtttttttgagtgataagaaatttttrtgcacataatttcttttgaaaacggtattattca

SEQ ID NO: 143018 - DNA, 518 bp, Homo sapiens
ataataacagtaggttatggcacataaaatacagaaaatggcattttttaatagtaaactaattaccagcttttatgttaattaattataaacattgaattttaatatattctctggaagggtgcttggaagtatgcatgatgcatgtatggggggagggatagartggtgaaaaaagaggtctgcacaggtataaagttaaaatattaattgttaaattttgttattggtctaagtgaatggtttagaagtgttttattctccctctctattgccaattttctgtgtaattatttcacacattgattatatgtttatataatataggaatcgaagagagtataccatagtcactctctccattcattgtcctttctttcctcaaaacaaaacaaaaataaccaaattctgaaaatatgtcatacatcttaacagtatgcacaaattcagtagttactgcttattttcattctgttccctttgggaaacattcatccctcaggtgtgtaattgaaaaa

SEQ ID NO: 143019 - DNA, 582 bp, Homo sapiens
gaacagaaggaaacatttcccaattcattttataaagttaatattaccctgatgagcaaaatcagaaaaaaatacacttcaaagaagtaaagctgtagaacagtgttcccaatgaatcctttacaaatgtgagcaaatagaattcaggaccatataaaaagaatcatgcactatggccaactggaatttattcccgggattcaaggctggtttggtattcaaaaatcaaaagatcacatgatcatatcagttgtcaaaaaagcatttgacaaaatttaatatccattaataataaaaattacttgcagaaagacagaaayagacaggaactttctcaacttgatgaagagtatctacaaaaaaatactgccactgacattatagttaatgatgatagattgaatgtttttttcattatgaccaggaacaaggtaaggatatctgctctcaccactcttaatatagtactggaagttctagccagtgcagttggccagataaagtaataaaggcatacagattggaagggaataaatgaaactgcccctatttacagatgaccgaattgtttatgtgaaatat

SEQ ID NO: 143020 - DNA, 542 bp, Homo sapiens
gcctatgttcagcagcctggggcttcaggcctagtttctttgcttaccagctgtgtgactttgagcagggcaggcaacctctctgggcctccgtgtcctgatcagtaacataagggaaagcagccctgcccagtctacttacagagctgttaccagcattaaccacaatgtcagatttaaaagttcttcccaggctgggcgcggtgacttacacctataatctcagcactttgggaggctgaggcaggcagattgcctgaggtcaggagttcgagaccaacctgggcaacatgktgaaaccctatctctactgaaatacaaaaattagatgggtgtggcggtgtacacctgtagtcccagttactcaggaggctgaggcaggagaattgcttgaacccgggaggcggaggttgcagtgagccgagatcgcaccactgcactccagcctgggtgacagagcgagactccatctcagaaaaaaaaaaaaaatgcttccttttgtgtgggtggcaagggcctacacaaggaaggccctactgaag

SEQ ID NO: 143021 - DNA, 401 bp, Homo sapiens
gcagcctgtgcttctggggaggcctcagggaggttttgctcatggcaatggcaaagcaggagcaggcactttccatagtgaaagcaggagcaaggctgtgggtrgaagggaggtgctacacacctttaaacgaccagatctcctcagaactaactcagtatcttgaggacagtacaaggggatggtactaaatcattcatgagaaatctgcccctgtgattcaatcaccttctacccagcctcacttccaacattgaggattacatttcaacatgagatttgggtggggacacaggtccaaactataccaatggttattaatcatactctaatttgaaaaaagaattgggtttcatctttttttaaatatcctgtaatagtttatatagcttgaaaattac

SEQ ID NO: 143022 - DNA, 586 bp, Homo sapiens
gaattcagtcacaacatatgaattttggagggagacaaacattcagaacatagagatcatcaggatttgtagagaggaaaagaatgcaggtccacattaactgcaataacgacaatcaagaacaaagaacaataaagcctggagccctagattcatgtccccaccctctcaccagttccctggaacactatgcargagtccctttgttgccttcgttttctcattagtaagacggtagattgacatacaagaccccttaggcccaatcctgtaaacttctcctttccccagtccaccgatgaagacagttggctcaggaacagggtcacagaattttggggccagtctggtccaaccaatcacagggaacttgaagtcccttgacagcacactcagaaaccccaagcctgatgttgaggtcccctacatggaaatgaattaggccctaggctgctcatgccaccttcagagagggctgaaacaaagttggctccccgctagcctggagcactgttggtgttcgatacttatttattgagcaaatgaaatatttttagcatgacttccctaagtccttgccacatgc

SEQ ID NO: 143023 - DNA, 567 bp, Homo sapiens
ccagaagttgagaaacagcagttataaagaccatgcatgtgactccagataagaggtgagatgtttcttcccatggacacacagttgttgtraaaaatattacagataagagccctgaagattcaccagaaatgacagctaagagcagaaaatgtgggatgattatttgttaatacgactgcgaaggagttaactatggccagtgctgtggtctgaatgtgttacccttaaattcatatgttgaaacttgatcaccagtgtgatggtattaagaggtagggcctttaggaaatgattaagtcatgagggcagatccttcatgaatgggattaatgacctcataaaagaggtctagggagctatctgtccctttgtccttccatcccttctgccatgtgagaacacagctgcatcctcttcagagggtgcagccataagacaccctcttggaagcagagagcagccttcgccagacactgaatctgctagtgccttgattttggacttcccagcctctagaactgtgagcaatacacttccgttctttgtaaattactcagtctaagg

SEQ ID NO: 143024 - DNA, 584 bp, Homo sapiens
tttggcatccctcccataataaaatggggtctgtgttttctttctcttaaatctggatttgtgacaaaaatggaagatgcgctgtttgacttccaaacctacatgatagaaagtaatacatattcttgctggtactcccggtacactggttttttggaactcagccaccatgctgtgaggaagcccaagtagccccatgaggaagtcatgttaaatgttccagccaacagtcccagctgaatttccagctgatggccagcaccaacttgtcaaccatgtgaatgagacatcttgaaaattcatcctttagtcccaggttgagccaccccagctgacactgcacagagtagagacaagctattcccaagccctgccgaaatttcagctttgtgaacaaaataaatgagtattggcatttaagccactaaattttacaayagttagttacacagaaacagcgagaacaatgaagaaacaaaactcagctaaaataggtcagagaaggataaattagcaatacttatgaaaagctctcaaagatatacatgcccttatacccaactattccacttttgggaattgaa

SEQ ID NO: 143025 - DNA, 574 bp, Homo sapiens
cagctttatgcgctccagacgagcctgcattccccctaatgcccctggaattgcttactcacaccaaaatccgctgcctcaggcgtttccagccagaggtaagccttcttttcatgggcaatcaggcagtagcctggagcacagaggggaaggggggcacctgcatgcccggctgggtctctgtagacagtggatcatgcgaggcctcccctctccttgaccctgtgtgatgagccctgggaggaggcacccaggccaggggaggagctgcgtagtgacagaaagggcatctacatctctaccacgtaagtggggaaactgaggctgggcctagcaccagatcactcatgttgaaacctaggtttgaactgggtctctgaatccccatccagagctcactgtcttaaagtctgaggtgcctgtgagtgtctgaggacccttactatgagacagtgttatcgctgacttacagtctgggtaaagaaggtgaatgcagtcagaggagtagattcaggtgtcagayatttgcataaaataccaattgctcctcatgttggggaggtaattcacaagc

SEQ ID NO: 143026 - DNA, 596 bp, Homo sapiens
acgattacccatggtatgtgtcctccctcactgcaacaagtgatacagccaatttgttcaactatacttgagtccctggtggtcttaagctggagggcattgatagtagtagatattcaaagcttttattactattattagcaatttttttwaaaaaaaagtactattgctgttgttgtttttaatcaagtaggcctagcatgtaaggtgcatctctgaggaagtagctgagatatccataagaaagcagacttggaataggttgcaaaagtccttttgcttcatggaacagtgtgagttgattcacttacacacatacatacacacacatctccaaagagatgctgacaagtctttagaatgctcctttgcaaaggcagagaacgtgcctgtcttattctaaatctacagcactccaaaagaaggcagatcaggtcacatagcacagactcaatagtagattttggctgaaaaccaaaatgaattcaagcctcctaggagaccttaacagtttaatttaaatactgatagatcaggcagataagcgtagttaacacatacagggtgcttactccctatcagacactgtgctaaac

SEQ ID NO: 143027 - DNA, 539 bp, Homo sapiens
gtctctgttccctcagcatggaatacatttccctcaccaatccacatggcttactctctaacttccttcaaatctgcattagtccttcctctgagaagcagatgctgcaatggattaatcatgcaaggcttttattaggggaaatgccttgcaaaaggaattagggatggagcagaggaaggcgggggttgtagtgggatcatgrtacaagtctgaccccaggggaaggagaaaagagagaaggtagactggaagcctcctctagtgctgggcaggctaggaaagttttgacaaaaccttcagggagtccctgagctaaagtgtgctgatgaggaagtcccaagtctcccaggagacatagccttcatacaaaagcagcaatgaatttcaaaatgaaatagccgtggccttctgtcagttatgctccctgtagtagaaggtctcacaagacactttatcatggccaccataagacctctgctgagatgccccagtcttccctgaccactccatatgaaagaccaagtccccctcagtgc

SEQ ID NO: 143028 - DNA, 539 bp, Homo sapiens
gtctctgttccctcagcatggaatacatttccctcaccaatccacatggcttactctctaacttccttcaaatctgcattagtccttcctctgagaagcagatgctgcaatggattaatcatgcaaggcttttattaggggaaatgccttgcaaaaggaattagggatggagcagaggaaggcgggggttgtagtgggatcatggtacaagtctgaccccaggggaaggagaaaagagagaaggtagactggaagcctcctctagtgctgggcaggctargaaagttttgacaaaaccttcagggagtccctgagctaaagtgtgctgatgaggaagtcccaagtctcccaggagacatagccttcatacaaaagcagcaatgaatttcaaaatgaaatagccgtggccttctgtcagttatgctccctgtagtagaaggtctcacaagacactttatcatggccaccataagacctctgctgagatgccccagtcttccctgaccactccatatgaaagaccaagtccccctcagtgc

SEQ ID NO: 143029 - DNA, 265 bp, Homo sapiens
agctgggccaggaaggtaagccgcaaggttgcagtcacacccagctcatgaccatggcaaggctcctttccctttcacctccactctcactcaggctggctctgttctgtgcctgcttcaactccccagtgctctcaatagctggctaccttgtgtagggtccctcgccctagctctggccctttggtcttgaaacagcagctggatctactcccawcccctaatggggtttggttaataactgtatccatctgattcatgcaca

SEQ ID NO: 143030 - DNA, 564 bp, Homo sapiens
ttttctgttttggataccatctatcttgcacccaggagggcctcagtaagyacctgttgaataactgagcacactgagtttgcaacataggaaaataacacacgtgtaagccaaaaaaaaaaaaaaaaaaaaaaagagtactgctttcttaaaggtagaaagtgtattacatgttatataccataacatattttgaaccgtatgaacttgatgaggtaaaagtcttgtctctaatcatgaccttcaaccatatgttgtcaatttccctatcctatatatcagatagatatgggaataaatccatatatgtcgggtcactttcaatgataataatggtataattggtctgattctggtaataatgatttatgtctgtaaataaaattctagaccaagtctaaactttgactttgtttccaattcaaagcctttcctttcctcacattgtcatgcctcttccatctgctactcctccttcagctatcccctctttttgctctgtcactgagggcattcgacattttcaaggtggaaagatcaattgggtcttatgttcacatatac

SEQ ID NO: 143031 - DNA, 564 bp, Homo sapiens
ttttctgttttggataccatctatcttgcacccaggagggcctcagtaagtacctgttgaataactgagcacactgagtttgcaacataggaaaataacacacgtgtaagccaaaaaaaaaaaaaaaaaaaaaaagagtactgctttcttaaaggtagaaagtgtattacatgttatataccataacatattttgaaccgtatgaacttgatgaggtaaaagtcttgtctctaatcatgaccttcaaccatatgttgtcaatttccctatcctatatatcagatagatatgggaataaatccatatatgtcgggtcactttcaatgataataatggtataattggtctgattctggtaataatgatttatgtctgtaaataaaattctagaccaagtctaaactttgactttgtttccaattcaaagcctttcctttcctcacattgtcatgcctcttccatctgctactcctccttcagctatcccctctttttgctctgtcactgagggcattcracattttcaaggtggaaagatcaattgggtcttatgttcacatatac

SEQ ID NO: 143032 - DNA, 189 bp, Homo sapiens
tgagatgctctggaacagggcagagctgtgagcaggctcagtatggcttctggccgtgcagcacgcacacattttaactgaaggtggcgatgttttacagggctgatctaccgtsaaggacaaaggactctgagttactgctccttggtaagagagaacaggaggctgacagcacaggctgaaaaatcc

SEQ ID NO: 143033 - DNA, 438 bp, Homo sapiens
ccacagaaggtcaccaacttcattttgtaattaaccaacataagcaagaaaggwctgagagcagagaagcttgaagagatggctgtaagaacagctggaataaagctgcatgctgccaagtctttcaagaaacagactaagataaagtgagaaatccaaagtggagtgatcagcaacattaataaaatactgaacttggcccctctaaggatttcaatttctgaatcatcatctccaatccagatgtcaccatatgtcatcttctttctctctgaaaggaggaaagacatccagaaacagacaaagactaaaatagctaaagaaagaatatcaatcagaacgaaaaaaattttcccatagaaaaactctacctgcttgtttccaaagacaactgggcaatccatgtacatcctgttagtagacaagggatctgtatca

SEQ ID NO: 143034 - DNA, 507 bp, Homo sapiens
acaccaaaaccctaggccagaagaaacaatcttaaatctgtttaaacaggtgctcagttcttactatcatcaacagcaaatgactataatcatagcacaaaataagaagtatatgaacaaggaaaacctattcataagtctgcataacttttataaacctgggatggacacagctcaatctcagagcaggtttgcagtcaagaaacagctgcccacagccaaaagtaatttcaaaacaactgaaacccttcacttatgtttcttaagaaccataaaggggatctacattcaaagaccataccaatatttattaaaacccctttcgtcttctacccttcccccgcaaacttgctgccaatccaacacattacaattcatgattccccataacttgtctcaacactttattctattttctgtctgtctttaccctctcttttctatatyactttattattcagactgaccttacctctctcctagcagaaaagaatccctacttacagg

SEQ ID NO: 143035 - DNA, 600 bp, Homo sapiens
gctgcatcaggttgaagtgttcattttcttgattgagatcttagaaaatgtgtttccctgctctttagagtccagtttacattacatcctgtgaaatggattaatcwgcaagcttttcaattcaaactgccataccaaccttcactttcaagcttttagcattaaaccttaacaaatattgaaaacaggaggtttatatatttagcatcaccaactatgtcataacagcatctacaggacaaatttcatgtcaacttattttaggtgctggcttaaatccctttaatcttagaacatcacatattttatctttgtaggtttagggtttgtcacaaaatttgcatgcacagggttcaaaaatatagcgaatttgcaatgcttttaaatgtacaacctacatgactttaatgccagacaccaagtttaaaaagtactgtttccttactcattgtcatacaagtaacactttatattatttaggtataaaatttttttcagaatccattctcagacacattacagggtcatttattacttttacataactgaactttctaaatccagcacatctaaattttcagatgtgaagcagtattaata

SEQ ID NO: 143036 - DNA, 451 bp, Homo sapiens
gttttggctacaaaacaatattgattttaagttgagatttattttaagttgagattacattttaattcctgtctcattaaattaactggtaattcatgaaactcagtatagtgtttctaaatttcagctactcatgtaccatcttcacagtttaccgtagccctgtattacctataatgttactttgtctttaaatgattctcctttttacataaatttaaatgtaaacaataactattacatataggaaagaaatattgcttctcgtaaataaaatatacacataagcatacgctaaattaaatatatarctgttaaaggttaatgtgataaatatttgtgtatatatataatatatatatatacacctccaaaaattatctcgattacttctcatgtgtgtatgccacactttgccaaatagtagtgttagcacagtcattatacacag

SEQ ID NO: 143037 - DNA, 571 bp, Homo sapiens
tccagtatatcatgtgtcttgccctgacttttcatcgaggctttaaagtctgagtccttcctttgttgaacttttatgggatttacagtggttttctacaatttatagcctacttgcagtgttaacagtaactaattggtcattttaattytgtctcttcgcaatagagggttctgttttatgtcactatagtttttcccccacagcatatagtgcacttctgggcatacaatttgtattcattacatacagcatatagtaaatacaatgtaaaatatctctaattactgtgtagcctttcttaggttggttaagagaattaagccttaatgccctaagcctaaaacatttatttaatgaatgaatctctctcctgtgcatccaaaatgaaactagttatgtcctatctttgagagaattgagaaagtagttacatcattttctgtgttctatggttcagatgaggaatctggttgagaaagccttatttagacatagcctcctatagtttatcagtaagaaaaaatgttgggtatgttttgtactacatggccctgaaacacagctcaag

SEQ ID NO: 143038 - DNA, 324 bp, Homo sapiens
tcaaagcaattgatgcaagggtgcagcattgcttttaagagactgctgagactatgtcacacagggaatggcctccttatagaagtgctagaaagtcattttcaaagagatgaaggttcacagtggcccttcttcctagaatgcccttcccttacttggccawctgcaaaagcctaatcaccttttaggaaacgtcaagtgtttttgacctctcattcctgtgtagaactgtccctcctctgtacccttaatatttactacttagtttattaatttcttgcctgttaataacacttttcacggtaaaacaaatatctattgctt

SEQ ID NO: 143039 - DNA, 550 bp, Homo sapiens
ggggggaaactgtttagaagccttttccagcctctagtggctgaccttagtcttggcttctggctgtttcctccatcttctaagcacatcgctccatcctctgcttctgttatcacatcatattcttaccatataagggcccttgtaattacatctgacacacccagatatccaggataatctacccattttaagatccttaataacatcggcaaagtccattttcccatattaaggtaatgtatggaaattttgcggggtggtgggggacaggcttcattcagtctatgacatgtaagaggttatgtaagaggtgaaggatgaaataaaagctgggcaaggaaaagcagcaacaaagttcctgatgacataaaataacaaaccaagtgcttcatytagactacctgttcaattcttgtagactgtgactgtattgaatccccttccctgcactgtcagggaatacaaggcatttggatctgatgtgaatacagaagctgatgtgtcctagtagaaaaaaaaaaaaacccacaaaatcactatatatgac

SEQ ID NO: 143040 - DNA, 550 bp, Homo sapiens
ggggggaaactgtttagaagccttttccagcctctagtggctgaccttagtcttggcttctggctgtttcctccatcttctaagcacatcgctccatcctctgcttctgttatcacatcatattcttaccatataagggcccttgtaattacatctgacacacccagatatccaggataatctacccattttaagatccttaataacatcggcaaagtccattttcccatattaaggtaatgtatggaaattttgcggggtggtgggggacaggcttcattcagtctatgacatgtaagaggttatgtaagaggtgaaggatgaaataaaagctgggcaaggaaaagcagcaacaaagttcctgatgacataaaataacaaaccaagtgcttcatttagactacctgttcaattcttgtagactgtgactgtattgaayccccttccctgcactgtcagggaatacaaggcatttggatctgatgtgaatacagaagctgatgtgtcctagtagaaaaaaaaaaaaacccacaaaatcactatatatgac

SEQ ID NO: 143041 - DNA, 560 bp, Homo sapiens
agaaattcatttcttgtctgtgagctctaactataatcaggtgattaaaaatgagtcatcactgactgaagcataagaagcctccaggaacagaacaaattctggtctcgtgcagattccaacagctgctacgaaacctatatttaggggtgtttgtcctggggtgagcatacagattttggcttcttggcaaaaattccttttgttcccttttttctagaatcatgtctttttcccactggctttccccactctcttgccgtagagaacagttgtatttaaatctgaaatttcagttgaaaaatacgtggtctttatggtgtgatcactctggttctgtgtggtctccaacaaatgatcctttaaaatcatccaaagatgaggcacagatgaatagtccccaagaagcagatcctccttcactaaggaacaaccctacaggtatcaatagtatgaacgtattagcacragagagaactactgatatgtctacaactccaactctactctgaagaacattttatgagagctgcaacataccttgtgtgccccacaggaaa

SEQ ID NO: 143042 - DNA, 586 bp, Homo sapiens
cacatggctttgtctttttaaagaagctgatccttttgaactcttgcctctgggctaccctctgtgaagttctctccatatgatgatcacatggyttagtctacatttttgacccagttctggtctgttttgtgtttactgtgttctggagtgaaaaccactttgtgcataattgatacttgacagcctgtgcccagcttctacccagaccagttaggacatgcttcttcctgacacagtatggacaggtcccaaacagtggtggctgtgaccaggtgatggcagccttagctttggggttagctgtccctcacttagcctctaaaaggtaatattcaagggaaggagctgaggttagggtctgacataagagattcctttcctccttcctaaagtaccaacaggtctaaacattctcatctccgaagcagtgggggcagttatggggctggagttataaaggcaacatcagagacacaacaaaaacaggaatgcccctcctccccacatcaggccgtccacatcttcagaataggattggtgtcttggtcagggttgaatgtccagcacagtatcagtaatattt

SEQ ID NO: 143043 - DNA, 339 bp, Homo sapiens
gatggtgtctatatggtggctaacatacccatgggacaaaacaactggcctyactgatttttgagccaaacttcactttgggggatttggtggagtttttttggcctccacaacttcaagtatcccagaatccacctgtgtgcagtttgagctctatcctaaaccatgaaagaggccaagagaattgtaggcttcaaaaaaaaacctggtctcctccctcagaactcatcagccatgctggactctttcaccaatgcccatgaaagcccattttctcattccgacttttattttcattgcagtcttttcataggttagcaactaaaatgaatattcact

SEQ ID NO: 143044 - DNA, 396 bp, Homo sapiens
atattgacatggttaaattttcaggaccccaagttctttagggatggactaaatggctagtgcatcattgcctacaaaagtgtatttgtattgccatcccttaactctggagatcctccataagccaattttcataaacccatactctttatcacagtgattgattcagagatagacattgacccaggcctaaaccagtcctctggctatagggwttagttcgtggacaggtattttactacagaagtccgatcgaagtgagatttaggtctttatttgttggttgggcagaaagaagccttccttcttttactgaagttaaataaataaaatgcatattatcttattgctgctgataactattttgcagccatggaaagaagtagtttaggaaga

SEQ ID NO: 143045 - DNA, 469 bp, Homo sapiens
tcacctcttccaccctagccctcaccactcctgcctcacactcaccttgatttcctccgtggcctagaaacatcccagctctttcctctctctgggccttaccctcaccagtgtgtctgcttggctgctccccatggggccattctgttctccagccagacctcacgccctcctctggaaaacctccctgtccccgtgggttggggcctcttgcctgtgcctcctccatgttctgaagctctgcttatgtcactgggattgcttgtyttaggtgcctctttctcctattagaactggagacatcggagggcaggaatggccgtgcatctctagctctggttatagtgcctgtcatatagcactgttcaatatatttacttgctgaatgaaagagcgcataaaagatgatagctagaattatgagactgctaagaaagaagggaagtggagggaggaggaggatcttgag

SEQ ID NO: 143046 - DNA, 534 bp, Homo sapiens
catttatcttgaaatggtcgacacctgcagcarcagacctcaatgtgtggtacagatcaagcaattcaactttttcttgtaatgtcatgactttgtttcttggaacacttccagcatcactagtggcactttagcatgggtcccatggtattatccaaggtttacagtattgtactaatcataatgaaaaacatgtaagaactgtgaaagagcactttttactgtaatacacaacttactggagagacaaactgctcacgtggaggtttagtgtcacacagcattttaagtagatacttgcaacacttgagctcactgagattgcaacaggtgaccacaaaattattacagtggtacagtatgtactatggttttatgcagttatgatttaatattagatcttaatgtttgtttacatttctcttaactgagaatggcaccctgtacagtctataagtgtttgtaagttttgataaattttaactttttataacagattcgtgtatattatataggtgtaaataataaaataga

SEQ ID NO: 143047 - DNA, 564 bp, Homo sapiens
ggcatcagccccaaggaggcttctgcagaaactcataggttcttggcatgagctggccagtctagatctagaagttctgggggaaggcagagaaaattatttccactctttccccatttcctatggaagcccacctcagcattcagctctcctctgtttccttttctcttctagtctgtctcctggagctcttcggaagtagcttcagctcatggctcaaacacagccctgtggccayggcccagcatccccacaatttcctggcccacaaatgggtttcctgacagcaagttctgcagcgtagtctcaggaatgggcaactacagacatttgacccagctgagaagcttcctgaatggagtttatacttcatttaacaaaatgttgttgagggagggcctgctttgtgctcagcatagagcagggtgctatgcaaaaacaatctcttagatactgattgtattttttattctgctttcaagatccagcttacatggcacctgtcctacaaagtctttcttaagactcctcatccccctgcaaccctgggttcccatggtttaa

SEQ ID NO: 143048 - DNA, 564 bp, Homo sapiens
ggcatcagccccaaggaggcttctgcagaaactcataggttcttggcatgagctggccagtctagatctagaagttctgggggaaggcagagaaaattatttccactctttccccatttcctatggaagcccacctcagcattcagctctcctctgtttccttttctcttctagtctgtctcctggagctcttcggaagtagcttcagctcatggctcaaacacagccctgtggccacggcccagcatccccacaatttcctggcccacaaatgggtttcctgacagcaagttctgcagcgtagtctcaggaatgggcaactacagacatttgacccrgctgagaagcttcctgaatggagtttatacttcatttaacaaaatgttgttgagggagggcctgctttgtgctcagcatagagcagggtgctatgcaaaaacaatctcttagatactgattgtattttttattctgctttcaagatccagcttacatggcacctgtcctacaaagtctttcttaagactcctcatccccctgcaaccctgggttcccatggtttaa

SEQ ID NO: 143049 - DNA, 649 bp, Homo sapiens
gattaagtgaggcaagttgggccacccatgtgccactttagcactggcttccttgcaagagttttattgtttatgttgttgttttctcattgtcactatagtttaggtttgtcagcatttgttgagtgtaaacatagagtaaatggcaatttggaatcacctttaaaaaaattaaaacataaaaataaaaataatgatgcatttagttgagtccaytgaggcctgtgcatcaccttttccaaaaacttaaaatggaagttacctcccaggcaagccaaggatgcagcattaagaagaactctttgtagtctgaggacagactcacagtcagtaaatagcaggacttgatgtggtgcaagtcatgccagacaaacttaattgctttttttttctaatttatagaaatgccagatgaggagataaaaggaaggggtgaatatcatgctctcaattttaggaaagtgcttgaggatagtaacttgggcaaggttctgagtaaaaactaaataataaccattcaaatgggcctggtcgggggtcctggcctggagacccccactgcaggggtgcccccacattgcccagagcccaatttttaatgaggtttcagtaaagtctgctaaaaaccttccactctgaatggttcaga

SEQ ID NO: 143050 - DNA, 581 bp, Homo sapiens
tacaacatccctgtgaggtggatgctactattactcccaccttacagacgagaaaactgatgtccaaagtgcttgagtaacttgcccaaggttactagaaagcaagtgacaaaactgtaattcaaatctgggccctctgcctccagcgcccacctatgtgaccacccaagtcatcctgtagttctgtctctccaggggcagaaactgtccaaatcctgccaatgcagagcaggcactcatttygggtagaatgtttcttccacagctttgtagaattcacatctgtcacagttaagaagccatagctgctctttgtcttgcggggagactttcaatccctcgcaaaaatccagattctacaagggcttcaggaggcgtttcttggctctctccccatttgccccacccagtttacttcccccttctctggccttgttgaccaacctcctgtcttcacaggtcagcccaggagcagctcccatgccaggcaggtgacttcagagggttgggactgtcaaggagaagaatggctaactgcctctggctgatgccttaaatgtcctctttaggctgcttgttca

SEQ ID NO: 143051 - DNA, 592 bp, Homo sapiens
attgggtgtggcagcgtggaaatggactgaacctggatttgtgaaatgggtgtccccttatctccaccacttcccagctctgtatctcacttgcctcacctgtgaagcaggacagataataacacctggtcttcttccttcacaggagcgtctgagtagcaaacacatttctccacgtgaaaatgctccaaaaagtatacatcactatayaaacacaacgtttactattattattgtcatctaaattctttagggggtgaaagaaaagtttggtcattatttcattaaaacgttattcaacaaatatattctgagtgcctactatgtgccagccattgggcaaaacagttggggtatttgagggagtaaaagggacaaaattcctgctcccacggaatttgattatatttccttatgatctagttgagatgacaaaacccacatgcgtaagagccaactgtagaacaaaaaggcatattgtatgttggtgaactaaataatgcattttaacttacaacttccaattacctgagtacctagtatgctatcatgtgtaattttatttaattctcaaacaactctgcaggctaag

SEQ ID NO: 143052 - DNA, 592 bp, Homo sapiens
attgggtgtggcagcgtggaaatggactgaacctggatttgtgaaatgggtgtccccttatctccaccacttcccagctctgtatctcacttgcctcacctgtgaagcaggacagataataacacctggtcttcttccttcacaggagcgtctgagtagcaaacacatttctccacgtgaaaatgctccaaaaagtatacatcactatataaacacaacgtttactattattattgtcatctaaattctttagggggtgaaagaaaagtttggtcattatttcattaaaacgttattcaacaaatatattctgagtgcctactatgtgccagccattgggcaaaacagtkggggtatttgagggagtaaaagggacaaaattcctgctcccacggaatttgattatatttccttatgatctagttgagatgacaaaacccacatgcgtaagagccaactgtagaacaaaaaggcatattgtatgttggtgaactaaataatgcattttaacttacaacttccaattacctgagtacctagtatgctatcatgtgtaattttatttaattctcaaacaactctgcaggctaag

SEQ ID NO: 143053 - DNA, 558 bp, Homo sapiens
atttatactgtttggatgagcttattcagacccaaatctaactatttccagtgcccctatgactgccaggcatgtgtcttcaggctcctgaggagasactcatgcatcctctggctccctggcatgtgcacctgctgttggcagcacctggggcaaaccccagctaatatcacttcccagcttctttagattaaaagcaatgtcctgaagttgcccttcaatgctgtacatgagctggcccttttctgtgtctccaatgtcacctctggccaccccctctctcacttctgttaactctccagctccttcctccatagggccttagtgctcattaacacccctgctggaatgttctaccccaagacttcaagtaccaggctgctgcttgtcattctgactcacctaaatgtcaccttgctaagaagtcttccctgcccttcccatctccactcaccgacttcctatctcatggccctgttcggtatcttcacagcattccccactgtctgaaatgagcttgtttgtatatttgctcactagtttatcccactgcctctt

SEQ ID NO: 143054 - DNA, 632 bp, Homo sapiens
tctagtgtttgttgtttgtttgtttgttttgactctatggaccaagaatgatcttaggagactgtccatatatttcagtgcaaagacctcataatcaattagccatccctaagatccctatggatccagaccattctaattagcaaactagtctgctgcttattatggaaccatgaagtattgggcattcttagctgcttacccaatggccattccccactttttccttgttaaccgaaatgcatttttttttgtagtgcagtaaaatgcctagctaaaagttctcatattcccttgmaattaggttataggtatgtgacttagattctgaaaaatcagacacatctatgtgaaaatcagacttggaagtgagcaagatgaagaggaagctaaacgcagtggaactgatacctagcaagcacagtggtagagaccgccagctatgtaagggggagagtgcagagctcaggcatccagtcctgagtgttaccagtgccagggggtggcagcgtctcactaaagctgccccacagccacgggctttgttcaaaggcatcttgtgtactacctcatatccttttataaaatctcttttctgtttagccagcatggattctgatgcaattaagaac

SEQ ID NO: 143055 - DNA, 397 bp, Homo sapiens
gtccaaaatccacacaatttttaacttcccaaaaacttaattattaatagcatactgttcattggaagcctttctgataacataaacagttgattaacaygtattttgtattttacatgtattatatactgtattcttataataaagtaagctagagaaagaaaatgctgttaagaaaatcataaggaagagaaaatatatttgctattcactaagtggaagtagatcatcataaaggtcttaattctcatgatctttgccctgagtaggctgaggaggaggaggaagaggaagaggaagggttggtcttactgtctcacaaatggcagagatggaggaggtagaaggggaggcaggcacattcagtgtaactttagggaaatacatcataatttct

SEQ ID NO: 143056 - DNA, 397 bp, Homo sapiens
gtccaaaatccacacaatttttaacttcccaaaaacttaattattaatagcatactgttcattggaagcctttctgataacataaacagttgattaacacgtattttgtattttacatgtattatatactgtattcttataataaagtaagctagagaaagaaaatgctgttaagaaaatcataaggaagagaaaatayatttgctattcactaagtggaagtagatcatcataaaggtcttaattctcatgatctttgccctgagtaggctgaggaggaggaggaagaggaagaggaagggttggtcttactgtctcacaaatggcagagatggaggaggtagaaggggaggcaggcacattcagtgtaactttagggaaatacatcataatttct

SEQ ID NO: 143057 - DNA, 501 bp, Homo sapiens
cgcactccagcctaggcaacagagcaaaactccatctggaaggagaaggaaaaaawatatatatatatatatggaggctgtgaagtcagggaagcaggagggaggtgggctagagtaccctgtgtgaacacaagaccgacctggaggaagccaacaggacggacaaatacagtcaagggccagcactgtggtggagcctggctgggaggggtcagacacacctccgtttcctcactgaggactgggattgggagctgtttgccggtgagaggcaggaagtgggatgccctggcgtggggggcgggccctcttttccctgggggatgggaggagaaggagcctaagaggatgggtggggaaggggagggagcagggattccccagtggcccagggttggggggccttggaagtgagagctctgtgggggcttcagtccccagagtcagtgcctcaggaggggccatgcctttcagggaccaggttctggggtcccaaggatg

SEQ ID NO: 143058 - DNA, 501 bp, Homo sapiens
cgcactccagcctaggcaacagagcaaaactccatctggaaggagaaggaaaaaatawatatatatatatatggaggctgtgaagtcagggaagcaggagggaggtgggctagagtaccctgtgtgaacacaagaccgacctggaggaagccaacaggacggacaaatacagtcaagggccagcactgtggtggagcctggctgggaggggtcagacacacctccgtttcctcactgaggactgggattgggagctgtttgccggtgagaggcaggaagtgggatgccctggcgtggggggcgggccctcttttccctgggggatgggaggagaaggagcctaagaggatgggtggggaaggggagggagcagggattccccagtggcccagggttggggggccttggaagtgagagctctgtgggggcttcagtccccagagtcagtgcctcaggaggggccatgcctttcagggaccaggttctggggtcccaaggatg

SEQ ID NO: 143059 - DNA, 233 bp, Homo sapiens
agctcttaggggagatttcaaggaccctccagaaccagggctcaytgatttggtggaaaacaaggtctgccgtgaaatcagaacgtcggtccctgcccagggctttcagacctcccccagtatggaaagagaaagggctttcagactgtcgggtggggcccgggctagggtgattttggcgcctccagcaggccggagggaagcagcttgcgggtgggccctccctccagatc

SEQ ID NO: 143060 - DNA, 264 bp, Homo sapiens
ccccaagccagcgctcacacaaaagcttgagcaagcaaggtgggatttttgatgttgtggaggaggaggcaaggcatttaccttggggacctcaacacaaacaacttgaaaatccccttggcgtttctgttctccccaagtcccagctgctccaccyggggaggcctgaccttcccccttcccagcactgctggcctcactgctcacctccaatacccccatttcccaggaacttccactcctcgcccctcactcctgcagaac

SEQ ID NO: 143061 - DNA, 360 bp, Homo sapiens
cggcctgctagggcgacgagtatgtcgggagcgcgccgcccccacccaggcgccccgatgggtttttccatgactgcatccggcctcgggccgcctttgttcccgccgtccccggcctgcccgcgaagcggcccgcctctccctgcgcgcctgggattttccagggctcaattggagcactggcgagccgcctccccgcccccagcctcccctgccccggctgcccccgagtcctgtttcrgggatcctagccctctctccagacgcgctgctctgtccactgtccccgcctccaggacctgcgtcctcccagccccacatttgtgcgcaaagttgacggtcaccgggcccgcgcgcttc

SEQ ID NO: 143062 - DNA, 451 bp, Homo sapiens
gggtaatttataaagaaagaggtttaattgactcacagttctgcaggctgtacagtccttgagaaacttacaatcatggcagaagacaaaggggaagsaggtacattttacatggctggagaaggaggaggagagtgaaggaggagatgctacacacttttaaacaactgatcttgtaaaaactcactatcacaagaacagcaagggggaaatctgcctccatgatccagtcacctcccaccaggcccttcctccaacattgaaggttacaattcaacatgacatctgggcagggacgcaaatccaaaccatatcacagtgctaaagacagataccagagaaaggaagagattatgatcacttgaataagaaagcagcaagcatctctagttgagaaattgcatacattggcctagagaagttgtatcccccccaaagttttcagaggccc

SEQ ID NO: 143063 - DNA, 463 bp, Homo sapiens
aagaatggaaagagaatttaaaagggaacagagcttagagacttatgagacagtatgaaacagtgtaacgtacatatcactggatatccaaaaggagaagagagaatgagacatgaacatttttttgtaaaaaatagtggctaaaatattttccaattttagtgaaagacataaatacgcagattcaagaagctcagaaaaggaagttaaattgtccccatttgcagktggcatgatcttatatttagaaaaacccagactccaccaaaaaactcttagatctgatgaatgaattcagtaaagttgcagaatacaaaatcaacttataaaaatcggtaacatttctatacaccaatgatgaaatagctgaaaaattaagaaggcaatcccttctataatagctataaaaataaaattcttaggaatgaatttagccaaaaaggtgaaagacatctacaaggaa

SEQ ID NO: 143064 - DNA, 546 bp, Homo sapiens
gagaaaacagactcaaagggattaaatcattcatacaaggccacatacaaagttagtggggaagccatactaaaattcagtatttatgcctccacaccttaagccaatatttactgaattaagctgaattgcttccccagagaaactttctagggcaaagactttcatctaaggtatagaatacagatcaaaatctgtagagtacatgtttaaaattacatatgctctttcctcctttgagatttactacatgaaataagaaatgtcagttatggagatatgttcccccaaatgaatattgtggaagagtaagrccaaaactttttctaaaatcatgtatttcacatatggtttagtagatatttgataggcctttatagaaaaataaatgatattattttgaagaccatttgttgctgcctatgaataacttggtaatatctggattctatgttggatcagattacccatcccaagactcacgtttgtatttttcattcctgtgtgtgcttctgtccaaactttgccaaaaattatgccatcatt

SEQ ID NO: 143065 - DNA, 507 bp, Homo sapiens
ccaaatctagctttataaataaaaggagattctggaaggtttacaagtacacagcagaatggtttaaggaggaggttcactgtcctacagtcatcacatgctaaagttgaagctatactttcagttcaaaagttaaaccaaagctctttatcaccataaatcatgctccacagtaagaagtatagagaaaagagaattacagaaccaagagaatcaacacaaattaaaggctttttgttttgtttttatgtatcaggagccaactttcatcttgaccacaaagatctcagagtcaacaaactgtgccctgcattttttaaaaaaggtattattaaaagcattgytttatttacttgaacctcaacagacttaaacaatgaaaatgaattagggaatacttacccaagtccatatcttaggttatctttataaccctacacacgaggaattcccttaaagcaaaagtgatgtgaaccacacctaacctgagtactctctccccacttt

SEQ ID NO: 143066 - DNA, 546 bp, Homo sapiens
gaagtctcaccaaattgttgacttgttcttacctggtggcttacttatactaagaaggagttttaagagacagtaattcaaagataatagtacaattcagaaaagcattctaaagctctattgctacttctagatactcaggtaatcttttggtctttctgttatattgtttccttggaaaaggattcaatctctctgttccccagctcttttttctcttcctactaaataagcaaaggtcaaaacttggaagatgtatttycctggaaagaacattcaatcgattttattagttaatataaaacatttatgtgttatgataggatggaaagcaaaacagtatttagggaaaacagttggtaatattgctcaaatcatgaagataataaagcttagcttctgtgtaggagtgcgactggtcacaggttatcacaagattaagtgttctgtgcgtgcacacccatcttttcttgatatttagtgcacttcacagactggccatttcacaatttgattatcacgtagctttgaccataaccagggcac

SEQ ID NO: 143067 - DNA, 577 bp, Homo sapiens
taaaatggatcccatccaaagcagccattaccatccatcagaggtaggaagagagacgtctactaccagtcagacaactcacagtccatggtgtgactgagctgtggcagcagccgtggcattggccttgcaacagtgtcagggcatgcggtccagcctttcttgtgatttggctctgagttagattgatttatatggttggtttaaggaaggctaagaaaatctattcttgatcttctggtctcattgacattctctgtcactgtcattgttattatcaccaccaactaccatcaccaccaccactaacatgtactgatgctcacaatacgccatgaaccggactaaacttttacttaatttccttatttaatcataacgccaactttatctcataggaactactatttmtcacacttcacagatgagaaactgaagccctagagaagatacccgctatgaagctttggataagttacagtggcagagctgaggctgaaaccaaggctcagtctccaaagagcatgttctaaacttgtctgttatattgctctcctgaattaagatgattgttgga

SEQ ID NO: 143068 - DNA, 598 bp, Homo sapiens
gctttaaggattcagaaaagctttaagacatatagttcctataagcaaagcgataaaggggtaaaaaaaaaatgtagccaaaatgttaaatcactgaagatttcagtgatttaaaggctaaatttaaaggctaaaaayacatttcattaaaatagatcacataagaaataactgtgtctagacctattaaaaatgccaactctttgcctttcaattttgagtctaaacaggcttctttgtattaaatgaccactatgaagcagctaatgcaacttctgaaatgttaccaaatttataaacagaacaccaaatatgtgtgggtcaaagtccacatacaaatctacactactgctcctttggtggggagggaaatggtaagcacagaacagtttatcaccccataaaaggttcatttgtagtcttacatgctgtaacctatattttaataaaaccatggtccatagctggtcaataacctcttaatcatggtcaaactacatgaccattatgtccacaaattgttagttttcttgctatatttttttaaaaaacaagcagcccttcctgccgtagttattttccaagaaatagtaatgag

SEQ ID NO: 143069 - DNA, 598 bp, Homo sapiens
gctttaaggattcagaaaagctttaagacatatagttcctataagcaaagcgataaaggggtaaaaaaaaaatgtagccaaaatgttaaatcactgaagatttcagtgatttaaaggctaaatttaaaggctaaaaatamatttcattaaaatagatcacataagaaataactgtgtctagacctattaaaaatgccaactctttgcctttcaattttgagtctaaacaggcttctttgtattaaatgaccactatgaagcagctaatgcaacttctgaaatgttaccaaatttataaacagaacaccaaatatgtgtgggtcaaagtccacatacaaatctacactactgctcctttggtggggagggaaatggtaagcacagaacagtttatcaccccataaaaggttcatttgtagtcttacatgctgtaacctatattttaataaaaccatggtccatagctggtcaataacctcttaatcatggtcaaactacatgaccattatgtccacaaattgttagttttcttgctatatttttttaaaaaacaagcagcccttcctgccgtagttattttccaagaaatagtaatgag

SEQ ID NO: 143070 - DNA, 598 bp, Homo sapiens
gctttaaggattcagaaaagctttaagacatatagttcctataagcaaagcgataaaggggtaaaaaaaaaatgtagccaaaatgttaaatcactgaagatttcagtgatttaaaggctaaatttaaaggctaaaaatacatttcattaaaatagatcacataagaaataactgtgtctagacctattaaaaatgccaactctttgcctttcaattttgagtctaaacaggcttctttgtattaaatgaccactatgaagcagctaatgcaacttctraaatgttaccaaatttataaacagaacaccaaatatgtgtgggtcaaagtccacatacaaatctacactactgctcctttggtggggagggaaatggtaagcacagaacagtttatcaccccataaaaggttcatttgtagtcttacatgctgtaacctatattttaataaaaccatggtccatagctggtcaataacctcttaatcatggtcaaactacatgaccattatgtccacaaattgttagttttcttgctatatttttttaaaaaacaagcagcccttcctgccgtagttattttccaagaaatagtaatgag

SEQ ID NO: 143071 - DNA, 442 bp, Homo sapiens
gtagcaggtccttttcactggtggtaagtggagtattgatcatctctggtatattgtaggtagtgtgccgttgcaattcttaggagtttcatgagtgatgggtttagacgagatatagattaagaggctgcattgacttttgtgatatctctgttatttgagagagatgggggaaatggtcactttaaggatggggaattagttgtggctgagtaatactaacagattgcagagaggtcagccaaatacaaagttaaggcagtgagagaaagctacaaggtctccacagagcatataaaagaccctcatctttggctgccaaagagaagactatcctaatctctaagaccaggaccctaaagagaaccagaacctcaaaattgtccraattttcacccttcagtctacaccagtgttagagaaggaagggaaccctaaaact

SEQ ID NO: 143072 - DNA, 454 bp, Homo sapiens
cactgggcccctgtatccccggaactttctgtgcctgcagaacactcacttctttctttcttgcaaccctctttgcctgaagactatctaggtctcagttgaggcatatggcttgcagaaatatgcttgcccaacccaagatctgccttaacgttcccccatgaccatgagagcaacatctagtgtcaaaattgtctaatgacatgactggggaagtagwatccggctaagggggagaagagattattcacatgaagagttgcaggactggctaaaatatactgtgagaaagtggtagtacgtgattgaaatggacctcgacggatctgcgtgcatgagtgggtgtgtgcgtggaggggacggatatcaaactgtatatcgtataaggcagcctttgttgataggaatccttaactcagcaacaccctggaaaggactcctaggccagtcctat

SEQ ID NO: 143073 - DNA, 446 bp, Homo sapiens
ccctgtatccccggaactttctgtgcctgcagaacactcacttctttctttcttgcaaccctctttgcctgaagactatctaggtctcagttgaggcatatggcttgcagaaatatgcttgcccaacccaagatctgccttaacgttcccccatgaccatgagagcaacatctagtgtcaaaattgtctaatgacatgactggggaagtagtatccggctaagggggagaagagattattcacwtgaagagttgcaggactggctaaaatatactgtgagaaagtggtagtacgtgattgaaatggacctcgacggatctgcgtgcatgagtgggtgtgtgcgtggaggggacggatatcaaactgtatatcgtataaggcagcctttgttgataggaatccttaactcagcaacaccctggaaaggactcctaggccagtcctat

SEQ ID NO: 143074 - DNA, 405 bp, Homo sapiens
agccaggtttaaattatgagtatatttaaaataacagattacaaatgaacattatggtttttttcaatgacttctggtttggggggggtcccagataattagcatgcactacagaagagtttctcttttcatctttgaatgtagagcaagagatgggtgtgaggggcatgaggtcacaagtcccagctaggctacaagagttgttgatgttggtggattgacctctcttgaccttggtcccctctgagaatgggaagaacagcattccctttatctgtctcctgctttgcctgaagcttgaaagaaataatgtrtgtgaaaacattctcagaactataaagggcttatacttatttttaaaatatattctccaagtagatattgtttttccctaatcaacatctc

SEQ ID NO: 143075 - DNA, 551 bp, Homo sapiens
gtttctattaatattgttctcacaatattctgctgaaaaagtcactgaaatacttctgaatttgatgatagtctatgatgcccatagtgcccaagtagccctacatttttaaacattcctccctattactttagataacccaatagttaacaatgaaagctattattttggaagatattcattaggttgcagttaactatataattttatacctggtaatgttcttatgtttacccatacacaatcttatctggtaaattattcttctttcaatctcacaactttctggaacttccataaaatcttaccatcatttttaacagtgcatgaaacaatcattttcaaacaaacttgtactcactgaactgctaagcaaaatgaacttcagcattacatttgtattgctttatgtgtataaaaccacgccagaagtttytgggggaaatgggagggattgcaagaaggttttacttggcgttctgccatattcaccaatctactgctccttgtccctatatgatcagccttaccttctgctcctctatctgacc

SEQ ID NO: 143076 - DNA, 513 bp, Homo sapiens
atgttctttattttaatcaatggtataattagataatcacttgcccaattcaraaacctaaattccttgaggtctgcttgcccctcagccctgcattttcaatcccttaccaagtcttattgattctatcttctaaacactttctgaaattgttcattctgtctctactacgatatcctagtccatctaccatgattccttatgcagaccattgcaataaaccccataatttatcttcttatatccactcttgccattatctaattttatgtacatttaattcagtctgtctattatatctcttgtactttttcttcacatcaattattataattatatataagtacttactatataattatatatattctgtgattatttgatacacatccattttcctcatttgaacataagctccataagaaaagagaccatgtctttatttttgctgtctacccttagtccaatgcctaatgaataatgggtactcaatgaatattggttgaatgaacc

SEQ ID NO: 143077 - DNA, 514 bp, Homo sapiens
aatttttacaaaatatccataccactaaacaatgacaataaagaatcatgtgtgtatatctaatagttattgcatgggccagactgattaaataatttttaaatatgaatctaattgcatttagactaaatatggctgagtgggtgattgagattgaagcattattaggtaattgataatgccattaatagaaacaaaaagtactggaaaatgaatgtgcttgagggaaacaaaatgagttcagttttaaatatgagtttggtgggygtgaccaccaaacaactgaaaatgcaagaatgggtttcaagagagtggtgttgaacacacaaatttcgtagttatgtacatattacaagtggtagaaatggattatggccttatgggagaaattgtaggaagagaagatagccatggaatggatgtatgtaaaatcgcacttagaggctaaggaagaataaaagagtcactgaaagagtgaaatgcaagacacaaatgagagcagcctttgtctcag

SEQ ID NO: 143078 - DNA, 514 bp, Homo sapiens
aatttttacaaaatatccataccactaaacaatgacaataaagaatcatgtgtgtatatctaatagttattgcatgggccagactgattaaataatttttaaatatgaatctaattgcatttagactaaatatggctgagtgggtgattgagattgaagcattattaggtaattgataatgccattaatagaaacaaaaagtactggaaaatgaatgtgcttgagggaaacaaaatgagttcagttttaaatatgagtttggtgggtgtgaccaccaaacaactgaaaatgcaagaatgggkttcaagagagtggtgttgaacacacaaatttcgtagttatgtacatattacaagtggtagaaatggattatggccttatgggagaaattgtaggaagagaagatagccatggaatggatgtatgtaaaatcgcacttagaggctaaggaagaataaaagagtcactgaaagagtgaaatgcaagacacaaatgagagcagcctttgtctcag

SEQ ID NO: 143079 - DNA, 514 bp, Homo sapiens
aatttttacaaaatatccataccactaaacaatgacaataaagaatcatgtgtgtatatctaatagttattgcatgggccagactgattaaataatttttaaatatgaatctaattgcatttagactaaatatggctgagtgggtgattgagattgaagcattattaggtaattgataatgccattaatagaaacaaaaagtactggaaaatgaatgtgcttgagggaaacaaaatgagttcagttttaaatatgagtttggtgggtgtgaccaccaaacaactgaaaatgcaagaatgggtttcaagagagtggtgttgaacacacaaatttcgtagttaygtacatattacaagtggtagaaatggattatggccttatgggagaaattgtaggaagagaagatagccatggaatggatgtatgtaaaatcgcacttagaggctaaggaagaataaaagagtcactgaaagagtgaaatgcaagacacaaatgagagcagcctttgtctcag

SEQ ID NO: 143080 - DNA, 351 bp, Homo sapiens
tatcatgaagatgtccctcaggcttgggaaaaatggtttaatctttgccaccactgttttcttacagcattcattcagacatttcaaatatttgagcacctgctatggacagaagagaatagagagggatgaggtaagagatgggagattttgggtagaatgacttacttctctgagataacatcgaacagggtgtcgaatgarctgatgaagtgagccacgtggctctctgggcaaagaacatttcggacatggggtacagtaactgcaaaggccttgagccagggatatgttttggcatagaaagaatagcaaggagacatgactggcagaagaaaagcaaaccaaggg

SEQ ID NO: 143081 - DNA, 351 bp, Homo sapiens
tatcatgaagatgtccctcaggcttgggaaaaatggtttaatctttgccaccactgttttcttacagcattcattcagacatttcaaatatttgagcacctgctatggacagaagagaatagagagggatgaggtaagagatgggagattttgggtagaatgacttacttctctgagataacatcgaacagggtgtcgaatgaactgrtgaagtgagccacgtggctctctgggcaaagaacatttcggacatggggtacagtaactgcaaaggccttgagccagggatatgttttggcatagaaagaatagcaaggagacatgactggcagaagaaaagcaaaccaaggg

SEQ ID NO: 143082 - DNA, 351 bp, Homo sapiens
tatcatgaagatgtccctcaggcttgggaaaaatggtttaatctttgccaccactgttttcttacagcattcattcagacatttcaaatatttgagcacctgctatggacagaagagaatagagagggatgaggtaagagatgggagattttgggtagaatgacttacttctctgagataacatcgaacagggtgtcgaatgaactgatgaagtgagccaygtggctctctgggcaaagaacatttcggacatggggtacagtaactgcaaaggccttgagccagggatatgttttggcatagaaagaatagcaaggagacatgactggcagaagaaaagcaaaccaaggg

SEQ ID NO: 143083 - DNA, 522 bp, Homo sapiens
ttagacagagcactatgagtgcycagagtacaaatagcttgctggttcaaggtcactgggctggcaaatggaggagccaagaactggattcaaatgtatctgtttccagctctgaaacgcaagaccacccagcacagggatctggttcatcccttactgctttgggactcgggagttattaccatcagaagttctgtcctgaccctcttcacagggcagctgggattttgaatgggacctctgcttccatgttattgatgcttaatataaataatgcatcaagccttcagagtactggctttcagtaactttgaaatatgattatatatttgattatgtatttatttgctctatgagaaaaagtagtctgtcctggttgatgattatatttgaactaagggctagagttttaaccctaaaatattgtaaccctgaaactctcagtcttctatgggaatctagacagctgcaggggaacacttttgaggtaagagtttctccaataccttttgcaggcaggat

SEQ ID NO: 143084 - DNA, 557 bp, Homo sapiens
gatatgttttggcatagaaagaatagcaaggagacatgactggcagaagaaaagcaaaccaaggggagagtggttgaagataggcttgatattgggktggagtgagggcagattgtttaaggccttatgagccatggggagaattttgtttttgattctgaatgagatgggaagagaaatattgtataaaagtatatgagattgagtcccatatacttttaccatggagagaaaattaatcctttagaatatgggaacatgatatttcctaattaaaaatcttgttacttttgcagccaaacctgaagtgcaacaatgggtaaagatgctgttttgtaggtaggagatatatttaaataaaatgaaatgatgattcttggaaaattcaatttcttcttatcaaatctgtgaaaatgaaaaaggcttacaatttgtgcaactcctttgaaaatagtcttctagccagtagtaggttttgattatgtattaacctatattgcaaatcaaactattgcaatggcacattggatttttttgatcactttgtgtctgaatac

SEQ ID NO: 143085 - DNA, 557 bp, Homo sapiens
gatatgttttggcatagaaagaatagcaaggagacatgactggcagaagaaaagcaaaccaaggggagagtggttgaagataggcttgatattgggttggagtgagggcagattgtttawggccttatgagccatggggagaattttgtttttgattctgaatgagatgggaagagaaatattgtataaaagtatatgagattgagtcccatatacttttaccatggagagaaaattaatcctttagaatatgggaacatgatatttcctaattaaaaatcttgttacttttgcagccaaacctgaagtgcaacaatgggtaaagatgctgttttgtaggtaggagatatatttaaataaaatgaaatgatgattcttggaaaattcaatttcttcttatcaaatctgtgaaaatgaaaaaggcttacaatttgtgcaactcctttgaaaatagtcttctagccagtagtaggttttgattatgtattaacctatattgcaaatcaaactattgcaatggcacattggatttttttgatcactttgtgtctgaatac

SEQ ID NO: 143086 - DNA, 375 bp, Homo sapiens
atttgaccacacctcactgcttccactgataccactttcatctaagtcaccaccacctctgtcttacattactgcaatatcctcctaaatgagctctctgattctacacttgcctctctgcaggatactcttgacagatcagacagggcaatcttattaaacaaaagtcagattatgttacttctctactccgaactctccagtggcccccatttcacacagagtaaaagccaaattttctatcaggtcttgcacaatctattcatttccataaccaacctacttgcatattctattrttcactcttctcattccattccagctagatccctgtggtttcttaaatgcactctctatccaggatctcacattaaa

SEQ ID NO: 143087 - DNA, 665 bp, Homo sapiens
gaaaaccactttaaccatgccagtaattaattatacaaatatatatgataaaayatttttaaattcttagttataccaaattgtagaaaacctcaaatgatatagctaataatgatttcagaagctaatctaggaaagagatccacaaaacagaattttacatcattttcttaactgtgattgtaatttgacaagttaatggttaaaacaatcaagatgttgcaatcaattgtacatttaatggatgtacaatttttcttattcctccaagattagtgtgatgtttttatgttttgttttcattagagaatgaatcaattcctattacagattttaacttcggagatatttctttacaatcatcttccttcttataagaatggataattgaaattttaaattcatgcaaaggttctcaggcatatgttcctcttgaaaattttctttagtctcttcaaagtctaacatgaatcagaagatgttaaccttcttgagtcgagagcaaatactggtgagatagtatatttctctgccatccagattttccagttttccaagttgataatttagccattagttcttgcttagctgttgcttcatgcttttggatttgagtcctaaaaaagacagacataacttctaaatgatcaactttcttcaaaaat

SEQ ID NO: 143088 - DNA, 665 bp, Homo sapiens
gaaaaccactttaaccatgccagtaattaattatacaaatatatatgataaaacatttttaaattcttagttataccaaattgtagaaaacctcaaatgatatagctaataatgatttcagaagctaatctaggaaagagatccacaaaacagaattttacatcattttcttaactgtgattgtaatttgacaagttaatggttaaaacaatcaagatgttgcaatcaattgtacatttaatggatgtacaatttttcttattcctccaagattagtgtgatgtttttatgttttgttttcattagagaatgaatcaattcctattacagattttaacttcggagatatttctttacaatcatcttccttcttataagaatggataattgaaattttaaattcatgcaaaggttctcaggcatatgttcctcttgaaaattttctttagtctcttcaaagtctaacatgaatcagaaratgttaaccttcttgagtcgagagcaaatactggtgagatagtatatttctctgccatccagattttccagttttccaagttgataatttagccattagttcttgcttagctgttgcttcatgcttttggatttgagtcctaaaaaagacagacataacttctaaatgatcaactttcttcaaaaat

SEQ ID NO: 143089 - DNA, 403 bp, Homo sapiens
ctgtacagattgtttcattacccacgtattgagcctagtatccattagctatttttcctgatcctcttcctcctcccaccttccaccytccagtaggctccagtgtctgttgttcctctctgtgtgtccacaagttctcattatgtagcttccacttataagtgacaacatgtagtatttggttttctgttcctgcattagtttgctaaggagaatgacctctagctccatccatgttgctacagagaacatgatctcactcttttttatgactacatagtattccatagtgtatattaactagatttcctttatctaatctgccactgatggacatttaggttgattctatgtcttcactttgtggatagtgctgtaatgaacatatatgtgcatgtgtctt

SEQ ID NO: 143090 - DNA, 530 bp, Homo sapiens
gaattcttccccaggtactagtgaaaggacaagctgtctgagccagcagtctccaatatggagtttacacaccccaggcccagtgaaccactgggaccaaaaaaaatacagtattagtacttagctttatgctaagacagattaatacaggatcttatgtatttttaaattttatgtatattttataatgcaatatattaacatactgataatagagatatgtaatttataaatatgcatgctcaatgttttgactggtagactattctggcaaacatgtttatagcctctgctctaagcatgggtgtgtcctgatgggcagtttgtctttccccagggyttatgtcccattggaagggagaaaaaagtcaggttccttccagccctgtgctgcagctttgtgtcactcctgggtgatggagaaatggcgagcttaagtctatggaaggagtgtgttctgtggccccactgtctttaaaatggcacttggtactttctatccaaaaaagggctcctccaagccagtctag

SEQ ID NO: 143091 - DNA, 633 bp, Homo sapiens
tctacaaatgttgtttacatcaaattggacagggatgcagacactgtccatggctcgttctatttttgttcaaatcatttgaagttgaagctgtggacggtttgttgtgtctatttcagattagtaatttacagagaaatcacagacttttgctacaaatcgtgtgcatcaagtgtctcwgataatcctcccatcagtgttctgtttctagaacttgtagaaccagtgttactgtttgtatcagggaagtggagaatctaagtgtaaaaaagaaataactaagactcctattccttggagggacccttctggtgccctttgggaataaagctgtagcactgcagggaagacagtgattcatgttcaaccccacaaacaagcatttttttcacaacatgtgtgtttgtttgtaatatgcaatatgaagtgtttttttttaaaggtattattattatttacaggtattctggtaaaatgatttttttaaatttctatttttgttagcagtgctgtttgttagtatttggttattgactagacctgtcccaccttttcacctatcaaggtgggtgtggtcatcagtttaattcaacatgcatcacttccttgaccttttacctttcccttattcca

SEQ ID NO: 143092 - DNA, 617 bp, Homo sapiens
tctgtcagccaacatgtacaaaatgtaagaaagaatttttaaacaggtaataaattatatttataagcaacaaagtgctgcctccttcacttaataacaaggttctcttgcgtgttcagagctgccacgtgtttcttcggtgggacagaaaggctttgggtcctgcgtggatggtgatcacaacctcctgcaggcacaggatgaggttttagcatggtgctactaaaaaatcagctgcacactggaatcaccagagaggccttaagaactaacgccagggtcacacctccagagattctgatggaagtggtctgggggtagcctgrgtcttgggtgttaaaagctcccgggtggtactaatgagcggttaagggtgagaaccaatgtcttagaacttctgcagaattctctggggcgggagcttctaaatagagtgtcaagccctgcccccagagatctgattttaaatgaagcttgcaaacaactatactaataggtaggaaatgaaaggtaagcaactaccagcagaggagttcagcttggtacaggactgctggccactgccttagggcgagcaagccaagggctccagctgtgaggtgcgaagcagctgtgag

SEQ ID NO: 143093 - DNA, 576 bp, Homo sapiens
cacatctcagtactagttaagtgcatgctgcactttcagaatcttcagcaagctcatgttttcatgaagatagacttaaattggccattatgaggaacagcagcagcatcaaggttttttaatgagcacaaccatgggaataacatacagaagagttgatacagaaaagccaaagattcagctccttgcctaaaaggagtcagaatytactcgaagacagactgtagagcaatcaaaatagtacaagtaataatacttctgaatatttaaatatgtcttcttgttcattataattgtttttactagggaatcctcatatgtgtagaaaaaacaatataaaaaaataatactctgatactttaatttccttttgataaaaaactgatgttttcaaattgctttatggggaagttttataaaaaatacagcaggtaagaaatgggtgtccgaccccacatttatggcctactgtcatctctgcagaggaaatcccagggaatggagttggggatggggcccagcagctaggtgagaataaactggcagggacagaaaagggggtttgatttcatcgag

SEQ ID NO: 143094 - DNA, 576 bp, Homo sapiens
cacatctcagtactagttaagtgcatgctgcactttcagaatcttcagcaagctcatgttttcatgaagatagacttaaattggccattatgaggaacagcagcagcatcaaggttttttaatgagcacaaccatgggaataacatacagaagagttgatacagaaaagccaaagattcagctccttgcctaaaaggagtcagaatttactcgaagacagactgtagagcaatcaaaatagtacaagtaataatacttctgaatatttaaatatgtcttcttgttcattataattgtttttactagggaatcctcatatgtgtagaaaaaacaatataaaaaaataatactctgatactttaatttccttttgataaaaaactgatgttttcaaattgctttatggggaagttttataaaaaatacagmaggtaagaaatgggtgtccgaccccacatttatggcctactgtcatctctgcagaggaaatcccagggaatggagttggggatggggcccagcagctaggtgagaataaactggcagggacagaaaagggggtttgatttcatcgag

SEQ ID NO: 143095 - DNA, 407 bp, Homo sapiens
ggttatggttttgagggtagggaaggggagcaaagggaaagactttgagagagagagagacaagaaaattaaaagacacacgaaactatgattttcctcttctcctctgaaggtgccagggaaggacataccaaggagggggtgatgggagccactcactctgccaggagacatattttagccactgacattgtttagaattgcagcacatggtgacaataaaagtaggattttaatcagttttattatcgacagtgtactcccttcctgcctgtgcctggtgtaccrcccctggcgtgccccttagcacagcactgctgcctggtatggcgtgtgtgcactgcaggtgttagtgtaactgtgggagggaagtcatggggctgcttgtgtgtgcagaaaggctgaaa

SEQ ID NO: 143096 - DNA, 594 bp, Homo sapiens
gaatactatgtctagggaagagaaaattggggttgttaatcaaagggaagaaagcagcttcttttctgctgaatttgggaatccaaaggcagaggtttcatcctgtttttattttcttcttatcacactctttcaagtttccttaatgtatctggaaggaatagaagttggattcagaattgataactggcatggtgatgacaaacctgtgtaacaccaaggttctcacagctaacagctgtttcacaaacggcatcttccaaatgaacagtcacctctgctatgcagaaaacccccatcctgctgtgagcaagttaggctcttcaagaactggacaacttttgggtgaggtgttcaatatcaaactgcataatcattagccattttcatatatactattttatagatttaagtctctcaactatcaaaaagtagagcgattttyaggagaaaaaagtcgtggggactgagttcaggacaccctgaaactatgcgaccagtaatttttttaaggtattttttcctacaagtaaggtatctgaaaagtcaacgttttgagggtggaatcaagacttttcacttctcctggcaaag

SEQ ID NO: 143097 - DNA, 497 bp, Homo sapiens
aaagaaataatcagtagagtaaacagatatcccacagtgtgggagaaaatattcataaactatgcatctgacaaaggactaacatccagaatctacatgaaactcgaaycagcaagaaaaaaacaaataatcccattgaaaagtgggcaaagggcatgaatagacaattctcaaaagaagataaacaaatagccaacaaacatatgaaaaaaatgttcaacatcactaattaccagggaaatgcaaattaaaaccacaatgagatacaaccttactcctgcaaaaatgatcatgattaaaaaatttaaaaataagagatgttggcatggatgtggtgaaaagggaacaactagtatactgctggtgagaatgtaaactagtacaaccgctatagaagacactatggaaattccttatagaactaaaagtagaactaccatttgatccagcaataccgctcctgtgtatctacccagagggaaaaaaaagttattata

SEQ ID NO: 143098 - DNA, 529 bp, Homo sapiens
taacacctgtgacttttttattcttttccttcatatttagactacatgtataacttacatttctcatctaaatcaaaattcaaaaattaycggaaaatatggtcatcctaattttatgatatcaggaaggtataggggctagagaagtaccctaaattaaatctaaagactaatttctccttatcatgggttcttcttactcaaaataggagtaaatagaaatgcacttctaggcaactgttaagaataaaaaagaaatggaacagaaaaagctggtaaagctattgtcaagttactgctatgatgtcctaggaaatttaaagaaacatcagagacagtaaattcaagctttaaaaatacacaccccttgtctgcaaagagagaggagctaaaaatataaagaggggagaccctgagaaaatagtcccttcccctataagccataaattcataaaggaatcaaatatttagttggaagacaagaaaggaggcgagacagccatttcaatggaatattagctgccacaaa

SEQ ID NO: 143099 - DNA, 529 bp, Homo sapiens
taacacctgtgacttttttattcttttccttcatatttagactacatgtataacttacatttctcatctaaatcaaaattcaaaaattaccggaaaatatggtcatcctaattttatgatatcaggaaggtataggggctagagaagtaccctaaattaaatctaaagactaatttctccttatcatgggttcttcttactcaaaataggagtaaatagaaatgcacttctaggcaactgttaagaataaaaaagaaatggmacagaaaaagctggtaaagctattgtcaagttactgctatgatgtcctaggaaatttaaagaaacatcagagacagtaaattcaagctttaaaaatacacaccccttgtctgcaaagagagaggagctaaaaatataaagaggggagaccctgagaaaatagtcccttcccctataagccataaattcataaaggaatcaaatatttagttggaagacaagaaaggaggcgagacagccatttcaatggaatattagctgccacaaa

SEQ ID NO: 143100 - DNA, 492 bp, Homo sapiens
ttatatttaaaattagtgtgtctcttaacctactcattagtgttgaccatgagtggctgaaattaaaaactggcaatatccctggttttggtggttatggtttccataaaagatactggttgattactgccacacacaaagtaatcttccctcttatgcactcctgtctaggacttaatttggcaattatgtggcattgtgacatctcttttattgktttcctatatgtatttcggctttccatatgtagttgatttgtctcacagtgttccacgtgtagctgatttgtcttacaagcaagattgttattttattgaggacaccgtccaagtactctgggtcattgtgttatgtaaatggatttaatgattatttgctaaatgaatcaatgtaccaagagatgaaagaaaataagaatattttagtcatccttgaacaaactttcagtatgtttcttaagctgaaaaccttatatttttatagactctttgc

SEQ ID NO: 143101 - DNA, 535 bp, Homo sapiens
atatagtttggcctagctagcttttttattattattattcattcttataatctctgccttttggagggagcatttcacttaatgtaattattgatatggttggaggtaggtctaatgtttcacagtttaytgtctgtttgtcctacctgctcttcgtacctgtgtaccttatttattacctccttttgaattaattgaatattttatgtaattccatcttagcttctctaccagctttttagctctaataatttatttttttaatggccactgaggtactataataaatatccttgaattttcaggtgtccttagagttaatattgtaccaattcatgtaaaatgtgaaaactttgtaatcacataggttcattgactgacccccttttcttttctttttttttttgagacagagtcttactctgtcacccaggctggagtgcagtggcaggatctcggctcactgcaagctccacctcccaggttcacgccattctcctgcctcagcctgtagaagtagctgggactacaggtg

SEQ ID NO: 143102 - DNA, 535 bp, Homo sapiens
atatagtttggcctagctagcttttttattattattattcattcttataatctctgccttttggagggagcatttcacttaatgtaattattgatatggttggaggtaggtctaatgtttcacagtttactgtctgtttgtcctacctgctcttcgtmcctgtgtaccttatttattacctccttttgaattaattgaatattttatgtaattccatcttagcttctctaccagctttttagctctaataatttatttttttaatggccactgaggtactataataaatatccttgaattttcaggtgtccttagagttaatattgtaccaattcatgtaaaatgtgaaaactttgtaatcacataggttcattgactgacccccttttcttttctttttttttttgagacagagtcttactctgtcacccaggctggagtgcagtggcaggatctcggctcactgcaagctccacctcccaggttcacgccattctcctgcctcagcctgtagaagtagctgggactacaggtg

SEQ ID NO: 143103 - DNA, 629 bp, Homo sapiens
ccactttcctcttctagcattaaacttagaccaacaactattctcatactagccgtaaacacctacattgttatattcctccagtttccagcttaataatgagaacttttctttcctagtagctccaaattaaaawgtcctagttcacaatttcattagcataatttaagccatttgaacatctattaaccaagtactggagtcaaggaaatggcatatgctacttggccatgccaggtgaatgtgcactgctagagctgaagatggaagtgtagaggagaaaagtgagatgaagagggtgtaagttcgtgtaactgcatgtactgcctggcaaaagataattcccccacacctagagtcgctggatttagcaaataaaactatagcattttcatttgattttgaatctcagctataacaacgagtaggtttttagtattaaatatgtctcatgcaatatctgtgagatatctctagtaaaaatactgttgtttatcttatattttaatttaacaaaaaatactttattttatctgacaaccttgcccacacccaaatgtttcagcaataaaccactgaaatgaaatcaaattaaatggttgcaatgggactgaatgagcaacaattat

SEQ ID NO: 143104 - DNA, 629 bp, Homo sapiens
ccactttcctcttctagcattaaacttagaccaacaactattctcatactagccgtaaacacctacattgttatattcctccagtttccagcttaataatgagaacttttctttcctagtagctccaaattaaaatgtcctagttcacaatttcattagcataatttaagccatttgaacatctattaaccaagtactggagtcaaggaaatggcatatgctacttggccatgccaggtgaatgtgcactgctagagctgaagatggaagtgtagaggagaaaagtgagatgaagagggtgtaagttcgtgtaactgcatgtactgcctggcaaaagataattcccccacacctagagtcgctggatttagcaaataaaactatagcattttcatttgattttgaatctcagctataacaacgagtaggtttttagtattaartatgtctcatgcaatatctgtgagatatctctagtaaaaatactgttgtttatcttatattttaatttaacaaaaaatactttattttatctgacaaccttgcccacacccaaatgtttcagcaataaaccactgaaatgaaatcaaattaaatggttgcaatgggactgaatgagcaacaattat

SEQ ID NO: 143105 - DNA, 563 bp, Homo sapiens
agagaaatacatttgggagttttcagccaatagatggtatttaaagacaggagactggataagatcaccacacttcctcactgcatttggaaatgtctgccaggctacgatataaactttaaattgtttctcttccaatcaccctgactctcgccatgtataagtgactacaacagtatagattcttttctttttcatctagtagtttaagaagtctaataatgtgatcaaaataagggttgtaaacttccatgtaatatgggaactaggtttcttaactattttattaatagcttgccccttggaaagagtaacctgaactggagttgacaagctagttgttcttggtcaggcaaatctactttcttcttgtaagaagaaaacaccccctggaaaaaaagtaagtgaaaacaataagagatgaaagaaagttgagactattataatgaaattcaacaaatatctactaagagtgcaagactctgggtatataaagattgagaaatggtcctttccttctctaaaatcaaattcacaaggatrgtagaggagaaaggaattca

SEQ ID NO: 143106 - DNA, 550 bp, Homo sapiens
atcatttctaagcatggagactgaagtgtatgatactacagatttgccagaaaactaaagggcatagtgatactacagatgtcccagaattacagaataaataattggaatatgcaaaacttgaatccaatatttatgattaaaaattaaatgttcttttcactctatcataaattgtcaactatagctctatgattgacttgaacttatttcttttgaaatcatggactgttagtgccagaagagattttggtgactggatggtctctaattgrtttatctagtccaaaatgggttttttttttttttttcaaactgtttatttactacataattatttgttaaaaggaaaattctctgcttggaagtccagcgcgtgaagtagatgcaagaagagatgtgtctcaaccacttgctttgccttgcccctgtggcctcgggggaagaggttaacccaatcactggagttctgttgagcaaaattttcatgacagttgctgtgataagcagaattccattcacaagatctccatccctaggtgtacacgcc

SEQ ID NO: 143107 - DNA, 567 bp, Homo sapiens
ccatccttggcagtgaaatacaagacaaatatggaacagcctatatgttcaaagtgtatactgattttattcaacaaatttgtgaggttgggccttggagacagtaatgtctcactttgcagatgaggaaagttcccttggaacaaaggttctcaatcagcaacatcatcatcacctagaactagttagaaatgcagttcttaggccccaacaaaggcttattaaattacaaactctgggggttgctgggaccaatcagtctatggtttactaagctccccaggtgcttcaaatgcattctaacattagaaactcacaggtcagtgattcagatcttcagtgcattgcagtcaggacacaagtcctgggccttctccattttacctttctacctccacaataatggatatttattgaaygtccatgctgatttggaacaattgtgtgtagtctgtgatggttaatgctagtgattagtgcccttataaaagaaaccccaaagagctgccctacctttccgccgtatgaagacacatagaaggtgtctatgaggaatgggccatcacc

SEQ ID NO: 143108 - DNA, 489 bp, Homo sapiens
gggcagaagggactttgtggaagtcatttcttggtttaaaatattcaaatggatcctttgaagttgttgatcatccatcaaaagatacatttttaaaaaatagatattctggagaaaataacaattgcaatcttttaccaaacacttaatgtctatcccatgaggtactgtgtttattgtttttccaggattctcaattttttttgctcaaacagctttatgaagtatgtactgttatcattttcattttacatataaaacaagtgggcttagtcacattaagtaactcctccaagtcaccattagytgacttcagaaccaggaggtaaaccagcagtctgattttagtgctcacaataaccagagtatcataactctcctcagaaatttagaaatcttgtcattttgtttcaggaatagcaagcagacctactggctctgtatcttccaccatgagaagtttgtttttacctttaactactagtggga

SEQ ID NO: 143109 - DNA, 513 bp, Homo sapiens
ataaaaggaaaataaaatcttaggacttcagactcactacaacctccacctcttgggttcaagcgattctcctgcctcagcttccagagtagctggaattacaggcatgtgccaccatgcccagctaattttttatttttagtagagacagggtttctccatgttggccaggctggtcttcagttctccacctcagrtgatctgcccgcctcagcctcccaaagtgctgggataccaggcgtgagccaccacgcttggcccaatgttttatgaacaaacatttaaactgtaattctgctttgtaccagaattcatcagaaacaatccttttagctctgtgattttattttcttttcaaaattagctgaacattatagcaaaactaaaagttacaattttctcccgccttccctgaagaaaagcccagagagattttgttttgtttttttggggggagtttttgagacagagtttcactcttgctgcccaggctggaatgcagtagctagatct

SEQ ID NO: 143110 - DNA, 565 bp, Homo sapiens
ttaaggctgggtgtccaggggagacatcacatgtcagcaggttccatgatggcccctgagccataaaaccagcaagtttttattagtgattttcaaaaggggagggagtgtacgaataggtgtgggtcacagagatcacatgcttcacaaggtaatatcacaaggtaaatggaggcagggcgagatcacaggaccacaggactggggcgaaattaaaattgctaatgaagtttcgggcatgcattgtcattgataacttcttatcaggagacagggtttgagagcagacaacyggtctgaccaaaatttattaggcgggaatttcctcatactaataagcctgggagcgctacgggagaccagggcttatttcatcccacagctatgactataaaagacagctgcccccaaagcggccatttcagaggctgaccctcagggatgcattctctttctcagggatgttccctgctgagaaaagaattcagcgatatttctcctatttgcttttgaaagaagagaaatatggctctgttccccccggctcaccggcagccagagttta

SEQ ID NO: 143111 - DNA, 565 bp, Homo sapiens
ttaaggctgggtgtccaggggagacatcacatgtcagcaggttccatgatggcccctgagccataaaaccagcaagtttttattagtgattttcaaaaggggagggagtgtacgaataggtgtgggtcacagagatcacatgcttcacaaggtaatatcacaaggtaaatggaggcagggcgagatcacaggaccacaggactggggcgaaattaaaattgctaatgaagtttcgggcatgcattgtcattgataacttcttatcaggagacagggtttgagagcagacaactggtctgaccaaaatttattaggcgggaatttcctcatactaataagcctgggagcgctacgggagaccagggcttatttcatcccacagctatgactataaaagacagctgcccccaaagcggccatttcagaggctgaccctcagggatgcattctctttctcagggatgttccctgctgagaaaagaattcagcgatatttctcctatttgcttttgaaagaagagaaatatgrctctgttccccccggctcaccggcagccagagttta

SEQ ID NO: 143112 - DNA, 440 bp, Homo sapiens
ttccacccctgtctctgcatgggtgagttcagacacatctctttcyttcacccactcaatgagttagcctcaaacagggacatttggaaatgcatgaggaggcactgaattgctcctataactttagggaagggaaaaggagcgctaaggacattgaatgggtcaaggatgccagttgtgcagcaacaggaatgggggattttcttgcccccattgataattgtgcccagattgagaaacaccacctgatggcccctaaggtgtctccatgctggagaaaacaaggccaatgcttctatgactttctcaaagttcagagcagaggagccttccactaggagagggcagagtatccaacaggcccatggcatctcaagaggacaagtctctagagtaatcttattggggtcctcccaactgtgcccttcagtgccagcccc

SEQ ID NO: 143113 - DNA, 440 bp, Homo sapiens
ttccacccctgtctctgcatgggtgagttcagacacatctctttctttcacccactcaatgagttagcctcaaacagggacatttggaaatgcatgaggaggcactgaattgctcctataactttagggaagggaaaaggagcgctaaggacattgaatgggtcaaggatgccagttgtgcagcaacaggaatgggggattttcttgcccccattgataattgtgcccagattgagaaacaccacctgatggcccctaaggtgtctccatgctggagaaaacaaggccaatgcttctatgwctttctcaaagttcagagcagaggagccttccactaggagagggcagagtatccaacaggcccatggcatctcaagaggacaagtctctagagtaatcttattggggtcctcccaactgtgcccttcagtgccagcccc

SEQ ID NO: 143114 - DNA, 568 bp, Homo sapiens
agggtgttctcatcaactgacaagactcctcctctcctgcaaatggcccaaccacagaccactccaaggccaccctggagcctccagatgctgcccgtcttggcacaaccctgccttcaaagcaagcaggttgtccagcattgcctgggtgggctgtctcagtagaggttcttattggcaaaaccccacttagttcaggtataaaaggcagcctgaggccaaggcaggtagatcacctgaggtcaggagttcgagacctgtctggccaacatggtaaaaccccatctctactaaaaatacaaaaattagccgggtgtggtggcatggatctgtaatcccagctactcaggaggctgagacaggaaaatcacttgaacccgggaagcggaggttgccatgagccaagatcgcgccactgcactccagcctgggyaacagagtgagactccatgtcaaaagaaaaggcagcctgagaatcaccacgagggctcacagaagcaaggctagaggctcctaggccaaacgcccatgccatattgaattccagaacccctttcacagcacaaaa

SEQ ID NO: 143115 - DNA, 344 bp, Homo sapiens
ttaccactgatagtatttcatatggtccctcagtaatatttcttagagatggttaaaaataggttctgagtcatcttaagcatatttctaggaatttgttttattgctgtcatgaatataatggttttgctccagttcatttcatagtttaacatatcaaatattaggtatcttaaaaatcacaaatgctatttcaccctgcaggttagcagtattaaaatagaawcatcaaatcccccatcagtgggggcgggggggggggttgtagaaacagtctgatatggtttggctcttgtccccacccaaatctcatctcaattttaatccccacgtgtcagaggagg

SEQ ID NO: 143116 - DNA, 630 bp, Homo sapiens
ggcttacaatggtgttggctcggggtaaggaaatcacaatggataaggctctatcctggggagtgacagggaggtgccattataatacctgggccttaagaggtaaggggagggagcagtccctggagcctggaactaagaggactgtgtggccagggccacccaaactatgacctgttgtttagaagggcagctaatctgtgacaatcctgcagagagagaactgggggacaagatactccaactcacacttcttcctctctccaaactttcctgttgagacttcccattggccaaagacaagcaaggccagaaggcaatggcggcctttcagggcagacagcagggtggaaaaggyggggagccaaaggcatgggacacatggcacctcaagactcttgttttttccctatctgccaaagtccacacagctctctcacacaaatgcctttctcatccctcaccctgacaactactctgatctgaggaatgcatcaggaatgagaccagatgcccatatcaacttcttcagggaatgaagacctagaggaaaagtgcagctgaatctggaactgcaattgcccagaaacacgatcagaaatgtaataaatgctgctattacacctaaaa

SEQ ID NO: 143117 - DNA, 413 bp, Homo sapiens
ttttactttatgtttgaggcatcacatatcctgtcactaatgagctatttatcctcatgagaataataagctcttcttcagattatgagactaacgcgctgccagmtgcgctaagagggcttagagaataataagctcttctaagtccctgtaggccattacagattttaactcttttcaaaagatatttcacaattatcaacggccatggtgtaggtcaaaatgtgaaagactgtgacagaattcaactaaaaaaatcagaaaaaaattatggcacctgtaggtgtcctctgaggtgctcattagccaggaacagaactcaatgaatactgacttttgcttgtgccattttactggaaaattatgttagtgtttaggaaatttgaggcaccagaaagggttgaagacaggat

SEQ ID NO: 143118 - DNA, 553 bp, Homo sapiens
gccctctttctcttcctctttctctgccatgtaaaacatgcctccttccccttcaccatctgccatatttataagtttcctgaggcctccccagccatgcttcctgtatagcctatggaaccatgagtcaattaaacctcttttctttataaattacctggtctcaggtagttctttacagcaatgggagaatggacraataaagaaaattggtaccagaaaagtggggcattgctataaagatacctgaaaatgtggaagtcactttggaaacaggtaatgggcagaggttgtaataatttggagggttcagaagaagacaggaagatgagggaaagtttggaatctcctagagaattgttacatggttttgaacaaaatacggatagtgatatggacagtgaagtccaggctgaggtggtctcagatggagatgaggaagttattggggactggaactggtgatatatttagatatatttaggtttgtaaatgcatttatacattttcccaacattggtgctatgctttagcaaagagactggcagcatta

SEQ ID NO: 143119 - DNA, 553 bp, Homo sapiens
gccctctttctcttcctctttctctgccatgtaaaacatgcctccttccccttcaccatctgccatatttataagtttcctgaggcctccccagccatgcttcctgtatagcctatggaaccatgagtcaattaaacctcttttctttataaattacctggtctcaggtagttctttacagcaatgggagaatggacaaataaagaaaattggtaccagaaaagtggggcattgctataaagatacctgaaaaygtggaagtcactttggaaacaggtaatgggcagaggttgtaataatttggagggttcagaagaagacaggaagatgagggaaagtttggaatctcctagagaattgttacatggttttgaacaaaatacggatagtgatatggacagtgaagtccaggctgaggtggtctcagatggagatgaggaagttattggggactggaactggtgatatatttagatatatttaggtttgtaaatgcatttatacattttcccaacattggtgctatgctttagcaaagagactggcagcatta

SEQ ID NO: 143120 - DNA, 553 bp, Homo sapiens
gccctctttctcttcctctttctctgccatgtaaaacatgcctccttccccttcaccatctgccatatttataagtttcctgaggcctccccagccatgcttcctgtatagcctatggaaccatgagtcaattaaacctcttttctttataaattacctggtctcaggtagttctttacagcaatgggagaatggacaaataaagaaaattggtaccagaaaagtggggcattgctataaagatacctgaaaatgtggaagtcactttggaaacaggtaatgggcagaggttgtaataatttggagggttcagaagaagacaggaagatgagggaaagtttggaatctcctagagaattgttacatggttttgaacaaaatacggatagtgatatggacagtgaagtcyaggctgaggtggtctcagatggagatgaggaagttattggggactggaactggtgatatatttagatatatttaggtttgtaaatgcatttatacattttcccaacattggtgctatgctttagcaaagagactggcagcatta

SEQ ID NO: 143121 - DNA, 553 bp, Homo sapiens
gccctctttctcttcctctttctctgccatgtaaaacatgcctccttccccttcaccatctgccatatttataagtttcctgaggcctccccagccatgcttcctgtatagcctatggaaccatgagtcaattaaacctcttttctttataaattacctggtctcaggtagttctttacagcaatgggagaatggacaaataaagaaaattggtaccagaaaagtggggcattgctataaagatacctgaaaatgtggaagtcactttggaaacaggtaatgggcagaggttgtaataatttggagggttcagaagaagacaggaagatgagggaaagtttggaatctcctagagaattgttacatggttttgaacaaaatacggatagtgatatggacagtgaagtccaggctgaggtggtctcagatggagatgaggaagttattggggactggaactggtgatatatttakatatatttaggtttgtaaatgcatttatacattttcccaacattggtgctatgctttagcaaagagactggcagcatta

SEQ ID NO: 143122 - DNA, 583 bp, Homo sapiens
ggaactgacccttggcatggtgtccctcggcatccctggccttggtctgaagtctactttgatattaatatagccactccgtagtacagctccttttcactttttcactttcaaactatttatgtccttgtatttaaatggagttattttagaccacatatacttggttcttgctttttatccaatcttacaatatattttaattgatgtattcaggccattagcatttcctataattattgatatagctgggtttctgtctaccattttattatcttttttcctgtttgtcctccctgattttgtccctctattacccctttttctgccttcttttgggttgattttttttttttttttttttttactattccattcattgtatctattagcttttggctatatgtcctttttttttttttccagtggttgctctagggttgtaatatacatatctaatctttcacagtgtatttagcattactgttttactaytttttgtaaaatgcagatgccttaccaacaaatagtttcctttatctccccactttgtttcatttgtatatactactctatatacaca

SEQ ID NO: 143123 - DNA, 390 bp, Homo sapiens
ggaacaggcagaacccatcagagggcttgactccaatctcatccaaattccagatgggaacacagaggctcagagtggacagggcttgccctgatcatacagtgacytggtggcaaagctgggagcccccagcaccagcctcttccccagccctcacccctgccccaggcatcagccaccatagagtcacttaccggaactgggctctgtggggtgctcctccttcgggatgggttgtgaggtctcatgactggggtcctctgttgttttccttgagggcctgaaaccccaaagccctcattattctgtgcctctagtccttgcccatctccacaggttctgcccatatcccatgtccattcttgaacaatgcccacaaccctctgaatt

SEQ ID NO: 143124 - DNA, 521 bp, Homo sapiens
actctccaaatactgaatcatcgctgcctgggttgttctcctctgtggaacgttattcatttatagatgtaatgttctccatgtagtagaccctaccaaaagtataccatgcacaaagttaaaaaaagaaaaacatattagaaaagtttcatctatgacaaaattttaatatccttattttcagaagagggttatgcataaagacctgagcattcttgttcaggaagggagcagagaaaaactaatgcccactaatcatatgaaaagactataagcctctrttaatcaaaatgatacacattgaaataagatttatgattattctagcagacagccaaagatttgaaaggtcaacatgcactgttagctgggatatggagaaatgggtacatccacacagctgcaggagtatttctgcctttctagaagttctccttattctggtcgagcatttcccactctaagaattttttctaagtcagaataaatgtgcaaagaatgataattgcagcatcattcat

SEQ ID NO: 143125 - DNA, 621 bp, Homo sapiens
ttttaggtgtaatagcagcatttattacatttctgatcgtgtttctgggcaattgcagttccagattcagctgcacttttcctctaggtcttcattccctgaagaggttgatatgggcatctggtctcattcctgatgcattcctcagatcagagtagttgtcagggtgagggatgagaaaggcatttgtgtgagagarctgtgtggactttggcagatagggaaaaaacaagagtcttgaggtgccatgtgtcccatgcctttggctccccgccttttccaccctgctgtctgccctgaaaggccgccattgccttctggccttgcttgtctttggccaatgggaagtctcaacaggaaagtttggagagaggaagaagtgtgagttggagtatcttgtcccccagttctctctctgcaggattgtcacagattagctgcccttctaaacaacaggtcatagtttaggcggccctggccacacagtcctcttagttccaggctccagggactgctccctccccttacctcttaaggcccaggtgttataatggcacctccctgtcacttcccaggacagagccttatccactgtgacttccttacccccagccaacacca

SEQ ID NO: 143126 - DNA, 594 bp, Homo sapiens
atccagctgcacatctagaacaaggtggccattcctctggacactgtggcaggtaggggatggggagatggggcagcccacaaagctcagtgccctgccatggaccccttctgctccgagacctccctgctgtgggttcttcacaccctgagacactgccctgaagtcagacagaagcaaatgagctcctctcccaagactgccctctcccaygctggctgatgacttcctagagggggaatcagtcaccaggggctggggactgtttcttcgggtggatgccctggagttcaggctggctggttcatcccattcctccatgtgcatgagacaaggcagggcagaaatgacacaggcaccacctttacttctgcattcctgcaaagtggtttctgcaggtcccgctgatacggttaagcagctctgctagggaagggcttcggaagtggctctggtaggtttggggttgtggtgagaggccatggatctacaaggagagggtggtcactgagcagatggctgggtatctacccacagacccagaaccagtgacatgtcagggggttatggctggctggcagggactcactgatt

SEQ ID NO: 143127 - DNA, 604 bp, Homo sapiens
aatgcttgatgttctcctgtaaggggggcagttagaccacgagccaaaatgaggtgatcttatttgctgaacttaaaacccagctgaacctacttccaaaattaattttctgttcaaatgtccataagtccatagaaatgtaaatatatatatttgaattatatatatataattcgaattatatatatataattcaaataaatatgaatattatttcatatatttatatatttgaattatatataatatatataaaattatatatataattcaattatatataattaaattatatatataattcaattatatataattcaaatatatatataattcaattatatatataattcaaattatatatataattcaaataatatatgaatagatagctaatcaggactagacttatgacaggaattaaaggcacttcackatccctttttattttctccattagtacgttgtaaccgtgtagaaatacagtacttcacagaattaacatattaatagaaatttaatcctgaagaaaatcattctgtgtatagaatatgcatcttctgggctttgtggtttcttttaaatggctagatgattgaatagc

SEQ ID NO: 143128 - DNA, 371 bp, Homo sapiens
ctagtacattagaaacaaaattaagcttgtaagctagtcatgtttatagactggaaagttaagttagggataaggacattaacatgctaaggtagtagttctcaaactgttttcccaaaaatcaatgctcgtaatctaaggagatgttaataatgttccctggatgcctcaatggaactgggctttgttgtgactttttaaataaacttgaacccatcgtycaagggtgttttgaaaaggcatttctgattgtggcctatgaagtgctcatgcatgatggcaaaatgtaaatgcagatatactatggcaccactggaggacaagctgttccttctttcaagagtagtttccaaagtattacccatcgtctt

SEQ ID NO: 143129 - DNA, 569 bp, Homo sapiens
attgcatatgcctttgcatacccatagcttagcttccacttatgagtgacaacatgtggcatttggttttgcaatcccaagttccttcgcttggaataatggccttcagctctacccaagttgatgcaaaagacattatttctttcttttttatggctgagtagtaatctatggcatatgtatattacattttctttatccactcatcgcttgatgggcacttatgttgattccatatctttgcaattgtgaattgtactgcaataaacatatgcrcacaggtgtcttctgatagaatgacttcttttcctttgggtacatacccagtagtgggattgctggatcaaatggttgatctgcttgtagttctttgagaaatctctatacggttttccatagaggttgtactaatttacattcctgccagcaggatataaccattcccttttaactgtatccacaccagcatctattgctttttgactctttaataatggctattctggttggagtaaggaggtatctctcactgtggttttaatttgcatctccctgatgattagttaggt

SEQ ID NO: 143130 - DNA, 569 bp, Homo sapiens
attgcatatgcctttgcatacccatagcttagcttccacttatgagtgacaacatgtggcatttggttttgcaatcccaagttccttcgcttggaataatggccttcagctctacccaagttgatgcaaaagacattatttctttcttttttatggctgagtagtaatctatggcatatgtatattacattttctttatccactcatcgcttgatgggcacttatgttgattccatatctttgcaattgtgaattgtactgcaataaacatatgcacacaggtgtcttctgatagaatkacttcttttcctttgggtacatacccagtagtgggattgctggatcaaatggttgatctgcttgtagttctttgagaaatctctatacggttttccatagaggttgtactaatttacattcctgccagcaggatataaccattcccttttaactgtatccacaccagcatctattgctttttgactctttaataatggctattctggttggagtaaggaggtatctctcactgtggttttaatttgcatctccctgatgattagttaggt

SEQ ID NO: 143131 - DNA, 569 bp, Homo sapiens
attgcatatgcctttgcatacccatagcttagcttccacttatgagtgacaacatgtggcatttggttttgcaatcccaagttccttcgcttggaataatggccttcagctctacccaagttgatgcaaaagacattatttctttcttttttatggctgagtagtaatctatggcatatgtatattacattttctttatccactcatcgcttgatgggcacttatgttgattccatatctttgcaattgtgaattgtactgcaataaacatatgcacacaggtgtcttctgatagaatgacttcttttcctttgggtacatacccagtagtgggattgctggatcaaatggttgatctgcttgtagttctttgagaaatctctatacggttttccatagaggttgtactaatttacattcctgccagcaggatataaccattcccttttaactgtatccacaccagcatctattgctttttgactctttaataatkgctattctggttggagtaaggaggtatctctcactgtggttttaatttgcatctccctgatgattagttaggt

SEQ ID NO: 143132 - DNA, 390 bp, Homo sapiens
gaatgaattagagagggttccttctttctctatcatgtggaatagtgtcaaaagtagtcaaaatagtgtcaaaaggattggtaccaattcttctttgaatgtctggtagaattctgctgtgaatccacctggtcctggacattttttgttggtaatttttaaattaccatttcaatcttgctgctcattattggtctgttcagggtatctaattcttcctcatttaagctaggatggttgtatttttccaggagtttatcyatctcttttaggttttctagttaatgtgcataaaggtgttgagagtaggtttgaatgatcttttgtatttcagtggtgtcagttgtaatatctcctgtttaatttcttagtgaggttatttggattttc

SEQ ID NO: 143133 - DNA, 576 bp, Homo sapiens
acactctggggactgttgtgggttggggggaggggggagggatagctttaggagatatacctaatgctaaatgacaagttaatgggtgcagcrcaccagcatggcacatgtatacatatgtaactaacctgcacattgtgcacatgtaccctaaaacttaaagtataataataataaaataaaataaaaaaatagtttaattacgcttttaatctatctaaattattttgaaacctatgctgccaaagacttagtggtttcttgagttcaatgtccaccctcatagtctccagtgtctatacgttctttatctttaattttgattccctaatttttctataagacacttttctatcttcttgaagtgtacactcaagaagctcctgttggtaaatgcaatctctctccctttctctctctctctctttttttactttttaagataatttagtttacccttatttatttaaaatatgctagctatgtatccaattaaaggttgaacaataactttttttcagaactcttactatttatttctccattttctgggtctgcataggctgtggagatttt

SEQ ID NO: 143134 - DNA, 512 bp, Homo sapiens
tgggggctgagggagttttgggggtgcaagatatctagaaagagagtatttagaagagcaacaagggatgaggggatttgaaagagattttctttgaattaagaatgcacacccacctttgcatttcgccaaaagacaagtcacgaatcgaaacatgtttaatcattgtttgcttgccagacttcatttctttgcaaaaaaacyacaaagcacctcctgatccacctggattagacagccaatctcacagagagagcacggactgtgaacggcatagggtacacacaaggacatacagagtccagaagaagaactcaaactaagttggcacagagactctctcagcagctgcacttttaagagttcttattcagttcttactgaagagaaactgcaagggcctcacaggccctgttgagtagcgttcagggtttacagtagaaatgcgtgtcaatgttagttatttaggaacctgcgtgtagttcccattctgcggtgtggagtcagtcatt

SEQ ID NO: 143135 - DNA, 512 bp, Homo sapiens
tgggggctgagggagttttgggggtgcaagatatctagaaagagagtatttagaagagcaacaagggatgaggggatttgaaagagattttctttgaattaagaatgcacacccacctttgcatttcgccaaaagacaagtcacgaatcgaaacatgtttaatcattgtttgcttgccagacttcatttctttgcaaaaaaaccacaaagcacctcctgatccacctggattagacagccaatctcacasagagagcacggactgtgaacggcatagggtacacacaaggacatacagagtccagaagaagaactcaaactaagttggcacagagactctctcagcagctgcacttttaagagttcttattcagttcttactgaagagaaactgcaagggcctcacaggccctgttgagtagcgttcagggtttacagtagaaatgcgtgtcaatgttagttatttaggaacctgcgtgtagttcccattctgcggtgtggagtcagtcatt

SEQ ID NO: 143136 - DNA, 464 bp, Homo sapiens
gcaacaagggatgaggggatttgaaagagattttctttgaattaagaatgcacacccacctttgcatttcgccaaaagacaagtcacgaatcgaaacatgtttaatcattgtttgcttgccagacttcatttctttgcaaaaaaaccacaaagcacctcctgatccacctggattagacagccaatctcacagagagagyacggactgtgaacggcatagggtacacacaaggacatacagagtccagaagaagaactcaaactaagttggcacagagactctctcagcagctgcacttttaagagttcttattcagttcttactgaagagaaactgcaagggcctcacaggccctgttgagtagcgttcagggtttacagtagaaatgcgtgtcaatgttagttatttaggaacctgcgtgtagttcccattctgcggtgtggagtcagtcattctcaacaga

SEQ ID NO: 143137 - DNA, 597 bp, Homo sapiens
aaatttttatttattaaaaattaattactaatttttaacttaatttattaacttattgactaacttagctcaaaatcacacagcttgaaggtttgaaccctagactctgtgattcaggcctcgatcagtagaaagagtttacaggcatggcctcctggacctttaaggcaaacgttccagaaaggcttaggacaagatcatagaactcctggcagaaccaggtgccaccaagaaggagtgtgctttgtttctgtagtcttggggtacataaagctgggcagggggcagggggcagtgggtgggggttacaccaaatctgagctgcctttatctgtaccgacctgacatcttgagcagaccaagccccaggcagtaaaagtgctggaaagtcaagacacgtgggcctcartcctctctgcttcttgagaggcgttcgaccttgcagaggcccttgctcttgccatctgggggtttagggccagatggctgcccaggtctcttagaattaggttggcctgattccttgagctgtggggttggtgttcctggagtcactgctaaaaattctgcaaattgcagggaagccaatgtttaaag

SEQ ID NO: 143138 - DNA, 530 bp, Homo sapiens
gcattacacggtttcccatattgcaaccaactcctggggctttctggccagtcacatggtgaccacatgcccagtgcaggtgcctcactctccctgcttgcctctgtggtaatcacaaaaacagtcctttctccactctgggtgggaaggaaaaagtgcagctggtatctgcaattttctactcagttgatttgttctgggtttggtttaacttaatgatttctcaataagatttgaatttcttcaaattaataaaggcaaaatgctaacaagcaagggaatggaaccaagacatgagatcccatccttcagagactggggaaggcatstaagttcccagggccagaggtcctgggactgggtcaaggacacagtgaggctgacaagggagtacatccatgagccacgtggcctgcctggctcttgccctgattcaaggctaaaagcccattaacctggactggagagctcaagactcagctcaggctcaggccactttgaacaaatcattttccctctccttccacccc

SEQ ID NO: 143139 - DNA, 530 bp, Homo sapiens
gcattacacggtttcccatattgcaaccaactcctggggctttctggccagtcacatggtgaccacatgcccagtgcaggtgcctcactctccctgcttgcctctgtggtaatcacaaaaacagtcctttctccactctgggtgggaaggaaaaagtgcagctggtatctgcaattttctactcagttgatttgttctgggtttggtttaacttaatgatttctcaataagatttgaatttcttcaaattaataaaggcaaaatgctaacaagcaagggaatggaaccaagacatgagatcccatccttcagagactggggaaggcatgtaagttcccagggccagaggtcctgggactgggtcaaggacacagtgaggctgacaagggagtacatccatgagccacgtggcctgcctggctcktgccctgattcaaggctaaaagcccattaacctggactggagagctcaagactcagctcaggctcaggccactttgaacaaatcattttccctctccttccacccc

SEQ ID NO: 143140 - DNA, 578 bp, Homo sapiens
ccatagttagaaaagttttatatacaagattgactgttgcagtgttatttgtgatggaaaaagttggaaaaatatcaaatgttcaacagaagtgggtctgaataatggtacatccatacaagaggaagaaatctttaataataaaaaagtaagaacctatatggctcttcccatttgccagtttgacttgtaattaatgcattgacagacacagcaagcctatgaagtggatgctattattacgygcactttaaggatgacaaaattgaggtcttgagaataaaagtgacttgcccatagtcccacagctggaaagtggcagagttgagatataaacccaagctatctgattcaagagtccatactattaaccactctgttatactccctctggaagaatatctaatgattttggtaaatgtatgtatgtgcatgtgggtgtgtgtttaaaaggacaagaaacctatacaccagtgtgtgacactggatggcaggactgcaaacaatttgtgctttcttatttgtatttttctgtattttttgatttcacatcaaaggtatttttttaatcagaaaaa

SEQ ID NO: 143141 - DNA, 615 bp, Homo sapiens
ttctactgtattgggaaagatagcccctgcataaaaacagccatttagaaaaaaaaaaaatgtgttacaagaaaatgtcaaatttgaaagtgcagagaaaggtgaaaggggcatttggcccrtacaagttgaagagggtttcacaaaggaagcggcctttgagctgagtcttggaggatggttctgaatgtcctgagaacaacaactgccactgactgattccctgcaagaaatcctttcatcactccggattggaacagctatcctgagataaaacccgagaagtctgggaagtgaggagggaacttcgaagaggagtcttaggaatgtgaatactcaaatccaagatcttaagatctcactagagggatgcttgtgcacacagtccttggtagaaaaacgtcaatcactgaactaagacgtgcatctatttttgaagtgatctgcacttctgggaatagccccaaagggaaattggtcattgattgctaggaaaccagcaattcccgctgggctttctgctccttgccatatttgcacatatttttttccaggctcctgcctgctcttctttcaatacacacatccaaactcacaccagcatatgttctagct

SEQ ID NO: 143142 - DNA, 578 bp, Homo sapiens
ccatagttagaaaagttttatatacaagattgactgttgcagtgttatttgtgatggaaaaagttggaaaaatatcaaatgttcaacagaagtgggtctgaataatggtacatccatacaagaggaagaaatctttaataataaaaaagtaagaacctatatggctcttcccatttgccagtttgacttgtaattaatgcattgacagacacagcaagcctatgaagtggatgctattattacgcgcactttaaggatgacaaaattgaggtcttgagaataaaagtgacttgcccatagtcccacagctggaaagtggcagagttgagatataaacccaagctatctgattcaagagtccatactattaaccactctgttatactccctctggaagaatatctaatgattttggtaaatgtatgtatgtgcatgtgggtgtgtgtttaaaaggacaagaaacctatacaccagtgtgtgacactggatggcagractgcaaacaatttgtgctttcttatttgtatttttctgtattttttgatttcacatcaaaggtatttttttaatcagaaaaa

SEQ ID NO: 143143 - DNA, 615 bp, Homo sapiens
ttctactgtattgggaaagatagcccctgcataaaaacagccatttagaaaaaaaaaaaatgtgttacaagaaaatgtcaaatttgaaagtgcagagaaaggtgaaaggggcatttggcccgtacaagttgaagagggtttcacaaaggaagcggcctttgagctgagtcttggaggatggttctgaatgtcctgagaacaacaactgccactgactgattccctgcaagaaatcctttcatcactccggattggaacagctatcctgagataaaacccgagaagtctgggaagtgaggagggaacttcgaagaggagtcttaggaatgtgaatactcaaatccaagatcttaagatctcactagagggatgcttgtgcacacagtccttggtagaaaaacgtcaatcactgaactaagacrtgcatctatttttgaagtgatctgcacttctgggaatagccccaaagggaaattggtcattgattgctaggaaaccagcaattcccgctgggctttctgctccttgccatatttgcacatatttttttccaggctcctgcctgctcttctttcaatacacacatccaaactcacaccagcatatgttctagct

SEQ ID NO: 143144 - DNA, 615 bp, Homo sapiens
ttctactgtattgggaaagatagcccctgcataaaaacagccatttagaaaaaaaaaaaatgtgttacaagaaaatgtcaaatttgaaagtgcagagaaaggtgaaaggggcatttggcccgtacaagttgaagagggtttcacaaaggaagcggcctttgagctgagtcttggaggatggttctgaatgtcctgagaacaacaactgccactgactgattccctgcaagaaatcctttcatcactccggattggaacagctatcctgagataaaacccgagaagtctgggaagtgaggagggaacttcgaagaggagtcttaggaatgtgaatactcaaatccaagatcttaagatctcactagagggatgcttgtgcacacagtccttggtagaaaaacgtcaatcactgaactaagacgtgcatctatttttgaagtgatctgcacttctgggaatagccccaaagggaaattggtcattgattgctaggaaaccagcaattcccgctgggctttctgctccttgccatatttgcacatatttttttccaggctcctscctgctcttctttcaatacacacatccaaactcacaccagcatatgttctagct

SEQ ID NO: 143145 - DNA, 451 bp, Homo sapiens
ttataccactcagggaaagaacgagttttaggggggagatttttcacactgaagccccacctttgaaaagcctgacaccaaaggcttaggtgggtctgacatgggcctcccttccaycctgagacccctccatcctctccttttagcggtctttcctgtgcccatctacctggctctcctgggctgctcttcctccagccacctccaggatgaaaatctaaccccctcgcctctttctctgaggacccaattcactccacccctcaggtggaatgccctgtcagtttggaccaaaagttcctggattctgttgtgctgtcatttgtgttccatccctgtgctccacaactgtttgccatgccaccgttgtgcacattaacctgagttctcgtctagcttcaaagggaatggtaagggagtttccagcggaaaccctcatgagcacctaaac

SEQ ID NO: 143146 - DNA, 451 bp, Homo sapiens
ttataccactcagggaaagaacgagttttaggggggagatttttcacactgaagccccacctttgaaaagcctgacaccaaaggcttaggtgggtctgacatgggcctcccttccaccctgagacccctccatcctctccttttagcggtctttcctgtgcccatctacctggctctcctgggctgctcttcctccagccacctccaggatgaaaatctaaccccctcgcctctttctctgaggacccaattcactccacccctcaggtggaatgccctgtcagtttggaccaaamgttcctggattctgttgtgctgtcatttgtgttccatccctgtgctccacaactgtttgccatgccaccgttgtgcacattaacctgagttctcgtctagcttcaaagggaatggtaagggagtttccagcggaaaccctcatgagcacctaaac

SEQ ID NO: 143147 - DNA, 582 bp, Homo sapiens
caagttatacacttacaaagtacaatgatgggacaggcacaggatagatatgtccattacaaaagggagaaatagagaagaagaaaggggtaactggtctctagtaggtccaaaaaccagcagggaaaacacgaagtcttaaagctggagaataatctgctttgactccatgtcctgcatcccgggcacacaagggtggaggttgggcccctaacgcctcaggcagccccattgctatggctgtgctaggctcaatccactcattctctcacaggttggagtcttgtcttgcagctttcccaggctggagttgcatgctgggtaccccatgcccatgactccactaggaattgccctagtgggaactttctgcagtgacttaactccaggataagttctcttcctgggctcccaagctctccaatacattatttgaaatctaagtagaggccmcgatacctccacagctttgctttctgcacacctgcagaaatagcaccctgtaaacaccaccaaggtgtacctctgaagcaggagtacgagctgcacttgggcctgcctgagccacagctggggcaacca

SEQ ID NO: 143148 - DNA, 605 bp, Homo sapiens
agtttgcctcagtcctttcagcgtgttttttccttcttgttcctgcggtgtatgggagccagtacccagggatgctcactattctgcttgttttgccagcacttcagtggggcagtgtaccccaaagggtggcttctgggtcaatgttgyccatagcactgttgatctgatgagactcccagagagtctcatcagtgtactccagcagcttctcagtgagtttcagcaacaccttagcaagtggtttcccagcgagtcttgttagaacctcaatgggcagcttcccagagaatcttattgttgcctcagagagcagctgcctagtgagttttttgggcaccccaacaggctgcttccagctagctcctcagccatctggtgaggtctgactctaagccttggggacagctctctttcaagatgattccctctttggataccttgtcttagcctggatgttgtagctgattcattatctgcttttgccatgttctttaaacttttcttacccctttgtagttaatcctctgctacaagttaataattctttatattaaattttctcgtttaaattactggtgtggtttctgtttccctgctggacc

SEQ ID NO: 143149 - DNA, 490 bp, Homo sapiens
cttcactttcaaacatctttgccccatgagagttttaaagaaacatgtgttccccctttgaaagtgtcatcaacttcaggcaaaacctttctttgacytcccccacctcttgcctactttcaagaggtatggtggtttatatctgctaaacatttataggacaagtatccagataatcagagagctgaaaccaatgtagaagcatcagatgtgtaatattgtttggattgagaataacttaggcctcagtcaaattatttcattggtcttttaggtttcttggtactctgaaacctgtgcattattgtctgtttcaaaggaataaaaatgattttcttttgttaagtgtccagcagagtttttcactatttttcaaatttctactccctagaaactctttcaccctatcagatcagaaacactcccttgctctgaatccctactgagtgatttgtgtgttcagtttgctctatctagttttcctataaac

SEQ ID NO: 143150 - DNA, 623 bp, Homo sapiens
gcttctcatcatgacaaatagatgattgaaccagaagaagtgaatgtcaattggatgattgacccttattttttattcagcactattctttccctctggctacacagggtggagtgatgtgcttgccagaggctggacaaagataaacatattcccctaaggaagtggcagagtgcaactgcataagcaaatgcaaaaggttttttttctaagtttcttcagggcaacctttgatggccagaacaggaaataaaattagtagcttaaatactagaaaataataatttctaccaaatatttgcatagtgacatatttttctaagtgtttttgtatacattatttcatataatggagtaaccctgtgatgaggaagggctggtaatattataagcatttcacagattaggaaattaaaatgtatagaggttatatgaatctcaagtagaacaaccaggcttaggaactcaaacttttggtttgtttccstgtgtgtgtgtgtgtgtgtgtgtgtttgttttctagtaaaatatttcacttcatcttttttaaaaaagagaacaataaatacgaaaacaaaaaaaaaaaaaaaagaaaaagagagttgaacaataacaacgaaaac

SEQ ID NO: 143151 - DNA, 498 bp, Homo sapiens
caaatgcaacaaaaacaaaaataaataaatggaacctaattaaatgaaaaagcttctgcacagcaaaaaatcagcagagtgaacagccaacccacagaatggaaggaaatatttgcaaactatgtattcaacaatgggctaatatccaggacctgcaaggaactcaaacacatcggcaagaaaaaaaaatcccattaaaaaktgggaaaatgacatgaatatacatttctcaaaagaagatatagaaatggccaagaagcatgaaaagatgctcaacatcactaatcatcagggaaacgcaaattaaagccacaatgaggtaccaccttattcctgcaagagtagccataattaaaaagttaaaaaacaatagatgttggcatggatgtggggaaaaggaaacacttttacactgctggtgggaatgtaaactagtacaacctctatggaaaacagtatggagagttcttaaagagctaaaagtagatttatcatttg

SEQ ID NO: 143152 - DNA, 599 bp, Homo sapiens
tttcaaaatactttaaaggagaaaattatgacatctaaatgaaacaatgagggtaaaattgcagttaaataccatttcctaaaccaatcacttttytacttttgtactgaatcaatcttttctaattcaatcacaatgagcattaagaatggttttcagagtattcgggacccatcatctaatggtataaattggtcctaatttcatactcttaaacctgaagttttttgccgtaaagacaaaactcaacaaaactgatgtttcttttcttttcttttcttttttcttttcttttttctttctttctttctttctttctttctttctttctttctttctttctttctttctttctctctctctttctctctctctctctctctcattttctctttctttctttctatcttcttgctttattgcccagactgaagagcagtggctcattctcagctgactgcaacttcagtgttcaagcaattctcctgcccagtctcctaagtttctgggattacaggtatgtgccaccactcctggctgatttttgtgtttttagtagagacagggtttccccatattggccaggcttgtctccaacc

SEQ ID NO: 143153 - DNA, 409 bp, Homo sapiens
gatcatatcacttagctctgcttcttyttgatgataagaacaccaaaaatctagtccctcagaatatttcccaaaaacaatacaagattatctaatatacctacaggttgtacatcagattcatttattctacattactgcacctttacaacttttgcccttcatttacctattttcttcccaccaatataaccacctttttgaatgtattaaacttataaaaatagatttcaaatatgagtgggaccatgaagtattttttctctgtgtgtctgtcttatttcacttaggaaacctaccatttacatgtctcctaaatttagtacagaaataaagtgctagccaagaatgtgtctctgttttgttagattaatttttttccaagttatcctctttatcaatttttact

SEQ ID NO: 143154 - DNA, 277 bp, Homo sapiens
tccagcttcagccccaagctagcatggaggaccacagagagactgtgtaaaagattttacagaaatctgctttaaattgtcacttatgacatgtacttacggatttttatccagtcatcaagagcagttcttgagtaactgaaaatcttcacattctttccaaaatgatagcactagtttttaagaataagaaacatttctaaataatgatcttgataacagcatagyatttagggcatataatgtgcaaattttgctttgaaaattggattgaaag

SEQ ID NO: 143155 - DNA, 385 bp, Homo sapiens
ttctaaataatgatcttgataacagcatagcatttagggcatayaatgtgcaaattttgctttgaaaattggattgaaagaagttggtcttacatttggctctcaatatgtaagttttcaaaacatttttaatatctgtggttagtgttttgtttgtcttgtagttaaaattaatcatctctatgctttattagaagttacaagcaaaattgtccttgtgactttacatttcctggtaaattaacttcttgatagaacaatttttgcttattgacacatgtctatgcatgttttgtttctttctcatttatttatttatttatttattttcgcagtggatattactctgaatcatgataagccaacagtcatatctttcgatgtg

SEQ ID NO: 143156 - DNA, 385 bp, Homo sapiens
ttctaaataatgatcttgataacagcatagcatttagggcatataatgtgcaaattttgctttgaaaattggattgaaagaagttggtcttacatttggctctcaatatgtaagttttcaaaacatttttaatayctgtggttagtgttttgtttgtcttgtagttaaaattaatcatctctatgctttattagaagttacaagcaaaattgtccttgtgactttacatttcctggtaaattaacttcttgatagaacaatttttgcttattgacacatgtctatgcatgttttgtttctttctcatttatttatttatttatttattttcgcagtggatattactctgaatcatgataagccaacagtcatatctttcgatgtg

SEQ ID NO: 143157 - DNA, 385 bp, Homo sapiens
ttctaaataatgatcttgataacagcatagcatttagggcatataatgtgcaaattttgctttgaaaattggattgaaagaagttggtcttacatttggctctcaatatgtaagttttcaaaacatttttaatatctgtggttagtgttttgtttgtcttgtagttaaaattaatcatctctatgctttattagaagttacaagcaaaattgtccttgtgactttacatttcctggtaaattaacttcttgatagaacaatttttgcttattgacacatgtctatgcatgttttgtttctttctcwtttatttatttatttatttattttcgcagtggatattactctgaatcatgataagccaacagtcatatctttcgatgtg

SEQ ID NO: 143158 - DNA, 385 bp, Homo sapiens
ttctaaataatgatcttgataacagcatagcatttagggcatataatgtgcaaattttgctttgaaaattggattgaaagaagttggtcttacatttggctctcaatatgtaagttttcaaaacatttttaatatctgtggttagtgttttgtttgtcttgtagttaaaattaatcatctctatgctttattagaagttacaagcaaaattgtccttgtgactttacatttcctggtaaattaacttcttgatagaacaatttttgcttattgacacatgtctatgcatgttttgtttctttctcatttatttatttatttatttattttcrcagtggatattactctgaatcatgataagccaacagtcatatctttcgatgtg

SEQ ID NO: 143159 - DNA, 434 bp, Homo sapiens
atgaattctggaatcttgcaagtcttccagagggaactcacctgtcccatctgcatgaactacttcctagacccagtcaccatagactgtgggcacagcttttgccggccctgtttctacctcaactggcaagacatggcagttgttgctcagtgctctaaatgcaaggagacaacatggcagagaaacctcaacactgacatttgtttgaagaacatggcttccattgccagaaaagccagcctccggcaattccttagctctgargagcaaatatgtgggatgcacagagagacaaagaagatgttctgtgaagtggacaagagcctgctctgtttgctgtattccaactctcaggagcaccggaatcacagacactgtcccattgagtgggctgctgaggaacgccgggtaagtgatgcctctgaagatct

SEQ ID NO: 143160 - DNA, 434 bp, Homo sapiens
atgaattctggaatcttgcaagtcttccagagggaactcacctgtcccatctgcatgaactacttcctagacccagtcaccatagactgtgggcacagcttttgccggccctgtttctacctcaactggcaagacatggcagttgttgctcagtgctctaaatgcaaggagacaacatggcagagaaacctcaacactgacatttgtttgaagaacatggcttccattgccagaaaagccagcctccggcaattccttagctctgaagagcaaatatgtgggatgcacagagagacaaagaagatgttctgtgaagtggacaagagcctgctctgtttgctgtaytccaactctcaggagcaccggaatcacagacactgtcccattgagtgggctgctgaggaacgccgggtaagtgatgcctctgaagatct

SEQ ID NO: 143161 - DNA, 471 bp, Homo sapiens
tataagttagtgtgactctttggtaggatttctaatcagaccacagatgttacccaagcatgctcatctgtttccatacaaacctataggaataccccaacaaatacaagaaactgggccatttcacactgttcccaatgggctgcctggataaattctggacacaagagttatttgtcagtcatggaaatttcaggtgacccttctaaggctgagtcagtaggaatttgaatcctggtgggcaagtacattgaaatgtgagctaaatttcaggcagaaggagcaagagtgcaaccttagggaaagcatgaaatgaaatatcagcactaattaatattgaataagtcataacacataacgggaaatgtggcgagaaatgtagactggtgtcttgatgaagacagaaatatgtgagaaacatgggaactagtatttaatataaggagaastctaaggacttgagaagaattc

SEQ ID NO: 143162 - DNA, 593 bp, Homo sapiens
aagtccttttcgttactctcctttatttgataacgctgctgaattttagtgaaagcaatgaaaaatcttagaattgtaaatattctccagaggtcatctaagtcattgtaaggaatttttcatagtttaataagattaaaactcaagtgagatggcaaccaccatcacatatcaaattatatcatatatttatttggtcaaaaaattgtgttttgatttccaaactgggatgttttggggagctttctcatttttttcagtttcactatttttcatctctcatcattaccttactaatttaaagttatgtgtaaatgctgaatgaatgaatgaacattcattaatgtcttctcaattyaattgtataatattaatacactcattacacatatatttacacacacctatgtgtacatacatgtataaatatcaactccatatattcattatgcatacatatctgttgcagcaaacactagatattttcattttttcaaaactatattgaagaatgatagaaaatgcaaaataacaacaattaatatcctcataattcataaaatctatagtaagaatatgaattacagatggta

SEQ ID NO: 143163 - DNA, 593 bp, Homo sapiens
aagtccttttcgttactctcctttatttgataacgctgctgaattttagtgaaagcaatgaaaaatcttagaattgtaaatattctccagaggtcatctaagtcattgtaaggaatttttcatagtttaataagattaaaactcaagtgagatggcaaccaccatcacatatcaaattatatcatatatttatttggtcaaaaaattgtgttttgatttccaaactgggatgttttggggagctttctcatttttttcagtttcactatttttcatctctcatcattaccttactaatttaaagttatgtgtaaatgctgaatgaatgaatgaacattcattaatgtcttctcaattcaattgtataatattaatacactcattacacatatatttacacacacctatgtgtacatacatgtataaatatcaactccatatattcattatgcatacatatctgttgcagcaaacactagatattttcattttttcaaaactatattgaagaatgatagaaaatgyaaaataacaacaattaatatcctcataattcataaaatctatagtaagaatatgaattacagatggta

SEQ ID NO: 143164 - DNA, 483 bp, Homo sapiens
atcagtagataaatatgctgaggaaagtacctagtctactgtcatttaaatagatttataaaactgtgactgtgaaatataatgttacagatttttttgtcataccaaattttatcttttgaaaatgtcatgttcttagaaaactatgttaaatcattgtttttgtagaaaaatgttaacttagtagtttacattgaaggcttagtgatgcttttagtttttaaagtatagtatttttaattacttaaactatagagaatagtttaagtaccctgttttttataagtaaacatttaagttgctgaaagaattatcctattgaaatctagtttgatgatgtaagccrgaaaaggcactaaaccttgcagcaagtattgtgtgaaaaaataacagaattgtttatagactacattattctcttgtattcttcagcgcatgtgtctctatcggtctatagcttcaacaatgccagaactctggaat

SEQ ID NO: 143165 - DNA, 526 bp, Homo sapiens
tccttcttactcagaggacgatgtccaaatgcygtacctagacattcaaggcctttcaccacctcaccctggctcctgcccaacctctgggccttccgcacacaccagtcaaatgcagtaatttttcaggagcacctactttgtgtcaggcactgctaaaggcacttgggatgaggaggtgagagagataaggtccctgacctcacacagctcaaattctagtggagagatgcaaaatggacaagaaaacaatggcaccagtctgatgactagagatgttacaagtgttttgaaggaaccaacagggcaatgtgctgaggtgtgacttctctaagacatggcataaactgagacctcaaggacaagaagaagccagccctgggaagttccggaggaagggagtttcttcccctagaagagggcacagcaaatgctaaggccctggggcaggagcaagctttcagaggacagagtcagccaggggctggagtgagtgaaggggagcagggaaagagatgaggccagc

SEQ ID NO: 143166 - DNA, 526 bp, Homo sapiens
tccttcttactcagaggacgatgtccaaatgctgtacctagacattcaaggcctttcaccacctcaccctggctcctgcccaacctctgggccttccgcacacaccagtcaaatgcagtaatttttcaggagcacctactttgtgtcaggcactgctaaaggcacttgggatgaggaggtgagagagataaggtccctgacctcacacagctcaaattctagtggagagatgcaaaatggacaagaaaacaatggcaccagtctgatgactagagatrttacaagtgttttgaaggaaccaacagggcaatgtgctgaggtgtgacttctctaagacatggcataaactgagacctcaaggacaagaagaagccagccctgggaagttccggaggaagggagtttcttcccctagaagagggcacagcaaatgctaaggccctggggcaggagcaagctttcagaggacagagtcagccaggggctggagtgagtgaaggggagcagggaaagagatgaggccagc

SEQ ID NO: 143167 - DNA, 489 bp, Homo sapiens
ttagctttgttttgtggtgtttaattagagttttactttcttttttgtatttttcaataccccttgaattttccataatcattatataacatctctataattgggggatgtgatagtttaagtgygttccccaaagttcatgcattagaaacttaatccccaatgcaacagtgttgaaaggtggggcctttaagaggtgattagatcatggggcctctgacctcatgaatgaattaatgtttttatctccagagtgggttcattatggtgagattgggtttgttttaaaagtgagttcagcccccttttgctgtccttcacgcttgcctttccaccttccaccatgggatgatgcagtaaatagacccttgaaagatgccagtgccatgctcttggacttctcagtcttcagaactgtgaacgcatacatttctcttcttataaataacccggtttcaagtggtctcttacaatagcacaaacagacta

SEQ ID NO: 143168 - DNA, 561 bp, Homo sapiens
actgagttatgctcagtaacaaacatgaccagtgtgccatagcttaaaacaaaggcttacttctcactgatgctacatgtccatcatgggttggctgtgagctctgccctgtgtcattctcactcagagaaccagaytgagggaggttccatctccatgctgccttgattgccaagagaagaaatggggaaaaatagcaaacagcatggtggttattaaagcttccatccagaaatgacacatgtcacttttcaaagctcattggccaaagtaaggcatgtggctatgactaatgtcaaaagaggtaaaccaattcaatttatcatgtggctagagagtaaggaactggagatatttctatagcacgaatgactaaccaaaccaaattagtacactaaaaagaagagagagaagaggaagagggggaggaggaagaggacaagaaaggcactgatttgctgagagagtagaactttcctggcctcatgctcttatctactcctgatggcagcgttggagaaattccattcaatgtggcatctgtctctataccagtctcat

SEQ ID NO: 143169 - DNA, 649 bp, Homo sapiens
gggtttctgaattactccacttatctcttcttggccttaagattgctttttataaattgagatgatggaaatgtttctttcttcccctgagaggcataaagggaaccaattccatttcataatccaaaacataagccttaattttccatttcctctgcagccacagtaaagctgctaatccttaaacctgtgctgatggtccccatgttggacgtcaaaggaatctataagcttaccctgcttccctgtggtttatctgaattgaaccctgtacaacagacatgggaagcwaaagtcttgagattgttaggggctcctttaagacaagggatgtatttgcactctgttgtgcaacatttagtgagcaactactatgtgcctgacactgcactgaatcagggagacacagaggtgagtaagtcccaacccctacctacagatggagcagctgattactttcttactatacggtgagtggcgaggtacaagacgcaggagtatgaccctgatggtggtgctctggccccatgagttaccacgtgatgcagcagtcaagacttctctttgtcctacccagggatgactcaagattgaacctatgtggaatacagctgaggcagtttctacattagcctcttcctcactcttt

SEQ ID NO: 143170 - DNA, 427 bp, Homo sapiens
tagaacatgcagtgatgggtccagagatgacctttgacagaactggggaccttctgcagtgaacagcagggaaggtagggagcatggcatggcaggtatggattatgagaagctgcagactccctgactggaagatgactggtgaggttccctccttaacttcactgagccttagtttcctccactgtaaaatgggtatgatcccagtatccaatgtctatgggcagcggtggggattagatggtgtcatgttgtacaattcttagcacagtgcctagaacaaactaagccctcactaaatgtcagcttctattaatattcatatccatatccatatccatatccatatccttgtcatcaacgctattatcagcaggggaagctgtrcctcagggctgcctgtgcctatgcctgcctttgtggccaa

SEQ ID NO: 143171 - DNA, 535 bp, Homo sapiens
gcttaggttgatcccctttactgggtgggaccccaagaagtaaaaggaagaaggtggaggtgaggagggctgctaagtccaggggaggaagaagggcttttctccgataaatatttggtctttagacatcatctttagagaagatctaacatccttttgatgggggtgactttgcatggcatccaacaaaaggtgctggtattgcctcattccaatcttctgggcaaacgtgtaactctttgcctgataacccttttctgacagcagacacaccatcagcccacatactgggcaagccagacctggtggagagttggtacccgctgtgagcagccctcaacaagtaactgatgggagttgttgtgtacattctccagctccctygccctcggggaggatgactctgaggccccgaggaccctggtgggactgagctccggtggcccccagtggtgggttgcttaatgatgcatcctttgttggcctttcctccctgccactcctctcccctcactggtattttctggaatcaatt

SEQ ID NO: 143172 - DNA, 437 bp, Homo sapiens
gcagtatttgtttttctgccaagctaagtgagagaaatcaaagttacttttaaatgaaggaatgagaaaagagtgaaagtgttgaatagtgcattgggggataacagatttttttggataattgacaggtcagaggttccttggaggatcagaatgagagcagaaggagttggtattctgaagggatgtcttaattgagctkcccttcctggcaaatgcagttcttgattcagtatggagttgagaaaattgcactgttcttggagttagggagtctgggctcacatgaagcagtttttcttcctctgcaggtccagagggaagagcttagtccctggagaaacagactgaaaagacaggttgtcaggcacccagccaagctgagctgtacttcacacttaggtagactaaatgttttcaaaagaaatggagtcata

SEQ ID NO: 143173 - DNA, 437 bp, Homo sapiens
gcagtatttgtttttctgccaagctaagtgagagaaatcaaagttacttttaaatgaaggaatgagaaaagagtgaaagtgttgaatagtgcattgggggataacagatttttttggataattgacaggtcagaggttccttggaggatcagaatgagagcagaaggagttggtattctgaagggatgtcttaattgagcttcccttcctggcaaatgcagttcttgattcagtatggagttgagaaaattgcactgttcttggagttagggartctgggctcacatgaagcagtttttcttcctctgcaggtccagagggaagagcttagtccctggagaaacagactgaaaagacaggttgtcaggcacccagccaagctgagctgtacttcacacttaggtagactaaatgttttcaaaagaaatggagtcata

SEQ ID NO: 143174 - DNA, 648 bp, Homo sapiens
gttaagaaacaaacaaacaaacaaaaaaccactacatgatttctgcataaggccaaaacttacttaaacttttattctgtttctgtgcgtgatactaactcagtgtgtatcactggctttgtgatttatcagttgggtaaaattcattctctagcataataggttcaggttcatgctacgactatatctacaagattctgtatttaaaaattggcattcaagcatctacaagttcttgtagacaaataatacacaatctatattgtctttaatatctgtaaatctacaaaactttgaagataatatatcctgtactgactcagcataattgtcaattttcaaagtttcccattttgaaatattaaaaatactcatagtgataagtatcacttttactacatcacgtaagtttgcacaaacagatgtttttctatatgtaaagatagtgaccaaaaatttatgtaaaaattgtaataactagatgtttattagtttccaattgctgacctacaaattattgctagcttggtctaagacaactcaacwgtattatctgattacccaaaatactcatattgatatatatcacttttactacaccaagtaagtttgcacagatgtttttctatatgtaaagatattgaccaa

SEQ ID NO: 143175 - DNA, 635 bp, Homo sapiens
catacaaaatcatttttatggctcagattatcattgacatctttttaatgctcatatgaaaaccaaaacatatttctgtagagctggtggttctcaagtagtaatatagggactcagattccttccatcttctggctcctttgttctcaatacatgactttaaagtctcccctgctcatctgtgccaagtccgtgaaggaaatgagcattgagaatcacctctggaaggctctcatggtccaggccttcaattttcacgcatcactactgctaattttccatgtgctaaatatctgtgatttgaccgtaccctactataagaaacattgacaaatacacattcacattgatctaggaagaaaaagaaatgggtttggtgagcagatattcattatatgtttcaatgacatatttttcaattaaaattagtatatgtgtatatatgtgtgtgttcacatacatgtaatattagagtgtctctatattggaattaatccttaatatatgcctatttgaattcaggaattccctggaagttcttaatsgtatttttgaattcttacatttttctcccctcattgtttccatttgtatttaacttgaatataagtggaaaatatggaacacatgacttc

SEQ ID NO: 143176 - DNA, 431 bp, Homo sapiens
gaattcctatattaactcttcattacacagaaacacatttccttattgattatgtttataaaataaaatttcccttttctatttaaataaaattttaaaaagagacacagaactattataaaatatactttgtacttcatctktcttttcatttccagtttttgttggagttagagaattttgccaagaacatgttctttaattcccagtttatcatatagaataatgaaataaacaatgaagaatatgctatcttctctgtactctgctagcagtaattttcaaggacgtcatttagataaaataaataaggcaaagaagtcaatttctagagatgctctgtttttgaaaagtaagcctgtggcgatacaacacaccagtacacagcccacagaatgctgactgtgtgtaaacgagaaatgtcaagtagc

SEQ ID NO: 143177 - DNA, 431 bp, Homo sapiens
gaattcctatattaactcttcattacacagaaacacatttccttattgattatgtttataaaataaaatttcccttttctatttaaataaaattttaaaaagagacacagaactattataaaatatactttgtacttcatctgtcttttcatttccagtttttgttggagttagagaattttgccaagaacatgttctttaattcccagtttatcatatagaataatgaaataaacaatkaagaatatgctatcttctctgtactctgctagcagtaattttcaaggacgtcatttagataaaataaataaggcaaagaagtcaatttctagagatgctctgtttttgaaaagtaagcctgtggcgatacaacacaccagtacacagcccacagaatgctgactgtgtgtaaacgagaaatgtcaagtagc

SEQ ID NO: 143178 - DNA, 431 bp, Homo sapiens
gaattcctatattaactcttcattacacagaaacacatttccttattgattatgtttataaaataaaatttcccttttctatttaaataaaattttaaaaagagacacagaactattataaaatatactttgtacttcatctgtcttttcatttccagtttttgttggagttagagaattttgccaagaacatgttctttaattcccagtttatcatatagaataatgaaataaacaatgaagaatatgctatcttctctgtactctgctagcagtaattttcaaggacgtcatttagataaaataamtaaggcaaagaagtcaatttctagagatgctctgtttttgaaaagtaagcctgtggcgatacaacacaccagtacacagcccacagaatgctgactgtgtgtaaacgagaaatgtcaagtagc

SEQ ID NO: 143179 - DNA, 613 bp, Homo sapiens
ccctttcatttttctatgcctcatgcttttcacatttttattgctggtaattaattaaattattcatcaaattatttctcctattttgttttgttttgttttgttttgagacagagtctttcttacyctgtcacccaggctggagtgcagtggcatgatctcggctcactgcaacctccgcctcccgggttcaagcaattctcctgcctcagcctcctgagtagctggaattacaggcacataccaccaggccctgctaagttttatttgtttgtttgtttgtttttgtatgtttagtagagacagggtttcaccacgttggccacgctggtcttgaattcctgacattaggtgatcacccgcctcggcttcccaaagtgctgggattacaggcgtgagccactgcgcctggccttctcctcttctttagattcactctctcttacccttcaccttctccaaaactttcattaatgctgtgaatttcaatttttaggtttagctatcagctgttgtttctccacactaatttcaaaacagccccgtcacatcaactcactcagcatttttcaagaatacaatacctcatcattgactatagtcacaagtctat

SEQ ID NO: 143180 - DNA, 604 bp, Homo sapiens
gttgaaccatttttgcatcactgggataaatcccacttgatcatgatgaatgatcttttgaagttattgttgaattcagtgtgccagtattttgctgaggacttttgcgtcaatgtttatcaggaatattggcctatagttttcattttttgatatacctttttctggttttggaatcagggtaatactggtctcatggaatgagtttgaaagttttccttcctcttctaattttcagaatagtttgagtaagattagtattagttctttaaatgtttagtaaaatccagcagagaagcttgggtcccagtcttatttttgctgraggaatttttattacagcttcaatctcattacttgttattagtctgttcagatattggatttcttcctggttcaatattggtaggttacatgtgtctagaaagttatccatttcttctaggtttttcaatttattggcatatagttgctcataggggcatctaatgatcctttgaatttctgtagtatcagttttaatgtctagtttttcatctctgatttttatttattttggttttctttccttttaccttaatctggctaaaggtttgtcaatttt

SEQ ID NO: 143181 - DNA, 559 bp, Homo sapiens
atctttactttagatggtcaagatgcatttaaaaacttagtattcatgttcagaaaatccttgtgagccatgtaggataccttaaaaataaaatacttttctttccaccagtggtttaatgaaaataatgatatctcttcaactggtctttcaaaaaaattaaakttggctatattgattttttttaaatgttatattaggcactttaggaaacctaaaagaaaatgtaattatttccattcaatctttttaaaaatacatctccaggccagatgcagtggctcacacctgtaatcccagcactttgggaggctgaggcaggtggacaacctgaagtcaggagttcaagtccagcctggccaacatggtaaaaccccgtctctactaaaaacacaaaaattagctgggcgtggtggtgggagcctgtagtcccagctactcgggtggctgaggcaggagaattgcttgaacccaggaggcaaaggttgcagtgagccgagatcgcaccactgcattccagcctggacaacaagagtgaaactccctctcaaaaacaata

SEQ ID NO: 143182 - DNA, 559 bp, Homo sapiens
atctttactttagatggtcaagatgcatttaaaaacttagtattcatgttcagaaaatccttgtgagccatgtaggataccttaaaaataaaatacttttctttccaccagtggtttaatgaaaataatgatatctcttcaactggtctttcaaaaaaattaaagttggctatattgattttttttaaatgttatattaggcactttaggaaacctaaaagaaaatgtaattatttccattcaatctttttaaaaatacatctccaggccagatgcagtggctcacacctgtaatcccagcactttgggaggctgaggcaggtggacaacctgaagtcaggagttcaagtccagcctggccaacatggtaaaaccccgtctctactaaaaacacaaaaattagctgggcrtggtggtgggagcctgtagtcccagctactcgggtggctgaggcaggagaattgcttgaacccaggaggcaaaggttgcagtgagccgagatcgcaccactgcattccagcctggacaacaagagtgaaactccctctcaaaaacaata

SEQ ID NO: 143183 - DNA, 396 bp, Homo sapiens
gcattgttctgaagtttgtttatataattaactataataatgttaatcattaaataattgatagaatttgtataaactcaacatatagaagatacccaggcattgtagctgtaacaaaaatagtcattatcattaaagtcaggtgacatagatattacacctaatcacccaataataaaagcaaccayagcaacaaacaaatgagtaacaccaccaataagatctattgtttttaaagcaaggagcactcacaaagtaactatgcgtcagcctcgccttaaatgtttcacatgaatttcctcctttaatcttcccaaaacttctgagagatccctctgctcccaaccccctaccattattatagatagtgactatataaatagtgaacataaataa

SEQ ID NO: 143184 - DNA, 396 bp, Homo sapiens
gcattgttctgaagtttgtttatataattaactataataatgttaatcattaaataattgatagaatttgtataaactcaacatatagaagatacccaggcattgtagctgtaacaaaaatagtcattatcattaaagtcaggtgacatagatattacacctaatcacccaataataaaagcaaccatagcaacaaacaaatgagtaacaccaccaataagatctattgtttttaaagcaaggagcactcacaaagtaactatgcgtcagcctcgccttaaatgtttcacatgaatttcctcctttaatcttcccaaaacttctgagagatcsctctgctcccaaccccctaccattattatagatagtgactatataaatagtgaacataaataa

SEQ ID NO: 143185 - DNA, 396 bp, Homo sapiens
gcattgttctgaagtttgtttatataattaactataataatgttaatcattaaataattgatagaatttgtataaactcaacatatagaagatacccaggcattgtagctgtaacaaaaatagtcattatcattaaagtcaggtgacatagatattacacctaatcacccaataataaaagcaaccatagcaacaaacaaatgagtaacaccaccaataagatctattgtttttaaagcaaggagcactcacaaagtaactatgcgtcagcctcgccttaaatgtttcacatgaatttcctcctttaatcttcccaaaacttctgagagatccctctgctcccaaccccctaccattattatagayagtgactatataaatagtgaacataaataa

SEQ ID NO: 143186 - DNA, 341 bp, Homo sapiens
ggtcttctttgaccccctcccatccactgccttccatcacagagtatttaaacatgtgatgccactggctgcaatgctattccttctctgctttaacctatttagctccttcaagtctcagctcgaatgccacttcctcaaggaagcattccctgactgcctccaactatatcagatcttscttttataaacttctggagcactgtgtgcctctacttgacacatatcactgtttaaaatttacatttatttatgtgatcatttggttaatgtttcccactgaactataagctcctggagggcaagaattgtgcttgtctttatcatcatgtgaccagtac

SEQ ID NO: 143187 - DNA, 620 bp, Homo sapiens
atttaccgagcacatgtgatgtgctgggccctgtgctagatgcttctggggtgctggagggttaaataagaggatgcatgtaaagtctcagccccgagcctgctctgctcatgctccacmaatgctacttgtggttcctgtgatttactattgccattggttattatttttaattagtatcataccctatgagtccacaatcctacacggtttacaatcagagcacagctcattcatttatcaacttaaaaaatcagaaatttcatcctttactctccctggaaggcattttaaaaggttctaaacatacaatccccagcaacattaatcaaaatccctccctctcccattcatctccctcacacccacaaaagagccagcctcactatgagcactcccaaaataatcccaatttaaatgtctttttctctttgcccccaattattttgactggcttaacctctctcccaaccagaaaaacattatttttttctatttacgagtagaaggagagaaaaacaaaaaaaggctggcaattacaggattctctttgttggatggcagagcagggagctctgtggatatgctcatatcaataacttttgccccagaattattat

SEQ ID NO: 143188 - DNA, 535 bp, Homo sapiens
acagggctttttttttaatgcttcagactaaaaatcagggacaatcaaagtgtttcacccagtgtctggcaaataataagtttgcaatatattgcaactaataygtgaatgatggtgcaatttcttagaatccctttaaaccataattctttccagattagttttattaattcaacaaacataagctgaatatgtactatgtgtcaggcactgtggattcttctggacagaagcagacagcaggaattgtgcatcaactttggcctgatttgcctgcatagtgcctgattaacaatcttatcttggtcaggtgagaagcccatatggttacttttttagtccatgactgacctagaggccctgggccaaaggcaaggagacttagtcctttcaaaatgcatttccagaatttcctaaatttgtattttgtgtgttgccagattgctttaccctgaagctgagcttccttgcagtagacaatgtcagaggctcacttcttgcacgtggataacagcctcaagcggttggctggaca

SEQ ID NO: 143189 - DNA, 511 bp, Homo sapiens
tgactatgtcactttacattcccaccaggaacacaggagttattcagtttctccacaaccttgccagcattgggtgttgccactatttttcactttagccattctgttaggtgtctagtgatatcccactgttacactttaacttgcatttccctgatgatggtgaacatcatttcatgttcttacatgccatctgtatatattctccttggtgaatgtctcttcatatcttttactcatttcagattggcttgttttttcactcttgagttttaagagttctttacatattctcaacacttgccrcctgtaagatatgtgatttgcaaatattttccagtctagtttgtcttttcacttcttaacagagtttttcacccttttttaaaaattttttaataagcccagtttaccaaactttcctcttatgaatcaggtttttggtgtcaagtctgaattctttgtctaggcctaaatcctgaagatttttaatgtttttttcctaaaagtt

SEQ ID NO: 143190 - DNA, 590 bp, Homo sapiens
ctacacttgaaggcactgcttcaggaaataggtttttttaacctcaaattacctacaaaaactcaaacttattttaaaagcaatacatcatggtggttgagaatatggacaccgggatgaaggagatctagatttaaagtgtgattcctccctttacagctgtgtgatcttgggcaagactggttcacctcttcaaaataagctttctcttctataagttgaaatcaattcctcacagggctgtagagagaattaaaatgaactaatatatgtaaacccaagctacttatattacactaaacaattacttcarttaactaatgactgttatcagtaggtcttattagtactaatgaagtgttaacaaattattttgcataatatgcctccccaaagagacaaaccctattttcagtactggctgaaatttgcactcacatacacactgcagtccttgaaaccacttgttcctttatgctaaacatgctccttacaatcttgctcacaatgtgaaattatttagaaaacactctttcacagaaaaactaaatgtaagttctttaaaataagtgctacacataaaaggcaac

SEQ ID NO: 143191 - DNA, 436 bp, Homo sapiens
ctcacagctgcatttgttaaaaaaacaaaacaaaacaaaamaaaacaaaaacaaaaaaaaaactgtcttgagatattctttaagcatgggatccatgattaaataagtttgggaatcactgtatatactgcctgtctattaacatataaaaggctttgagaagtccagcaagaaagatatctacctaatgtttaaactaatgttgtcccagcttctctgaccaacatgcatgcctataataactataacacctattaacaggacaaggaccatctttaggaaaggtttctctctggatttcttagttgtcctctatgtcctacttgaacagttagtgatgggatgtcaatccccctacaagcagcccatcattatagtcaactctatctactgagaggaaacagcagaatggacacacttcaggttttaaagtgaa

SEQ ID NO: 143192 - DNA, 456 bp, Homo sapiens
atgaattctctgcagcatgaattttctcacagctgcatttgttaaaaaaacaaaacaaaacaaaacaaaamaaaaacaaaaaaaaaactgtcttgagatattctttaagcatgggatccatgattaaataagtttgggaatcactgtatatactgcctgtctattaacatataaaaggctttgagaagtccagcaagaaagatatctacctaatgtttaaactaatgttgtcccagcttctctgaccaacatgcatgcctataataactataacacctattaacaggacaaggaccatctttaggaaaggtttctctctggatttcttagttgtcctctatgtcctacttgaacagttagtgatgggatgtcaatccccctacaagcagcccatcattatagtcaactctatctactgagaggaaacagcagaatggacacacttcaggttttaaa

SEQ ID NO: 143193 - DNA, 544 bp, Homo sapiens
attactaagtgaggaaatatagagaagaatatactttctaagccctcttttcccttaaaaatctatagcatcttaatctttacaccctactacttagcccctgatattataaagccttaatatatcttctattttatgtgtatgtrtcaaattcattcattgatctgttcagttagtcaacatttgttgagcacctttctgcacttgggtcatataggtgtaagtgacccaccatcctgtcctcgaaacccacagtctggcagaaacacctgtttctatgtctagctgtgaagcagaaggcagaagcaacagctacttctgtggctccctcagaaccattcattgatctctatcatgcagtaaattaatacttacaaaattttgagatgactggtgatcaaaaacagagttttgaagtcaactctgtgttcaaagcctagccctaccatttcctcgttctctgaccctgggcctctctgaacctcagtttccgcatccgcacagatagagatgagtgagaatagtcccagtcttacatgttcat

SEQ ID NO: 143194 - DNA, 485 bp, Homo sapiens
agatgaacaggacaggagcagctgctctggtactctcaatggaattttaagtcacagtaacctttatattgtaggcacacatataacatatgtttattagaaaggtacgaggatactgatgttgccctctcagatatgaatggcaattcacactagcatcagtttctctttgtaggaattgttagttgtgggatctgttcataggaaacgagttctgcaggtcaaaaaacggtcattgaatgcataccgtgtgccagcgtgagrttttcctctcttgtctttattattattatttttacttttggtcatttgtaattttttttcccaacaactacttgggtctgagaataaattgaagatatctacatataaatggtttttagttgcttaaaactggtgggtggaatttccttgatccagcagacatttacagagcccacaataccagctgggtcctgatcctccacattggtagcgtggctggc

SEQ ID NO: 143195 - DNA, 652 bp, Homo sapiens
tttttagttgcttaaaactggtgggtggaatttccttgatccagcagacatttacagagcccacaataccagctgggtcctgatcctccacattggtagcgtggctggccctttcatgtggtggcttcaagaaggtcgcttctcagttaaactcagcaaaagttgatcaagtgccagctctgtatcaggcccatggaagtcagtgggggcatagatatgagcaagatcccctttcggtccccaaggagctcaccatcagggagaaagatatgcaagagtggcagagaggaccatgtgcctttccaygtgtgtagaattgaatatgggtcataggaggctgtcaagacaagagcgtgagttcagaggcgagcgtgatgggagaagagcagattgtcaggacacagtccagtgatgagcatgtagtctcgggtgcattgaggatgcttgctgtctccaaaggcttgcttatgtttgagttccattggaggctcttcccgttcactccataggacactgtccccactgggaacccctagaacatgtgtatttatatccctgctatggggacagtctctcacctggttaactgtgggcatagtctcacagcacagtgattaaggataagggctttgcagtcacccacatgaagccc

SEQ ID NO: 143196 - DNA, 572 bp, Homo sapiens
aaactagtacagtcactatggaaaacagtgtacagattcctaaaagagctaaaaatgtaactaccatttgatccatcaatcccactactgagtatctacccagaggaaaagaagtcattattcgaaaaagatactcacacacacatgtttatagtggcacaattcataatagcaaaatcttggaaccaatccaaatgcccatcaatcaatgaatgaagaaactgtgagatatatatatatatatatatattacatatattttatatatatctctctaatatattatatatctctaatatatattacatattatataatatatatatctaatatataatatatataatattcctagagtatatatatctctaatatataatatatackctattcctagagaatggataatttggaggtgggaaaatacttcaaagaatatcaacatcagaagtagttacatgaggcaagaaaatacagacttcttaaaatgggatcacttctactttaaatattccaggccatatatatatatgggatatggggcatggaacatgtcagttgaaatgcagcag

SEQ ID NO: 143197 - DNA, 642 bp, Homo sapiens
gctacagctatccaatttccattacgtaagaataagatccaatagctgtcatattctgggtaagatctaagagttgtcactccctattctcatctttggtgatatattgtgcatagaattatctcagtgtgaattcagatccccagcaaaatatttgggctagctttatatctttactttcaagctggtaagaaagttgtttttctttctttcttttcctccctccctaggggtaaaagatgccccttatcaatgtaccattcccatttgttctagtctctaatgctttctttttttttttttttttcctcttgagatggagtcttggctctattgcccaggctggagtacaatggtgggatctcggctcactgcaacctccacctccaggattcaagcaattctcctgcctcattctcccgactagctggggctacaggcatgcaccaccacgccggggctaattttttgtatttttagtagagacagggtttcaccatgttrgccaagctggtctcgaactcctgacctcaggtgattctcctgccttggcctcctgaagtgctgggattacaggtgtgagccactgcacctggccttataatgctttctgaaataagactatgaaagaatgtgtgccta

SEQ ID NO: 143198 - DNA, 203 bp, Homo sapiens
agtccccaaattaagaaaggccagcagatcatgatgattagcattagctcctacaggtcatacaatacatgaaaataggttgtgactttatttctacctcctgcaaaattttttaygtgatctgctgttatccagaactgtaatgcacaggcctcatgctccaataggtcatcctagtgttcataggcgtgtgatcctatttc

SEQ ID NO: 143199 - DNA, 558 bp, Homo sapiens
cgtggtggcacacactggtaatcccagctactcatgaggctgaggcaggagaattgcttgaacctgggaggtggaggttgcagtgagatgagatcatgccactgcactccagcctgggtgacagagcaagactccatctcaaaaaagaagcagtatgttggttttgagagtagagtgtagtagctgtggagccagaatgcctargttcaaacactcttaataaccagctacgtgaccttgggcaagatattcagactgtctgtgattcagttttctcatgataagaaaataatagtgtccccccagtaaggttatgtggaggataaaataacataatgtgtgcaaatgttaacacaatgatgatgatgttagctttcctaatcctcattcttgttgggtatatctgccatctctttcccaacttccccacaaacaattaaatgcactctatttttcatgagaaaaagtgagaacaagaaagaacatttaaaacaaatgtgatttaattttatagatgatatatttttaatgttacctagggaaatgttgtcaaggtaa

SEQ ID NO: 143200 - DNA, 471 bp, Homo sapiens
agtgcttttttaaagttctgcttcctgatttccaccaagcacttcttcactatctcagctccagctccagctggcytaggtgcagtggtggttgcccctcaggacagtacaggcagaaaaccttggtaacacccatgtggtgccatttcacacagtgcatgagctggcaagacatggctatctccatctagatttcaaaggatggagctctcagagcctcaagcactaaactaaggcagagggctgctgagagggcagggcccctgcagagagtcttcaactatgacagtgcctagtatagccatgagggaagtgctaccccagagaccccagactggaagagccacttgcttgggattccagcctgggagagatacaggcacccaactgcaagccacccaactggaagccataaaaggagaagtgtgggctgtgcccagctaagccagaggagactaacttctgtccaag

SEQ ID NO: 143201 - DNA, 471 bp, Homo sapiens
agtgcttttttaaagttctgcttcctgatttccaccaagcacttcttcactatctcagctccagctccagctggcctaggtgcagtggtggttgcccctcaggacagtacaggcagaaaacyttggtaacacccatgtggtgccatttcacacagtgcatgagctggcaagacatggctatctccatctagatttcaaaggatggagctctcagagcctcaagcactaaactaaggcagagggctgctgagagggcagggcccctgcagagagtcttcaactatgacagtgcctagtatagccatgagggaagtgctaccccagagaccccagactggaagagccacttgcttgggattccagcctgggagagatacaggcacccaactgcaagccacccaactggaagccataaaaggagaagtgtgggctgtgcccagctaagccagaggagactaacttctgtccaag

SEQ ID NO: 143202 - DNA, 439 bp, Homo sapiens
  misc_feature (1)...(439): n = A,T,C or G
tgacaggtaaatgtatttctgggatctgtaagttatgaatgtaattctactgaattcctcgtgtctcttcagtaagcataaaacctatgagtggaagattgcaccttgtgtaataagcagccagttttgatcaatttttggacaagttatacagaaaaacaggcacacaaatrtcatattaaaaccctgcctattgagaggcttgtggaatggaattttgatccaaatttgaatccttgttaaaaatgcacaaggcaaagtttttaaaaagccttttggaagagccaaaaaaggccattttcaactccttgggaggttgtgttcagctcttatgtattcattagtcctcctctggcttgattccaagcctttggcatacattataaatcataacttggaaagacagaacagataagggaagaatatggcttctgaaann

SEQ ID NO: 143203 - DNA, 516 bp, Homo sapiens
aataagtaaaacttttgagatacggccataatactttgttctaaaggtctgctcagcaagagaaaagactttaccagaacgttatctgaggtgggggartagaaattacacaacttcacccttctgtaagcgtttctctcatacctaagggaggagggggggaagctgagaaacccttgtgaagatcacactagtgacacaggcccacttaaagactgagacttaatcataggatgacggactgcttcccccttctccataccttaccatcacaacaagcctcccatataaaataacaatggataaaccaggtgtggtggctcacacctgtaatcccagcactcaggaggctaaggcaggagaatcgcttgaacccaggcgtcccaggttgcagtgagccgagatcatgccattgcactccagcctgggcaacaagagtaaaactccttttctaaattaattaattaaaataaaataaaataacaatggatgacactgaaagaactgcaaggctca

SEQ ID NO: 143204 - DNA, 516 bp, Homo sapiens
aataagtaaaacttttgagatacggccataatactttgttctaaaggtctgctcagcaagagaaaagactttaccagaacgttatctgaggtgggggaatagaaattacacaacttcacccttctgtaagcgtttctctcatacctaagggaggagggggggaagctgagaaacccttgtgaagatcacactagtgacacaggcccacttaaagactgagacttaatcataggatgacggactgcttcccccttctccataccttaccatcacaacaagcctcccatataaaataacaatggataraccaggtgtggtggctcacacctgtaatcccagcactcaggaggctaaggcaggagaatcgcttgaacccaggcgtcccaggttgcagtgagccgagatcatgccattgcactccagcctgggcaacaagagtaaaactccttttctaaattaattaattaaaataaaataaaataacaatggatgacactgaaagaactgcaaggctca

SEQ ID NO: 143205 - DNA, 624 bp, Homo sapiens
cctctccaactgctttaagaatggctcagaagaagtttgaaatcatgcaaacagaagtaaaacaggaaataaatgataaaaattatagtgacaaatacttccaaatggagaccacytttatattttgaaagtaagtctgcttcaaagtttttgggatttttaaattttttattttttattttttttagtcaatgtaaaacaattttgggcaatgaagtaagactttgattcgcttttggcatctttagtcattcctgccctgtatgctttactatattctaaggctgataaaagggtagatatcattaagaaacatttgaaaatatgatgatcagccaacaccaatggtaatagaaccagttgaagagaacttttcatagctgaagactctaaatcatggcaaaatataactcatcctgaatgtttgcagattcggtattgggctgcccatgacaaagaagaagctgcaaacagagttcaagtcaccagccaagagtactcggccaggctcgagaaccttctgccagacacccagtattttatagaagtcggggcctgcaatagtgcagggtgtggacctccaagtgacatgattgaggctttcaccaagaaagcacgtgagtc

SEQ ID NO: 143206 - DNA, 344 bp, Homo sapiens
cttctatctgacttgaacactgttatccattgctttaataacttattccttattgaatatttgtagtgcatatcaaggcaaatgtaacaccacaaatgtttcatcacacatatactatctctaataattctatattatccttcaaaaaccgtttttaataattatgagcaaattaagaaaatatacatatagctataattttcaatattaatttcmataagctaatttggattactacatattttctataaattttagaatatcaattgacaaggatccttggtcataaataaatatcctcagagaagcacatatttaattatttgtagtgagcatgcatattt

SEQ ID NO: 143207 - DNA, 572 bp, Homo sapiens
tttttctaaaatttgagaatgataaaattagtaataaattttgctaggagttatagcatcgatattgggaaaaaataaggcaactatattacaggcactagtaaacatagtattatacatatttcctagaacatatttgactataaacatttttctacaaattaagtagatattgttgtcaatgcctaatatcttacctatttttcatggaacataacatgtatgaggcaaggttagttatacacaagatgaaaaatcatggtgaaaatatgattagagtatctgctttagcaaagagagaaatggtaattctctcctcattttaaacataaacaagtttcctatctttataattaacctattgataatataaaccaaagcacttatcacagaacatagcagttgctcaattattttattgatcttcagcagttactaawacattctgtaagctagcacacaaataaggtacttcacatagaataatgtctttaaattacactatcagttgccatgtcacatttaaagaactcattctctagttattagatgtacttgaatgtacttatgtg

SEQ ID NO: 143208 - DNA, 422 bp, Homo sapiens
  misc_feature (1)...(422): n = A,T,C or G
nnnnnnnnnnnnnnnnnnnnnnnnnnnnnnnnnnnnnnntgagtttttagttgcacaatgaaatgatatctaagataagtcagttgggaaaaatgttgaatgggcagaaaaaaattctttacattaaaattataattatccacagtaaaattctatgaaaaaatccaamccagttacagactatttgtttaataaggttaaaaaatgaacgctttcttctttcatcagtatatggacaatagcatcgaatgtatatgttaaacttgttttcaatcatcaaaacacaatgtatttggcaatagattcttctaaattataatatgcaaatctattgttgccttgatcactcctttttttttcatcatcctcaattaacttccaatagccccaatcatcatcttaccctcctggtttctcctttt

SEQ ID NO: 143209 - DNA, 521 bp, Homo sapiens
aggcctaggaggaaaaaatgatttcgtgggctcagcccacagctttgctgctctgtgtagcctcaggacttggtgccctacatcccagcatggctaaaaagggtcaatgtacagttcaggccactgcttcagagggtgcaaggcccaagtcttggtggttttcacatggtgttgggcctgcgtgtacacagaagtcaagaattgaggtttgggaacctctgcctggagttcagaggatgtagggaaacacgtggatgtccaggcagaagtgtgctgcagggtcaaarccctcatggagaacctttgctagggcagtgcagaagggaaatctggggtgggagtccccacagtgggtctctactagggcactgcctagtggatctgtgagaagaggaccaccatcctccagaccccagaatggtatatccactggcagcttgcaacatgtgcctggaaaagccacagacacacaatgccagcctgggaaagcagccagaagggggctataccctgcaaagcca

SEQ ID NO: 143210 - DNA, 521 bp, Homo sapiens
aggcctaggaggaaaaaatgatttcgtgggctcagcccacagctttgctgctctgtgtagcctcaggacttggtgccctacatcccagcatggctaaaaagggtcaatgtacagttcaggccactgcttcagagggtgcaaggcccaagtcttggtggttttcacatggtgttgggcctgcgtgtacacagaagtcaagaattgaggtttgggaacctctgcctggagttcagaggatgtagggaaacacgtggatgtccaggcagaagtgtgctgcagggtcaaagccctcatggagaacctttgctrgggcagtgcagaagggaaatctggggtgggagtccccacagtgggtctctactagggcactgcctagtggatctgtgagaagaggaccaccatcctccagaccccagaatggtatatccactggcagcttgcaacatgtgcctggaaaagccacagacacacaatgccagcctgggaaagcagccagaagggggctataccctgcaaagcca

SEQ ID NO: 143211 - DNA, 521 bp, Homo sapiens
aggcctaggaggaaaaaatgatttcgtgggctcagcccacagctttgctgctctgtgtagcctcaggacttggtgccctacatcccagcatggctaaaaagggtcaatgtacagttcaggccactgcttcagagggtgcaaggcccaagtcttggtggttttcacatggtgttgggcctgcgtgtacacagaagtcaagaattgaggtttgggaacctctgcctggagttcagaggatgtagggaaacacgtggatgtccaggcagaagtgtgctgcagggtcaaagccctcatggagaacctttgctagggcagtgcagaagggaaatctggggtgggagtccccacagtgggtctctactagggcactgcctagtggatctgtgagaagaggaccaccatcctccagacccsagaatggtatatccactggcagcttgcaacatgtgcctggaaaagccacagacacacaatgccagcctgggaaagcagccagaagggggctataccctgcaaagcca

SEQ ID NO: 143212 - DNA, 497 bp, Homo sapiens
cactacacccaaaagtttaaaaaaatcatttttctcaagtatgcatgaaatagtcacaacaattgactctatattaaggcacacacaaaaacatagtaactttcatgcagtggaaatactctgtaaacacttatctcagtgcaatatgaccagaaactaaaaataaaagcaaaatataaaaatgcacgacctagaagggacataaaatgtggaatggggcaaggcaagaaagaaccctattggaatggattagaatttctaaaatatgtgtgtatgatgtatakatgcatgtacatgtatgtatatataaaaatacagatgtatgtatatgtgtgtatggttttctacccacatatacatatccttgtttatgtgaacatgcatacgatctatgtgggtagtatgtatgtatgagtatacacatgcatatattttctaatttagttcactgaaagggcaaaggtccccaacagcaatgactgcaatgagcatgtcta

SEQ ID NO: 143213 - DNA, 497 bp, Homo sapiens
cactacacccaaaagtttaaaaaaatcatttttctcaagtatgcatgaaatagtcacaacaattgactctatattaaggcacacacaaaaacatagtaactttcatgcagtggaaatactctgtaaacacttatctcagtgcaatatgaccagaaactaaaaataaaagcaaaatataaaaatgcacgacctagaagggacataaaatgtggaatggggcaaggcaagaaagaaccctattggaatggattagaatttctaaaatatgtgtgtatgatgtatagatgcatgtacatgtatgtatatataaaaatacagatgtatgtrtatgtgtgtatggttttctacccacatatacatatccttgtttatgtgaacatgcatacgatctatgtgggtagtatgtatgtatgagtatacacatgcatatattttctaatttagttcactgaaagggcaaaggtccccaacagcaatgactgcaatgagcatgtcta

SEQ ID NO: 143214 - DNA, 600 bp, Homo sapiens
agttgaaatctgactgagtaaataaaacaattaaatcattagcttaacatttcatcaattaaaaataaaaatttaaaaacaaatacttaaaataatgtaacaatttatcaccaggcaatttggactcacgacartgtatgctgttagtcagacatgcagtgttgcaatgcagcttgactgtcttgcagacagcctcaatgctatttttaaattggcagaggcagcagaccatatggctaggtaagatcctatagatgaaaacacaaaacaataaattagtggtaaggcggttacttgagtaggtaaaggaggcagccaacgctaccacagggctgggcaaagaggtgttactgaggcctgtggactggacacttgggtaggaaccagaaggccaatgggaaggaggacacaggtgcccaactgaagggtaagcatggcagtgagtatggtatgcctagaataaaggtggttgggaatagaattgggtgacactgatcagtagtttaaattcagaggtatctcttcccgactcaaaagtctcactttgggctgaaagtatacaggaagaaggtagacttctaagagaatctaaataagccc

SEQ ID NO: 143215 - DNA, 600 bp, Homo sapiens
agttgaaatctgactgagtaaataaaacaattaaatcattagcttaacatttcatcaattaaaaataaaaatttaaaaacaaatacttaaaataatgtaacaatttatcaccaggcaatttggactcacgacaatgtatgctgttagtcagacatgcagtgttgcaatgcagcttgactgtcttgcagacagcctcaatgctatttttaaattggcagaggcagcagrccatatggctaggtaagatcctatagatgaaaacacaaaacaataaattagtggtaaggcggttacttgagtaggtaaaggaggcagccaacgctaccacagggctgggcaaagaggtgttactgaggcctgtggactggacacttgggtaggaaccagaaggccaatgggaaggaggacacaggtgcccaactgaagggtaagcatggcagtgagtatggtatgcctagaataaaggtggttgggaatagaattgggtgacactgatcagtagtttaaattcagaggtatctcttcccgactcaaaagtctcactttgggctgaaagtatacaggaagaaggtagacttctaagagaatctaaataagccc

SEQ ID NO: 143216 - DNA, 600 bp, Homo sapiens
agttgaaatctgactgagtaaataaaacaattaaatcattagcttaacatttcatcaattaaaaataaaaatttaaaaacaaatacttaaaataatgtaacaatttatcaccaggcaatttggactcacgacaatgtatgctgttagtcagacatgcagtgttgcaatgcagcttgactgtcttgcagacagcctcaatgctatttttaaattggcagaggcagcagaccatatggctaggtaagatcctatagatgaaaacacaaaacaataaattagtggtaaggcggttacttgagtaggtaaaggaggcagccaacgctaccacagggctgggcaaagaggtgttactgaggcctgtggactggacacttgggtaggaaccagaaggccaatgggaaggaggacacaggtgcccaactgaagggtaagcatggcagtgagtatggtatgcctagaataaaggtggttgggawtagaattgggtgacactgatcagtagtttaaattcagaggtatctcttcccgactcaaaagtctcactttgggctgaaagtatacaggaagaaggtagacttctaagagaatctaaataagccc

SEQ ID NO: 143217 - DNA, 275 bp, Homo sapiens
agatctgttcgcaggattgttttaaagtatactgacaaaactttgagactgtaagtgacctgagatatacattatccttacttgagaatagtaatttttcaataygcgttaaagatcattacacatgagccaagacaaatgagctggcctacttactttgtatataaatgtgtaaactcctcaagaattccaataatgaactccaataaggaaattagttcaatgtctttatggccttggtgacaaatggttacagacaatcagagcattttttt

SEQ ID NO: 143218 - DNA, 275 bp, Homo sapiens
agatctgttcgcaggattgttttaaagtatactgacaaaactttgagactgtaagtgacctgagatatacattatccttacttgagaatagtaatttttcaatacgckttaaagatcattacacatgagccaagacaaatgagctggcctacttactttgtatataaatgtgtaaactcctcaagaattccaataatgaactccaataaggaaattagttcaatgtctttatggccttggtgacaaatggttacagacaatcagagcattttttt

SEQ ID NO: 143219 - DNA, 275 bp, Homo sapiens
agatctgttcgcaggattgttttaaagtatactgacaaaactttgagactgtaagtgacctgagatatacattatccttacttgagaatagtaatttttcaatacgcgttaaagatcattacacatgagccaagacaaatgagctggcctacttactttgtakataaatgtgtaaactcctcaagaattccaataatgaactccaataaggaaattagttcaatgtctttatggccttggtgacaaatggttacagacaatcagagcattttttt

SEQ ID NO: 143220 - DNA, 275 bp, Homo sapiens
agatctgttcgcaggattgttttaaagtatactgacaaaactttgagactgtaagtgacctgagatatacattatccttacttgagaatagtaatttttcaatacgcgttaaagatcattacacatgagccaagacaaatgagctggcctacttactttgtatataaatgtgtaaactcctcaagamttccaataatgaactccaataaggaaattagttcaatgtctttatggccttggtgacaaatggttacagacaatcagagcattttttt

SEQ ID NO: 143221 - DNA, 422 bp, Homo sapiens
tagatctgttcgcaggattgttttaaagtatactgacaaaactttgagactgtaagtgacctgagatatacattatccttacttgagaatagtaatttttcaatacgcgttaaagatcattacacatgagccaagacaaatgagctggcctacttactttgtatataaatgtgtaaactcctcaagaattccaataatgaactccaataaggaaattagttcaaygtctttatggccttggtgacaaatggttacagacaatcagagcatttttttcctatccactaatggtcaagaaaaaagcagacagatcctcactatcttagagaactaagtgagaaagttggtcgatgaagaggacttcatccagagaggaagggatgtagcttacagggaagatgctgcaggaggctgaggaaagt

SEQ ID NO: 143222 - DNA, 604 bp, Homo sapiens
gagttgaaatctgactgagtaaataaaacaattaaatcattagcttaacatttcatcaattaaaaataaaaatttaaaaacaaatacttaaaataatgtaacaatttatcatcaccaggcaatttggactcacgacagtgtatgctgttagacatgcagtgttgcaatgcagcttgactgtcttgcagacagcctcaatgctwtttttaaattggcagaggcagcaggccatatggctaggtaagatcctatagatgaaaacacaaaacaataaattagtggtaaggcggttacttgagtaggtaaaggaggcagccaacgctaccacagggctgggcaaagaggtgttactgaggcctgtggactggacacttgggtaggaaccagaaggccaatgggaaggaggacacaggtgcccaactgaagggtaagcatggcagtgagtatggtatgcctagaataaaggtggttgggattagaattgggtgacactgatcagtagtttaaattcagaggtatctcttcccgactcaaaagtctcactttgggctgaaagtatacaggaagaaggtagacttctaagaagagtctgaataagccccca

SEQ ID NO: 143223 - DNA, 563 bp, Homo sapiens
tagcctggtcttgtatgtgccatttccatttactttcttgagtgtaccctatccaatgaggtttgagggagttcatgacccaagtcatattaggaatttggggcctcataaaaacatcatgattaagacaaaggtgttctgtttcctgtaaagcccagtagcaggtcaacagctgcttctcaaagagtataagctttgctagcctctgacagcttctgggtctaaaaccccaaaggtatctcttcccatcttgtttctacctaaggctccaatgagcgtgttgatctaggacagttacttgcagttctactggcccatcctgtaagggccatactgttgctctgcttgtttggctggttgaaaagccacgctcactttctgtcttcagtgaaagtcatagcgttttctagtgacygcatgcagaggttgtaaaatgttacccaaatggggaatatgatgtctccagaatccaaacaaaccaatacaattttggacctccttttcagtggtagggctgcaaattctagtattttagccttagcctttggtaaaatggactgttt

SEQ ID NO: 143224 - DNA, 439 bp, Homo sapiens
gaattccagagcaccctagctgtgctctgaatgattttytctcacataggattccagaaccctgctgctgggttctgatggcttctccctcacataggattccagaaaactgctgcgaatgtctgaatgattgtaaatcacaaaggattccgtaacactaatgctctcttctgaatattggtacctcagattggattccagaacacagcagctgggttctgagtgtttgtccctcagaaaggattctagaacactcctacgagggtctgaaagtttgtccctcacataggattccagagcactactgctatcaactgaaaatttgaccctcacataggattccagaacactcctgctgttgtctgtgcctcacttggtattccagaacaatcctgctgcagtctgaacgtttctccatcacataggattccaaaacatt

SEQ ID NO: 143225 - DNA, 452 bp, Homo sapiens
tgctctgaatgattttctctcacataggattccagaaccctgctgctgggttctgatggcttctccctcacataggattccagaaaactgctgcgaatgtctgaatgattgtaaatcacaaaggattccgtaacactaatgctstcttctgaatattggtacctcagattggattccagaacacagcagctgggttctgagtgtttgtccctcagaaaggattctagaacactcctacgagggtctgaaagtttgtccctcacataggattccagagcactactgctatcaactgaaaatttgaccctcacataggattccagaacactcctgctgttgtctgtgcctcacttggtattccagaacaatcctgctgcagtctgaacgtttctccatcacataggattccaaaacattgcttctgttgtctgagtgtttgtcccaaaatagaa

SEQ ID NO: 143226 - DNA, 553 bp, Homo sapiens
aatgttctgcgcaggaaatgctcaaggagagaaggaaacacacacacacacacacacacacacacacacacacacacacaatacctttaagggtaaacaaactgtatcccacgtaaatggcaatgcagatataataagcaaatgatataataagcaagttgcaatgggacggagagaagggaaaagagatatatatatttacactcatcagactatggaggattcaccaccagactgcgaagcaacagactgggctccagagttggccacttgtccgtgaacagatgagaagagatctcatgaagttttggcacagtctggaacyctagctctttttgtaatgagttatctggcatgacgtccagtcaggagggcccttcatttctgggctcaaggaaaagaaaaaggtcaacttgtttttttgattgtctgttgtttttcagtaactaacatataggaataaattgaaatagagatttatccgaaacagcgctggatgaaagcctcaaggggctcacacaacctgttccaggacttggtgaccattgtttga

SEQ ID NO: 143227 - DNA, 553 bp, Homo sapiens
aatgttctgcgcaggaaatgctcaaggagagaaggaaacacacacacacacacacacacacacacacacacacacacacaatacctttaagggtaaacaaactgtatcccacgtaaatggcaatgcagatataataagcaaatgatataataagcaagttgcaatgggacggagagaagggaaaagagatatatatatttacactcatcagactatggaggattcaccaccagactgcgaagcaacagactgggctccagagttggccacttgtccgtgaacagatgagaagagatctcatgaagttttggcacagtctggaactctagctctttttgtaatgagttatctggcatgacgtccagtcaggagggcccttcatttctgggctcaaggaaaagaaaaagrtcaacttgtttttttgattgtctgttgtttttcagtaactaacatataggaataaattgaaatagagatttatccgaaacagcgctggatgaaagcctcaaggggctcacacaacctgttccaggacttggtgaccattgtttga

SEQ ID NO: 143228 - DNA, 446 bp, Homo sapiens
gaatgtttgttcctctcataggattccagaacactgctacgagggtctgaattattctaccccacataggattccaggacactcctgctgtggtcagaatgtttgtccctcacttagtattcctgaacactgctgttgggttctcagtgtttggccctcacatackattccagaacaccacagctgtggtctgaatgtttgttcctcagatgggattccagatcactcctgctgttgtctgaatgtttttccctcttataggcttgcagaacactactgctgttgtctgaatggttgaccgtcacataggattccagaacacccctgctcttgtctgggtgtttgtccctaaaataggattccagaacactgctgctgcgttctgagtgtctgtcccttcacataggattccagaacagtgctgatatggtttgaatatttgttcc

SEQ ID NO: 143229 - DNA, 446 bp, Homo sapiens
gaatgtttgttcctctcataggattccagaacactgctacgagggtctgaattattctaccccacataggattccaggacactcctgctgtggtcagaatgtttgtccctcacttagtattcctgaacactgctgttgggttctcagtgtttggccctcacatactattccagaacaccacagctgtggtctgaatgtttgttcctcagatgggattccagatcactcctgctgttgtctgaatgtttttccctcttataggctwgcagaacactactgctgttgtctgaatggttgaccgtcacataggattccagaacacccctgctcttgtctgggtgtttgtccctaaaataggattccagaacactgctgctgcgttctgagtgtctgtcccttcacataggattccagaacagtgctgatatggtttgaatatttgttcc

SEQ ID NO: 143230 - DNA, 446 bp, Homo sapiens
gaatgtttgttcctctcataggattccagaacactgctacgagggtctgaattattctaccccacataggattccaggacactcctgctgtggtcagaatgtttgtccctcacttagtattcctgaacactgctgttgggttctcagtgtttggccctcacatactattccagaacaccacagctgtggtctgaatgtttgttcctcagatgggattccagatcactcctgctgttgtctgaatgtttttccctcttataggcttgcagaacactactgctgttgtctgaatggttgaccgtcacataggattccagaacaccyctgctcttgtctgggtgtttgtccctaaaataggattccagaacactgctgctgcgttctgagtgtctgtcccttcacataggattccagaacagtgctgatatggtttgaatatttgttcc

SEQ ID NO: 143231 - DNA, 464 bp, Homo sapiens
atgaatgtttgttcctctcataggattccagaacactgctacgagggtctgaattattctaccccacataggattccaggacactcctgctgtggtcagaatgtttgtccctcacttagtattcctgaacactgctgttgggttctcagtgtttggccctcacatactattccagaacaccacagctgtggtctgaatgtttgttcctcagatgggattccagatcactcctgctgttgtctgaatgtttttccctcttataggcttgcagaacactactgctgttgtctgaatggttgaccgtcacataggattccagaacacccctgctcttgtctgggtgtttgtccctaaaataggattccagaacactgctgctgcgttctgagtgtctgtcccttcacataggattccagaacagtgctgatatgrtttgaatatttgttcctccatagaattctaga

SEQ ID NO: 143232 - DNA, 464 bp, Homo sapiens
atgaatgtttgttcctctcataggattccagaacactgctacgagggtctgaattattctaccccacataggattccaggacactcctgctgtggtcagaatgtttgtccctcacttagtattcctgaacactgctgttgggttctcagtgtttggccctcacatactattccagaacaccacagctgtggtctgaatgtttgttcctcagatgggattccagatcactcctgctgttgtctgaatgtttttccctcttataggcttgcagaacactactgctgttgtctgaatggttgaccgtcacataggattccagaacacccctgctcttgtctgggtgtttgtccctaaaataggattccagaacactgctgctgcgttctgagtgtctgtcccttcacataggattccagaacagtgctgatatggtttgaatrtttgttcctccatagaattctaga

SEQ ID NO: 143233 - DNA, 567 bp, Homo sapiens
agtataaagttagcattgctttttcataaatggcctttattgagttaaggcacataccttctattcctaacttgttgagagttttcatcataatcaaggctgaatttcatccaattcttcttctgcatatgcaaaagctacaaaaatgaaaatacttaaygtgatggctaatacagggtgtcaaattgattggattggaggatagaaagcattgatcctgggtgtgtctgtgagggtgttgccaaaggacattaacatttgagtcagtgggctgggaaagggagatccactcttaattgggtgagcaccatctaatgagctgacagtgaatataaagcaggcagaaaaacgtgaaaaagagagactggcctaagctcccagactacatctttctcctgtgctggacacttgcagccctcaaacatcagactccaagttcttcagctttgggacatggaccacctctccttgctcctcaaacttgcagacaacctattgtgggatctcatgatctctctagggaagcccaactaatacacctagcaacaaacttaactaaaaaggtaa

SEQ ID NO: 143234 - DNA, 534 bp, Homo sapiens
tgagttaaggcacataccttctattcctaacttgttgagagttttcatcataatcaaggctgaatttcatccaattcttcttctgcatatgcaaaagctacaaaaatgaaaatacttaatgtgatggctaatacagggtgtcaaattgattggattggaggatagaaagcattgatcctgggtgtgtctgtgagggtgttgccaaaggacattaacatttgagtcagtgggctgggaaagggagatccactcttaattgggtgagcaccatctaatgagctgacagtgaatataaagcaggcagaaaaacgtgaaaaagagagactggcctaagctcccagactacatctttctcctgtgctggacacttgcagccctcaaacatcagactccaagttcttcagctttgggacatggaccrcctctccttgctcctcaaacttgcagacaacctattgtgggatctcatgatctctctagggaagcccaactaatacacctagcaacaaacttaactaaaaaggtaaaagatct

SEQ ID NO: 143235 - DNA, 618 bp, Homo sapiens
tttgtgatgcacatctgtaatcccagctactcaggaagctgagacagcagaaatcacttaaaactgagaagtggaggttgcartgagcggagatcatgccactgtactccagcctgggtgacagagtgagactctgccacaagaagaaaaaaaagagaaactagaagatctaaaattaacagcctaacatcttgattaaaagaactagaaaaccaagtgaaaactaaccagaaaggtagcagaaaacaagaaataaccaagatcaaagtagagctgagggagatagagacactgaaaactcttccaaaaaaaaaagtcaacaaatccaggagctgtttttatgaaaaaaattaataaactagatggaacactagctaggcaaataaataagaaaagaaaggagaaccaaacacaattagaaataataagggagatatcatcactgatcccatggaaatatgaacaacaatcagagaacactataaacatatgtatgcacataaaccagaaaatctagaagaaatagacaatttccttgcaaaataaaccctccacaagactgaaccctgaatagatcaataatgtgttctgaaactgaggcagtaaaaactagcctac

SEQ ID NO: 143236 - DNA, 390 bp, Homo sapiens
gaattctgtctagtacccagaaggaagggggttcccagtgaaggcagggccaggctgcatgcacctcttcaaaaatrttctcctcatagtccacgctcaaggtgtacatcctctgtgtgcttgcagtccatggcagcctctgccttgggaacagtccagctgcacacctgcaatatggtggtgaccctcttgaatggatggttctgggccccattgcagacagcagatagggagatgctcagcccatcaagcccagagccctgccacaggcttctgtgaggcctccacctgctctgggttcttgccctgagaggctgccctgaagtcaaacagaagcaggtgggactctcttccacagctgctctctctcccactgacagctccctagag

SEQ ID NO: 143237 - DNA, 390 bp, Homo sapiens
gaattctgtctagtacccagaaggaagggggttcccagtgaaggcagggccaggctgcatgcacctcttcaaaaatgttctcctcatagtccacgctcaaggtgtacatcctctgtgtgcttgcagtccatggcagsctctgccttgggaacagtccagctgcacacctgcaatatggtggtgaccctcttgaatggatggttctgggccccattgcagacagcagatagggagatgctcagcccatcaagcccagagccctgccacaggcttctgtgaggcctccacctgctctgggttcttgccctgagaggctgccctgaagtcaaacagaagcaggtgggactctcttccacagctgctctctctcccactgacagctccctagag

SEQ ID NO: 143238 - DNA, 380 bp, Homo sapiens
tgaaggcagggccaggctgcatgcacctcttcaaaaatgttctcctcatagtccacgctcaaggtgtacatcctctgtgtgcttgcagtccatggcagcctctgccttgggaacartccagctgcacacctgcaatatggtggtgaccctcttgaatggatggttctgggccccattgcagacagcagatagggagatgctcagcccatcaagcccagagccctgccacaggcttctgtgaggcctccacctgctctgggttcttgccctgagaggctgccctgaagtcaaacagaagcaggtgggactctcttccacagctgctctctctcccactgacagctccctagagggtaactcagacagaggggatagatttc

SEQ ID NO: 143239 - DNA, 390 bp, Homo sapiens
gaattctgtctagtacccagaaggaagggggttcccagtgaaggcagggccaggctgcatgcacctcttcaaaaatgttctcctcatagtccacgctcaaggtgtacatcctctgtgtgcttgcagtccatggcagcctctgccttgggaacagtccagctgcacacctgcaatatggtggtgaccctcttgaatggatggttctgggccccattgcagrcagcagatagggagatgctcagcccatcaagcccagagccctgccacaggcttctgtgaggcctccacctgctctgggttcttgccctgagaggctgccctgaagtcaaacagaagcaggtgggactctcttccacagctgctctctctcccactgacagctccctagag

SEQ ID NO: 143240 - DNA, 380 bp, Homo sapiens
tgaaggcagggccaggctgcatgcacctcttcaaaaatgttctcctcatagtccacgctcaaggtgtacatcctctgtgtgcttgcagtccatggcagcctctgccttgggaacagtccagctgcacacctgcaatatggtggtgaccctcttgaatggatggttctgggccccattgcagacagcagatagggagatgctcagcccatcaagcccagagccctgccacaggcttctgtgaggcctccacctgctctgggttcttgccctgaraggctgccctgaagtcaaacagaagcaggtgggactctcttccacagctgctctctctcccactgacagctccctagagggtaactcagacagaggggatagatttc

SEQ ID NO: 143241 - DNA, 163 bp, Homo sapiens
tcaagcccagagccctgccacaggcttctgtgaggcctccacctgctctgggttcttgccctgagaggctgccctgaagtcaaacasaagcaggtgggactctcttccacagctgctctctctcccactgacagctccctagagggtaactcagacagagggg

SEQ ID NO: 143242 - DNA, 486 bp, Homo sapiens
gaattcacactgaaagccgaagtcctcccagaatcttgtgagaacctaaatgatctgaatagtttgtcattscttttagggatctgggaaaatctctgcacatttctggagaccgctgttatgccatttttaataaatctgttgtgcttcaattcagaagtgtgtgaggggagttgtggaggaattggcatttgggttagaaattccaggaacaacagagacagatgacacctgttttctgcttcataatgtcaagttttatgaaggctaaaacctaattctacaaaaaaaattagactgaaaaactttataggcaaaaattatcttattaaataggaaaatctaattattttattttaaaattttcttttccttagtaggacctaatcatagaaatttaaacactgtatgccaacagcctctactgtaggatggtttattgtaagtactcattttacagatttcttacaaaaactttttccgtaa

SEQ ID NO: 143243 - DNA, 486 bp, Homo sapiens
gaattcacactgaaagccgaagtcctcccagaatcttgtgagaacctaaatgatctgaatagtttgtcattccttttrgggatctgggaaaatctctgcacatttctggagaccgctgttatgccatttttaataaatctgttgtgcttcaattcagaagtgtgtgaggggagttgtggaggaattggcatttgggttagaaattccaggaacaacagagacagatgacacctgttttctgcttcataatgtcaagttttatgaaggctaaaacctaattctacaaaaaaaattagactgaaaaactttataggcaaaaattatcttattaaataggaaaatctaattattttattttaaaattttcttttccttagtaggacctaatcatagaaatttaaacactgtatgccaacagcctctactgtaggatggtttattgtaagtactcattttacagatttcttacaaaaactttttccgtaa

SEQ ID NO: 143244 - DNA, 504 bp, Homo sapiens
gaagtcctcccagaatcttgtgagaacctaaatgatctgaatagtttgtcattccttttagggatctgggaaaatctctgcacatttctggagaccgctgttatgccatttttaataaatctgttgtgcttcaattcaraagtgtgtgaggggagttgtggaggaattggcatttgggttagaaattccaggaacaacagagacagatgacacctgttttctgcttcataatgtcaagttttatgaaggctaaaacctaattctacaaaaaaaattagactgaaaaactttataggcaaaaattatcttattaaataggaaaatctaattattttattttaaaattttcttttccttagtaggacctaatcatagaaatttaaacactgtatgccaacagcctctactgtaggatggtttattgtaagtactcattttacagatttcttacaaaaactttttccgtaagagaaattagaatattgttcaacatatattgaattc

SEQ ID NO: 143245 - DNA, 487 bp, Homo sapiens
gaattcacactgaaagccgaagtcctcccagaatcttgtgagaacctaaatgatctgaatagtttgtcattccttttagggatctgggaaaatctctgcacatttctggagaccgctgttatgccatttttaataaatctgttgtgcttcaattcagaagtgtgtgaggggagttgtggaggaattggcatttgggttagaaattccaggaacaacagagacagatgacacctgttttctgcttcataatgtcaagttttatgaaggytaaaacctaattctacaaaaaaaattagactgaaaaactttataggcaaaaattatcttattaaataggaaaatctaattattttattttaaaattttcttttccttagtaggacctaatcatagaaatttaaacactgtatgccaacagcctctactgtaggatggtttattgtaagtactcattttacagatttcttacaaaaactttttccgtaag

SEQ ID NO: 143246 - DNA, 300 bp, Homo sapiens
gacacctgttttctgcttcataatgtcaagttttatgaaggctaaaacctaattctacaaaaaaaattagactgaaaaactttataggcaaaaattatcttattaaataggaaaatctaattattttattttaaaattttcttttcyttagtaggacctaatcatagaaatttaaacactgtatgccaacagcctctactgtaggatggtttattgtaagtactcattttacagatttcttacaaaaactttttccgtaagagaaattagaatattgttcaacatatattgaattcacaa

SEQ ID NO: 143247 - DNA, 300 bp, Homo sapiens
gacacctgttttctgcttcataatgtcaagttttatgaaggctaaaacctaattctacaaaaaaaattagactgaaaaactttataggcaaaaattatcttattaaataggaaaatctaattattttattttaaaattttcttttccttagtaggacctaatcatagaaatttaaacactgtatgccaacagcctctactgtaggatggtttattgtaagtactcattttacagatttcttacaaaaactttttccgtaagrgaaattagaatattgttcaacatatattgaattcacaa

SEQ ID NO: 143248 - DNA, 516 bp, Homo sapiens
tttaatatgaagattactatgactgtgttttcactttctgaattatcatgtgtcacatttttctgtaatttcagtttgagaagttgtaaaacagcatgctcaaatgtatatgttatgtatcaattatataattaattattaaaatatttggcttgtatgtttaattgastctaggcacaatattactattagcattttcttccagttttcccaacttttatttgactaatagtacaatttatttccagtttttattttatctgtcaatgttttatactgtatttacaatatttatattgttaccatatgtaaaaatgtaagacctttctattaaaggctagattacagccttacccttttgtgtaaggaaagaagcaatgcatcagtagcataatttaaaactttctctagtattacttaaatatttattccttaaaactttctcatcacatctctttttaataattataatatggtttctttgaaatgttgttgccttaattgtatccaaataat

SEQ ID NO: 143249 - DNA, 606 bp, Homo sapiens
tatgtttattcaggattttatagatcaaagtttctcttaattatgttttagaatttatgtttctgtattttttagagtaggctgtctcacagcagttaattgtgtttttactttctacctatttattatgattttgaattacattattcaagtaagaattcggggaaggtttcttttaagtttgttttgcaattttgcatttctgtgtttcatgttttagggtagggcaccttacatcagtttattgtttttagtttgaatttatataatataattttctatgacaatattcaaatctgtacascttaagacagtgtgaggcaaaaaatatgaaccatccctatggtcttttgttaatataatgatttaattgtttgtttgcttgtataaatattgcccctattttgtttatgacttgtgcattttcttcttgtttgatggccaataattgattctgtctaagtgagtaatcatggaaattgtcttaatttcaacatctattgtttatattatcctagtgtgaaagaaagacttatgcgatttgaagataatttttcaaaaactttgtaactctctctcttcgggtgtctttacttatttatttat

SEQ ID NO: 143250 - DNA, 606 bp, Homo sapiens
tatgtttattcaggattttatagatcaaagtttctcttaattatgttttagaatttatgtttctgtattttttagagtaggctgtctcacagcagttaattgtgtttttactttctacctatttattatgattttgaattacattattcaagtaagaattcggggaaggtttcttttaagtttgttttgcaattttgcatttctgtgtttcatgttttagggtagggcaccttacatcagtttattgtttttagtttgaatttatataatataattttctatgacaatattcaaatctgtacaccttaagacagtgtgaggcaaaaaatatgaaccatccctatggtcttttgttaatataatgatttaattgtttgtttgcttgtataaatattgcccctattttgtttatgacttgtgyattttcttcttgtttgatggccaataattgattctgtctaagtgagtaatcatggaaattgtcttaatttcaacatctattgtttatattatcctagtgtgaaagaaagacttatgcgatttgaagataatttttcaaaaactttgtaactctctctcttcgggtgtctttacttatttatttat

SEQ ID NO: 143251 - DNA, 606 bp, Homo sapiens
tatgtttattcaggattttatagatcaaagtttctcttaattatgttttagaatttatgtttctgtattttttagagtaggctgtctcacagcagttaattgtgtttttactttctacctatttattatgattttgaattacattattcaagtaagaattcggggaaggtttcttttaagtttgttttgcaattttgcatttctgtgtttcatgttttagggtagggcaccttacatcagtttattgtttttagtttgaatttatataatataattttctatgacaatattcaaatctgtacaccttaagacagtgtgaggcaaaaaatatgaaccatccctatggtcttttgttaatataatgatttaattgtttgtttgcttgtataaatattgcccctattttgtttatgacttgtgcattttcttcttgtttgatggmcaataattgattctgtctaagtgagtaatcatggaaattgtcttaatttcaacatctattgtttatattatcctagtgtgaaagaaagacttatgcgatttgaagataatttttcaaaaactttgtaactctctctcttcgggtgtctttacttatttatttat

SEQ ID NO: 143252 - DNA, 398 bp, Homo sapiens
atttcatgtcctgtgaagcccatatccacccccattacagtgaggggcacagggcactagacctgtaaaataatgtcttttgcctttttttcttttcttttctttttctttttttttttttttaactgagtggatgtttcttctttctctttttctgttttgtttgttttttaactaatttttaagaggtctttacaggtcagctgtggtgcctcrcacctgtaatttcaacactttgggaggatgaggcaggtggattatttgaggtcaggagttcaaaaccagcctggcgaatctggtgaaaatccgtctctactaaacttacaaaaaaattagcggggaatggtggcccaagcctgtagccccagctactcaggaggctgagacagaagaattgc

SEQ ID NO: 143253 - DNA, 398 bp, Homo sapiens
atttcatgtcctgtgaagcccatatccacccccattacagtgaggggcacagggcactagacctgtaaaataatgtcttttgcctttttttcttttcttttctttttctttttttttttttttaactgagtggatgtttcttctttctctttttctgttttgtttgttttttaactaatttttaagaggtctttacaggtcagctgtggtgcctcacacctgtaatttcaacactttgggaggatgaggcaggtggattatttgaggtcaggagttcaaaaccagcctggcgaayctggtgaaaatccgtctctactaaacttacaaaaaaattagcggggaatggtggcccaagcctgtagccccagctactcaggaggctgagacagaagaattgc

SEQ ID NO: 143254 - DNA, 259 bp, Homo sapiens
tggtcagtggctatgcaggagtcagtctttcagtgctgatctttgctgagaaaataatagtattgttcaaacagtatataggatttgcactcaatatttaataatttagtgacaaaaatctcttaaatayacattatactgatataaaataagttactcatctattaccaaatttactcttttatttaatataactcttgggataacattttcttttatgcttccataaatatgcttcacatggatatatcacatattg

SEQ ID NO: 143255 - DNA, 259 bp, Homo sapiens
tggtcagtggctatgcaggagtcagtctttcagtgctgatctttgctgagaaaataatagtattgttcaaacagtatataggatttgcactcaatatttaataatttagtgacaaaaatctcttaaatatacattatactgatataaaataagttaytcatctattaccaaatttactcttttatttaatataactcttgggataacattttcttttatgcttccataaatatgcttcacatggatatatcacatattg

SEQ ID NO: 143256 - DNA, 259 bp, Homo sapiens
tggtcagtggctatgcaggagtcagtctttcagtgctgatctttgctgagaaaataatagtattgttcaaacagtatataggatttgcactcaatatttaataatttagtgacaaaaatctcttaaatatacattatactgatataaaataagttactcatctattaccaaatttactcttttatttaatataacycttgggataacattttcttttatgcttccataaatatgcttcacatggatatatcacatattg

SEQ ID NO: 143257 - DNA, 545 bp, Homo sapiens
agaaaagacaaggtaatttcaacaacttaaccccatcatcaagagggtgttacttaagtacattatgggaggtcatagataaacaaccagtcagcctctaagcatcagaaaatccgtgatgtccattggcctgagagatkgtctgcatttctttgaaggaaaaaagcaggttttaaaacactagaaccgaatcaaatcctaaatttgaatagaaagattagaaaggcttatgcatgggaaaaagattcagggtatccaacggttaattctgactatttctgagtaatttaaatttacctataatttaaaaaaaaaaataaggtcaggtgtattgactcaaacctgtaatcccagcattttgggaggccgaggtgggtgaatcacttgagacgaggagtttgcgaccactatgggcaccatggcaaaacctcatatctactaaaaacacaaaaattagccaattggtggtgtgtgcttgtagtcccagctacttgggaggctgacgcatgagaatcgcttgaacctagggggtggaggttgcaata

SEQ ID NO: 143258 - DNA, 546 bp, Homo sapiens
cagaaaagacaaggtaatttcaacaacttaaccccatcatcaagagggtgttacttaagtacattatgggaggtcatagataaacaaccagtcagcctctaagcatcagaaaatccgtgatgtccattggcctgagagatggtctgcatttctttgaaggaaaaaagcaggttttaaaacactagarccgaatcaaatcctaaatttgaatagaaagattagaaaggcttatgcatgggaaaaagattcagggtatccaacggttaattctgactatttctgagtaatttaaatttacctataatttaaaaaaaaaaataaggtcaggtgtattgactcaaacctgtaatcccagcattttgggaggccgaggtgggtgaatcacttgagacgaggagtttgcgaccactatgggcaccatggcaaaacctcatatctactaaaaacacaaaaattagccaattggtggtgtgtgcttgtagtcccagctacttgggaggctgacgcatgagaatcgcttgaacctagggggtggaggttgcaata

SEQ ID NO: 143259 - DNA, 548 bp, Homo sapiens
agaaaagacaaggtaatttcaacaacttaaccccatcatcaagagggtgttacttaagtacattatgggaggtcatagataaacaaccagtcagcctctaagcatcagaaaatccgtgatgtccattggcctgagagatggtctgcatttctttgaaggaaaaaagcaggttttaaaacactagaaccgaatcaaatccyaaatttgaatagaaagattagaaaggcttatgcatgggaaaaagattcagggtatccaacggttaattctgactatttctgagtaatttaaatttacctataatttaaaaaaaaaaataaggtcaggtgtattgactcaaacctgtaatcccagcattttgggaggccgaggtgggtgaatcacttgagacgaggagtttgcgaccactatgggcaccatggcaaaacctcatatctactaaaaacacaaaaattagccaattggtggtgtgtgcttgtagtcccagctacttgggaggctgacgcatgagaatcgcttgaacctagggggtggaggttgcaataacc

SEQ ID NO: 143260 - DNA, 545 bp, Homo sapiens
cagaaaagacaaggtaatttcaacaacttaaccccatcatcaagagggtgttacttaagtacattatgggaggtcatagataaacaaccagtcagcctctaagcatcagaaaatccgtgatgtccattggcctgagagatggtctgcatttctttgaaggaaaaaagcaggttttaaaacactagaaccgaatcaaatcctaaatttgaatagaaagattagaaaggctyatgcatgggaaaaagattcagggtatccaacggttaattctgactatttctgagtaatttaaatttacctataatttaaaaaaaaaaataaggtcaggtgtattgactcaaacctgtaatcccagcattttgggaggccgaggtgggtgaatcacttgagacgaggagtttgcgaccactatgggcaccatggcaaaacctcatatctactaaaaacacaaaaattagccaattggtggtgtgtgcttgtagtcccagctacttgggaggctgacgcatgagaatcgcttgaacctagggggtggaggttgcaat

SEQ ID NO: 143261 - DNA, 545 bp, Homo sapiens
cagaaaagacaaggtaatttcaacaacttaaccccatcatcaagagggtgttacttaagtacattatgggaggtcatagataaacaaccagtcagcctctaagcatcagaaaatccgtgatgtccattggcctgagagatggtctgcatttctttgaaggaaaaaagcaggttttaaaacactagaaccgaatcaaatcctaaatttgaatagaaagattagaaaggcttatgcatgggaaaaagattcagggtatccaayggttaattctgactatttctgagtaatttaaatttacctataatttaaaaaaaaaaataaggtcaggtgtattgactcaaacctgtaatcccagcattttgggaggccgaggtgggtgaatcacttgagacgaggagtttgcgaccactatgggcaccatggcaaaacctcatatctactaaaaacacaaaaattagccaattggtggtgtgtgcttgtagtcccagctacttgggaggctgacgcatgagaatcgcttgaacctagggggtggaggttgcaat

SEQ ID NO: 143262 - DNA, 548 bp, Homo sapiens
agaaaagacaaggtaatttcaacaacttaaccccatcatcaagagggtgttacttaagtacattatgggaggtcatagataaacaaccagtcagcctctaagcatcagaaaatccgtgatgtccattggcctgagagatggtctgcatttctttgaaggaaaaaagcaggttttaaaacactagaaccgaatcaaatcctaaatttgaatagaaagattagaaaggcttatgcatgggaaaaagattcagggtatccaacggttaattctgactatttctgagtaatttaaatttacctataatttaaaaaaaaaawtaaggtcaggtgtattgactcaaacctgtaatcccagcattttgggaggccgaggtgggtgaatcacttgagacgaggagtttgcgaccactatgggcaccatggcaaaacctcatatctactaaaaacacaaaaattagccaattggtggtgtgtgcttgtagtcccagctacttgggaggctgacgcatgagaatcgcttgaacctagggggtggaggttgcaataacc

SEQ ID NO: 143263 - DNA, 546 bp, Homo sapiens
cagaaaagacaaggtaatttcaacaacttaaccccatcatcaagagggtgttacttaagtacattatgggaggtcatagataaacaaccagtcagcctctaagcatcagaaaatccgtgatgtccattggcctgagagatggtctgcatttctttgaaggaaaaaagcaggttttaaaacactagaaccgaatcaaatcctaaatttgaatagaaagattagaaaggcttatgcatgggaaaaagattcagggtatccaacggttaattctgactatttctgagtaatttaaatttacctataatttaaaaaaaaaaataaggtcaggtgtrttgactcaaacctgtaatcccagcattttgggaggccgaggtgggtgaatcacttgagacgaggagtttgcgaccactatgggcaccatggcaaaacctcatatctactaaaaacacaaaaattagccaattggtggtgtgtgcttgtagtcccagctacttgggaggctgacgcatgagaatcgcttgaacctagggggtggaggttgcaata

SEQ ID NO: 143264 - DNA, 528 bp, Homo sapiens
tgatatgagtgtttctccctcacatatgattccagaacactcctgctgttgtctgaatgcttttccctcacacaggktcccagaacactcctgttgggttgtgagtgtttgtccctctcctaagattccagaaaactgctacgaggttctgaatatttgcccctcacataggactccaggacactgctgctgtgttgtaaatgtttgtttctcacataggatttcagaagactcctgctgttgtcttaaagtttgtcccacacataggattccaaaacagtcccgctgttgtttgaatgtttgtcccttacataggattccaaaacaatgctgctggcgtctgaatgtttgtccctcacgtaggattcaagaacaccgttacgaatgtctgaatgtttgttcctcacataggatttcagaacaatacagctgtgatctgactgtttgtccctcaaatagggttccagaacactgctgctgggttctgagtgtttgtccctcacatcggattcctgaacaccgctgcga

SEQ ID NO: 143265 - DNA, 539 bp, Homo sapiens
agtgtttctccctcacatatgattccagaacactcctgctgttgtctgaatgcttttccctcacacaggttcccagaacactcctgttgggttgtgagwgtttgtccctctcctaagattccagaaaactgctacgaggttctgaatatttgcccctcacataggactccaggacactgctgctgtgttgtaaatgtttgtttctcacataggatttcagaagactcctgctgttgtcttaaagtttgtcccacacataggattccaaaacagtcccgctgttgtttgaatgtttgtcccttacataggattccaaaacaatgctgctggcgtctgaatgtttgtccctcacgtaggattcaagaacaccgttacgaatgtctgaatgtttgttcctcacataggatttcagaacaatacagctgtgatctgactgtttgtccctcaaatagggttccagaacactgctgctgggttctgagtgtttgtccctcacatcggattcctgaacaccgctgcgagtgtctgaatgattgctc

SEQ ID NO: 143266 - DNA, 508 bp, Homo sapiens
agaacactcctgctgttgtctgaatgcttttccctcacacaggttcccagaacactcctgttgggttgtgagtgtttgtccctctcctargattccagaaaactgctacgaggttctgaatatttgcccctcacataggactccaggacactgctgctgtgttgtaaatgtttgtttctcacataggatttcagaagactcctgctgttgtcttaaagtttgtcccacacataggattccaaaacagtcccgctgttgtttgaatgtttgtcccttacataggattccaaaacaatgctgctggcgtctgaatgtttgtccctcacgtaggattcaagaacaccgttacgaatgtctgaatgtttgttcctcacataggatttcagaacaatacagctgtgatctgactgtttgtccctcaaatagggttccagaacactgctgctgggttctgagtgtttgtccctcacatcggattcctgaacaccgctgcgagtgtctgaatgat

SEQ ID NO: 143267 - DNA, 528 bp, Homo sapiens
tgatatgagtgtttctccctcacatatgattccagaacactcctgctgttgtctgaatgcttttccctcacacaggttcccagaacactcctgttgggttgtgagtgtttgtccctctcctaagattccagaaaactgctaygaggttctgaatatttgcccctcacataggactccaggacactgctgctgtgttgtaaatgtttgtttctcacataggatttcagaagactcctgctgttgtcttaaagtttgtcccacacataggattccaaaacagtcccgctgttgtttgaatgtttgtcccttacataggattccaaaacaatgctgctggcgtctgaatgtttgtccctcacgtaggattcaagaacaccgttacgaatgtctgaatgtttgttcctcacataggatttcagaacaatacagctgtgatctgactgtttgtccctcaaatagggttccagaacactgctgctgggttctgagtgtttgtccctcacatcggattcctgaacaccgctgcga

SEQ ID NO: 143268 - DNA, 508 bp, Homo sapiens
agaacactcctgctgttgtctgaatgcttttccctcacacaggttcccagaacactcctgttgggttgtgagtgtttgtccctctcctaagattccagaaaactgctacgaggttctgaatatttgcccctcacataggactccaggacactgctgctgtgttgtaaatgtttgtttctcacataggatttcagaagactcctgctgttgtcttaaagtttgtcccacacataggattccaaaacastcccgctgttgtttgaatgtttgtcccttacataggattccaaaacaatgctgctggcgtctgaatgtttgtccctcacgtaggattcaagaacaccgttacgaatgtctgaatgtttgttcctcacataggatttcagaacaatacagctgtgatctgactgtttgtccctcaaatagggttccagaacactgctgctgggttctgagtgtttgtccctcacatcggattcctgaacaccgctgcgagtgtctgaatgat

SEQ ID NO: 143269 - DNA, 508 bp, Homo sapiens
agaacactcctgctgttgtctgaatgcttttccctcacacaggttcccagaacactcctgttgggttgtgagtgtttgtccctctcctaagattccagaaaactgctacgaggttctgaatatttgcccctcacataggactccaggacactgctgctgtgttgtaaatgtttgtttctcacataggatttcagaagactcctgctgttgtcttaaagtttgtcccacacataggattccaaaacagtcccgctgttgtttgaatgyttgtcccttacataggattccaaaacaatgctgctggcgtctgaatgtttgtccctcacgtaggattcaagaacaccgttacgaatgtctgaatgtttgttcctcacataggatttcagaacaatacagctgtgatctgactgtttgtccctcaaatagggttccagaacactgctgctgggttctgagtgtttgtccctcacatcggattcctgaacaccgctgcgagtgtctgaatgat

SEQ ID NO: 143270 - DNA, 539 bp, Homo sapiens
agtgtttctccctcacatatgattccagaacactcctgctgttgtctgaatgcttttccctcacacaggttcccagaacactcctgttgggttgtgagtgtttgtccctctcctaagattccagaaaactgctacgaggttctgaatatttgcccctcacataggactccaggacactgctgctgtgttgtaaatgtttgtttctcacataggatttcagaagactcctgctgttgtcttaaagtttgtcccacacataggattccaaaacagtcccgctgttgtttgaatgtttgtcccttacataggattccaaaacaatgctgctggcgtctgaatgtttgtycctcacgtaggattcaagaacaccgttacgaatgtctgaatgtttgttcctcacataggatttcagaacaatacagctgtgatctgactgtttgtccctcaaatagggttccagaacactgctgctgggttctgagtgtttgtccctcacatcggattcctgaacaccgctgcgagtgtctgaatgattgctc

SEQ ID NO: 143271 - DNA, 466 bp, Homo sapiens
ttgtgagtgtttgtccctctcctaagattccagaaaactgctacgaggttctgaatatttgcccctcacataggactccaggacactgctgctgtgttgtaaatgtttgtttctcacataggatttcagaagactcctgctgttgtcttaaagtttgtcccacacataggattccaaaacagtcccgctgttgtttgaatgtttgtcccttacataggattccaaaacaatgctgctggcgtctgaatgtttgtccctcacgtaggattcaagaacaccgttacgaatgtctgaatgtttgttcctcacataggatttcagaacaatacagctgtgatctgactgtttgtccctcaaatagggttccagaacactgctgctgggttctgagtgtttgtccctcacatcggattcctgaacaccgctgcgagtgtctgaatgattgcycctcacataggattctaga

SEQ ID NO: 143272 - DNA, 593 bp, Homo sapiens
aattccagaacactgcaacgggggtctgaatgtatgatcctaacttaggattccagaccactcccgctcttgtttgagtgtttgtctgtcacatgggattccagaacacttctgctagggtctgaatgtttgtccataacataggactccagaacactcccgctgttgtttgaacgtttgtccctcatataggattctagaacactgcttctaggttctgaatgtttgtccctcacgtaggattccagarcactgctacaattgtctgaacctttgtccctcatataatattccagaacacttctgtgaggatcgaaatgtttgtcacatattattacagaacacccccactctggtctgaatgtttctcccgcacataggatgacagaatactgctgagagggtctgaatgattgtccctcaaataggattccagatcaatgctgctggggtctaaaggtttgtccgtcacatcggattccaggttactgctacagggttctgaatgtttattcctcacaggggattccagatcactacttctgtgttctgaaagtttgaccctcacgtaggattctggaacactgccatga

SEQ ID NO: 143273 - DNA, 553 bp, Homo sapiens
taacttaggattccagaccactcccgctcttgtttgagtgtttgtctgtcacatgggattccagaacacttctgctagggtctgaatgtttgtccataacataggactccagaacactcccgctgttgtttgaacgtttgtccctcatataggattctagaacactgcttctaggttctgaatgtttgtccctcacgtaggattccagaacactgctacaattgtctgaacctttgtccctcatataatattccagaacacttctgtgaggatcgaaatgtttgtcacatattattacagaacacccccactstggtctgaatgtttctcccgcacataggatgacagaatactgctgagagggtctgaatgattgtccctcaaataggattccagatcaatgctgctggggtctaaaggtttgtccgtcacatcggattccaggttactgctacagggttctgaatgtttattcctcacaggggattccagatcactacttctgtgttctgaaagtttgaccctcacgtaggattctggaacactgccatga

SEQ ID NO: 143274 - DNA, 601 bp, Homo sapiens
cacacatttggaaaatgcatgagaaaactagttcccttttggagtgttaaaataactaaaaaacaggtgattatgttgaggtggctctagtgtcctgagctctgagtggagagacaggccaaggcctccgtacttccaaaaagctgcccattcttctccagctgtgcacctgattagatagtttccactccaagacccatgattggatgtagttcaattccctaccctgccgcctcagaccatgagtgacatatgtgatttgacactgggttgaataaagcaagaattataggtttttcctggatccttttctagcagggcttcctctgtgaactagaaactggccctgcctgtaaaatatttgcatttacatttgtatgtaagattatttgtattaatgaataatatatatgtgttattcatatatggaatcaatataatgacaattgttttaaaatttcagatgttttactttcmtggcacatccaggttttagagcaggcagcctgagatttcaaaagggaggcaattctctaagaaataatatgagaggcacaagtgaattttaaatattctggtaactacattttaataaatacac

SEQ ID NO: 143275 - DNA, 478 bp, Homo sapiens
tttgtccttaacataggatttcagaacactcccgctgttggttgaatgtttctcccttacataggattccagaacactgctcctggggtctgaatgtttgtccctcacataggattctggaacactgctatgattatcttaatacatgtccctcacaaaggattccagaacattcctacgagggtctgaatgtatgtcccacacataggattccagaacactgctgctggggtctgaatgtttgtccctcacatagaataccagaaaactgctacgattgtctgaatgtttgttcctcactggggattccagaacactgctactgggtctaaatgtttatccatcacttaggattccagaacactgctacgagggtcggaatgtttgttcctcacggtggattccagaacactcctgctgtggtctgaatgtttgtccctcacamagggctccagaacacttctacaagggtctgaat

SEQ ID NO: 143276 - DNA, 551 bp, Homo sapiens
gctatatttcctggttgcttttawgtactgtggttttgttaaggttttggtcaattaagaaaccactacctattttatcctttatgaaaaagctttgtacatgggaaaattgacaatattcagccacactagtcattccgggagcttctccaatctgttgtcaaaatgtgtcttctttgtactgtatgtattttcttgttaataaggtttacctctctttcctcttaggagcctttagtctcttctctttgtcactgttgcaggcactacagtctctttgttgtaagaaatatttatctttattctcagtcgacccaagctgtcatttaaactctatctctattctggtcaacactaaatgttaaaggtataaatcaataagtcagaagtttgcatacacgtttcactctgttttctttcccgagggagaatcatggaatggacagaattttatctaactgcactgttctgtagtgcagaaatgtaaccaaattttctttcttctaaatgtggttatggttggcttttttctcatgaggggtgctacaaac

SEQ ID NO: 143277 - DNA, 445 bp, Homo sapiens
acaggcaatatggtgaaattctgtcactacaaaaaaataaaataaatatggctgggcatgttggctcacacctgtaatcccagcactttgggagtctgaggcaggtggataatgaggtcagggggtggagaccagcctggccaaaatggtaaaacccattctctactaaaaataataataacaaaaaattagccagacatggtggtgtgcgcctgtaatcccagctactcaaaaggctgagacaggagaattgcttgaayctgggaggtggaggttgcattgagacaagatcatggcactacactccagcctagcccacagagcaagacactgtcttgaaaaaaaataaaaacaaaaataaataaagctagccaggcatggtggttcatgcctatagtcctaggtaattaagcggttgatgcaggaggactgctcaaacccaaga

SEQ ID NO: 143278 - DNA, 585 bp, Homo sapiens
ggttcatgcctgtaatctgaacatttggggaggccaaggcatgaggataccttcaagccaaatgtttgagtccagtacaggcaatatggtgaaattctgtcactacaaaaaaataaaataaatatggctgggcatgttggctcacacctgtaatcccagcactttgggagtctgaggcaggtggataatgaggtcagggggtggagaccagcctggccaaaatggtaaaacccattctctactaaaaataataataacaaaaaattagccagacatggtggtgtgcgcctgtaatcccagctactcaaaaggctgagacaggagaattgcttgaacctgggaggtggaggttgcattgagacaagatcatgscactacactccagcctagcccacagagcaagacactgtcttgaaaaaaaataaaaacaaaaataaataaagctagccaggcatggtggttcatgcctatagtcctaggtaattaagcggttgatgcaggaggactgctcaaacccaagaggttaaggttaccgtgagctatgattatgccgttgcacttcaggctaagtaaaagagtaagatt

SEQ ID NO: 143279 - DNA, 585 bp, Homo sapiens
ggttcatgcctgtaatctgaacatttggggaggccaaggcatgaggataccttcaagccaaatgtttgagtccagtacaggcaatatggtgaaattctgtcactacaaaaaaataaaataaatatggctgggcatgttggctcacacctgtaatcccagcactttgggagtctgaggcaggtggataatgaggtcagggggtggagaccagcctggccaaaatggtaaaacccattctctactaaaaataataataacaaaaaattagccagacatggtggtgtgcgcctgtaatcccagctactcaaaaggctgagacaggagaattgcttgaacctgggaggtggaggttgcattgagacaagatcatggcactacactccagcctagcccacagagcaagacactgtcttgaaaaaaaataaaaacaaaaataaataaagctrgccaggcatggtggttcatgcctatagtcctaggtaattaagcggttgatgcaggaggactgctcaaacccaagaggttaaggttaccgtgagctatgattatgccgttgcacttcaggctaagtaaaagagtaagatt

SEQ ID NO: 143280 - DNA, 608 bp, Homo sapiens
gaacgcctcctgtatgttgcatctatgtgcataagtcacaatctcaatggaggaatgggttttttccatgagagccttaatcccttttgaaaackgagttatcttagtggactcacagcctcacaagtgttttggatcttggtcagggagtcacaaacccacttaaggacaacatccacttattagagccaattttccaacttttcactgcctctgggtgtgagtttcagaacctcatttatgttccatgttcgtgtgggagaatgacaattttgacagatggctgggctcaggcaggagcctttcatcctgcaggtgttgagacaaaggatatgatacaacacctaaaatatgctgggtgcaggcaaaagaggagactcatattagctggttgctaggtccagttatatgtcaccacctccctttttggcagggctaaggaaaaagaggagagtcagagctaaagaaatgtcataatgtccctgcgggtaggacctatgcatgagagttgcaacacctagtcattgaacccagccatatattataatacacaatgtatacaaggcccaggcaagaaaggagagaatatcacataggtactgtgtcca

SEQ ID NO: 143281 - DNA, 608 bp, Homo sapiens
gaacgcctcctgtatgttgcatctatgtgcataagtcacaatctcaatggaggaatgggttttttccatgagagccttaatcccttttgaaaacggagttatcttagtggactcacagcctcacaagtgttttggatcttggtcagggagtcacaaacccacttaaggacaacatccacttattagagccaattttccaacttttsactgcctctgggtgtgagtttcagaacctcatttatgttccatgttcgtgtgggagaatgacaattttgacagatggctgggctcaggcaggagcctttcatcctgcaggtgttgagacaaaggatatgatacaacacctaaaatatgctgggtgcaggcaaaagaggagactcatattagctggttgctaggtccagttatatgtcaccacctccctttttggcagggctaaggaaaaagaggagagtcagagctaaagaaatgtcataatgtccctgcgggtaggacctatgcatgagagttgcaacacctagtcattgaacccagccatatattataatacacaatgtatacaaggcccaggcaagaaaggagagaatatcacataggtactgtgtcca

SEQ ID NO: 143282 - DNA, 608 bp, Homo sapiens
gaacgcctcctgtatgttgcatctatgtgcataagtcacaatctcaatggaggaatgggttttttccatgagagccttaatcccttttgaaaacggagttatcttagtggactcacagcctcacaagtgttttggatcttggtcagggagtcacaaacccacttaaggacaacatccacttattagagccaattttccaacttttcactgcctctgggtgtgagtttcagaacctcatttatgttccatgttcgtgtgggagaatgacaattttgacasatggctgggctcaggcaggagcctttcatcctgcaggtgttgagacaaaggatatgatacaacacctaaaatatgctgggtgcaggcaaaagaggagactcatattagctggttgctaggtccagttatatgtcaccacctccctttttggcagggctaaggaaaaagaggagagtcagagctaaagaaatgtcataatgtccctgcgggtaggacctatgcatgagagttgcaacacctagtcattgaacccagccatatattataatacacaatgtatacaaggcccaggcaagaaaggagagaatatcacataggtactgtgtcca

SEQ ID NO: 143283 - DNA, 608 bp, Homo sapiens
gaacgcctcctgtatgttgcatctatgtgcataagtcacaatctcaatggaggaatgggttttttccatgagagccttaatcccttttgaaaacggagttatcttagtggactcacagcctcacaagtgttttggatcttggtcagggagtcacaaacccacttaaggacaacatccacttattagagccaattttccaacttttcactgcctctgggtgtgagtttcagaacctcatttatgttccatgttcgtgtgggagaatgacaattttgacagatggctgggctcaggcaggagcctttcatcctgcaggtgttgagacaaaggatatgatacaacacctaaaatatgctgggtgcaggcaaaagaggagactcatattagctggttgctaggtccagttatatgtcaccacctccctttttggcagggctaaggaaaaagaggagagtcagagctaaagaaatgtcataatgtccctgcgggtaggacctatgcatgagagttgcawcacctagtcattgaacccagccatatattataatacacaatgtatacaaggcccaggcaagaaaggagagaatatcacataggtactgtgtcca

SEQ ID NO: 143284 - DNA, 391 bp, Homo sapiens
ctgagcgggtgttacttctgcctagcctgggccttaaagtttcttcctgtgtgatctaacagggtgtaaaccatgtcgttcgtggaaccagtgggaagatgctggcaaccaaaggttgaaagccttgcaaaaccatcatgcaaacatggagttgccgtaagcaagagagcaagaaatcagttaacattttaaacaaaattggaacaaaastaaaagttgaaaatataataatgacgggtactattaaagagagcaaggcagacaacggacatagctttcatgttcccatggaagttcctagagattcaattttgtctgcctgggtgatgatattattaatattttcttcgactaaaccagactgattgatctcaaaaacagcattcttctt

SEQ ID NO: 143285 - DNA, 391 bp, Homo sapiens
ctgagcgggtgttacttctgcctagcctgggccttaaagtttcttcctgtgtgatctaacagggtgtaaaccatgtcgttcgtggaaccagtgggaagatgctggcaaccaaaggttgaaagccttgcaaaaccatcatgcaaacatggagttgccgtaagcaagagagcaagaaatcagttaacattttaaacaaaattggaacaaaagtaaaagytgaaaatataataatgacgggtactattaaagagagcaaggcagacaacggacatagctttcatgttcccatggaagttcctagagattcaattttgtctgcctgggtgatgatattattaatattttcttcgactaaaccagactgattgatctcaaaaacagcattcttctt

SEQ ID NO: 143286 - DNA, 251 bp, Homo sapiens
aggaggtgaaacaagcttagattctacagaagactctgatagtgtggggatgctgcggattctacaggaggtgtagrcccttgagagtccctatctggagctggtgttgggctgttgggtctggggtcccttccccttaataagagatgatcttctaatgcttctgaggggctttgtggcttactaggctttagcccacaggtgctgcatagagctgggttttgttgtcaggccataaaggtttgcacata

SEQ ID NO: 143287 - DNA, 251 bp, Homo sapiens
aggaggtgaaacaagcttagattctacagaagactctgatagtgtggggatgctgcggattctacaggaggtgtaggcccttgagagtccctatctggagctggtgttggsctgttgggtctggggtcccttccccttaataagagatgatcttctaatgcttctgaggggctttgtggcttactaggctttagcccacaggtgctgcatagagctgggttttgttgtcaggccataaaggtttgcacata

SEQ ID NO: 143288 - DNA, 251 bp, Homo sapiens
aggaggtgaaacaagcttagattctacagaagactctgatagtgtggggatgctgcggattctacaggaggtgtaggcccttgagagtccctatctggagctggtgttgggctgttgggtctggggtcccttcccmttaataagagatgatcttctaatgcttctgaggggctttgtggcttactaggctttagcccacaggtgctgcatagagctgggttttgttgtcaggccataaaggtttgcacata

SEQ ID NO: 143289 - DNA, 587 bp, Homo sapiens
atttaaacacgtttcccccagaactttartgaaacagcgctggaacaaccagcgatagttaaccaggtagtctggaagtgccatagtattcactgcaagaaaagggaaactgaaattaatgaagcagacaaacctctctccgggccatggcaaaagaaatgttgatggctgatgtaataccttggttcttatcttcttagcttaaaagaatttaaacaggaaacatgcagcaaaagaagtacagcatagagtaatttattgcacacaaaaaagaaaagaatacgttgaaaatcaagtgcagaatagacggtacagtctgagaaagagattccagggcagcctgctcataagagtgagacagcattaattgttgctggagaaaccctccttctgggagttttacatgattattcataagaaggtggaaagaagtgttatagaaggcatgctttgactggtcttctgggtgcacatgtgcagtagctgtacatatttttgcatatgtttcatgtctcattagcatgcaatgacatttcacccaggaatgtgtttttacttgttaaaatgagcaaaggttcagcttgaag

SEQ ID NO: 143290 - DNA, 587 bp, Homo sapiens
gatttaaacacgtttcccccagaactttagtgaaacagcgctggaacaaccagcgatagttaaccaggtagtctggaagtgccatagtattcactgcaagaaaagggaaactgaaattaatgaagcagacaaacctctctccgggccatggcaaaagaaatgttgatggctgatgtaataccttggttcttatcttcttagcttaaaagaatttaaacaggaaacatgcagcaaaagaagtacagcatagagtawtttattgcacacaaaaaagaaaagaatacgttgaaaatcaagtgcagaatagacggtacagtctgagaaagagattccagggcagcctgctcataagagtgagacagcattaattgttgctggagaaaccctccttctgggagttttacatgattattcataagaaggtggaaagaagtgttatagaaggcatgctttgactggtcttctgggtgcacatgtgcagtagctgtacatatttttgcatatgtttcatgtctcattagcatgcaatgacatttcacccaggaatgtgtttttacttgttaaaatgagcaaaggttcagcttgaa

SEQ ID NO: 143291 - DNA, 475 bp, Homo sapiens
aacctctctccgggccatggcaaaagaaatgttgatggctgatgtaataccttggttcttatcttcttagcttaaaagaatttaaacaggaaacatgcagcaaaagaagtacagcatagagtaatttattgcacacaaaaaagaaaagaatacgttgaaaatcaagtgcagaatagacggtacagtctgagaaagagattccagggcagcctgctcataagagtgagacagcattaatygttgctggagaaaccctccttctgggagttttacatgattattcataagaaggtggaaagaagtgttatagaaggcatgctttgactggtcttctgggtgcacatgtgcagtagctgtacatatttttgcatatgtttcatgtctcattagcatgcaatgacatttcacccaggaatgtgtttttacttgttaaaatgagcaaaggttcagcttgaagacagataaaatcaaaatg

SEQ ID NO: 143292 - DNA, 590 bp, Homo sapiens
cccccagaactttagtgaaacagcgctggaacaaccagcgatagttaaccaggtagtctggaagtgccatagtattcactgcaagaaaagggaaactgaaattaatgaagcagacaaacctctctccgggccatggcaaaagaaatgttgatggctgatgtaataccttggttcttatcttcttagcttaaaagaatttaaacaggaaacatgcagcaaaagaagtacagcatagagtaatttattgcacacaaaaaagaaaagaatacgttgaaaatcaagtgcagaatagacggtacagtctgagaaagagattccagggcagcctgctcataagagtgagacagcattaattgttgctggagaaaccctccttctgggagttttacatgattattcataagaaggtggaaagaagtgtkatagaaggcatgctttgactggtcttctgggtgcacatgtgcagtagctgtacatatttttgcatatgtttcatgtctcattagcatgcaatgacatttcacccaggaatgtgtttttacttgttaaaatgagcaaaggttcagcttgaagacagataaaatcaaaat

SEQ ID NO: 143293 - DNA, 563 bp, Homo sapiens
tttagtgaaacagcgctggaacaaccagcgatagttaaccaggtagtctggaagtgccatagtattcactgcaagaaaagggaaactgaaattaatgaagcagacaaacctctctccgggccatggcaaaagaaatgttgatggctgatgtaataccttggttcttatcttcttagcttaaaagaatttaaacaggaaacatgcagcaaaagaagtacagcatagagtaatttattgcacacaaaaaagaaaagaatacgttgaaaatcaagtgcagaatagacggtacagtctgagaaagagattccagggcagcctgctcataagagtgagacagcattaattgttgctggagaaaccctccttctgggagttttacatgattattcataagaaggtggaaagaagtgttatagaaggcatgctttgastggtcttctgggtgcacatgtgcagtagctgtacatatttttgcatatgtttcatgtctcattagcatgcaatgacatttcacccaggaatgtgtttttacttgttaaaatgagcaaaggttcagcttgaag

SEQ ID NO: 143294 - DNA, 588 bp, Homo sapiens
cccccagaactttagtgaaacagcgctggaacaaccagcgatagttaaccaggtagtctggaagtgccatagtattcactgcaagaaaagggaaactgaaattaatgaagcagacaaacctctctccgggccatggcaaaagaaatgttgatggctgatgtaataccttggttcttatcttcttagcttaaaagaatttaaacaggaaacatgcagcaaaagaagtacagcatagagtaatttattgcacacaaaaaagaaaagaatacgttgaaaatcaagtgcagaatagacggtacagtctgagaaagagattccagggcagcctgctcataagagtgagacagcattaattgttgctggagaaaccctccttctgggagttttacatgattattcataagaaggtggaaagaagtgttatagaaggcatgctttgactggtcttctgggtgcacatgtgcagtagctgtacatatttttgcatatgttkcatgtctcattagcatgcaatgacatttcacccaggaatgtgtttttacttgttaaaatgagcaaaggttcagcttgaagacagataaaatcaaa

SEQ ID NO: 143295 - DNA, 512 bp, Homo sapiens
ggttgatgaaaatggctcacaaaactcacgccttggaaagsgggttttctcccttgctcttagattttctgcaacccattaaactaacttcctgatgcctcgactttcacattcgtgaaaaaggcgccattgagagtgacgtttccaggaaggctcagcccttgtcagcccctgcagagctctgaagctgttcacaagcaggccatgtggaagatttctctcaaaagccattgagcacgcgctctggctagagaaaaaagagggctgctgcacaatggacagtgtctcagacatcaggacagtttccacagtagtttaggaaaaaaggcagtgccctgagctgcagaaggtgcaatgctctggaaggaaccctgggtgcagctgaaagaggaacctgagaagcatagggccaatcgggtgaggataacccgcctgatttgggcaaaggtaaggtgcctacatagggtaataccctcctcaatgctcagcccagacctgtcctccaggtccac

SEQ ID NO: 143296 - DNA, 512 bp, Homo sapiens
ggttgatgaaaatggctcacaaaactcacgccttggaaagcgggttttctcccttgctcttagattttctgcaacccattaaactaacttyctgatgcctcgactttcacattcgtgaaaaaggcgccattgagagtgacgtttccaggaaggctcagcccttgtcagcccctgcagagctctgaagctgttcacaagcaggccatgtggaagatttctctcaaaagccattgagcacgcgctctggctagagaaaaaagagggctgctgcacaatggacagtgtctcagacatcaggacagtttccacagtagtttaggaaaaaaggcagtgccctgagctgcagaaggtgcaatgctctggaaggaaccctgggtgcagctgaaagaggaacctgagaagcatagggccaatcgggtgaggataacccgcctgatttgggcaaaggtaaggtgcctacatagggtaataccctcctcaatgctcagcccagacctgtcctccaggtccac

SEQ ID NO: 143297 - DNA, 512 bp, Homo sapiens
ggttgatgaaaatggctcacaaaactcacgccttggaaagcgggttttctcccttgctcttagattttctgcaacccattaaactaacttcctgatgcctcgactttcacattcgtgaaaaaggcgccattgagagtgacgtttccaggaaggctcagcccttgtcagcccctgcagagctctgaagctgttcacaagcaggccatgtggaagatttctctcaaaagccattgagcacgcgctctggctagagaaaaaagagggctgctgcacaatggacagtgtctcagacatcaggacagtttccacagyagtttaggaaaaaaggcagtgccctgagctgcagaaggtgcaatgctctggaaggaaccctgggtgcagctgaaagaggaacctgagaagcatagggccaatcgggtgaggataacccgcctgatttgggcaaaggtaaggtgcctacatagggtaataccctcctcaatgctcagcccagacctgtcctccaggtccac

SEQ ID NO: 143298 - DNA, 535 bp, Homo sapiens
ggcgcatgctgggattgtagtcctgtagccatttgaccaaagggctgkgagtgtttatgagaatacaactcccagcaatcctagggaggagcacacagccccgcctcttcccccagtgatacgcattgtccctgagacaggtgcatgctaagattgtagtcctgaagctctgcgaccaaagggctgggagtgtttatgagcatatatctcccagcaagcctaggaagacgcacacagccccgcctctttttccactgacgcggactgtccctgaccccagtgcatactgggatggtagtcctgcatccctgtgatgaaagttctgggagtctccatgaaactacctctcccaggaagcagaaggaggggtccacagcctagccttttcctccagtaatgcgcactgtccctgagctgggtgcatgctgggattgtagtcctgcagcccggtgatgaaaggtctgggagtgtttatgagactacatctcctaccaagcccaggaggtgcacacaaccctgcctctttctccagtga

SEQ ID NO: 143299 - DNA, 535 bp, Homo sapiens
ggcgcatgctgggattgtagtcctgtagccatttgaccaaagggctggkagtgtttatgagaatacaactcccagcaatcctagggaggagcacacagccccgcctcttcccccagtgatacgcattgtccctgagacaggtgcatgctaagattgtagtcctgaagctctgcgaccaaagggctgggagtgtttatgagcatatatctcccagcaagcctaggaagacgcacacagccccgcctctttttccactgacgcggactgtccctgaccccagtgcatactgggatggtagtcctgcatccctgtgatgaaagttctgggagtctccatgaaactacctctcccaggaagcagaaggaggggtccacagcctagccttttcctccagtaatgcgcactgtccctgagctgggtgcatgctgggattgtagtcctgcagcccggtgatgaaaggtctgggagtgtttatgagactacatctcctaccaagcccaggaggtgcacacaaccctgcctctttctccagtga

SEQ ID NO: 143300 - DNA, 534 bp, Homo sapiens
ggtgcatactggaattctcctgttgcgggattcaggaggacgagacagacctcaggttgaaacaggagaatctttattgagtgcactcaggaccagctgactcacgtcaaaaagaccgggcccggaacacagacaacacctgacttttatacacacttcacaaaaggkggtgggctagcttgaagcgagcttacagtggcgtgaaagcaggaatacagaggcaggacaaagacaggattgcacatgaccgttgccaagcaacccacatgtccattatctaggtttccctgggcatgggcttatcctataaccctcactatggtgcccaaacagctgtagttcagcctactcaggcttctcatgactttcattgtacttcttcgataaaacacaatacttgaagtcactagttacagagaacaagaatctataaactcattccataaaacaaagggaatttgtttttcttttccctgtgttgggggagtgttgggagaacctccagagcacattacataatattatcaagaattt

SEQ ID NO: 143301 - DNA, 583 bp, Homo sapiens
ttttattcttttgatgctattgtaaattgagttgttttcataattttcttctcagattattcgtattactacataaaatacagtttatttttctatgttgattttgtatgctactactctgctgaatttattaattttaatattttttgtgtggaatctttaagattttctacataaaagaatatattttctgtacacactttgatgaagtttatttcattgtcttttttaatttctctgaatgaaacttctaatacagtgttgaataaaagtggctggcaagagcagacattctgtcttctgagcttagacgaaataattttggtcttttcctctagaacatgtagtttgctgtgggtttttatacgtgaattttacaaagatggttttcttttattcgtaatttattgtttttattataaaatattttgaattttgtaaaatacattttctgtattaatgagataatgttttctaaaaattttgttaatgtgtcatatgcattgattatttttcatatgctaaaacttttgttaagaaaggctagctaagygaaccagtgagactggaaaaagaataaaga

SEQ ID NO: 143302 - DNA, 467 bp, Homo sapiens
gctaagtgaaccagtgagactggaaaaagaataaagaaatctattctggttgtgatcaattagttgtaaacaccattgcactgaaaccagccatacgctaaatcttccttacattccagtaataaattccccttggtcatggggtgtaatcttgctartatgctgctgaatgtggttagctaggatgttgctgagtagttttgcatccgtgttcataagggatattagtctatgggtttttgtagtctctttgtctggctttggtatgagctaatgctggcatcatggaataagtttggaactgctctcttcaggattttggtagattttggaaaggatttttgttctataaatgcttgatctacatcaccagtgaagccaacaaaacaagggcttttcttcatgagaggtttttaattactgattccatttccttagtagttttctatctattcagattttgtatt

SEQ ID NO: 143303 - DNA, 585 bp, Homo sapiens
ggtgtaatcttgctagtatgctgctgaatgtggttagctaggatgttgctgagtagttttgcatccgtgttcataagggatattagtctatgggtttttgtagtctctttgtctggctttggtatgagctaatgctggcatcatggaataagtttggaactgctctcttcaggattttggtagattttggaaaggatttttgttctataaatgcttgatctamatcaccagtgaagccaacaaaacaagggcttttcttcatgagaggtttttaattactgattccatttccttagtagttttctatctattcagattttgtatttctttgtaatcaagtcttgcataagtaggaatctgcccactttatctaggttttccaatttatcatcctatcatagttcacagtacacttttttaaacattttatttctttgaattagtagtaatgtcccactttcattactcattttagtatgtgaatatgctgttaatttttcgtgtgtgtagctgaagttttgccaattgttaattttttgaagaactgagagtgaacttttggttttttggaattctgttgtttgt

SEQ ID NO: 143304 - DNA, 524 bp, Homo sapiens
atatgctgttaatttttcgtgtgtgtagctgaagttttgccaattgttaattttttgaagaactgagagtgaacttttgkttttttggaattctgttgtttgtgtaatctctattgcatttatctctgctaaaatcttcaatactttcttctttctctttgctttgcatctaatttggtgttatttttctaatttactaggtgataaagttattatttatttgaaatctttgctctttttaaatgtatcttagctgcaaacttttcatcttaacactgtttttgctgtttcccataacttttgatatgttttgttttcatttttcttcctctgtatgttcctacttcttccgtgatttcttcctttacttaatttatacaattttgtaattctttaagttgtaattgtgtagttgtttaatttatacaattttgtaaactttctagcatttcatctgttattgatttaatttgagatctactatacagcccatcctggagaattccccatgtgcatttgagaag

SEQ ID NO: 143305 - DNA, 395 bp, Homo sapiens
gaattctgttgtttgtgtaatctctattgcatttatctctgctaaaatcttcaatactttcttctttctctttgctttgcatctaatttggtgttatttttctaatttactaggtgataaagttattatttatttgaaatctttgctctttttaaatgtatcttagctgcaaacttttcatcttaacactgtttttgctgtttcccataacttttgatatgttttgttttcatttttcttcctctgtatgttcctacttcttccgtgatttcttcctttacttaatttatacaattttgtaattcyttaagttgtaattgtgtagttgtttaatttatacaattttgtaaactttctagcatttcatctgttattgatttaatttgagatctact

SEQ ID NO: 143306 - DNA, 395 bp, Homo sapiens
gaattctgttgtttgtgtaatctctattgcatttatctctgctaaaatcttcaatactttcttctttctctttgctttgcatctaatttggtgttatttttctaatttactaggtgataaagttattatttatttgaaatctttgctctttttaaatgtatcttagctgcaaacttttcatcttaacactgtttttgctgtttcccataacttttgatatgttttgttttcatttttcttcctctgtatgttcctacttcttccgtgatttcttcctttacttaatttatacaattttgtaattctytaagttgtaattgtgtagttgtttaatttatacaattttgtaaactttctagcatttcatctgttattgatttaatttgagatctact

SEQ ID NO: 143307 - DNA, 540 bp, Homo sapiens
tggtaagtgttttccagagagtgaccacaatcaagctgcagattgaacctaaatctgtgtccaacccagagtctaatactgcaaaccagacttggggtwgctggtgaaagttgacctatctgtctcatggttgaagaattcctagaccatacctagcagagtaaccagaagtggacttttagcccacttcttgagatatcagtcaccactgttgacttcttcagcataacagtcatctgactccagccataccatgtgtcccttgaagctaatctgtgccaccttttaggcttttgaggccaattgagctctgacttcgtggcatttttcaccacatcgactaaaatgggccaactctacgatgttccctccttttccacacatgttggttagataattcgttgattaggtatgcttttctctgaaaggggattatctcttccagattgcctccaagataaggatgaaatgtttgggggatctaggaatctatttcacaaatttggaatttcgtgctaataattcctgggtgaaatgtct

SEQ ID NO: 143308 - DNA, 541 bp, Homo sapiens
atggtaagtgttttccagagagtgaccacaatcaagctgcagattgaacctaaatctgtgtccaacccagagtctaatactgcaaaccagacttggggttgctggtgaaagttgacctatctgtctcatggttgaagaattcctagaccatacctagcagagtaaccagaagtggacttttagcccacttcttgagatatcagtcaccactgttgacttcttcagcataacagtcatctgactccagccataccatgtgtcccttgaagctaatctgtgccaccttttaggyttttgaggccaattgagctctgacttcgtggcatttttcaccacatcgactaaaatgggccaactctacgatgttccctccttttccacacatgttggttagataattcgttgattaggtatgcttttctctgaaaggggattatctcttccagattgcctccaagataaggatgaaatgtttgggggatctaggaatctatttcacaaatttggaatttcgtgctaataattcctgggtgaaatgtct

SEQ ID NO: 143309 - DNA, 498 bp, Homo sapiens
ttgaacctaaatctgtgtccaacccagagtctaatactgcaaaccagacttggggttgctggtgaaagttgacctatctgtctcatggttgaagaattcctagaccatacctagcagagtaaccagaagtggacttttagcccacttcttgagatatcagtcaccactgttgacttcttcagcataacagtcatctgactccagccataccatgtgtcccttgaagctaatctgtgccaccttttaggcttttgaggccaattgagctctgacttcgtggcatttttcaccacatcgactaaaatgggccaactctamgatgttccctccttttccacacatgttggttagataattcgttgattaggtatgcttttctctgaaaggggattatctcttccagattgcctccaagataaggatgaaatgtttgggggatctaggaatctatttcacaaatttggaatttcgtgctaataattcctgggtgaaatgtct

SEQ ID NO: 143310 - DNA, 485 bp, Homo sapiens
atattggctcacgcctgtaatcccagcactttgcgaggtggaagagagtggatcacctgaggtcaggagttcaagaacagcctgaccaacatggtaaaaccccatctctctactatttacagttcgcattgtaccttgcaatgaatatacattttatccaaaaagcctaaaaaataatgaaattgggggtgggggcatggctggaagtatagataaaacaaaaatgacacatgactagcagctgttaaagctgggtgactggtctgttayactttttttgtattgtgtatgtttttagtgatctgtaataaaacacttgtacaaaatgacaaagtttatctacacttagctcttaaggtcttggttacctttgggaaggggaaagtgtcaggggcatgaacaaatctgattcttagatacacaagtgtatttatttagtaataattcatcaaacattccctaaatgctttgtgcctatattgctg

SEQ ID NO: 143311 - DNA, 485 bp, Homo sapiens
atattggctcacgcctgtaatcccagcactttgcgaggtggaagagagtggatcacctgaggtcaggagttcaagaacagcctgaccaacatggtaaaaccccatctctctactatttacagttcgcattgtaccttgcaatgaatatacattttatccaaaaagcctaaaaaataatgaaattgggggtgggggcatggctggaagtatagataaaacaaaaatgacacatgactagcagctgttaaagctgggtgactggtctgttatactttttttgtattgtgtatgtttttagtgatctgtaataaaacacttgtacaaaatgacaaagtttatctacacttagctcttaaggtcttggttacctttgggaaggggaaagtgtcaggggcatgaamaaatctgattcttagatacacaagtgtatttatttagtaataattcatcaaacattccctaaatgctttgtgcctatattgctg

SEQ ID NO: 143312 - DNA, 511 bp, Homo sapiens
acaagcgtgagccaccgcactggcctataatttgtttttttttttaagtaaagaaaagctttacatttttaaatatgggaacaacatgaatactgaaaaatatgcaatgaaacactactacataataagcaatgagaaataaattatactatcattcagataatgttgaggaaagttaatagaaacactaatgataagtttttctatgcagtaaacttagacacacaaactgaaattttattaatgtgaggtgcatactaagtaattcactttttatataacacataaattcaagtatgctattctgaaatccctgaagctaaaattataggctaatttgggatacataaaaatcaaaaagtgaaaacgtgcagatcacagtcccactaagctttatataagattaaataataaaataactcaataagaaatcatgtaacaattaagaatttattctattcttggcaggwttctaagtttttctatggcattaaggtctttaaaaattctt

SEQ ID NO: 143313 - DNA, 628 bp, Homo sapiens
catttgtttcattgccattcgggcaactaggtagtaagaccattttctgctaagcaagagtaggtatacaagtaacmaatccctctggcctcctcctgaatagttcagagaacagattctagttcagccagctggctgctaacacccctcccttcctcagaaatgcttatgtttttaacaggattataagccacggcctcccagcatcgggtcccatcaatatatttggtggaatcatcagcaaaccaagcatgtctctgatcgtctgggcttggttctttaaaggatttgccccattgggcaggggaggtttccttccttatctgcaggacttgctcagtggtttgctgagctggcaagttttgcacatcctcatttaaaaatgatacctgttttggttccggcttagcctggtcttgtatgtgccatttccatttactttcttgagtgtaccctatccaatgaggtttgagggagttcatgacccaagtcatattaggaatttggggcctcataaaaacatcatgattaagacaaaggtgttctgtttcctgtaaagcccagtagcaggtcaacagctgcttctcaaagagtataagctttgctagcctctgacagcttctgggtc

SEQ ID NO: 143314 - DNA, 563 bp, Homo sapiens
tagcctggtcttgtatgtgccatttccatttactttcttgagtgtaccctatccaatgaggtttgagggagttcatgacccaagtcatattaggaatttggggcctcataaaaacatcatgattaagacaaaggtgttctgtttcctgtaaagcccagtagcaggtcaacagctgcttctcaaagagtataagctttgctagcctytgacagcttctgggtctaaaaccccaaaggtatctcttcccatcttgtttctacctaaggctccaatgagcgtgttgatctaggacagttacttgcagttctactggcccatcctgtaagggccatactgttgctctgcttgtttggctggttgaaaagccacgctcactttctgtcttcagtgaaagtcatagcgttttctagtgactgcatgcagaggttgtaaaatgttacccaaatggggaatatgatgtctccagaatccaaacaaaccaatacaattttggacctccttttcagtggtagggctgcaaattctagtattttagccttagcctttggtaaaatggactgttt

SEQ ID NO: 143315 - DNA, 533 bp, Homo sapiens
cacataccaccctgtgctgtgagtggccactcccatccaacaactgagactttctgttactgggccaaggttttctgccaaacttacttcccttataatgaatgaattctccctcagaaggttcctcagtcctcccctggaagctgacctgcaatggcctaacccacctatttaccaggcatgccaggacatatgagaccctgataggtggacaccaaagctcagcctggaaccccacccccatgtgcatcattgcagcagaacttcttcggacacactcgatccaccagctaacactccataccctatgaagagaatacgtacggattctaggtttgataaaaycctgggccagtggtggtaagtcaggctgaaaagcaaccatctcccaatttccacccactgttttacctacaagactatttctacctctcattatttaatcctccacaaaaagtatattttgtaacatggtccctgagctgcctcaccctgggccaatggttttcaaacttgagcgtgcatcagagcca

SEQ ID NO: 143316 - DNA, 378 bp, Homo sapiens
tgccaggacatatgagaccctgataggtggacaccaaagctcagcctggaaccccacccccatgtgcatcattgcagcagaacttcttcggacacactcgatccaccagctaacactccataccctatgaagagaatacgtacggattctaggtttgataaaatcctgggccagtggtggtaagtcaggctgaaaagcaaccatctcccaatttccacccactgttttacctacaagactatttctacctctcattatttaatcctccacaaaaagtatattttgtaacatggtccctgagctgcctcaccctgggccaatggttttcaaacttgagcrtgcatcagagccacctggagggcttgttaaaacagatct

SEQ ID NO: 143317 - DNA, 422 bp, Homo sapiens
gtggaactgataaatggtgctcttctattaactttaagtccacctgaccttcattaagctggtatcgtggggtagttattaaaattaaaatcataataaaatttgaaaaatgtgtaaacaaatgttaataacttcataaataagattaaggataaatgacattaaaacagcagggcaaacctaatattggattataacccaaagtataaatatccatgagctcacaagatataaataaatgagaaccgacaaatctcccatacagaatttcatataatttgtgtcggtgaagctcaacttcacttaatgacttgcctccaaaaagaacattagggaaaaactagtgaaatgtgaataaagtgtggagtttagctcacagtaagatacwaatgttggtttctcagtgacaaatgtaccacagt

SEQ ID NO: 143318 - DNA, 519 bp, Homo sapiens
tgtagcagtagttacagaggaagggagtaagccacacaagcaattctggaataaagggaaatggcttgagggccttgcaattgcaatgatctcctggggttgaagcttaagttcattcacattgtgactgtcaccaaggctttaggtcattcatttagttttagtacctcatttacataccacctgtgtgtcaggcacagtggctgtgttggcctaggccaggggtcagtgaaccttttttgtatagctccagagagtaaatattttaagtttcatgggccatatggttcctatcacaactacctaacttygctgttgtagtgcagacacaaccacagacaatgaataaacaagaatttgcttattggatgtgttccaataaaatttttcttatagaaacaggtggtgggccacatttggcccatgagtctgctgaggctcagaaaatgatccccagtgtgaaggcctcagaaacagcctcagaagtaaagtctcttttggaccttctcctgccctcct

SEQ ID NO: 143319 - DNA, 571 bp, Homo sapiens
tataacatatttgtgtaattctgtatttacttatatatgtacatataagtagacatacacacataaaatatatttttcttttagatggtatgctatggatgctttttagtaattttgctttctgttaataaaatgaatattttacatgtcaacaaatatatacttattttataattttagatggctacttcacagtattttcatgaatagatcataatttatttaatcgaagcctaattttgaacatttacatttttataagtgtttatttactgtttataaatgctaaggtatccctattcaggcatacagctttaagcatttgctcaatttcttcctccccatggtggaagaaggtctccttgctatggtcygaatatttgtgtccctccaaaattcatatattgaaacctaacctgcaggtgacagtatcaggaggtggggcttttgggaagtgattaggtcaggaaggtggagcctcatgattggaattagcaaccatagaaaaagagacaccatgtgaggtcagagcaaaaagggtaggctgcctatgcagtagtaagcaggccct

SEQ ID NO: 143320 - DNA, 680 bp, Homo sapiens
tgctcaatttcttcctccccatggtggaagaaggtctccttgctatggtccgaatatttgtgtccctccaaaattcatatattgaaacctaacctgcaggtgacagtatcaggaggtrgggcttttgggaagtgattaggtcaggaaggtggagcctcatgattggaattagcaaccatagaaaaagagacaccatgtgaggtcagagcaaaaagggtaggctgcctatgcagtagtaagcaggccctcatcagactctgctggcaccttgatcttacacttcccagcctccagaatggtgagaaataaacttctgttgtttataagctacccagtgttttgttatagcagcccaaatggacttaggcactcctgatataaatcaaacattgaaaattgtaaaataggaagtcctagccagagcaattaggcaagagaaataaataaaaggcatctaaataggaaaagaagaagtcaaactatctctctttgctgatgatatgattccatacatagaaaaccctaaagactctgccaacaggccccggaactgataaatgacttcagtaaagtttcaggatacaaaatcaatgtacaaaaagcagtaacatttctcttcaccaataacattcaagctgcgagccaaatcaagaatgcaattccatttacaataaccacac

SEQ ID NO: 143321 - DNA, 680 bp, Homo sapiens
tgctcaatttcttcctccccatggtggaagaaggtctccttgctatggtccgaatatttgtgtccctccaaaattcatatattgaaacctaacctgcaggtgacagtatcaggaggtggggcttttgggaagtgattaggtcaggaaggtggagcctcatgattggaattagcaaccatagaaaaagagacaccatgtgaggtcagagcaaaaagggtaggctgcctatgcagtagtaagcaggccctcatcagactctgctggcaccttgatcttacacttcccagcctccagaatggtgagaaataaacttctgttgtttataagctacccagtgttttgttatagcagcccaaatggactwaggcactcctgatataaatcaaacattgaaaattgtaaaataggaagtcctagccagagcaattaggcaagagaaataaataaaaggcatctaaataggaaaagaagaagtcaaactatctctctttgctgatgatatgattccatacatagaaaaccctaaagactctgccaacaggccccggaactgataaatgacttcagtaaagtttcaggatacaaaatcaatgtacaaaaagcagtaacatttctcttcaccaataacattcaagctgcgagccaaatcaagaatgcaattccatttacaataaccacac

SEQ ID NO: 143322 - DNA, 571 bp, Homo sapiens
gccaggctaatactatcattctttattcatcaatttgaatattttatccaattaaaactgmcagagattctatggaagttgtactgaatttatatactattttcaggagaacagctctatttatgagaaaaagtgtcacttttcaagaacgtggtgtaaatttctaattgttcagatcccatttttgtcctccagtacgattttattttttacatgggtcctattcctttgtcatataatttattcctattttatgatttttgttactattatgaatggaatagtttcctcattttcgtttgtatgtgggtatggcttatatagaaaaagctaatcatactatatctttatgttgtatctacccaatccatcaaattctttcttttacttctatttactttttttactagagtttcttgatgatatcaggtataaaattatattgtcagcaaaaagtttcacctctttctttccatatttatgctgtgcatattaggtttattgcatttactaaaatatctaaacaatattaaataataatagtaaaagtaggtgtgatttgtaaactata

SEQ ID NO: 143323 - DNA, 571 bp, Homo sapiens
gccaggctaatactatcattctttattcatcaatttgaatattttatccaattaaaactgccagagattctatggaagttgtactgaatttatatactattttcaggagaacagctctatttatgagaaaaagtgtcacttttcaagaacgtggtgtaaatttctaattgttcagatcccatttttgtcctccagtacgattttattttttacatgggtcctattcctttgtcatataatttattcctattttatgatttttgttactattatgaatggaatagtttcctcattttcgtttgtatgtgggtatggcttatatagaaaaagctaatcatactatatctttatgttgtatctacccaatccatcaaattctttyttttacttctatttactttttttactagagtttcttgatgatatcaggtataaaattatattgtcagcaaaaagtttcacctctttctttccatatttatgctgtgcatattaggtttattgcatttactaaaatatctaaacaatattaaataataatagtaaaagtaggtgtgatttgtaaactata

SEQ ID NO: 143324 - DNA, 487 bp, Homo sapiens
attcatctttatagccaagcttttcctccttggacccagaacatggcatgttrtaagcgtttgccagcagttctctctggcatgatgggtctcaaagctagctgcctattagaactacctggagacatgctctaacctgcccagtgttcaagccccacctccagtgattctgattttaattgatcttatgtagatcctagcttaagtaggttttaaaagttctccaggtgattctaacatatagccagtgctaagaattcctgttctagctgcagaagatatagaggcaaaacacatggccccttccaaacctgggacttgtatttaatagaatttaatacgtttagagggcttcactaaagaaaaatcacttttgaaggctgtaggctttctagtggaatgttagttctgctttatggtatggtaggctgaataatagtcccccaaagaacttcacgtctcaatcctttggaacctataaatagat

SEQ ID NO: 143325 - DNA, 641 bp, Homo sapiens
tgtcatgtggtgtgtcacggtccctgaatgcttctagaaagctacactagmaagcaggggtccctggttgttaatataaaacatattactttaaatttatactgtatatttatttttcagccaacacctaatcttatctttgctttagtccagtggcttccaaacttttgcactgagacccacggagaaccttttacatctcaacccattacacacatctatacactcttaactgagatacaagttcaataaaacaatatgtattgttattacatatgatatcctctgatatttactttgccttcccttgcattcccctgccttcccttgtattttttttgtttttgttgtttgtttttttgagacagggtctcattctgttgcccaggctggagtgcagtggtgcaatctcggctcactgcaaactctgcctcccgggttcaagcgattctggtgcctcagcctcccaagtagctgggattacaggtgtgtaccaccactcctggctgatttttaaaaatatttttagtagagatggggtttcaccatgttggccaggctattttcaaactcctgacctcagatgatcaggcccgccttggcctcccaaagtgctgggattaaaggtgtgagctatcaca

SEQ ID NO: 143326 - DNA, 641 bp, Homo sapiens
tgtcatgtggtgtgtcacggtccctgaatgcttctagaaagctacactagaaagcaggggtccctggttgttaatataaaacatattactttaaatttatactgtatatttatttttcagccaacacctaatcttatctttgctttagtccagtggcttccaaacttttgcactgagacccacggagaaccttttacatctcaacccattacacacatctatacactcttaactgagatacaagttcaataaaacaatatgtattgttattacatatgatatcctctgatatttactttgccttcccttgcattcccctgccttcccttgtattttttttgtttttgttgtttgtttttttgagacagggtckcattctgttgcccaggctggagtgcagtggtgcaatctcggctcactgcaaactctgcctcccgggttcaagcgattctggtgcctcagcctcccaagtagctgggattacaggtgtgtaccaccactcctggctgatttttaaaaatatttttagtagagatggggtttcaccatgttggccaggctattttcaaactcctgacctcagatgatcaggcccgccttggcctcccaaagtgctgggattaaaggtgtgagctatcaca

SEQ ID NO: 143327 - DNA, 540 bp, Homo sapiens
ctgggaagtccaagatcaaggcactggcagattcagagtaagggcctgcttcctcacagacagctttgttctcactgtaaccttatatggcagaaggagcagaaagaaggggcatatgcaatctctatgcaatctcttttataaggacactaatctcagggggattctgtcttcttgacttaatcacctcccaaaggctctacctcaaattgggcagaaggatctaacagatgaatttgggatacacaaaaatttagattagagcggatrgtgtgccgtaaattcattggtagcaattttttcttcttaatagtacattaaataatagtgtttccaacaactgatattgtcttcgattcaataagatacattattattattacgtggccccttttctcccattatttttgaatattttgctatatttttgttttccacaaatgattacctttcattttataaattgaaagtcaaatacacataccttttatattatttttaaaaatcaaagtaccacccccttctactcccataagatct

SEQ ID NO: 143328 - DNA, 540 bp, Homo sapiens
ctgggaagtccaagatcaaggcactggcagattcagagtaagggcctgcttcctcacagacagctttgttctcactgtaaccttatatggcagaaggagcagaaagaaggggcatatgcaatctctatgcaatctcttttataaggacactaatctcagggggattctgtcttcttgacttaatcacctcccaaaggctctacctcaaattgggcagaaggatctaacagatgaatttgggatacacaaaaatttagattagagcggatggtgtgccgtaaattcattggtagcaattttttcttcttaatagtacattaaataatagtgtttccaacaactgatattgtcttcgattcaataagatacattattattattacrtggccccttttctcccattatttttgaatattttgctatatttttgttttccacaaatgattacctttcattttataaattgaaagtcaaatacacataccttttatattatttttaaaaatcaaagtaccacccccttctactcccataagatct

SEQ ID NO: 143329 - DNA, 540 bp, Homo sapiens
ctgggaagtccaagatcaaggcactggcagattcagagtaagggcctgcttcctcacagacagctttgttctcactgtaaccttatatggcagaaggagcagaaagaaggggcatatgcaatctctatgcaatctcttttataaggacactaatctcagggggattctgtcttcttgacttaatcacctcccaaaggctctacctcaaattgggcagaaggatctaacagatgaatttgggatacacaaaaatttagattagagcggatggtgtgccgtaaattcattggtagcaattttttcttcttaatagtacattaaataatagtgtttccaacaactgatattgtcttcgattcaataagatacattattattattacgtggccccttttctcccattatttttgaatmttttgctatatttttgttttccacaaatgattacctttcattttataaattgaaagtcaaatacacataccttttatattatttttaaaaatcaaagtaccacccccttctactcccataagatct

SEQ ID NO: 143330 - DNA, 540 bp, Homo sapiens
ctgggaagtccaagatcaaggcactggcagattcagagtaagggcctgcttcctcacagacagctttgttctcactgtaaccttatatggcagaaggagcagaaagaaggggcatatgcaatctctatgcaatctcttttataaggacactaatctcagggggattctgtcttcttgacttaatcacctcccaaaggctctacctcaaattgggcagaaggatctaacagatgaatttgggatacacaaaaatttagattagagcggatggtgtgccgtaaattcattggtagcaattttttcttcttaatagtacattaaataatagtgtttccaacaactgatattgtcttcgattcaataagatacattattattattacgtggccccttttctcccattatttttgaatattttgctatatttttgttttccacaaatgattacctttcattttataaattgaaagtcaaatacacataycttttatattatttttaaaaatcaaagtaccacccccttctactcccataagatct

SEQ ID NO: 143331 - DNA, 453 bp, Homo sapiens
acatggagaaaccccatctatactaaaaataaaaaaattagctgggtgtggtggcacatgcctgtaatcccagccacttgggatsatgaggtaggagaattgcttgaacccaggaagtgaaggttgctgtgagctgagatcacgccactgcactccagcctgggcaacagagcaaaactctgtctcaaaaaaaaaaaaaaaacaaaaaagaagaagaagaaatataactaaactaattaagaggtggtttggtagtgggtaaaagagctctaaagtctagatttggggtcagataaccttggtttatagtctctctctctctctcaccaactaactgggtgaatttggacccagtatttagtttctctgagctccagtttcttcaaataaggggatttaaaattcctttctggttctacaattctatgataaaatatcaattcaagtgaattc

SEQ ID NO: 143332 - DNA, 453 bp, Homo sapiens
acatggagaaaccccatctatactaaaaataaaaaaattagctgggtgtggtggcacatgcctgtaatcccagccacttgggatgatgaggtaggagaattgcttgaacccaggaagtgaaggttgctgtgagctgagatcacgccactgcactccagcctgggcaacagagcaaaactctgtctcaaaaaaaaaaaaaaaamaaaaaagaagaagaagaaatataactaaactaattaagaggtggtttggtagtgggtaaaagagctctaaagtctagatttggggtcagataaccttggtttatagtctctctctctctctcaccaactaactgggtgaatttggacccagtatttagtttctctgagctccagtttcttcaaataaggggatttaaaattcctttctggttctacaattctatgataaaatatcaattcaagtgaattc

SEQ ID NO: 143333 - DNA, 478 bp, Homo sapiens
ggctcactgggtgatccagggctgtcccttaaccgccctgcgcctctgttgatgcagctgtgatatggggacacagatgtgtgtgtgtgtggcgccgatgtgcagcctttggtgagaggtccaaagctaaatgtggggtccattcagctagtcatgggctgtttctatgtgaaattgctgtctgcrgtgcaggaattgggaggtgacctggtaggtcttggatcaatgactagtaaatagatgcacagaagaaaaaaaaatgtccagggaaggggagtatgtccctgatggctgggaattatattgccatggcaaccacagctacgaaagagctcatcccaatatcaggcatttcttatcagtaagctatggtgcagaattttcctctgcaatagtaatatgtttttgtggtgtattttaagaataaagacgaaaaagaatgagcatgcctcagttccactgggcagcatctgaggac

SEQ ID NO: 143334 - DNA, 477 bp, Homo sapiens
acgggctcactgggtgatccagggctgtcccttaaccgccctgcgcctctgttgatgcagctgtgatatggggacacagatgtgtgtgtgtgtggcgccgatgtgcagcctttggtgagaggtccaaagctaaatgtggggtccattcagctagtcatgggctgtttctatgtgaaattgctgtctgcagtgcaggaattgggaggtgacctggtaggtcttggatcaatgactagtaaatagatgcacagaagaaaaaaaaatgtccagggaaggggagtatgtccctgatggctgggaattatattgccatggcaaccacagctacgaaagagctcatcccartatcaggcatttcttatcagtaagctatggtgcagaattttcctctgcaatagtaatatgtttttgtggtgtattttaagaataaagacgaaaaagaatgagcatgcctcagttccactgggcagcatctga

SEQ ID NO: 143335 - DNA, 478 bp, Homo sapiens
ggctcactgggtgatccagggctgtcccttaaccgccctgcgcctctgttgatgcagctgtgatatggggacacagatgtgtgtgtgtgtggcgccgatgtgcagcctttggtgagaggtccaaagctaaatgtggggtccattcagctagtcatgggctgtttctatgtgaaattgctgtctgcagtgcaggaattgggaggtgacctggtaggtcttggatcaatgactagtaaatagatgcacagaagaaaaaaaaatgtccagggaaggggagtatgtccctgatggctgggaattatattgccatggcaaccacagctacgaaagagctcatcccaatatcaggcatttcttatcagtaagctatggtgcagaattttcctctgcaatagtaatatgtttttgtggtgtattttaagaataaagacraaaaagaatgagcatgcctcagttccactgggcagcatctgaggac

SEQ ID NO: 143336 - DNA, 336 bp, Homo sapiens
aaatgggcattcaaacattggctgcataagtatttcatgtttcaaaagaaagtgacttctctagttgtaatggccatccaatcagatgatgcaaggggaaatgataaccgttttaaagacccagaaatataacacagttttcaaaaagacatttcttaaagaaacaaagtatgagtaggatatcatctcaattttctagtggtgttagagtcacttccctgaacaagaaatgagagcaatgatgcaaatgaaatatgattacaaacacaytgaattcaaaatgtagtggttcctaggatatcatgtgcagattcccaatttcaacatgtgttgttt

SEQ ID NO: 143337 - DNA, 598 bp, Homo sapiens
gctattctgagggagtggggagaaagccccacacctcatcagaaactgtgaggagaggagaagctgtctcctgactgcctccccgaggaggttgcctccaggtccctatcagcctcctgttttcttctattctaggaacatcacacagcattctgctaagastcagagatccctggattcaagcctacgcctatgatgcatgcaaggtggccagcgttccacggtggagatgttcctctacagctttctcagggtttgaaaataagaataaaaatcaagaactctggccgggcgcggtggctcacgcctgtaatcccagcactttgggaggccgaggcgggcagatcacgaagtcaggagatcaagaccatcctggctaacgtggtaaaaccccgtttctactaaaaaaaatacaaaaaattagccgggcgtggtggtgagtgcctgtagtcccagctactgaggaggctgaggcaggagcatggcgtgaacctgggaggcggagcttgcagtgagtcgagatggtgccactgcacttcagcctgggcgacacattgagactccatctcaaaaaaaaataaataaaaattaaaaaaaa

SEQ ID NO: 143338 - DNA, 610 bp, Homo sapiens
gtgctattctgagggagtggggagaaagccccacacctcatcagaaactgtgaggagaggagaagctgtctcctgactgcctccccgaggaggttgcctccaggtccctatcagcctcctgttttcttctattctaggaacatcacacagcattctgctaagagtcagagatccctggattcaagcctaygcctatgatgcatgcaaggtggccagcgttccacggtggagatgttcctctacagctttctcagggtttgaaaataagaataaaaatcaagaactctggccgggcgcggtggctcacgcctgtaatcccagcactttgggaggccgaggcgggcagatcacgaagtcaggagatcaagaccatcctggctaacgtggtaaaaccccgtttctactaaaaaaaatacaaaaaattagccgggcgtggtggtgagtgcctgtagtcccagctactgaggaggctgaggcaggagcatggcgtgaacctgggaggcggagcttgcagtgagtcgagatggtgccactgcacttcagcctgggcgacacattgagactccatctcaaaaaaaaataaataaaaattaaaaaaaagaaatctaga

SEQ ID NO: 143339 - DNA, 598 bp, Homo sapiens
gctattctgagggagtggggagaaagccccacacctcatcagaaactgtgaggagaggagaagctgtctcctgactgcctccccgaggaggttgcctccaggtccctatcagcctcctgttttcttctattctaggaacatcacacagcattctgctaagagtcagagatccctggattcaagcctacgcctatgatgcatgcaaggtggccagcgttccacggtggagatgttcctctacagctttctcagggtttgaaaataagaataaaaatcaagaactctggccgggcgcggtggctcacgcctgtaatcccagcactttgggaggccgaggcgggcagatcacgaagtcaggagatcaagaccatcctggctaacgtggtaaaacccygtttctactaaaaaaaatacaaaaaattagccgggcgtggtggtgagtgcctgtagtcccagctactgaggaggctgaggcaggagcatggcgtgaacctgggaggcggagcttgcagtgagtcgagatggtgccactgcacttcagcctgggcgacacattgagactccatctcaaaaaaaaataaataaaaattaaaaaaaa

SEQ ID NO: 143340 - DNA, 565 bp, Homo sapiens
attaggttgttactaaaattcatttggcagtaacacctgacctgaagtgacctgaggatattgataaacttaatatgcttatctgtgtagtgtgcctattcataagtttactgcaggaatattggtgtatatgattgcaaggtatttggttaccctgctggagatattacataatgtattatggtagatgtacaatatatgaaaaatcttggccgggcacggtggctcacccctgtaatcccagcactttgggaggccgaggcaggcagatcacctgaggtcgggagttcaagaccagcctgaccaacatggagaaaccctgtctctactaaaaatacaaaattagccggggtggtggcacacgcctgtaatcccagctactcaggaggcttaggcaggagaatcgcttgaacccaggaagtggaggttgcggtgagctgagatggagctattgcaccccagcctgggcaacaagagcaaaactccgtctaaaaaaaaagagagaaagaragaaaacagaaaaggaaagaaaagaaagaaaagagctctcccaaattctgaattc

SEQ ID NO: 143341 - DNA, 568 bp, Homo sapiens
tgtggttgaagtcacatagggccattgggaagtcaggcaacagaagatgctaaagtgggaagccttctccccagtatccattccttggtcccagctctccctgggaggagcgtcaggcatgaatgcaacttcattatacagtgactctgcatgcacaaggggtattaatgattcatacaaatctgcaagttaaatgctatgtcaaaaatagaaattcaattgtctacaataaaattaaaaacataaagtcctcaaatccaaaggcttctatcgacagtttcctgtcatctggaaaaacaaacctcttgctgtgctggggagaaatacaatccctccatgtgtttgcttctcaccttccccctgttcarccacccgagcctcagcagtgtctccagagaggcctttacaggcaaagggatgctgtgtgcttgttctccccaccacatcctgatccaacctttctgctgcagctgggcctctgaggacccagcctgctgggtggatttctgaaagctggttggagatgagagggtctttccagagactggttcagggtggaagaaaaggt

SEQ ID NO: 143342 - DNA, 612 bp, Homo sapiens
ggatcctgtcctgtgcactgcctggtgcatagtaggtacctgatatataaatgttttatgagcaaatgaagaatgggaatttggagctggatatagatacagggtttctctgtagtggcactactgacatttgaagtgggataacccttgtgtgggctgtcctgcacgctgtaggatgtctagcagcaaccctggctacgacccaccacataccaatcgtgctctttctccacaactgtgacaaccaaaaatatctccagacattgccaaatgtcccctggcattaaaaaccattgatctagtgaaatctagtayctaatttgaaaaatgagaaagttgaggcccagagaaagtaagtgacttgcctgaaatcacaaagcaagttagtggcagagctgggattcaaccccaggggtcccaattctaagccagtgctctttccacctggcccttgtctttcatggcccactgtccaagcctcttccatcaggccattgtcatgggttccagaatggaagaggctggttgctgctgctctgttcttcaggtgactgaatcaggggaggtcatactgaaatgagggtgctggtcatgggggagagtgggtagcca

SEQ ID NO: 143343 - DNA, 610 bp, Homo sapiens
accaaacaggctttgtgtgagcaacatggctgttaatttcccctgggtgcaggsgggctgagtccaaaaagaaagtcagtgaagcgagataggggtggggccgttttataagatttgggcaggtaaaggaaaattacagtcaaagggggtttgttctctggtgggcaggagtgggggttgcaaggtgctcagttggggagctttttgagccaggatgagccaggaaaaggactttcacaaggtaacgtcatcacttaaggcaaggaccagccattttcacttcttttgtggtggaatataatcagttaaggcaaggaccagccatttacacttcttttgtggtggaatgtcatcagttaaggcaaggcagggcatattcacttcttttgtgattattcagttacttcaggccatctgggcatatacgtgcaagtcacaggggatgcgatggcttggcttgggctcagaggcctgacattctgcattctgcttttctcacttaagaatacctcatggaaatttattttcaacaggtataattctattttatttcttttaattgctgcatagtgtttcatggttttgttattggaaaagggtcctgatccag

SEQ ID NO: 143344 - DNA, 644 bp, Homo sapiens
cataccaatgtatactcccctcagcagtgaaaaattggttgggattaaataaagttatgtggataaagtgcctagtgcagtccttggcatgtattaaagtgttcaataaatgttagatcttattactagaataagataaaaatgagcaattttctgatagtttggtttcatgggaggatagaatttggaagaatagggcagtttgataagattcactaaatgcataagtgacaatgtgaaactcaaataagaatgtgatgaggacaagctccatacttcacaattttgcctaagaccaattcagagtgtacttagaactcaaatatattcaaattattaatctggcacagggatataaccatcatttgtactcaaataggtaaagccaagtattcaagccccaattgtccctctttagaaaattttatgtgaactaaattattttcataaattatacccatgttagattctaacagacctaaaatttcatttgtgttaacaaacatgaccacatgaattgaatgtgacttaaaatagaatgacttttcagtcctagtgcattgcacaggaataataaatgactcaagtaaaataaaccctaagtaataaaagtaaatgamcaatgatcaagtttctcttttaaa

SEQ ID NO: 143345 - DNA, 517 bp, Homo sapiens
aaacaataataataatgcagcaatgttaggctcatgaacatcatttttgcaaaaattaaaaaaaaatctcataggacagaggaagcaagagattatcttgcatcattgacctctaagcactggcttccaaaacagcccagtaatctataagaacacatcatctcatcataaagaggtaaattacatrcaaaactgttacacaccgggtatctgcattactctatgaagatttgaatcaggcaacaattctttacgatattttatccatagtgttctttgtcaaatagtttttcatgtgaagaaactgacacataaacaaaatgacagttttttggaccaaacataaatttcttcacaattaacaatatagttttattaatacgtattatttttgtctaaatggttcaacatgatcatgattttaaaagttactaaaaataaaatacagttgatgactggttgagttgaaaatggggcagtggcttagaaatgtctgaaggcaagaggctgttaaatt

SEQ ID NO: 143346 - DNA, 428 bp, Homo sapiens
ggcaagcttcctttcatgctgtgtcaagtgtttaaaaaatatggctcaatattacaaacacacaggactacgtagaggataattatatcaaactttcatgtacctcccagttaaaattcaaacgtggtagcttttggatgcatttgctccagagtttaagggaagaaaactacggattcagccataatgttcacgctgacgctygagttatatgtcccttttctagtccagttacctcagccctccccactattctgaagtcaatgtgtgtctttccatccatgtttaatacctagtgtgcatgtccatgaagaatggatagtgttccttggtctgtttttacaattttatacaaatagtagtccatacatattctcctgaaagttgcttttcccttcaacaatatcttctagatgaatctagaattc

SEQ ID NO: 143347 - DNA, 365 bp, Homo sapiens
ttttacagaaaagatatataaacaccaatgaaaataaatataaaattatatgacatacaattatagtgtggaaagactkaataaataagtgaactaagctctaagaaaaaaagatgatgatataaaatgatatagaagtaaaacccttggctgatatagcataattaatgtatcagttaaatatgtacatagtagaagtggcaggaagacagcatacagagtgagacctgaccagaagctttaagtaaagttctatacccttaaacaagattaaagtggactcaggaaaacatggtccacatgaggagaaggacacatgttccagacgggccaaatctcagagcatctctaccttctccaggagg

SEQ ID NO: 143348 - DNA, 365 bp, Homo sapiens
ttttacagaaaagatatataaacaccaatgaaaataaatataaaattatatgacatacaattatagtgtggaaagactgaataaataagtgaactaagctctaagaaaaaaagatgatgatataaaatgatatagaagtaaaacccttggctgatatagcataattaatgtatcagttaartatgtacatagtagaagtggcaggaagacagcatacagagtgagacctgaccagaagctttaagtaaagttctatacccttaaacaagattaaagtggactcaggaaaacatggtccacatgaggagaaggacacatgttccagacgggccaaatctcagagcatctctaccttctccaggagg

SEQ ID NO: 143349 - DNA, 365 bp, Homo sapiens
ttttacagaaaagatatataaacaccaatgaaaataaatataaaattatatgacatacaattatagtgtggaaagactgaataaataagtgaactaagctctaagaaaaaaagatgatgatataaaatgatatagaagtaaaacccttggctgatatagcataattaatgtatcagttaaatatgtacatwgtagaagtggcaggaagacagcatacagagtgagacctgaccagaagctttaagtaaagttctatacccttaaacaagattaaagtggactcaggaaaacatggtccacatgaggagaaggacacatgttccagacgggccaaatctcagagcatctctaccttctccaggagg

SEQ ID NO: 143350 - DNA, 486 bp, Homo sapiens
aactcagcaggctgaggagatccaaggggatcactgagctctgaggcttatgagagaaaagagagaggtctaagactttttttgtataaatttttggtctccaagtgcaattttgctgtaagcatggatggcatagtggtgaagtcagggctttcaggtatccatcaccagaataatgcacattgtacccattaagaaatttctcactattcaccccttccatcccctcaccctgctgagtctcctttatcattccactctctacatcaataccctcacatcttttagcaccyacttatgagtgataaaatacgatgtttactctgtgtctggtttgcttcacttacaacaatggcctccagttccatccatgtgtctgcaaaaattatgattctactgttttttacgcctgaatagtatttcattgtgtatattttctacattttctttttccaatcatttgttgatggacatttaggttgattt

SEQ ID NO: 143351 - DNA, 486 bp, Homo sapiens
aactcagcaggctgaggagatccaaggggatcactgagctctgaggcttatgagagaaaagagagaggtctaagactttttttgtataaatttttggtctccaagtgcaattttgctgtaagcatggatggcatagtggtgaagtcagggctttcaggtatccatcaccagaataatgcacattgtacccattaagaaatttctcactattcaccccttccatcccctcaccctgctgagtctcctttatcattccactctctacatcaataccctcacatcttttagcacccacttatgagtgataaaatacgatgtttactctgtgtctggyttgcttcacttacaacaatggcctccagttccatccatgtgtctgcaaaaattatgattctactgttttttacgcctgaatagtatttcattgtgtatattttctacattttctttttccaatcatttgttgatggacatttaggttgattt

SEQ ID NO: 143352 - DNA, 252 bp, Homo sapiens
gagtttgctgccaccaaccccaacagcaagaattccagtcctgctgctgcaaagtaagtgtcactctgattttattactgctgtgtaacgcagttttagaccctttgkttgtcacttaatgttctaaaaaagtattaaagagaaaatattattatggtgatgagcccatccactgaagccatctcaacatcataccaattataagacctatcatttaaaaagaaaactgttagtttaacttatttatccaaa

SEQ ID NO: 143353 - DNA, 608 bp, Homo sapiens
tgcctgtgtgttctactagtatctcactgaggctagtgctgtatacaacataatttttaaaacactggttttatccatctttatgttcagctgcagcaacatttacaaaggtcaaatttgatcatgtgtcttcattactaaaggaaacaaaacaaactaatgaataaagcccacctggcagtggctcctcactacctgtatgacggagcmcacctggcttggtctgggtgccctgtgcttacctggccgtgctgtcttctgcctgttgctttgcctcccctttcctcctggagaaggtagagatgctctgagctttggcccgtctggaacatgtgtccttcccctcatgtggcccatgttttcctgagtccactttaatctcgtttaaggatatagaactttctttaaagcttttggtcaagtctcactctctatgctgtcttcctgctccttctacaatgtacatactttactgatacattaattatgctatatcagccaagggttttacttctatatcattttatatcattatcttttttcttagagtttagttcattcatttattcagtctttccacaatataattgtatgtcatataatttcat

SEQ ID NO: 143354 - DNA, 608 bp, Homo sapiens
tgcctgtgtgttctactagtatctcactgaggctagtgctgtatacaacataatttttaaaacactggttttatccatctttatgttcagctgcagcaacatttacaaaggtcaaatttgatcatgtgtcttcattactaaaggaaacaaaacaaactaatgaataaagcccacctggcagtggctcctcactacctgtatgacggagcacacctggcttggtctgggtgccctgtgcttacctggccgtgctgtcttctgcctgttgctttgcctcccctttcctcctggagaaggtagagatgctctgagctttggcccgtctggaacatgtgtccttcccctcatgtggcccatgttttcctgagtccactttaatctcgtttaaggatatagaacttwctttaaagcttttggtcaagtctcactctctatgctgtcttcctgctccttctacaatgtacatactttactgatacattaattatgctatatcagccaagggttttacttctatatcattttatatcattatcttttttcttagagtttagttcattcatttattcagtctttccacaatataattgtatgtcatataatttcat

SEQ ID NO: 143355 - DNA, 608 bp, Homo sapiens
tgcctgtgtgttctactagtatctcactgaggctagtgctgtatacaacataatttttaaaacactggttttatccatctttatgttcagctgcagcaacatttacaaaggtcaaatttgatcatgtgtcttcattactaaaggaaacaaaacaaactaatgaataaagcccacctggcagtggctcctcactacctgtatgacggagcacacctggcttggtctgggtgccctgtgcttacctggccgtgctgtcttctgcctgttgctttgcctcccctttcctcctggagaaggtagagatgctctgagctttggcccgtctggaacatgtgtccttcccctcatgtggcccatgttttcctgagtccactttaatctcgtttaaggatatagaactttctttaaagcttttggtcaagtctcactctctatgctgtcttcctgcyccttctacaatgtacatactttactgatacattaattatgctatatcagccaagggttttacttctatatcattttatatcattatcttttttcttagagtttagttcattcatttattcagtctttccacaatataattgtatgtcatataatttcat

SEQ ID NO: 143356 - DNA, 430 bp, Homo sapiens
actatgcacacattaaaaataatacaatcatgtcctgtgcagcaacatgcatacktctggaggccattatcctagggaaattactacaggaacagaaaaccaaataccacatgttcttgcctataagtaggatctaaacatggggtactcatgaatataaagatgacaacaatagacactgagaactactagatgaaggagggaaggaggagggcagggggtgagaaacgatgagtgctatgcttactgcctagctgatgggatcaattatatcccacaatatatgctcactaccttggtgatgggatcaataatatcccacatggctcagcatcacacaatatatccatgtaataaacctgcaaatatactccctgaatctaaaaaatttaaggcagagacagaataagagggcagaatagaagcctac

SEQ ID NO: 143357 - DNA, 430 bp, Homo sapiens
actatgcacacattaaaaataatacaatcatgtcctgtgcagcaacatgcatacttctggaggccattatcctagggaaattamtacaggaacagaaaaccaaataccacatgttcttgcctataagtaggatctaaacatggggtactcatgaatataaagatgacaacaatagacactgagaactactagatgaaggagggaaggaggagggcagggggtgagaaacgatgagtgctatgcttactgcctagctgatgggatcaattatatcccacaatatatgctcactaccttggtgatgggatcaataatatcccacatggctcagcatcacacaatatatccatgtaataaacctgcaaatatactccctgaatctaaaaaatttaaggcagagacagaataagagggcagaatagaagcctac

SEQ ID NO: 143358 - DNA, 430 bp, Homo sapiens
actatgcacacattaaaaataatacaatcatgtcctgtgcagcaacatgcatacttctggaggccattatcctagggaaattactacaggaacagaaaaccaaataccacatgttcttgcctataagtaggatctaaacatggggtactcatgaatataaagatgacaacaatagacactgagaactactagatgaaggaggraaggaggagggcagggggtgagaaacgatgagtgctatgcttactgcctagctgatgggatcaattatatcccacaatatatgctcactaccttggtgatgggatcaataatatcccacatggctcagcatcacacaatatatccatgtaataaacctgcaaatatactccctgaatctaaaaaatttaaggcagagacagaataagagggcagaatagaagcctac

SEQ ID NO: 143359 - DNA, 430 bp, Homo sapiens
actatgcacacattaaaaataatacaatcatgtcctgtgcagcaacatgcatacttctggaggccattatcctagggaaattactacaggaacagaaaaccaaataccacatgttcttgcctataagtaggatctaaacatggggtactcatgaatataaagatgacaacaatagacactgagaactactagatgaaggagggaaggaggagggcagggggtgagaaacgatgagtgctatgcttactgcctagctgatgggatcaawtatatcccacaatatatgctcactaccttggtgatgggatcaataatatcccacatggctcagcatcacacaatatatccatgtaataaacctgcaaatatactccctgaatctaaaaaatttaaggcagagacagaataagagggcagaatagaagcctac

SEQ ID NO: 143360 - DNA, 611 bp, Homo sapiens
cccgtacccacaataaaaaacagtgacaaccaggtaatacaccatgggcattgggctctgagaagcgccaacttcaggtgtgacccaatacatttccagctgtgggagctatggtgaaagacttctgtttgagaaaagcaggtgggaaagtaaagggaactctgtgttgcacctgatatgccagctcaacaacagtggggtagagcaccaagcagattcttagagtccctgagtccaggcctaaggtcttcttggtcagcatttctgcgcttgcccggggccaaaggtcgagtcccagacattgcagaatttatcacaagctaattaragagtgcttgggctttaagtgagaaagtgatgatgatttggtggaaaccccccattggccaggagtgttggcagtcatagaagaggctcttctgcctgcagacaggggaaggaagagtagaaaatactttgtcttattccctaagtgccaggttagctacagtaaaatagaagagcaggtaaattttgaagattctatgctttaatctctggctcccaggtagcatctgtggacccactcatggctaggggaacttgccaccctataggcagagacacaaaca

SEQ ID NO: 143361 - DNA, 498 bp, Homo sapiens
ctttgtcttattccctaagtgccaggttagctacagtaaaatagaagagcaggtaaattttgaagattctatgctttaatctctggytcccaggtagcatctgtggacccactcatggctaggggaacttgccaccctataggcagagacacaaacacggctggctttgccacatattaatcacagagtcctatggctttgaataaacatatggtagccaagtagtgttgcagtgggccttgcgtgagaccaagttctgtgcctacttcaggtgtgaatcagcacagtctcagtggtggtggccacaggagtgcttatgttaccccaaccccagcttcacatgtctcagcacagaaagagagactgctgatttgagagaaagtaagggaagagaacaagagtctttacttgataaatcacgagaatttttcttgatgttaatccaaggcaaccaaggcagtacctctatgtgtttgcataaactactgtgctattggg

SEQ ID NO: 143362 - DNA, 498 bp, Homo sapiens
ctttgtcttattccctaagtgccaggttagctacagtaaaatagaagagcaggtaaattttgaagattctatgctttaatctctggctcccaggtagcatctgtggacccactcatggctaggggaacttgccaccctataggcagagacacaaacacggctggctttgccacatattaatcacagagtcctayggctttgaataaacatatggtagccaagtagtgttgcagtgggccttgcgtgagaccaagttctgtgcctacttcaggtgtgaatcagcacagtctcagtggtggtggccacaggagtgcttatgttaccccaaccccagcttcacatgtctcagcacagaaagagagactgctgatttgagagaaagtaagggaagagaacaagagtctttacttgataaatcacgagaatttttcttgatgttaatccaaggcaaccaaggcagtacctctatgtgtttgcataaactactgtgctattggg

SEQ ID NO: 143363 - DNA, 328 bp, Homo sapiens
actagctgtaacttaaagtcaccaactgcagtggtcctcaaagacagtcagcccatcctttgaagttttgaagccaagtgtggacgtctctctagcgatgaaaattttacatcttcactaagcttaatcattgctagctctggacttcaagtgagagacatgcaattcttcctttcatttgagctctttgaggccactgtgcttactaattaacacccccggcrggtgtcatcctcctccctcctcaatcgagttcacccacaccggggcatggggaacggggcttgccgcaccccacacgccctgcacgcctggggctctcccacag

SEQ ID NO: 143364 - DNA, 541 bp, Homo sapiens
acacacaagtatttacataacatatgtaattgatatatatgtatatgttttatatatgctttatgcacacttatggraatatatgcatgtgtacataacattaattttttgaccaataaaaattacataattatgtattgtgtatattacaaaagtttgataggtatatatattgtaaaatgtttaatacaattaagttgatgaatatttatgtcaccttacatggttatgttttttgtagtgagagcatttaaggtctcctactgttgtagcaaattttaagcatacaaaacactgttattaactacattttaaagctataccttagacccccaaaacttatttatcttataactgaaagtttgtactctgaacaccttatcgttttttctacctccaggcctggtcattaccattgtactctctgcttctatgagttcaggctttttaaattctccatttaagtgagaatatacagtgtttgtctttctgtgcctggcttattttgtgcagcataatgtacccaggtccattcatgttg

SEQ ID NO: 143365 - DNA, 541 bp, Homo sapiens
acacacaagtatttacataacatatgtaattgatatatatgtatatgttttatatatgctttatgcacacttatgggaatatatgcatgtgtacataacattaattttttgaccaataaaaattacataattatgtattgtgtatattacaaaagtttgataggtatatatattgtaaaatgtttaatacaattaagttgatgaatatttatgtcaccttacatggttatgttttttgtagtgagagcatttaaggtctcctactgttgtagcaaattttaagcatacaaaacactgttattaactacattttaaagctataccttagacccccaaaacttatttatcttataactgaaagtttgtactctgaacaccttatcrttttttctacctccaggcctggtcattaccattgtactctctgcttctatgagttcaggctttttaaattctccatttaagtgagaatatacagtgtttgtctttctgtgcctggcttattttgtgcagcataatgtacccaggtccattcatgttg

SEQ ID NO: 143366 - DNA, 541 bp, Homo sapiens
acacacaagtatttacataacatatgtaattgatatatatgtatatgttttatatatgctttatgcacacttatgggaatatatgcatgtgtacataacattaattttttgaccaataaaaattacataattatgtattgtgtatattacaaaagtttgataggtatatatattgtaaaatgtttaatacaattaagttgatgaatatttatgtcaccttacatggttatgttttttgtagtgagagcatttaaggtctcctactgttgtagcaaattttaagcatacaaaacactgttattaactacattttaaagctataccttagacccccaaaacttatttatcttataactgaaagtttgtactctgaacaccttatcgttttttctacctccaggcctggtcattaccattgtactctctgcttctatgagttcaggctttttaaattctccatttaagtgagaatatacagtgtttgtctttctgtgcctgkcttattttgtgcagcataatgtacccaggtccattcatgttg

SEQ ID NO: 143367 - DNA, 553 bp, Homo sapiens
gtatagatgtaagaaaattatccaaaggtcaccattcaaatgaccaaccatttgaaatacagtaaagaatcaggcttctgagctaatacttttagaagagctagagtattaaactctgggcattttcacccattaatcattgttcaataaatgtttaagtgcctacctaccatgtgccagacaccattcaaagttctgtggatataacagacaaaaaccctgccctcatgtagcctgcattctaatggaggagaaagacaataaacacatgagtaaattataaataaagtgattagtactatatcttyaccttagaggatacccaacaaacagttactaacttaaaagaaaagaaaaactcacctgtagtatcagcagaaattttattcaagcttagttcatcagtaaggtcttcatttttaaacttatttttaatgtctctcactttgttcattatggaatcaattgtcaattctctgccacttaaatcctcggattccatttctaagaaaaaaactgaacagtcataactcctactttaactagcatcaaa

SEQ ID NO: 143368 - DNA, 560 bp, Homo sapiens
aatgtctggaaatgctttcaacactgcctttgtatacagtgaagtgtcctggtaatcagtcttacgagatactgggaactatttcagcaaaaaataaaaaaaataaagagaaggtattattcctctggaaaacctttgttcttccataagattagttcctttccctcatacctccttgggataagagttttctcaattagaaatgtttttatctgcaatttttaagggaatggcttcctggcacycttgcaggtctccacacaggccctggaggtgaggctcagctgcagcctgacttggcttggtgaacgaacaccttgtcatgttctcaggaatttggcatgagtggcagttccgtgcggtgctgtcaaggctgttgccattcacctccctaccttgtgggaggttgtcacaaggtcatttcccatctgttttcctggttctggtgaggtatgggactttccatctgtcccccttcttcaggaactgttgcagactataaaagtgcttggctggagcctagagttgttgacttctcagtcacagggtgaggagtgacc

SEQ ID NO: 143369 - DNA, 526 bp, Homo sapiens
ttccaatccacaggccatttcaagataatagatgttttggttctctattgccatgtgacaaaccaccccaaaacttgttggcttagaacaatcacagccatttattctcactcaaaattatgtaggtgaactgggctcagcaggtggatcctttgctgccatgtgttgtcaaccacttcagtaataatccagaggcttgaatcgcttggaatgtctaagattacttactcaaatgctttgggaatggtaatgactatcagctaggagctcagcwggggtactaattgtagtgcatcatttatcctccacatggcctctccatatggcctagacttcctacagaatggcatctggaattcaaggggaaatatgtgaaaatagaagttacatatatcatatgtttatacagcatcatttcccactgcattatattggtcagagcaaatcacagggctaactcagattcaaagggagaagcaataaacttacctctggcttggaagagtgtcatataatttgttgttat

SEQ ID NO: 143370 - DNA, 579 bp, Homo sapiens
gtctgcatcattttggatcctaaaagaagtagatgatatggtgaaattaagctgcattcattggggcaactatctgtgaaggatcaggtggtgagccagaggaggaagaggagacttcatcccaccatgcaggcttracacctgtgcaagagagagtgaggaaggagcacagtacaggaagagtctcagtctagagactctataatagctcaaagaaagtgttgactaggctgatggacgtcatcaagccagaggcactttggttaaaagaatgctgtgtctcacagagtaggcctacattagtattttcatcttgcttagtcattggctgagagtggcccatagaaggtggagccttggcatgaatgtggggaaaaaattcaaaagggaagcttctgggggctatcaattatattccccatagcaagagctctgagcagcatgttttcaaggctgccacagtatccaatggatctcaatatgccccctttaggaactaaaggggcttgaaaaattcaggatatactccattgtgataaagactctagatagtagacatttctgagctctgtggggaaa

SEQ ID NO: 143371 - DNA, 597 bp, Homo sapiens
catgaaacaaacagcaaccagttaagtttttgaacatgaaggcttaccctttggaatggtgtgaccaccatgtttgaagcctargcttttctgctgaagagaacatgtaatggtttaccaaggttctttggctgacagccccagccccaactcagatccagttaggctgccagattatagcttcatgagggactttaggagaaactagccaaaaaacaaacaaacaacctgacagcctaacctagcccaaattgcagaatctcaagcaaatactttaggttatactttaaacctctgagttttgggactttgttacatagcaatagataactgatacaactatggcatatttatttggacaagatatattccaaatataaaaattctcagcatcttttttgcaacaatctgaaccttaccctctgccatttgtcgttaacttttccccacacttgaattacttcagaaaccaaatgatttgttgcagagacttctggcttccagctaggtcctttcaccactctcttaccttagtttcctgagggatcccatctttcctatctgtctattttcattctacttttattatctgccctt

SEQ ID NO: 143372 - DNA, 499 bp, Homo sapiens
ggtctgacctagtgcaatcagagtcatagtggacacaggggtgattgtgtggctgcacacacagctttaggtggctcagaacagaggagagagactgcatgtttgggagaaagtaagggaagataacaagagtttctgcctggtaagctagagaattttctggtatcttgtccaagaccatcaagacagtatctctatgagtctgcaagaacaacgatgttactgagcttggggtgcagaaacagtttagatcacaatacytaagttttttcaaatatcttgaacaccttcccaagaagggcagctacaaataagcccagataatgaagactataataaatacctaactcttcgatgcccggacaccaaagaatatctactagcatcaacaccatacaggaaaacatggactcaacaaataagtaaggcaccagggaccaatcctggataaacagacacatgaccttacaggcagataactcaaaatagctgtgttgag

SEQ ID NO: 143373 - DNA, 489 bp, Homo sapiens
gcctggactacatggtgagacctcctctctacaagaaataaacaacattagctgggcactgtggcatgcatctgttgycctggctactcaggctgaggtgggaagatcacttgggcctaggaagtcaagtctgcagtgagccaagattgcaccaatgcactccagcttgggcagcagaatgagatcctgcctcaaaaacaaaaaacaatacatattttcagaagaaagatagatttttttttttttctgagactaggggtgataaactccttcctaaccagttcagagtgctgtgggagagacatggaggcctagcactacacaaagagaaaatctggtccttgcaagtcagtcattttaccaactgtgtgatttaatgagcaaaagctttaaaaatcttattttaaaataagatttttaaagcttttataaatctcaactttggacattttaatggagttgaaagatattgctgtaatttcagtaagg

SEQ ID NO: 143374 - DNA, 631 bp, Homo sapiens
tcagttcctactaagatatgtgaccttatgcaagttacttcagttttctctgcaactctttcctcatctgtaaaattaggatgctaataatagtgcctatcttgtttgtaagaattaaatgarctaatcctactgtatgtgtactgatgagtttggttcagctgtgagaaagaaaggcccagagaaagaagtccacaggtcagcaagctggtagggtggctccatggtatcaggaagctaggctgtttctcttgttgatctacagcacgggtccccaacccccaggccatggaccattaccaatctggtccatgcctattagggactgggcctcgcaacaggaggtgagctgcatttgagcaagaattactggctgagctccacctcctgtcagatcagcagtgacattagattcccataggagtgtgaaccctactgtgagatgcacatacaagggatccaggttgtgttccccttatgagaatgtaactaatgcctgatgatctgagatggaaccagtttcatactgaaaccttctgctaacacccctcaatctctgcaaaaattgtcttccacaaaaccagtccctggtgccaaaaagtttggggaccactgctctacagtacttaga

SEQ ID NO: 143375 - DNA, 561 bp, Homo sapiens
ggctggatgtctgtccaatgccaacattcttaggccttttctcaaacaagagattcaccactttcttggcctcctgcttcttcacagcagcagggaccagagccaccttcttccccttggtcttctttcctttcagcatcttaggcagtgggaggaaacagcaagaacaagaatttatattctcacaattctgaaggctaggaagtccaaaatcaaggcaccagcatgtggtctagtaggcacctttccgctgcatcctcatgtggcaggaagtagatgttcatgtgagcacaggtttgcagaatgctgcccaaagcctctttcaaaggacattaatcccattaacaaaaagcatccctcatggcctagtcatctcttaaaggcccacctcttaatattatcacattggcagcamttgaattttagaggggattaggtttcaacatgaattttggagggaacaaaacatttaaaccatagcagaaagtgtgtcaaaaatggcaaattatgtagaataaatttagtgaactttaaatgtcagtacttctgatttgggtttaa

SEQ ID NO: 143376 - DNA, 571 bp, Homo sapiens
gctatttgttatctgctgaggcatgtttcatgattagccagccactggattggattgacatgttgtagtctaattgaactgacattggaaatctttttaaatctcttatatctaagatactgtgcttagtttttatgaggcaacagaggaaaagagggatggatascttaaagtctagtaggaaataatgatatataaataactaatgaaaacatagggccaggaaaaatacgttatactataggtaaatattgctatgggagaaaaagtgaaaaactaattaattttggcagacctgagaaatgtttcttagaggtgtaacatttgagctcagctctcagggatgagttagattttcttctgtataccaatgagtgaggagaagaattctaggctgagggaatattgagatcagatagggttgcaggagtatgaaagtataggaaaccactagtagtgaaagaatttgaaatagtactagagaattggaataaatgtgaggtgtgttagggcataaaatcaggcagaagtagtagtagtcttgagatgtgtaggtttgccagatttaaca

SEQ ID NO: 143377 - DNA, 336 bp, Homo sapiens
tgacaatctttgtattgcatttgcatgccacaagagaacatttgctgcaaaagaggcactaaataattaagtggacaaaatgacttggccagctcacatcagcagcagcrtctgtcctggtcacttcagtaccccagagcttgtgcagtggattatgaatgtggttactatgttggcagagtcagaagcaatgtataaacccaacaacaggtgctccatcttataaggattaggtagactaagtaaatccaagaatctgcaggtggaagtgaatgtggctctgtatgtggtcactaccagtaacttacctaggcgatttccatttcttgtccccac

SEQ ID NO: 143378 - DNA, 545 bp, Homo sapiens
ccttaataaccgagtgcctttttcacactttyacttcaaaccatttcattctggaaagtaatttgtttacttactagttggacctcagaagatgacttttttttttttaacttacaacaaactctttatcattgtcttagaaagcattgtttagattataagtttcagaaaccaaactcaaactggcataagtaaaatactgacttggctcgtctaacagagatatccaggctgtggccacttcaggcacagctctatccagggggattacaggtcctgaagataccatttctctctccatctgctgaagtttctttcctctgtgtggccttccttttggggtaaagatggttcctacaaacgagtgttctattctcagaagaagaagagaaggtgaaaccaccattcctttctgagagccccagtgaaggacctggggaggcaatcagccagacccaggccacgcacccattcctgggtgggcttggcactagataacaccaagggactgtcaccaagagtgagggtcagaatgctggacaagc

SEQ ID NO: 143379 - DNA, 593 bp, Homo sapiens
agatgagtctggaagaatgaataataataataagcaatgttgagtgacttactgtacttaaggatcttgaattttgccaaataaaggaaagctcagcctcttattgattctagtgcaaaagtatataagctaagagttaagcacttaaaatctcagtataatagcatgcaaccatgtttagtcttttcttagaactgaacaagaattttgctgtgtcatttcttgctagagtaatttataggtaaaacggtgctattgtcatcacacttattgtgtgacttgcaagggagaccctgagaatatttttctcttgactatagttgtctctcactgaaggagagattggtaagcatactcactctctaattttaagttctgatgattgttaaatactttcctttaagtattatgtttcaatgttaatggagttgtagctaatatttataagcttaagagtaattcctcctgcatataaagaatcctcttaaaaatgtacataatgatttaatctktctttaaaattaaactctgtaatacattttcctctgttagattttatgtatatatatagtttcatagtgtaagtatagtaa

SEQ ID NO: 143380 - DNA, 575 bp, Homo sapiens
actggaaagccattcggaaagtagtatcagatcattagtattctctcttatgcactagtttatttctatggtaggacagagggcaagaatgttgacctttagaaaatgtggtctgtagttcagtgttgggcataccatagatttcaatatattcgtcaaattcgaactggataagatgaaaatttttatttcttaaggtgttctttaaaagtaagtcaattaaaaaaatttagctctccctttakatataaatatttgaaactattctaatatgttgaatacattttttttataaaattaaattgtgcttattaaagaaactttggacattgcagaaaaatagaaaggcaaaaaacagtagataataatgtcatacaaaggcaaacacataagactatataaaaactatttcctgcaattttccttttaatgcatagatttaaaaatgcttgaaaatgtgaactttataattttgtatcctttttcacttaaatcaagtacctgtattatctcaatgatcgtcatctttatcttcatgccttatcaccaaaaatagcatttattgttgcatacca

SEQ ID NO: 143381 - DNA, 506 bp, Homo sapiens
atctgttgcaatcctttagtcccacatttgcctttatgttaatggtaaccttttaattaaagctactctaaaattttcactttgtgtttattagaggcctcaacaagttgaatagtttaaaactaagtatagtttagtaatgtcagaatgtacagacatgggttttctagaatagagttcaacttaaatggctgtaggccttacatatgtgaaaaaataatctgttgaaatgtgttgcaaatattcctttatattttgagattcctttcatcattgcttcatgactggatggtatagaaagacttgctggggaaaaaattaaccgtttagctttttcactgactttctsttgcagcgaatttgtgtcatggctgttggaaattggagagattcacaggcctgaggaaggcgtgcacttgggacaagcattattagaaaatggaatcattcaccatggtaattactttattattaattacttatttaatgcatttattggccatatg

SEQ ID NO: 143382 - DNA, 563 bp, Homo sapiens
atacataataatgttttgtgattctaaatgtcttgaaatggagtcatttatgacaagtcactcagcccacagtgaaactgctgacccttcaaagtgataagcacatgtatggtggactgaggtgataagatgacacctcccatggccaggcacctcagagacaccacaggaaagtgaagctaaaggggctgagatgatgactacggacacactcctgtggagakccataaaaacagcaagaaactgacaatagttgagatgcctgcagaagctttgccaggagaactctgaggcctcctcgccattggtagtggctgctagaagctctgccaggagatgagcagggacccccatccccttgctggtcagtgtttccagggaaatccaggccttccttgtgcctcagtcagcctgcgggcctcctgagctactcaccatggtttgttccccctctcttttatgtctgcctgtgtgcattgagtatatttgcatgattgttggtgtgtgaaatccttgcaataaactatgaatttgaaagcatttaattggccattgagtcgtcg

SEQ ID NO: 143383 - DNA, 606 bp, Homo sapiens
gtggtgcatgccattagtcttagctactgaggaggctgaggtaggagaatcacttaagcctaggagttcagtgctgcagtgagctatgatcatgatactgtactccagcatgagcaacagagtgagatcctgtctctaaaaataaaaaataaaaagggaaaatcagagggtaatgtcaacaagttctactttttataagcaaaaagtctgttcaagtaaactgaaatcaaaatttaaaaacattaattttttattgttttccaaaattaaaatgtaacttagaaaatacattcagactacatccatttttagattaaatatgtattcgttacctagccaacacataatagatgagatattaaaacaaatggaaggactgcaacaaccaaggaaacagcctaaatttttgtgatttctgaatatctaagactttttctggggcgaataagctaaaagttagcttattcacctcagaaacaagtactrtcatctccatagaacaagtactatcaagtgacctaaggaacagacattcaatccatctgaaagagagcttatgatatacaagttaacttttctcaaaagaagacatttatgcagccaaaa

SEQ ID NO: 143384 - DNA, 562 bp, Homo sapiens
caatactttagtgtttgctgacagtcttakagtacttagaaaataagtttttatatatttgggcatttttaggttatgtctatatttcttttcaagctatcattgatccaaatacagtgaaaaatagcaaaccaggtgccaaatatgatccatgtgaaagtaattttctcatggagaagtatttttctgtcttcaagcgtggcagtaaagattttgatccagtggtctgagctgtgtcatcttttctttaggtagtttaaagtcatttgctttgttatgggtatgaattatgtggtattaagtactgcagtagcactattaaacattatatcataaatccttttagaatgtggaaaagttagtgtctgaaaggccatttaaaattttccactttaattccaagctaggggcagttttgtgttccttttttttttttttttttaacaactgacataatccactaaaaatgataagtctcttagtaccactcatgcatttccagacaaaatccaaacattatatagattgttttaaaatacagattgagattgttttaaatttg

SEQ ID NO: 143385 - DNA, 504 bp, Homo sapiens
ccttttgcaatacttacttgaagcatgttttctacatgaataatatcttgaagcccaaattatataattgtatctgtaatttatctgcttgmtatacccttcacaataattctatagcatataatttttctcatttttaaatatttatgaagaagcttatgttgcaagagcttcattctcactgtatatacctgaatgctgtgataggttagtaatgggcactgaatcagaactatttatttctgtcctacaccaaagcccttgttttataaactaggcaactttactcccagcatgagcatgagcatgagcaaatgttacggcaataggaaagcatagtatcattcaaagaattatctagaaagtggataattttggccaaatctgagattctcagtgctgtttatacatcacaatcacccatgggaggttttaaaacttaggctcagacatcatcacaaatctccaccacagacaaattcaaccccaattgctgagagaggg

SEQ ID NO: 143386 - DNA, 504 bp, Homo sapiens
ccttttgcaatacttacttgaagcatgttttctacatgaataatatcttgaagcccaaattatataattgtatctgtaatttatctgcttgatatacccttcacaataattctatagcatataatttttctcatttttaaatatttatgaagaagcttatgttgcaagagcttcattctcactgtatatacctgaatgctgtgataggttagtaatgggcactgaatcagaactatttatttctgtcctacaccaaagcccttgttttataaactaggcaactttactcccagcatgagcatgagcatgagcaaatgttacggcaataggaaagcatagtatcattcaaagaattatctagaaagtggataattttggccaaatctgagattctcagtgctgtttatacatcacaatcacccatgggaggttttaaaacttakgctcagacatcatcacaaatctccaccacagacaaattcaaccccaattgctgagagaggg

SEQ ID NO: 143387 - DNA, 618 bp, Homo sapiens
ttgaaagctctttcagacaagaagagaggagggaagactttccagcccatttacagaactggcattaccctcatatcaaagtcacagcaagactcacaggaaaagagtgccatacaccagtgtcaccaataaacataaatgaaaacatccttaacaaacattggcagataatacaaagccacataaaaaaggattacactccatgaccaatgggattcatcccaggaacatatggttggattaacatttgaaaatcarttcatggaatgcactgtattaatggaaaaaaagacataattatctcaaaagatgcaggagaaacagttgacaaaaatgttaacatcactcatgttcataagtttcaacaaaataggaatggaggagaccttcttcactctgataaagggcgtctataaaaaacccacagctaaaatcaaacttaatgaagaaagactgaagactgaatgcttttctcctaagatggggatcaatgcaaggatgtccaatcccaccacttttatttaatattatactggagattgtagccagtgcaataaggcagaaaattaaaaattaaaggcatccagataaaaaggaaaatatacaattctattcaca

SEQ ID NO: 143388 - DNA, 618 bp, Homo sapiens
ttgaaagctctttcagacaagaagagaggagggaagactttccagcccatttacagaactggcattaccctcatatcaaagtcacagcaagactcacaggaaaagagtgccatacaccagtgtcaccaataaacataaatgaaaacatccttaacaaacattggcagataatacaaagccacataaaaaaggattacactccatgaccaatgggattcatcccaggaacatatggttggattaacatttgaaaatcagttcatggaatgcactgtattaatggaaaaaaagacataattatctcaaaagatgcaggagaaacagttgacaaaaatgttaacatcactcatgttcataagtttcaacaaaataggaatggaggagaccttcttcactctgataaagggcrtctataaaaaacccacagctaaaatcaaacttaatgaagaaagactgaagactgaatgcttttctcctaagatggggatcaatgcaaggatgtccaatcccaccacttttatttaatattatactggagattgtagccagtgcaataaggcagaaaattaaaaattaaaggcatccagataaaaaggaaaatatacaattctattcaca

SEQ ID NO: 143389 - DNA, 488 bp, Homo sapiens
tcttaaaaaagaagctcttgagagtgtagttatgtgtggttcatccgtaaaataagaagctgttttagaagtaaaatgtgatgtttatggtggacaagacttgctgactaatggttgttggaaattttccatttgtcagattgttatgtagatgatcatatattaaatatagctaagaggagagcaaaagcccaaggaatctaaagaacatttttttttggctaatagtatgtttttaggaataagagctgctgtaaagaatgcagaagcctcatgtcattagctgcacgtccatctcctagcagatgagctgaggggtgccacgyactctctctatatatatacgcacacacacacgtgcatgcgcacacacacacatacacacacacatacatatatatctcttcttggggaaaatgggtctcgctgcttcacctgaagtctgcatgctttttgttccctattttttgctagtttcatttcctcac

SEQ ID NO: 143390 - DNA, 596 bp, Homo sapiens
agcataagaattctggcaccatgaagaataagaatgtggtgacacgatcaaaggattgctctagctctctagcaatggttcctaaccaaaatggaaactcagaaatgacagataaagaattcaaagcatagattgcaaggaagctcaatgacattcaagatcaggttgaaaattaatacaaagaaacttctaaagcaatccaggaaatgaaggaaggaataaacatctttaaaaaaatgaatcagaacttctggaattaaaaaactcagttaaggccaggagtggtggctcatgcctgtaatcccagcactttggaaggccgaggcaggtggatcacgaggtcaggagatcaagaccgtcctggctaacacagtgaaaccctgtctctactaaaaatacaaaaaaatwagttgggcatggtggcgggcatctgtagtcccagctactcgggaggctgaggcaggagaatggcgtgaacccgggaggcagagcttgcagtgagccgagatcgcaccactgcactccagcctgggcaaaaaagcgagactctatctcaaaaaaaaaaaaaaaaccctcacttaaggaatttcaaaata

SEQ ID NO: 143391 - DNA, 500 bp, Homo sapiens
atttttctccatgaaagcattctccaatttcatacttggggagcatcagcctcactgccaatatcccggagcttggaattgtactcataaggatatgaactttcatgaaatccttacgctttcatctcagasacccagtctctggcttcgctttgtcggctgtcttttgggtttcactctggaggcttacgggtttaagtcttcacaaaccattctttgttgtgtaaaagcatgatctctgaaggcagatcacctgggtaccaactatagctgtggaaccttgggcatgttgctcaatctctctgtgcctcagtttcctcatttataaagggaaggtcagtttggtgctcatttgactctcctcccaaatttcttgtcatgagtcttgtgctcctggacttatctgttgggtaaataggtccttattctcagtggtacctgaacacctatcctatacttttctgagactggccataatttcttaccccaaaccactgggg

SEQ ID NO: 143392 - DNA, 554 bp, Homo sapiens
tcattttgttgacagattgaagatggattggaggtggttacatggaagagaaggaagtcaattagtattccatggcaagaaagatcaattaagggcaacagataatgaattcagctctgtacatagtgagttagagacactcacagggcattgaagcaaagatgtccatgggggtggaagacaggagtctgaagctccggaaagagccccaagctaatagtaacagtatggtagttgaatgcatgtgtacagatgaagttgtcttggatgaactgtatgtagggtcagggaggaaaaaagcagtttgggattagagtcaaggggaactgcattatctggaaaaaaagaaaaaaacatatagagagaaagaagaaactgataatgtgtagtcacaraggagtgcttcagaaactaaaggaagaaagaagaaaggagtcaacggtttccacccctagtgcatgagtctggatgctatcgtctaactgcacagaataagcaactgggctgtacacagaatcacaaagccacaggatttggccaccaaaagagatcta

SEQ ID NO: 143393 - DNA, 568 bp, Homo sapiens
aatattccccaaaatggcatatgatctacttattgtcatatctacaaaaataatacctgtgcgtgaaaacgcctttttctttcttcktcagacagcaaaaccctgcctttaaggacaaagtcaaatatcatctgctctaaggaatcttcagtagtattttctctcattctcgagctaagcagaatttagcacatcatattatgtgtcaaagctagttcctatgttcctttattgaagcttttgactgtttctcctcactttccattctctccctctcaccttcttttctaagaattaataataatttttgagaataatgttttgagaatttacaataggttaagatgctgaaaacttagattatattattttaaaatcttatagttcagctaacatgaatttatttagccctttgtttcatgaagaggaaagagccttggggagattaagaaatgtataccagtcaactcaatctcatccagtctgaatcaattagtttatgagctaaggctacattagtgcaccaatattcactgagaacactcagccattctgtctcctttttcca

SEQ ID NO: 143394 - DNA, 574 bp, Homo sapiens
attataggtgcatagtagtcttccacatagaatcaattacatcttagttacaccatttaaaagcaagaaccctgcatgtgtcccagacttagtatttggggagttatctcactttatttattttctgttcaactatatatggaggggagcagatagggaatggcgatgactctgctgcctcatttccacattgtttcacagatctaggagtctttcatctggttggtgactgcaagttcttcttgctaactctgtctctgcctagagatctctctctttgttttagatatgacagcaatttagtgcaatcagaaccacctccttcctaaagctgccttgtcaatatgaggaaacctcaggttttttacctccagatttcaggaaccaatgttgtrctgcattagtctgtgttttaagggagcttttaagaatttatgagcattttttctcattttgttacaacttttttcatttgttacagagcatcgactcttgggaaagcagggcaacaacctcaatttctaaaccagtggattctacgtgtgtaggatagcctaggaaacaataaaatata

SEQ ID NO: 143395 - DNA, 574 bp, Homo sapiens
attataggtgcatagtagtcttccacatagaatcaattacatcttagttacaccatttaaaagcaagaaccctgcatgtgtcccagacttagtatttggggagttatctcactttatttattttctgttcaactatatatggaggggagcagatagggaatggcgatgactctgctgcctcatttccacattgtttcacagatctaggagtctttcatctggttggtgactgcaagttcttcttgctaactctgtctctgcctagagatctctctctttgttttagatatgacagcaatttagtgcaatcagaaccacctccttcctaaagctgccttgtcaatatgaggaaacctcaggttttttacctccagatttcaggaaccaatgttgtgctgcattagtctgtgttttaagggagcttttaagaatttatgagcattttttctcattttgttacaacttttttcatttgttacagagcatcgactcttgggaaagcagggcaacaacctcaatttctaaaccagtggattctacrtgtgtaggatagcctaggaaacaataaaatata

SEQ ID NO: 143396 - DNA, 451 bp, Homo sapiens
tggggacttttaaattttacaaggtttttgtaatgttcctttgaggttaagtacacttatttaaagtgaagtgcaactttcttttcccaattattttgcagtatttagtataataattctcacrtgctatttgcttaataattatttcttgaaggaaagactgtgttgctgcaagttggtaattcacagatgtgcctgaaagaaggaaaaataaagcctaaaataaagcaactactaggtagccatgaggaaaaagtgcatacagagttgttgctcactttagaaaagcttatttagggccagcaagcaaaactataaaataaacaaggtttatttagctctaatttcaaagattttcaaagcaaagataaaaagtataaagtttatctggtgggaaatttttgtttagtttatagggactttcttctattttttgtttttgttttttctt

SEQ ID NO: 143397 - DNA, 418 bp, Homo sapiens
tggggacttttaaattttacaaggtttttgtaatgttcctttgaggttaagtacacttatttaaagtgaagtgcaactttcttttcccaattattttgcagtatttagtataataattctcacgtgctatttgcttaataattatttcttgaaggaaagactgtgttgctgcaagttggtaattcacagatgtgcctgaaagaaggaaaaataaagcctaaaataaagcaactactaggtagccatgaggaaaaagtgcatayagagttgttgctcactttagaaaagcttatttagggccagcaagcaaaactataaaataaacaaggtttatttagctctaatttcaaagattttcaaagcaaagataaaaagtataaagtttatctggtgggaaatttttgtttagtttataggg

SEQ ID NO: 143398 - DNA, 339 bp, Homo sapiens
aattttccaaatttttatattctgcttcctttttaaacataagttccaatttcagaccatctctttgtgaatgcatgaatgcatatgactatatgcatttagatacagtcatgttatttcttgaatgctttgctgcttagaaatgtctttcatgagataccttgactcatctttctaaagttcaaagttctaaagatctctatggcaggggcataatgccaccagtctctttgctaaagcacagcaagagtgacctttactctagttcycaataagttccatatctccatctaagactacctcagcatgggtctcatttcccatattactatcagcatt

SEQ ID NO: 143399 - DNA, 579 bp, Homo sapiens
cttattccctatactgcctttcaagtttatttagtgccccatagtactttagctcactatggcaaggcatgtcagaagttctgaccactgggattagcaattcccctgtggctagggctggtctaaatgcttccactgttggtggtcatcagctgagttacatctgctatgacagggaagcagagagtttattgcaacgttgttcaattgctgggctcttcctctatcaattacacagagtctctgtccacaccacatggccactgctgcggggaggcggcgcagggtgacaatagacagaagcaagacwtttatctttcttatgttttcaatgcttctttcagcaatatgaagttaaaaccaggcactgggagtgcttacctgatttttggttcttacaaaagtgcttcttttgtgtagatagtcgttaaattggtgttcttggagtggtgacaatcagtggagccttctattaggccatcttgctctgccttactctagatgagaattgagtgtaacttctgaaagtattacgctaaatgtgtcagcacaatggtttagatgtgaatgtgggaatta

SEQ ID NO: 143400 - DNA, 552 bp, Homo sapiens
accacccagggaagaatgaccttactgaatgaactaagtaaggcaccagggaccaatcctggagagggagaggcatatgcaatgtttcatacagataattcaaaaaagcagttttgagaatgcacaacaaaattaaagataacatgagaaggaattcagaattctatcaaagaatatcaaagaggttaaagtaatttttaaaaaattaagcagaaaaatgtaattgacagactgaagaacacatcacagtctctcagcagcagaatgaaccagacagaagaaaaaattattgagcttgaagacaagctattagaaaatacacaatcagagaagacaaaagagaaaagaacaaaaaaaaatgatatatgcctacaagatctagaaaatagcttcaaaaaggtaaatctaagagttactggccttaaagaggagctacagcgagagatatcagggtggaaamttatttcaaagggataataatgaagaactttctaaacctagagaaagatatcaatattcaatacaagaaagttgtagaacatgaagcagatt

SEQ ID NO: 143401 - DNA, 450 bp, Homo sapiens
aaacagtatcaagcatctcttatgaccaaaatggaataaaactagaaattaacaatgagagaaactttagaaacacatggaaattaaacagcatgcttctgaatgattagtaatgaaattaaggtcaataatgaaattaagaaagaaatgtgtagatcggtcagggtggtgggaaaaattataggaaagatgaaaaccttcttggaaggcctggaggttttgcaaaagcttcgggagagaattctggctgaaagaagccaaattcyctcatccagaggctgagagcaaagggcagataacaagggaatgtaaagaaacttatctagataaattggtttacttatgtctccggaaaccaacccttgatcatttgcatacaggactgctctctactcaggggatcaacaatattaattactgacaagttgtatttgctccaagccgctgtca

SEQ ID NO: 143402 - DNA, 488 bp, Homo sapiens
agatatcaaaaacaaaacaaaacaaaacataataaacagacacttcaagtaaaagaaaaagtaaactatgaccaatgtatataatgaatattcatgtaaaaatcctcagtaagatactagcaaaccaaattcaacaatacattagaaagattattcatcatgactaagaagagatgcaaagatrgttcaacatatgcaaatcaattaaagtgatacagcatttcaacagaatgcaaggtgaaaaccatataattatttcaattgatgctgaaaaagcatttaatataattcaatatcccttcatgataaaaagcctcaaaaacctgggtatagaaaaaatataactcaacataataaaagccatatatgacaggcccacagctagtatcatactgaatagagaaaaactgatagcctttcctctaagatttggaatagggcaaggatgcctgttgtcatgaatgttattcaagacagtactggaattc

SEQ ID NO: 143403 - DNA, 377 bp, Homo sapiens
tataatgaatattcatgtaaaaatcctcagtaagatactagcaaaccaaattcaacaatacattagaaagattattcatcatgactaagaagagatgcaaagatagttcaacatatgcaaatcaattaaagtgatacagcatttcaacagaatgcaaggtgaaaaccatataattatttcaattgatgctgaaaaagcatttaatataattcaatatcccttcatgayaaaaagcctcaaaaacctgggtatagaaaaaatataactcaacataataaaagccatatatgacaggcccacagctagtatcatactgaatagagaaaaactgatagcctttcctctaagatttggaatagggcaaggatgcctgttgt

SEQ ID NO: 143404 - DNA, 377 bp, Homo sapiens
tataatgaatattcatgtaaaaatcctcagtaagatactagcaaaccaaattcaacaatacattagaaagattattcatcatgactaagaagagatgcaaagatagttcaacatatgcaaatcaattaaagtgatacagcatttcaacagaatgcaaggtgaaaaccatataattatttcaattgatgctgaaaaagcatttaatataattcaatatcccttcatgataaaaagcctcaaaaacctgggtatagaraaaatataactcaacataataaaagccatatatgacaggcccacagctagtatcatactgaatagagaaaaactgatagcctttcctctaagatttggaatagggcaaggatgcctgttgt

SEQ ID NO: 143405 - DNA, 564 bp, Homo sapiens
tcagtccgtgtttgttgccagtgcacacactttcaatgaatgtgttcagtttgtttttcttttttttgacttcttcattatgtttattatgattatctttattaaaatgtaattgtatatgtattgagtctgataacagaaatagatatgttaatgtgattgaatcattttgcaatgtacacataggtgaaaatattgcattgttttccataaatatacaagaaaaagttaacaaaacaaatacacaaaaatataaaatagggcttctactttgaatgattttgattttgtattttgtttttcttagatttaataggtgttatattgttgcaattgatgtcaaataaaaaaattatggcatgagaagcactatgtagttgacatcagattacactgggtaatwgggatcttctgcctttgcctctgcgtgcttgaataaattcattttattttttgtttattctgaaagaaaaaaagtcaaatggtacaaattaaatagtggtgtatatttttatgtattgtcttattttatctttataaaacacccataaaatagatcttatg

SEQ ID NO: 143406 - DNA, 494 bp, Homo sapiens
agattgattttctagggtactgaagacttttcttattaaaatgcaaatacatctggaagtcattttcttgtaacaccttatcagttattggttttgaagttctgactgattagtagtccacataactggcctccttgactctaaattataaattaaagataatcagcacattgaaaataatcatgcccttggtttagtatataaagggaaactttgatcaatactttaggtgtctcaccatatagttaaccttttatattattyctacttttttacttatttctagttactaataccaagcacttcagcagctctagtggcattgtctctgtcaagtgttatagaaaatattttatacatttattaacaaagtaaatcccatagcaacagcacgtatgctagacttcatatatctagtgttcactttattaaaaagttagttttcagtaatggcactcaatcctgatatttctgaatacttgcttgaaacatat

SEQ ID NO: 143407 - DNA, 653 bp, Homo sapiens
tgtccttttcagtttattatatcaaaattttatagttttccttttagaaatgtttctcttcttggattaagttcattgctaggtattttgtttcgtttgtagccattagaaatgagtttactttctggatttttcattattttgaatatttttcatattcattctactgttggcacgtagaaatgctactgatattggtgcatttgattttgtatcctgcaattttacggaatttctttatcagttctaataggtttttggtggggtattaggttttaccacgtataagattatatcttctgcaaaaaaggataatttgactctttcctttctaattagatactctttatatatttatcttgtctgattgccctggctaggacttccaatactatgttgaataaaagtagtgacagtgggcatccttgtcttcttccagatcttagaggaaagyatttcagtttttgtccattcagtacagtacgagctttgggtctttcatatgtgggttttattgtgttgaggcatgttgcttctatacccacttctttgacggattttttatctttaagggatgttgaatttcatcaaatactttttcagcatgaattgaaatgatgatgtaattttttcccttcattttgttgatatga

SEQ ID NO: 143408 - DNA, 240 bp, Homo sapiens
tctcaagagagtcaactcttctcwctgtaatagctctatagttctagttgccccagtcatactaaacttacaccacctccttatcgcctattcatctttcaagctttatctttaacattatctcctcagaaagctctctctgaccttattccatttgagattaggttatttagaatactttttatatattttcagagaatacagtatatctcttttgtgacattcctaacatttataata

SEQ ID NO: 143409 - DNA, 506 bp, Homo sapiens
caagcctgatctggtttcttggcaagatgtattagtccattctcgcactgctatacaacaataccagagactgggtaattcatttaaaaaagaggtttaattggctcacaattccacaggctgcacaggaaacaaggcaggatctgcttctgtggaggcctcaggaaaatttcaatcatggcagaaggtgaaggggaagcaggcacatattacatggccagagcaggaggaaaagagagagagaggaggaggtgccacacacttttaaaaaactagatctcacgagaactgactcagtaccatgacacagtaccaagggggaaatccactctcctgatccaatctcctctcaccaggccccactgccaacattggggattacaattcaacatgagatttgggtggggacacagatccataccatatttttcctcccctgcccccyctaaatctctgttcttctgacattgcaaaatacaatcatcccttcacaacagtccccaaag

SEQ ID NO: 143410 - DNA, 576 bp, Homo sapiens
aagttcataagaatataaccaatgaatcagcctcagaaagagaaagtcttaccaggaattgggaaatagaaaaaaataggattaaaaattgataaaccaaaacactgcctttggggaatccaaaggcaagacttgaacatgcacaaggacagatgtagtgtgttgttttgattaagagcaggtgacttggctagrtaagatacccttgggtatgtaaataaaaagtaattaaaaagttgaatttgagagtcttgatgaaggaaaattaaatcataaagtcagaagacatacaaagtgcctttccaacaaaatgcccttgaataaagaacagctacaacaaaagctagtaaatggctgtcttaggttgggttcattcaaacacatggctgaaataggattccatgtacaagaaaggtattaaatgaataggctctggataaactggagggaaaaaaaattaggaaaaaagaagaaaacagggagggaggcaaaataggaagggaagaccgataagcaagcttgtggtttcaggggaagttcagattcattctatcttacaggaaaccctgtagcaca

SEQ ID NO: 143411 - DNA, 572 bp, Homo sapiens
tctctacacaaagcttgttgatgcacttaaaatgaacaaaaagtagcaaacagataaaataacaagaaggatcaaaatattttaactgatgaaaattatctccacccaacaacaacaagcaaaaggaaactgtgacacaactcttcaatataattaactrtgtttaatcagacatttatagattaaaaattttgaattcatgatccaaaatatgataacacaagaggtaaaagtcatacaaaatgtgaaatgaaagttgatgtaactcattgaagaaatggaagaaaaagttaccttggaaagaaaaatgacaatataagatgtgaagacaaaataggagttactgaaaacataatgaacatcatttaaaaatacacatgaaaacatctgtgagaacaaaataaaatcactaaaaaagtaaaaggaatcagataaagcaaatgatgtagataacattcttaaagatggttctgttacctacatgtatgcatcaccataaataaaatttgagcattttttaaaaaggaaaaataatggagtaaactaatatttaaaacttcagtgaacaaaaa

SEQ ID NO: 143412 - DNA, 483 bp, Homo sapiens
tattattttgagaagacagcgaggtctggagattaaaacattgtatttgaagtgaaaatccatgggttttaaagttgagtcttccaccaagtactgtgtgacattaggtaaacgacttctttgagattcagctgtccatctgcaaagtacagaaaatacttaygctaccttgcaggtctgctataagttttaaaatcactagagtacataaaaaacatactaaaagactcataaattttagagttatttattggtactgttatcctgctataatttctctttgttaggtgctttatttgatattaatctgtcctaaaatttgtcaaaaatcccccatctgaaaataaggatttttaagtaggtattgcatcagagtatgtaaaatgattaagggcactataagcacaaagtagtctctcattgttatttcttataatgaaggtaggaagacaatagcccaggtaattgactttctgcatctat

SEQ ID NO: 143413 - DNA, 483 bp, Homo sapiens
tattattttgagaagacagcgaggtctggagattaaaacattgtatttgaagtgaaaatccatgggttttaaagttgagtcttccaccaagtactgtgtgacattaggtaaacgacttctttgagattcagctgtccatctgcaaagtacagaaaatacttacgctaccttgcaggtctgctataagttttaaaatcactagagtacataaaaaacatactaaaagactcataaattttagagttatttattkgtactgttatcctgctataatttctctttgttaggtgctttatttgatattaatctgtcctaaaatttgtcaaaaatcccccatctgaaaataaggatttttaagtaggtattgcatcagagtatgtaaaatgattaagggcactataagcacaaagtagtctctcattgttatttcttataatgaaggtaggaagacaatagcccaggtaattgactttctgcatctat

SEQ ID NO: 143414 - DNA, 441 bp, Homo sapiens
gggttagggcttcaacataggaatttatagatatttcagtctacagcatacctgtacacatacacatgtacacatacacacataattttttcctgtctttatgatttgaagttgtattcctgttctgtctagagaaaagcatggtctgtgaacccaatgaggactctgggacagattcaagaagtcttctaggttaaaattattttcatgacaatgataagacattttcttttttcacttccttawtatttgcatggatggtacaaaacaattatttgtaaaactgctgatgacttaacataaataaagactgtagacagaatgggaaatgcactttatgcaattgtatgagttgtgaattgaataaacattttttctcctataggatgccaatttttacttgaaagaatgactgatacacaaactggttaatcagaattg

SEQ ID NO: 143415 - DNA, 484 bp, Homo sapiens
gataacccagttaatctgatatgcttgttacttattgcatgcctgtactgaaatatttaatgtaccacatgagtatttacacctattacacaaaaattaaaaataaaaattaattttaaaaagacattgyttacctagattcataatctcttattaaacttttacagtataaggttaatttcctggttgtaattgttttggatcaataactcaattctatttaaattgaatctgtaactaatgatttttctaaagaaaccttggtaagtctgaaacaacttcctatagtctgctctagttaaactgtgcttataaagtaagcagagtgatgcaacccaattcttttcaaagtggtcattagatttaaagtggaagattctggattatgaaatcatactgcagtgacatcacattgcttctggtctatccactgttttaataaacagttgttctaagagcctgtgacacacattaaattctaact

SEQ ID NO: 143416 - DNA, 372 bp, Homo sapiens
tctttccacgttcctctgtctgcttttatcaaggccgcactggcagctaattagataatgcccatccagattgagggtgcgttrgcttcttctagtccactgactcagatgttaatctcctttggcaacagcctcatggacactcccagaaacaatactttgcatccttcaatccaatcaagttgaccctcaatattaaccatcacatgcaggtagtacatagtagggcaaggactggaacttagccagttctgctgcagagctggcttccttcaccagtactctatggtacgttgcaacagtgagagaaaggtggagagaaggggcctgaaattctacttgattaaaatcagagttgcattatgccactat

SEQ ID NO: 143417 - DNA, 540 bp, Homo sapiens
cagctttgtcacttaagacaagccagcaattttactatgggccttcaggatgggtagcatccctgatactagcgaaaaaggttgccccttttccacagtctttccaagaagagagctcaagaacacacacttttaagtggctagttgggtaacttgggaatcttttaaaaagcgattctcaacctgtggctatttctccactgagacatttggtaggatctgtaaacatttttggttgtcagatgatgcctatctcttagatccttgatggttccaatattctacagccccaaatgttgtagatgttgtaggaaaggtgacttacctcaaatctctagatgaacagactggcttgcccaaacaaaaccagtattcaaagactgaaataagttactatgttgtcgaatgtgcagtcaccagcaagtrgccacaagaatcaataataatctgaaagacgtgcttccactaaataaacaaaataaaataccggtaacagactcaaaaaagatagagatttgtaaactgcctgatgaagaattc

SEQ ID NO: 143418 - DNA, 408 bp, Homo sapiens
tctggtccctctgtccttggtgatcacggaaaaaaaatccttttaaccagtgtgaaaagcaaaggaatcacacccaaaacattacaatgtatcatcatttcatcctgtctgtgatgccctgatataagtaaaacgattcagtgacctgaaattagcctctaattatagcttcaagtattattctgtacaacttargtttccttaaattcaaacagactcaatattgaatcaatttgttaaacttacttatttcaagattcttaacagacacaataatactaacatataacaatttctgcatataaacaattgtgtggtttcacttactgaagtgagagtactacttctcagctagaataacatgcagcctaaatgcaaattaaaagcaaaataagacactctaagttg

SEQ ID NO: 143419 - DNA, 569 bp, Homo sapiens
aagcttttgcaaatcaatagatatccctggatgagcctaattcattgcatttcactttaaaagtgcacttcttaaagtacagtactgttcatttgaatattttactgtaattttaaacaacctttagtaagattgcatcatttctgtaagaatttgctgcttctgggacctaatgcctacccatgaaaaggtaagtattgccagaaggtggaatactcagtttttcagaagttaaggawcccatttttacattgaatcttggctttggctctcaggttcccttgatcaacttagtcagtaatttctttcctacctaagcatgcaagaaaaagaagcaaagggggcagaacacaaaaatccctgcaaattcatgaaagtcagagttcataccttttgcagtattgccatttactgcccatttatgcctgctctaatcagatgtcttgaggcctaaagctgaatccaagctagttaattatcagatccgatgtgattctgaacccaatctagtttctgtcataatttttgaacccagttcagatttacaaattgctcaaacacaatcatat

SEQ ID NO: 143420 - DNA, 552 bp, Homo sapiens
atttttacattgaatcttggctttggctctcaggttcccttgatcaacttagtcagtaatttctttcctacctaagcatgcaagaaaaagaagcaaagggggcagaacacaaaaatccctgcaaattcatgaaagtcagagttcataccttttgcagtattgccatttactgcccatttatgcctgctctaatcagatgtcttgaggcctaaagctgaatccaagctagttaattatcagatccgatgtgattctgaacccaatctagtttctgtcataatttttgaacccagttcagatttacaaattgctcaaacacaatcatatagctcaawacacaaatccctggagccttgggatctgagagagaactgatccatgatccccacttgcggcaagggagcgatgggcagagtaacccggtgggtatcttgtttgatcacttggtgctcctgggagttgctagaagctctaattcagatcacacctctgtaatcatctgttaaaagaaaactttagacaaatttaagagttcaaatgagcaaaaaatga

SEQ ID NO: 143421 - DNA, 645 bp, Homo sapiens
agaaaatgtaggcagaccataatctttgaataacttaatattaaaggttatatttgagtgctataaaaggaaagtagtatttataagtttttcagttatatggaaatagttggaccaccaatatcgcttcatcaaaaaatccaagtaataactggggtaaaaagacaagttgtgagattaaacaacttgatttgcttaacctcaaaggaatatatataattcttcttgtgtctttgaaaaaattaatacygtaaatttcaaattttgtataaatttggctaacctggggattaaaaaatagcatatgcaaaactgtatcacaatattcagaacatctggatattcaaataattttaattacccccttttctggctcagtttgaaagatttttcaaatgcactttttctgtattatttcatctttctcttatctacaagtttatgaagtttagtctttgagcaaaattactttttgaagaaagagaaatattaaaagcagagatgaatattattgctttaataaaaataatagtgttgagatttacagtttccaaatcaatgacacagatttaacttgtatctaatggccaatacgtgtttcattattttttcagatgagaaaatgggttaacagcttaaagagac

SEQ ID NO: 143422 - DNA, 675 bp, Homo sapiens
tttgccaaaataaaatttgccaaaatagaatttgcattttttattatatgcaaaccagaagtagcatcaatttttaagcatttcaacaaaatcttcttgtagaaacacaagctaatgccttccataaaaccatagtattaacttgattaataatttgttaattttccttacataacacttattttcaaaaagttaataactatcgggggaacccgcccccgataattcaacgttattttatgtaggttcttttctatttccctaagtgttggccggtctgagaaataaagggaaagattacaaaagagagaaattttaaggctgggtgtctgggggagacatcacatgttggcaggttccgtgatgccccccaagccacaaaaccagcaagtttttattagtgattttcaaaaggggagggagtgtacgaatatggtgtgggtcacggagatcacatgcttcacaaggtaataaaatattacaagataaatggagacagggcaagatgacaggaccygggtgaaattaaaattgctaatgaagttttgggcacacattgtcattgataacatcttatcaggagacagagtttgagagcagacaaccggtctgaccaaaatttattaggcaggaatttcctcatcctaataggcctgggagcgctacaggagacca

SEQ ID NO: 143423 - DNA, 439 bp, Homo sapiens
agatctatgaggtattttttttttacttgacaggtgccttttctaaaaccctctgtaatggattaaattgtgtcccctcagaatatatattttgaagagctaaccccacgtgacctcagaaggcaaccttatttggaaatagaattactgctgtgtaaatagttaagatgaggttatactggartagtgtgggaccctaatctaatatgaccggcattcttacaaaaaaggaaaatttgagcacagacatacctgcatatagggaggaggccatgtgaagatgaaggcataacttttggtgattgatatggtttgggtctgtgtccctgccctaatctcacatcaaattgtcatcccctgacgtgaggtgggccctggtgggaggtgattggatcatgggagcggattttccctttggtgctgctctcatgatagtgag

SEQ ID NO: 143424 - DNA, 439 bp, Homo sapiens
agatctatgaggtattttttttttacttgacaggtgccttttctaaaaccctctgtaatggattaaattgtgtcccctcagaatatatattttgaagagctaaccccacgtgacctcagaaggcaaccttatttggaaatagaattactgctgtgtaaatagttaagatgaggttatactggagtagtgtgggaccctaatctaatatgaccggcattcttacaaaaaaggaaaatttgagcacagacayacctgcatatagggaggaggccatgtgaagatgaaggcataacttttggtgattgatatggtttgggtctgtgtccctgccctaatctcacatcaaattgtcatcccctgacgtgaggtgggccctggtgggaggtgattggatcatgggagcggattttccctttggtgctgctctcatgatagtgag

SEQ ID NO: 143425 - DNA, 439 bp, Homo sapiens
agatctatgaggtattttttttttacttgacaggtgccttttctaaaaccctctgtaatggattaaattgtgtcccctcagaatatatattttgaagagctaaccccacgtgacctcagaaggcaaccttatttggaaatagaattactgctgtgtaaatagttaagatgaggttatactggagtagtgtgggaccctaatctaatatgaccggcattcttacaaaaaaggaaaatttgagcacagacatacctgcatatagggaggaggccatgtgaagatgaaggcataacttttggtgattgatrtggtttgggtctgtgtccctgccctaatctcacatcaaattgtcatcccctgacgtgaggtgggccctggtgggaggtgattggatcatgggagcggattttccctttggtgctgctctcatgatagtgag

SEQ ID NO: 143426 - DNA, 646 bp, Homo sapiens
gtttttcagtttcaggagccacactacaaaatagatacatgtgaaccagtaaattcaagagtaaattaccagaatggttgtgaggactgggaccctccatctacccccatgatgattacaaaacttgaatggaccatatcatctgaggaacaaatgagggaactggtgatgtttagctgggaatttctgtatgcctttctcagaaaagacatagggaggacatatctgactcagaatgtttgacaagcgattctgtgtgttcctagctggtagaattagaacatgccccaaatcrgtgagcctaacttcaggcaacacgtaaaggagcattttctgtttctcacagcagtcctgaggtccaataagctatctctggggaaagcaaactcactgtcatcaaagggattgaagcagtgtctttagggtcaattgatagccttctaacatgtcttcctggctctagtcttaagacctatccagaccattctccatatccccattggtgatctttttaaatgcaaaagagaacatatcacttcccagtttaatccttttcaatggttttccattgtctgccaatctctcagttcctcttgacctggtgtttacttactcattgcaagtttctagataaaattttcacttc

SEQ ID NO: 143427 - DNA, 426 bp, Homo sapiens
gggcttccaagacacaaagcaggggatatggagaggtgtctgcactagagtctggatggtgctactgacaacagtgagtgttcagggtgactgctagtgctgtgcagtgctgagcgccacattccatgggaccacgtgtcctttaataaacatattcagcgtgcgcttatggaactcatggcttctaaagcacaaggcgtatgtttcaagcatagtgctatccctgagcagcatttgtaagcctccagtctgcaacagtgggattacctaccaggctcagctgatggaccgggatgatattggaagagaggctgccagcctgaagacttacctggaaacattttctcgttggtctggttttaataaaatcacyagattccactagaaggaaaccaaagattacaaaggtccaaattaatatatgac

SEQ ID NO: 143428 - DNA, 431 bp, Homo sapiens
ccagttcctaggatatgacactgtgtagagctaggtcagaagagaaatgaagtcacactcaaaaatggttccacttttccaacttccaaacactttccccaagtcaaccatgtacatacaccttgactttcctctcaggatgacttcctgccacaactaatggagtgcctggctaaaaataaacaaataaaataagaagatggccgctgtccrccttccattgggacattttacttttgagaacaaacatttagtcactgaagctgaggaagtcctcattcaaggacagggtttccttgctcagtcggccagaccagaccagacaagcctcatgcgcctgaaggtcctggctcctggaccctcactgtatttataaagtcttaacagagtgactgtgaattccattgtggtgatgctgcctccggctggca

SEQ ID NO: 143429 - DNA, 553 bp, Homo sapiens
aaatggggttgaggatatgaaatgtgtgctctgtaatgttggctccccccacaaatctttgatgaacttgaccaaagggaagtctaatggtattcacttaaatcttgctttcacatgtaatttggtaacacaatatttcattctcagaagcagaacaattatcattctttataccttgtattgtgcagtttctattacttggcattaatattctactaagatgactagtttgaggcaatttaaggacaaaaatacttcagttttctgaatttacttatgtagagataagttgaagggataaaagacaaatatggcacccaaagcacattatttgtctctaatgatccaatgtcatcttttcacatatttaacccttataataaatattcttccaacaagaggtaaaggaattacttataggtaatggaagattcatgaaatatacagcatcaagtccttttggtgaaataatcaaagattaggagagggcaatccaaagataatttktttgtgagcagaagcaattttattgggaagacagccatacatgtgt

SEQ ID NO: 143430 - DNA, 553 bp, Homo sapiens
aaatggggttgaggatatgaaatgtgtgctctgtaatgttggctccccccacaaatctttgatgaacttgaccaaagggaagtctaatggtattcacttaaatcttgctttcacatgtaatttggtaacacaatatttcattctcagaagcagaacaattatcattctttataccttgtattgtgcagtttctattacttggcattaatattctactaagatgactagtttgaggcaatttaaggacaaaaatacttcagttttctgaatttacttatgtagagataagttgaagggataaaagacaaatatggcacccaaagcacattatttgtctctaatgatccaatgtcatcttttcacatatttaacccttataataaatattcttccaacaagaggtaaaggaattacttataggtaatggaagattcatgaaatatacagcatcaagtccttttggtgaaataatcaaagattaggagagggcaatccaaagataatttttttgtragcagaagcaattttattgggaagacagccatacatgtgt

SEQ ID NO: 143431 - DNA, 581 bp, Homo sapiens
tgtttcccaggctggtctcaaactcctgggctcaagagatccttccatcttggcctcccaaagtgctgggattatagatgtcagccactgtgcccagatgtcttgctttcttagatcccataatataggaaagcactacatgttgcttcatatttttcaaattaattctcaagctcttaagagactaaagacaaaatgttctagattacagctgactgagaaggaaggcagaacaatggttattggcatctgtcctgaagcgtcagtctgagcatgacagcaactcacaaatctcattgccacttattcataggaaataattccacccaacccgtaaggtccctgagaattttaaggtgttccatggaactgaacyatctaattaaacctctctctgtagtcgacaactttgatttttatgctccttgccaccaaagcatctgcaactgcaagacctgttcagcttctgcctaaaatcttcattgtgtattagctgtgaagtgtaaaatcagacttcttttacgacatcagctagttcttctttttttctggtaaattactcaaataaaacaaacatgcaa

SEQ ID NO: 143432 - DNA, 628 bp, Homo sapiens
atgtgtatgttgtgaatattactaagaaaaattctttgtgtgtatacatggaaatacagataacagtggttatctgtgcagtggaatgtaaacaattttttattttcatataataagcagatattagttttctaatcagtaacaaataaagctaattttttaagaaagttagaataatttttacctttctctgtgtttctatgggttttgtgaggatcagttgagataatgaatataaaagtaacttggaaactgtgaattgttctgcaagtgtgtattgttggcgatgttatattccaaatttgaagtccttcaagagttaagactayttctctgtccattacattgcattgcagctgtgtaaaaatattttcttcatttggaaagcacccctaaatcccttttacaagttagaaaaaaagcacaacacatttccttcacacctcaaatatcacagatggaaaactgtcattttgcctcactatttcctgtgctaaaatgataaaaaaaaataatgtggcaaatggctaatctatgccttaagaaaatttaaaattttaactatttctgcttgtaagtgactatttgtgaatgaattaatttttgcccagtaacaatttcttaatga

SEQ ID NO: 143433 - DNA, 450 bp, Homo sapiens
atggctcggggttaatgattagatttcaagtgtaggtatragagctggaagcgatcttgtcacatcctcatagctagggcaagattcccttctgttgcatccctattgcataatcaattagtctgtgcttgaataactgtatatgaaagactctagccattggcactctcttagctgtttcaaactgatcacagccttccatgggaatttgtttcctgttacacagctataactgagaaaactgattatccaggatcttttcactcagtcctttcagctgttgttctttctctagctcctggagaacagacaggacggagtttctcctctaaattatatcttttaggtttacatgcctgcttgtaacaaatttagtgcactgttacagaaagattcagcgggattgtctgctatgtattactgtatttcttgatagtatttagaaataat

SEQ ID NO: 143434 - DNA, 450 bp, Homo sapiens
atggctcggggttaatgattagatttcaagtgtaggtataagagctggaagcgatcttgtcacatcctcatagctagggcaagattcccttctgttgcatccctattgcataatcaattagtctgtgcttgaataactgtatatgaaagactctagccattggcactctcttagctgtttcaaactgatcacagccttccatgggaatttgtttcctgttacacagctataactgagaaaactsattatccaggatcttttcactcagtcctttcagctgttgttctttctctagctcctggagaacagacaggacggagtttctcctctaaattatatcttttaggtttacatgcctgcttgtaacaaatttagtgcactgttacagaaagattcagcgggattgtctgctatgtattactgtatttcttgatagtatttagaaataat

SEQ ID NO: 143435 - DNA, 559 bp, Homo sapiens
gctatatcagtttctttgagtgatgtcatatttgcttgattcttttttatctatgtagctttgcattggtatctatgcattcgaaggagcaaatactacttccagtctttacagactgtttttggcagataaaagtcttctcaagttgagctcccaggctgacaggattgcctccaagattgtagtcaagagtggttggagccaggtcatgtgagttttgctgagtttacaataaggtctgtggttagtaggtctgttaccaggggctcaggcagatgtgaatcctgcctggtccctagctggactgtattgcctccaggaccttggtcagtagggctgktgctggaatgagtagccacttcagagtccacagatagtaggcttgttaccaggtacacaaatggtgtggtttcctccaggtttcttggagtactcttactgggtcactgggtgcatccctgggcagtcagtactggccctggactgcagctgagagagttgggaccaagtcacagggttgcttcaggtctagtcttgcctctgtagatacagacaggtg

SEQ ID NO: 143436 - DNA, 559 bp, Homo sapiens
gctatatcagtttctttgagtgatgtcatatttgcttgattcttttttatctatgtagctttgcattggtatctatgcattcgaaggagcaaatactacttccagtctttacagactgtttttggcagataaaagtcttctcaagttgagctcccaggctgacaggattgcctccaagattgtagtcaagagtggttggagccaggtcatgtgagttttgctgagtttacaataaggtctgtggttagtaggtctgttaccaggggctcaggcagatgtgaatcctgcctggtccctagctggactgtattgcctccaggaccttggtcagtagggctggtgctggaatgagyagccacttcagagtccacagatagtaggcttgttaccaggtacacaaatggtgtggtttcctccaggtttcttggagtactcttactgggtcactgggtgcatccctgggcagtcagtactggccctggactgcagctgagagagttgggaccaagtcacagggttgcttcaggtctagtcttgcctctgtagatacagacaggtg

SEQ ID NO: 143437 - DNA, 449 bp, Homo sapiens
aacatttccctcctaaaatcaggaactgagcaagttagactgtttctactactcctaattaccatggtactccaggtcctcaccaatgtgataaggcaagaaaataaataagaggtggattatgactatgtgcataaaaaatcctaagaaatctacctcccaaaatactgaatatgagtaaatttagccatatcacagcatataagtttaaaggacacaaattaattttagttttatatacaagcatataaaattttaaattagaaaatgaatgaattgaaaaacaaactgaaaagatcaataccacttaaaatagatcaaarttataaaatgctaaggggttaatttgacaaaataattgcaagccctgttaaaataaaatgataaaacattgcttagaaaagtgaaaatatttaaataaattgagaaatataacattttatagtttg

SEQ ID NO: 143438 - DNA, 380 bp, Homo sapiens
gataagatgtattttttcattgatgaaattattgtatgaattttatgcagtaaaattctgtcttttagtgtacagttctgagtcttgatgaactatgccttcttctgaacttcttctgaaggcatagtacacattttttccatctttttactttcaaactacttgtgctttatacttacagtggtttattttacataatatgtagtgagatcttcctcttttatctaatttgaaaacctccgcctttcaatgagaatgttaaaccttaaggtttttcactcttattagtgtctattctttcttctaakgctttaagtggttctttctctgccttcgattgttttcctcataggcatgtgcttatcagtactcagctgaga

SEQ ID NO: 143439 - DNA, 578 bp, Homo sapiens
tgtgtatataagtgtatgtatgtgttttctatttgtatttttcaagcaaagaaatggaggtttttaatattagttgaggctacttgtttactttcaaagttgtttgtatatttttcaagatatttttgtctaaagacgatttgtttgttaaagctttgtttacacagacaasttggcttaacttgattgtataggtcttgataaatattttaattttctaatatgaacaataattaaaagcaagagagtccaggcattaacatcttgtgaaggacaagaaaaatcatgaaacattttaagaatctttatctgtggtacatggagtgaacatatgccagatgagaaagcctactgtgtattagtagagtgaaagcaagaatgtttggcctctgagttagcaagaatgtttggcctctgagttaagcaaaaacagtctcagaaacacttacagattattttgattctccaagttgccagttttgcttatcgtacttgaatttctccctttctccacttctttacatgtctaatttcatgcattaattgctttgaaagttctcagaaagttataacgttaa

SEQ ID NO: 143440 - DNA, 335 bp, Homo sapiens
tttgtcagcattttctatttcttcctaatacactgcactaaaaaaaaaaatggattgaaggttgcaargccaaaagccttgtatttaggcaacaaacctaacagaaaagctgactttcccacccccgccaccccgccccccgagagcctccaaggcacttaaagtattaaagtttgtgtattctggctatatctgagtagccctgtaacagatggatcttttaggagagcagctctggccagggacttccgtcttatgcagagcttctcaacctcaggatgactgacctttggggccagatagttctttgttgtggggacttttctatgcattga

SEQ ID NO: 143441 - DNA, 378 bp, Homo sapiens
tgtctgtatctccttctagaatgtgaccttcatgagaaaagggaatctttgtcttgcctgctggaacaaaatacatccctagaaaagtgtcaggcacatrgtaaatgctcacacagagttttgcactgatttaaatctactgattttttttttctacttgagctatttaagtcccccatgagaatcaggctgagctcttccaatattttggacctaaacattccagctgatcactctctctctcctggtctttgtgcagacatgaccttaatgatgtcgagccccatggcaaagctttgcccacaggaagcgaagagccccttaataaagcagatttccttttgctattcaacagcaagggctttgggctgtttaaaa

SEQ ID NO: 143442 - DNA, 547 bp, Homo sapiens
gatcactgagtctctgttcatttggcaaatgcgtctcatgctgaaataaacctgctgtcaagtttgacaagaagtccacattctctgaatgtatgcgctttgcaatgttcatctagaggcatacaattttggataatgccctcagggagctgcttttgcaggggtgctggactcagcatttagttcatccctgaggttcctaccaatgtagccctttcactargtttaagggctttcaagtttcacccaaggcttaaatgcgatagtagagtctggaaagaagccaaatggggcaggggaaatgaagcagatcccagctaatgaggttctgccaagcaccacatgttcattctggggcttttactgctctctcttagaaactataatcccaggctgactgaatattgcagcagggatggggctttcggctgtaaagtagtcagtaccccaagtttcatcagctgggcctttgtactcaccattttctctccatgaaaagtgcatcctccaagtcttggcatggctcactccttctcattctttaggt

SEQ ID NO: 143443 - DNA, 609 bp, Homo sapiens
ctttatagggaaagtgtgtttcttgtaggcaacaaattaataggtcttgttttttcatccattcagtctgtcttttgatgggcgagtttagttcatttacattcaatatattattgataagtaaggacttactcctaccattttgttatttgttttctaattatttagtaatcttctcttccttccttctttccttcctgtcttcctctagtgaaggtgattttctctggtggtatgatttagtttttttgctttatattttttgtgtatccattctgtttactgctttgaggttaccatgaggcttgcaaatactatcctataacctattcttttaacctgataatgacactatttgcataaacaaacaagcaaaaataaaactaataaaaactctataccttaactttgtccccctgctttttarctttttgttatgtataattatatcttattatattatgtcttagataattgctgtagttattatttttgattggttcattgtttagtctacttagaataagagtagtttacacaccatggttacagtgttataatattctgtgtttttctgtgtacctaccattaccagtgagttttgtacct

SEQ ID NO: 143444 - DNA, 659 bp, Homo sapiens
tggctagggctgatttaaatgttccctctatgggtggatgtcagctgagttgggttctgttttcctttctgctttaacagtatagcactgagttcagttcctcataattgctgtgttctccctccctcaatgcccagagacaagctctcagcaccatactgttgctgctggtgggtggcattggtgattcagaactgttttttctgtttttttttttttttttttttttttttttgccactttcagctgcatgaaattaaaaccaggtattatgagtcctcacctgatttttggttcttaagaagatgttgtttctttgtagataggtgttaacttggtgtccttgccagggttagaggagggggatgatcagtggagccttctattccaccatcttgctacacctccctgcatkatcatagatctttgagacttgcctttcttgactgcacaccagctgtcacgtgctcccctgattaggatcagcccagtctctcccaccaggatgggtctctcacagatacattcattcatcctaccagacaccccaaatctctctgtatccatcctcagggacactggttgaacttgttatcatcatgcatgtggaaccctgagcctccaatattcacatcagagcagtgtgggacagaatgagt

SEQ ID NO: 143445 - DNA, 599 bp, Homo sapiens
ccatgatttttctcatcagtgtcctttaaatacatccacattatatctgaggtttaaaaacaaggcaaatgggcacagcatgcttcggtaggactgtcctttgtggctgtagaaatgagcyttagctaacttaggcctgagtggttccagtacctaagtagatccctatacttaactcagcaaagcatacatagttgttattcaattgttatttacttttttggtctccttttatttcatttcctaggaaactgagtggacgttgaatctgtgaatgggaagggaattcttgtattttctaaccagatttgccaggacctaagagcagataatggggcgggggaagaaaggaaaattgccccccatgtatccaatacgccaataaattctatacaccaaaactttgaatgaacaaagtaatttttagaaaatcaaatagggattgtctagggagaataaaaagacatagtgttagtccagtgtatttattggcatggcacatgttgattgattacctactgtaagctaggccctctgccagaccttggaggcatgaaaataaacaagacagatgtgattactcttgctagttgagaaga

SEQ ID NO: 143446 - DNA, 599 bp, Homo sapiens
ccatgatttttctcatcagtgtcctttaaatacatccacattatatctgaggtttaaaaacaaggcaaatgggcacagcatgcttcggtaggactgtcctttgtggctgtagaaatgagccttagctaacttaggcctgagtggttccagtacctaagtagatccctatacttaactcagcaaagcatacatagttgttattcaattgttatttacttttttggtctccttttatttcatttcctaggaaactgagtggacgttgaatctgtgaatgggaagggaattcttgtattttctaaccagatttgccaggacytaagagcagataatggggcgggggaagaaaggaaaattgccccccatgtatccaatacgccaataaattctatacaccaaaactttgaatgaacaaagtaatttttagaaaatcaaatagggattgtctagggagaataaaaagacatagtgttagtccagtgtatttattggcatggcacatgttgattgattacctactgtaagctaggccctctgccagaccttggaggcatgaaaataaacaagacagatgtgattactcttgctagttgagaaga

SEQ ID NO: 143447 - DNA, 599 bp, Homo sapiens
ccatgatttttctcatcagtgtcctttaaatacatccacattatatctgaggtttaaaaacaaggcaaatgggcacagcatgcttcggtaggactgtcctttgtggctgtagaaatgagccttagctaacttaggcctgagtggttccagtacctaagtagatccctatacttaactcagcaaagcatacatagttgttattcaattgttatttacttttttggtctccttttatttcatttcctaggaaactgagtggacgttgaatctgtgaatgggaagggaattcttgtattttctaaccagatttgccaggacctaagagcagataatggggcgggggaagaaaggaaaattgccccccatgtatccaatacgccaataaattctatacaccaaaactttgaatgaacaaagtaatttttagaaaatcaaatagggattgtctagggagaataaaaagacatagtgttagtccagtgtatttattggcatggcacatgttgattgattacytactgtaagctaggccctctgccagaccttggaggcatgaaaataaacaagacagatgtgattactcttgctagttgagaaga

SEQ ID NO: 143448 - DNA, 597 bp, Homo sapiens
gattttgtgcttagtttggtgagaaggaacctagttttgaagtctgactctgaacttcagttttcgttggtgaaatgaagatctmatgataatctctttcctgttatctcagtagcattcttggagaagatcacagaaagttaagactatgaaagcatctataaactgtaaggtgttgtatacacaatgggaaaattagcctgggagtttcccagtaccatgaggcgttcctgaatagtgggagggaaaatgcttttgtttttctttctccaatgggatgtgagtactatcctgaagacagcgatgccgtgaaggacaaactcctaaatgcaactcaagaggtttttacatatagctcaagtggaagaaaatctgtggcttgatgtccataggagagtggggtagtgacaacaactgaacaattgttcttcagaactcatgctagtagcagaggaattaaaataaagatccctgggaatctcttggaaagatggtatcagcttagaatttctggcaaactccagctagcattgcttggtaaagactggaactcacaggcagaagcatcagcaggctgcaggaatgcaaagtggtctg

SEQ ID NO: 143449 - DNA, 589 bp, Homo sapiens
ttataaagattttcataatatttaatataaatgacctccaagctataaatatgtatctgtgtcctctcacctgcttaataattaagagctaattggtatctatgttaaaaagtgtagctcatagacaaaaaaaaattgttcaratttcttcacatatagaaatgaaagcttcaagaaatgaaacaggaaatgtagcccagaaatagtatcagagaacctcaaagagaaataaattatctagctgcccagctataggccaaaactggtgaaagatcaataatagttacaaaacattaagtcttctgccttcagggaagcaactaaaatctcggccagcaattaagtagcccaaagcaagaatgtgaaccaattgatcaaagttatagggaggacaattttggcttagcataaaactttctaaaagttggagctatccaagcacataatgaggtggtgaattgcttagcatttaaggtccttcggcagaagctgggatatttcttatcagtatattaaagaggagattctcacattcttgtccttcaaacatttttttagaatcatttcttcagacaaaatcttatggtga

SEQ ID NO: 143450 - DNA, 589 bp, Homo sapiens
ttataaagattttcataatatttaatataaatgacctccaagctataaatatgtatctgtgtcctctcacctgcttaataattaagagctaattggtatctatgttaaaaagtgtagctcatagacaaaaaaaaattgttcagatttcttcacatatagaaatgaaagcttcaagaaatgaaacaggaaatgtagcccagaaatagtatcagagaacctcaaagagaaataaattatctagctgcccagctataggccaaaactggtgaaagatcaataatagttacaaaacattaagtcttctgccttcagggaagcaactaaaatctckgccagcaattaagtagcccaaagcaagaatgtgaaccaattgatcaaagttatagggaggacaattttggcttagcataaaactttctaaaagttggagctatccaagcacataatgaggtggtgaattgcttagcatttaaggtccttcggcagaagctgggatatttcttatcagtatattaaagaggagattctcacattcttgtccttcaaacatttttttagaatcatttcttcagacaaaatcttatggtga

SEQ ID NO: 143451 - DNA, 589 bp, Homo sapiens
ttataaagattttcataatatttaatataaatgacctccaagctataaatatgtatctgtgtcctctcacctgcttaataattaagagctaattggtatctatgttaaaaagtgtagctcatagacaaaaaaaaattgttcagatttcttcacatatagaaatgaaagcttcaagaaatgaaacaggaaatgtagcccagaaatagtatcagagaacctcaaagagaaataaattatctagctgcccagctataggccaaaactggtgaaagatcaataatagttacaaaacattaagtcttctgccttcagggaagcaactaaaatctcggccagcaattaartagcccaaagcaagaatgtgaaccaattgatcaaagttatagggaggacaattttggcttagcataaaactttctaaaagttggagctatccaagcacataatgaggtggtgaattgcttagcatttaaggtccttcggcagaagctgggatatttcttatcagtatattaaagaggagattctcacattcttgtccttcaaacatttttttagaatcatttcttcagacaaaatcttatggtga

SEQ ID NO: 143452 - DNA, 607 bp, Homo sapiens
cgctctcttgtgagaatctgatgccgctgctgatctgacaggaggcggagctcaggcagtaatgttctcttgcttgctkctcactttctgctgggtggcctgcttcctaacaggccatggaccagtgctggtccatggccaatttgactctttctgagaacgcatttattggtttacaaatagacaccttcttgctgtgtcctcatatggtggagagagatactctgtctcatatatctgcttagaaaggcactaattccattcatgaaggctccccaccctcatggactaattatcccctaaaggttccaccttccaaatatcatcacattgaggattagagcattaacacatgaatattgggaaacacaaaattcaccctacagcaattttacacattgttttgcactggatttttttaacttaaaaatttatttaataatttattttttactgacacatacagcacaacttttacatctaaagctgtatctacagttctctagataaacacacatacacctctaatcccatgtcacaacacattatttcttaagaatattgtttcttggctctttaatactactactattgtttcaattcattt

SEQ ID NO: 143453 - DNA, 444 bp, Homo sapiens
atgcctgtaatcccagcactttgggaggccgaggtgggtggaacacttgaggtcaggagttcgagaccaccctgaccaacatgaggaaacccaatctctactaaaaatgcaaaaattagtcaggcaatgatggtgggtgcctgtcattccagctactcaggaggctgaggcaggagaatcacttsaacctaggaggtaaaggttgcagtgagccgagatcgtaccactgcactccagtctgggcgacagagcaaaactccgtcaaaaaaaaaaaaaaaccctaaaagaagacagactgaaagtgacagaaatgtttgaaataatactggctgaaaacattccaaattttcataaaactacccctgcttgggacccaccatgggccaggtgaaccagagtatctgaaaataaagaccaggtactactatgaagttaggcgatttc

SEQ ID NO: 143454 - DNA, 444 bp, Homo sapiens
atgcctgtaatcccagcactttgggaggccgaggtgggtggaacacttgaggtcaggagttcgagaccaccctgaccaacatgaggaaacccaatctctactaaaaatgcaaaaattagtcaggcaatgatggtgggtgcctgtcattccagctactcaggaggctgaggcaggagaatcacttcaacctaggaggtaaaggttgcagtgagccgagatcgtaccactgcactccagtctgggcgacagagcaaaactccgtcaaaaaaaaaaaaaaaccctaaaagaagacagactgaaagtgacagaaatgtttgaaataatactggctgaaaacattccaaattttcataaaactacccctgcttgggacccaccatgggccaggtgaaccagrgtatctgaaaataaagaccaggtactactatgaagttaggcgatttc

SEQ ID NO: 143455 - DNA, 444 bp, Homo sapiens
atgcctgtaatcccagcactttgggaggccgaggtgggtggaacacttgaggtcaggagttcgagaccaccctgaccaacatgaggaaacccaatctctactaaaaatgcaaaaattagtcaggcaatgatggtgggtgcctgtcattccagctactcaggaggctgaggcaggagaatcacttcaacctaggaggtaaaggttgcagtgagccgagatcgtaccactgcactccagtctgggcgacagagcaaaactccgtcaaaaaaaaaaaaaaaccctaaaagaagacagactgaaagtgacagaaatgtttgaaataatactggctgaaaacattccaaattttcataaaactacccctgcttgggacccaccatgggccaggtgaaccagaktatctgaaaataaagaccaggtactactatgaagttaggcgatttc

SEQ ID NO: 143456 - DNA, 457 bp, Homo sapiens
tattacattataccagctatcaagaccttgcagaaataaaaatgaagacttgataaacaatccattttgattgcaattcaatacatccctcaatcactgttccaaagcccactatcttatctagscctcctgagtagggacaatgtctccacattttggatgatattatcaagttttgaaaatacaaccaaagcgatgctaatttctgatttttctcaatgcaaaagaatgaaactcctgtaaagcattagtgtgaattttccagaatttaacacattgtgatataattttagttgttcttataataaagaaaatgtcagagtctcagagactgatttgggtgctgtataccctgaagtcgtctaatcctaccatttgggcaccagtccataatactttaaatgccagagaagcgtattcatctgtatttaacccactggctattatttcaatcacc

SEQ ID NO: 143457 - DNA, 625 bp, Homo sapiens
cgtatggggttgacagtagtgggaaatggatattgcaataaatttataagagcatgatgctttgcagctgaaatttcttctaaagaatgttttctgatatatcctcttgttcacgacactatcctttttagaacagaaaattcccaggaagaaaataagtataacaaacattatgatgtatacctgaagcaaaagtattttgataacttattattattctctattttagactagctttgtactttccctttaatagtcttgtcacaaaatgtgaaattttatttattgtggataacagctgacatttttgggaaatgagagaaatacaggtgactttggcttgattagaaacattatacgatattatctacttggttctttgatcaaygtagttactcaaaaagagatagttcattatttgggggttatatatattttaatttcagggcgatttgctttttagcctccaaattgtcaaaaagatgtgctctcttcaacaagtctatcttctttaaccaatgatgtctcttggataaaatactcatgcaaccatttttttgtagtgaaacttagacagtatgagcaccttagggatatccaaaatgagaaaaaaatattgtacagg

SEQ ID NO: 143458 - DNA, 533 bp, Homo sapiens
aaaaggaatcctgatcatgtagtgacaaaaaatttggcaacatggttgcttgccatagcatgggaacaaaaaaagtttgcattatgaatttggggagatttctggacataacatataagtatcaactggtccagcaaaacctttctcgtatttctgactgggaaaataatgaacaaaataaattatgttttaagctactaagttgaggataaataaatggaggaaaggaacgtagaagaaatggaaaacagaatgtgatagtttaggggtgataacaaatacttaatattcttccaattgagagctgaagtctaatttccctacctttgactctgsactagtgacacagcaatttattatgcagcagtgaataaccagaagtggggaaaagggagaaagggaacaagatcagtttaaatagtgaatgttctgggatgaaaataaaatggagatataattctgcctcttaatgacagaacaattcacctgctgaatgttttcaaatgtttaaagattatatatacagtcacaat

SEQ ID NO: 143459 - DNA, 589 bp, Homo sapiens
agcaattttcaagtataaattagatgatttactagagtcatcatgctttttgttttggcaacgattgtcttaatttttccctcagattgattcaattttagacagatttcttcctgtgttaaggattttgatccacggctcaccctagccyttatagagtctggatcgtctaaccacaaagctccctcccctaggtttttggagcatttaccctagaaaacctagaattataaccatgctttcttcacatttgagatgtaaatcgtttaaaaagctttttgtcacttttgtaacccaggacttatttaaggaactaaaagccatccctttgaaatgtaatcatagcacaagatagagtctctatttcccagtctctgtaggatggtagagacctaaactcaggaggcaagcaccttgctttaagttataaaattaatttttcctttgggtaatgtcaaaggaaacagagatagcctgtgatccttttaatcccagctcctaaaaattctcctgccctatgtttcagcagagttgagctcagactgagttttgatctctctctcagagatcagaagattgcagcagcctt

SEQ ID NO: 143460 - DNA, 603 bp, Homo sapiens
tgtcttttgcaattttgtccttctttccttatcctgagaagaagtatgaaacagaggagagttgtgcagaaaatagagaacaaagtaaatgtaaaatggcctttccatatagaaagctgtttgatatagtgaagaaagcatggttactagggtcagaaacttgggttcaagtgtcttgtctagctgtgtaaggctgtacaggttgcttgttgtttcttatcttagtttccttatatccttacatagaggtatttaataatccccataccttggaatgcagtaagaattaaataaggaartatacacaaagcatcttatataggtattgactcattttagtggttgaactgtgtaagtattctctccctttcttcttcaaccttcccaattttactgcatggactgttgttggcaatggtggtttgaaaattcattttttagagacttacttttagattgtgtgttgcactgactttaatggcattttttattgggtaaattgttgttttggtgctcatacattcattttggtcacttattataaagaagaaatgctaagaattttctatggatatctgatttagaaagcctcaagtaataaaa

SEQ ID NO: 143461 - DNA, 626 bp, Homo sapiens
tagaatgccaaggatagatggctgtttactctgggttaggaggaaagttttcaactttgaaatgattgactgaccaaggctgaaccaagcaagcaaggtatagggtgtaaaatagtttagcatattgtaacctagataggctgttcccaaaggcacaacagggagctcagcaggaaataggcactaggagtgggggggcaagtgcatgtgcaaaggcagtcctgtgcaagacarttgcattatacagctgagaattcactggattataaagctggccatacagggaatatccagcagctccaactacactgagggaagaaagtggtgagctcagacttgacctggatctataccttatccaggagagtccaacaggacaaattgtagttagaataggagttttctgatggtgataataattgaagccagaaaggcattaaggttcctcatgatctatttagtttgaaaccacttgctggatagtaataagggatatgggatcaagatctggtttctagcaattctgtgctgggaaggactaataaagttattgggattcctgctgagagggctaagctccatttagtcagagcacaaataaggaattgaggttgaagtccaggtat

SEQ ID NO: 143462 - DNA, 628 bp, Homo sapiens
aaaaagagaaatatcaaggtacaggataaaatattatacatccactgggagatcttgaagaaaagcaattccatttttcatattctttactctggctctgcttccctgtgattgcacaatttagcaccacaatctgacrtccaagaagtaaacttgtacagtgactatttattctgctactctcaaaagcaaagtaaaatataatcccaccaagttagggggcagggggagacctgtgtgggaaaattggaggagaaagagaactatttgaaggatattcatatcaaagacttaattttgtcattttgcagagctgagttaatggattaaacttgtggctgttttatgtagttttatcataaagtgatgtgtcagaatttttacatctgagatagttgctcttttaagttgactggaagcatcagtcataggtaaaatttccccgctgatagttctcttttctctcgttatcaaaaaagaggaatttatatgtgatttttcaatagaaataggagtagaagaaagccagttcatttcaaagacactttaaaaagccagaatttctatttaactttgaaagcaaacttaaacggatattctgaattctattaacaatcacgactgcaca

SEQ ID NO: 143463 - DNA, 559 bp, Homo sapiens
acaatcacgactgcacaggcccccattatcattccttacaccttgacttaggcgatctaatacaaaaccttccaaagtatgatgctctggttattttggggctgaattctgcagattcttggagaaggaatggaagtttacattctacagattcactagatgtcaagaactattctaatttggctctttgcattcatagtttatctcacatataatcctcatgttaaccatttgagataggtgttacatttcccatttaacaagtgaggttattggggctcaaaaaagttaagtgacttgcccaaggttattcagctaataaatagcagattcaggaatcaagctcagacctttttctttcaaaacctsaagtctttggcataatatatttgcagttaagattgactttctgaaaattatgagataactctaacctagatttagatataaatttggggcaattagttttaaactgaaacacatgagtagaaaaataacagaaggagatagacaaatacaagaaaaacctacccaaattattgtgctgtaatacaaaatg

SEQ ID NO: 143464 - DNA, 580 bp, Homo sapiens
tgttagcctgatgctggataatataaatgtgatagccttgacaccagaaaatcagaagaatctccatgtgtctgagaagtattatagacctaatgggcacatgccctaggtcacaagatgacaaggctatccaagaagatatggtcactggaagagaatatcaaggaaaacatctctagttagtctgacatttgtattcataggttcactgcttctaactattgygatggtgcccttactgcttattatatggtctggcaatattaaggtgaagtgaaatggttgagctggaaacagattatgcagtgagaattctgcttttttgcaaaccatggaaaagttcaccttctttccgtcatctgtatcaccagacaggtcatagttttccatgtaaacaatagtaacaatgaatatttctgttttaaaaaattaatgtattatttaaaaattatattaattttttaaaattgataaataaaaattttatatatttatcatgtaaaacaagaagtttggaaatatgtatacattgtggaatggctaaatagaactagttaatgtatgtactgcctcacacgca

SEQ ID NO: 143465 - DNA, 564 bp, Homo sapiens
atctggcttgggccccccactcttgtgtcactcggacactgctactgttgtgctgatgctttgaggttgtgatctgattctgctgctgcttgctcctgacatgaggagaatgtctgcctgtcccctcttgtgtaacacccatctcatgctgaactcatttcacttgctccttgtgctccaaggcaatcctgattgtcatcatcatttgcctcttcatttttgacctctcttccttctttttcaggctcaagcctagtctattagtgcaaactgagggtgagagtgtggatagacagaggccatgccattgtttgcatcattctcatattcatatatcattggatcctttgcataactcttttcttctctaaaaataaataaatgtttattgttttatatatttatgtaaagatatttaaattcatatataaattttttattttatatatatatataaattaagcaagcagatacttaaaagaatgatatcacccaactctrctcttcatatttcagacatatccagtctcaaacctggactaactaggacaccatattaaaaga

SEQ ID NO: 143466 - DNA, 594 bp, Homo sapiens
tagttataagctaggtgaaatgttctcttgcttcagcccttactgtgccactgcatttgaccctgaatgaggaaatcaataataaaaggaaaggatgaatattgtgagatggttttaggatttagcgggatcttttaaattacttacagtttgctgctttagttttcatttgttcatttactcattattttctatttcaacaaatatttattgaaaatttttcctgtatcaggtacgcatgaagttctagggatatgaaggaaatatagcatcctgttccttgtacctttkgctctgaaatccattcagttataagtcctataaggctcagaagacagacttggctctcaaatctgaccagattgtatttcagaactcttgcttcttaccttgttttagaattttttacagactctcctggagtttttgaacctcagattttctacaggtttttacttttattttgattccttctatttttaaaaactactttttctaacccaaagcctcagaggttgaggagtgcagacttgacagggaggcagagaggaaattatatgttatcagaaaatgcaataaatgaaactaaagctt

SEQ ID NO: 143467 - DNA, 579 bp, Homo sapiens
ccaggaaaacaagcttcaaattctctgcataatgttacactgaccatttttaattaaccccaaggaatcttgagaatatgcattcagcctaaagggcttgcttgctgcctaagcccattgcacatgataaaattgtattttctcagtcttggagatgagatcctgagggtgacagttcttaaaagcgtcaagaaagaccttggaaaaaaatcaataaccatccagtgttatattcaatgcctatggagcaaatgttattttttgatatgactattacaaaaaattcctaaaagtrtaactaatttaggtgtaaactgtgtcaaacaagcatgactgggtgctaaaaagatatggatgcaccgctgtgctttctgctgatcaaaaatctattcttctttgacaggttgagtttggtattttactcagtatgaaagttttaccattaaaaaaaaatcagaatctatcaatctaagaggctaatatcatgaagaacacttataaaagtcctccctataactccaagcaaacaagtatcagtcaaaaccaggcaggagacattgattttagcaagccaaactg

SEQ ID NO: 143468 - DNA, 544 bp, Homo sapiens
aactgctttttatgtggtataaatttcagtatatgtgcattagaccaagtttcgtattttatacaatttgacttaaccaaatctcttattgagaacagctatttgtggcgactaatagaagtaacagataaaattagtaaagatacagaaattttgaatttcaagataataagcttgattttatgcatgtatctaaaaccctggaactgaccttcagaacagatttgctcttgttaaaacacaagtggcagtcacaaaaagtgtccatatataaggccaaaatgaagatttcaygtataccaacgaacagatgtcacatagttttagaaattaagcagaaattcaatagttataagatgaaggagaattacatggaacaaatattatgcctttaatatcgccttaaaaggaaatactattacttcctcccacaaggcttggtctaatcaagtgggaaattacaagatactcatgtaatatgaatctcaccaaataactcttatgacagaaatagagcaggcttttggaactggagagccaaggc

SEQ ID NO: 143469 - DNA, 596 bp, Homo sapiens
ttgttttccaaaggcattctgccagtagacaccccagtaactgtttctgagattcactgtttccctgcatcatcaacacttcgcatcttcagatgttttcattcttgcgtgtgaaatagtatctcatatattttccccttcttaaactgctactatttcttgccttctgggaatgcaccataatttacttagccattcccctattcactgacgttcagttcatttcccatttgtagatgtgtttgtttgttttgggtattgcagtacaaacaatgctgccagaaccaaccttgtacaaacatcttgatgtactggtgctttaattaatggcagatccatttccagaactcagattgctggaacaaatcagcattttttcatcttaagaaataccgacaaaaatcctttcacaaaattgtatcgtaatttgcrgtcctaccagctgtgtatgaaaagatacttttgcccatccatacatttgtcagtacccgatgaccttgtttgacagtctaaaaatccctaagaccttgtggttgttttagtctgcactcccctgaccactaataagcatcactgcattgcctatttataagctt

SEQ ID NO: 143470 - DNA, 462 bp, Homo sapiens
ttgatgggtgcattacagcagggcttggcatccccagcagcaattcctagagactggcctcttgtagcaatggatcttaaagattgtttsttttctataccattacatgaggaggataagcctcgattcgccttctctgtgccttctattaatcaaacagaacctgtttctcgctatcagtggagagttttacctcaaggcaagcttaacagtcctgcattatgtcagcattttgtgggaagagcattaaaagagtctcaaaatatgtttccctctgcatatactgttcattacatggatgatattcttttggccactcctacagatcaaatattgtatcaattattcatagaagtaaagcaagcttttgttaaatggaatctcaaaattgctccagagaaagtgtgaacaacttccccataccattacttaggaactattgttacagagaaaagtgtatgg

SEQ ID NO: 143471 - DNA, 591 bp, Homo sapiens
gaaactgctacaattaaaagtacactagagccagaactgcttaacttgtttctaagacttcaagctctttgatcttgtatagctcctttttatatttctcatatccrttttcacactcaattccctgaaccattatctttaggcagacaaacttatcggttctgtatttcaacaagctcaagcttctaatgcattactgcatcaaaacacctctgcccttactcgtatgtttcatctgccttgcagccagtcttgagctattgtacaagcctatccctcttgtcagcgtgtccctggtgttgcacctgtagaaggctgtaacccacgaggtttgctccaaatgaaatctggcaaaatggatgttacacatatagcagactttggcaagcttagctatgttcatgtgaccatagacacttattctcatatgctgcatgctacatgccaaacaggtgagacagctggtcatgtacagtgacattgtctgttgttattggctcatatgggggtccctaaacaattaaagactgacaatggtcctgcttatactagtcatgctttcaaaatttcctacagctttgggctattact

SEQ ID NO: 143472 - DNA, 179 bp, Homo sapiens
gagtttattggaaagaacccattgaatcaatccattctcaggcacatacctggtcattcaacatcatacgtatttgccmtacaccagagcaagagctggggatataaaaatgaacaagacagatacatctcttaactccatggaacttagagctttccttctcctgttctacctggaac

SEQ ID NO: 143473 - DNA, 548 bp, Homo sapiens
ggtctccctcactgcccttgggaagcttctggtttcggtggcgataaagggaaattcactgtctaaatgccacaaacagatccttcttgaaattatcagcaaagaggatgtgatagggcatcgtgttaaagatccagatacatattttccaatgatattatgggaaggtgcaataggctwcttttttatttcttctaagagaagcttgcttttgagccctaaatacttgttggcctgcttttataagcaataggatattctgtatggatatctggttttatatctgttaagaaatggagatgataatatgccccctcccatttttttaaattgtcaaatacataatatgttgtaaaccttaattctggcagcataggttacttatggatgggttttctttttttgttgttttgttctgattttttattttttatttcatgtaaaagaaacccaaaagtagtttattgacatacataactgaaaaatgtaggcttcaggaacagctggatccaagggctgaaataagaacatcattaaacccaaatgca

SEQ ID NO: 143474 - DNA, 585 bp, Homo sapiens
acaaccattttcaggtgccctgttagaaggtgggctggaggccgcggcccaagtggtgcaggcagacacccctctctcagcagcacccacctgcacaggtcccacccattcattcatcacaacaagcagcctatcctttattttcagtcaacagtttatgaagagcttccacttccgctgcctgtctccattacaacagaattcctgggagctgcacagcaaagatggcaggactccattttgcagtaaggaagaggtgaagtgatttgcccaaactcacagaggtggaatgacagacagctcaagatttctgactcctgtccagtcctgtgactactggagtatgttcawgaagaccctccaggatgatggcgagcagggagtgggcattctggtccccctcccccagactcacaagttcaaatgcctggagaggtgaggtcaggagtggaggaggtcagtgtgctcggcagctaaccggaaagcctgtgccccatttcagtgcaggccactgccttggcccagcaggtttatgttatgcagaagtggcagggtttcttattttgtaaagtgaaagccagagat

SEQ ID NO: 143475 - DNA, 529 bp, Homo sapiens
gaaacaattcttaataatctaactaccgtaacacaatgacagtttttaatttttcataatctccttgcattctttgtttatactgagcttgaaattgctaaccagtaaaaccacagctggtgtggaaggaaagcracccgagcaccattaaacagcagagtactttattcagatgccacagcatgagaagaccttgagagagtgctctgccttggggaagaagggcaacatttttatagacctttagcaagaaaagtccgctgaagctcagctaattttgataacagttgatcaaagatggttctcacaagaggaagaattgatcttgtagtttaccatccattggatgagaaatctgagttttgccaaggagggtgggagaaacagctgcaaggggtcacagcagaacattgtcagtcatttagggcctcttatctcttggtcaatagagaggccaagtctcataatttgatcagattttggtttgttcgctcctccaaatacataactgatgtcagttgcagactca

SEQ ID NO: 143476 - DNA, 532 bp, Homo sapiens
tgttggttcatccttttgtctagtctatggaaagtgctccatgtgagttagatttatgtacctgaaattctttgtatgcaaggtgagctggttgcttcaactgtcatgccactaatcactagggtcgacccagatgctcaggctgactgggatggtattcccttcctcccccagtatgaagtctgggaagataagctagcaagtaagaatgtgtaagtrtgtgcattgcgcaatgttgacacggttgacacaagtgttttggtccacctggcaggtttctccctggagtagtgatgggtggaacagaataagatgagaatgtcaccaaccattaggatcatccgcctcactctgcaaaccacacaacctcctggcttcaaagctacctgcctagtgcggagagaataggtgctaacaggagcactctggttcatttagcagttactattactatgaaagattaataaacagatattctgatttatatcacaccttttgaacttttgttaatgtgggtctatttcactgaatc

SEQ ID NO: 143477 - DNA, 576 bp, Homo sapiens
aactggtttataaaactgctaacctaagtaaaacaaaaattgtataccaaggaaatattttgccacatttgcatgctaaatcaccaatattgaaattgtttagatatataatttaaataaactccatggtctaagtcaaatcacctataactactcatcagttaccagtaccatgcacctaatttggagaaacagctggtattcaagaggatgtaagtctaatgttaattaagcacagacttatgaagaaccaggatggccaccttatccttcttaagtccttaaaacttttgttattaaaagttctgcattccataactcatcatggaaagagaaaatgatccaaattaaatatattggtgtggtgatttctaaactgctaaaatagtttataaccaatrtttggtttgtcatacctatattcctaggaaaacaatcaaaacttcaggtacatttggttatctgatgggccatttaaacattttataaagggatttcattcagttgtcattttcagtgcatgttttctgattgtataaaagctcttccatgcgagacagttgatgttgaaacagt

SEQ ID NO: 143478 - DNA, 506 bp, Homo sapiens
cacgggttcctcttcgccctcgcaccgacccgcagggacatagaaccaagccccaagccggcccagctacaggaccctctctgggtgccgcacgtccggaggaaaatggcggagtgggccgggcagcgcaagcgcagagaaaaaagctggttcccaaggtccttgatggtaacatcattggaaggtgayactacatttcccatgaggctctgcggtcccccgttaggaacccacgcaggacattctgttttgcccagcagttgagttcagttacccagagacccggacttaatggatcaggactggtccctacccaggtgacacagatgtggcattctggttctttattaaatcctggtttcacagcctgggacattgtgaaaaaaatggagaaatttcaatagaggccaattggtctatgctattaatgagtaactttttttttttttgagacggagtctcactgtcgcccaggctggagtgcaatggtgcaatctcagctcact

SEQ ID NO: 143479 - DNA, 467 bp, Homo sapiens
gctccaagtgccaacacgggcgccagctctccacaaggctgtggctggaccacgggcacctcaaccagcttccatagctggcacactgggaacacagtggcacccagaatcttggagatatcacgaaccaaagggccccaaagaaggacctggctcggggagctcccaggtctgggcgccccaaagggccacagctcttctttccttctctttgcccacaatgtgktgagcaaggggcatgtctcagccctgtttgtgttacagctctttcagcctcttccctaggatttgtcataattaattcccatatcatcttatttttttacatgtgtttcaacttcagaagatgtatggatctaaacacaacatgatgtgttagctagctgccatatgagcttctccctgtttcaccactatgtagcctaaagttattccgtcatccatgactatcatgtctaaagagtctg

SEQ ID NO: 143480 - DNA, 467 bp, Homo sapiens
gctccaagtgccaacacgggcgccagctctccacaaggctgtggctggaccacgggcacctcaaccagcttccatagctggcacactgggaacacagtggcacccagaatcttggagatatcacgaaccaaagggccccaaagaaggacctggctcggggagctcccaggtctgggcgccccaaagggccacagctcttctttccttctctttgcccacaatgtggtgagcaaggggcatgtctcagccctgtttgtgttacagctctttcagcctcttccctaggatttgtcataattaattcccatatcatcttatttttttacatgtgtttcaacttcagaagatgtatggatctaaacacaacatgatgtgttagctagcwgccatatgagcttctccctgtttcaccactatgtagcctaaagttattccgtcatccatgactatcatgtctaaagagtctg

SEQ ID NO: 143481 - DNA, 468 bp, Homo sapiens
gctccaagtgccaacacgggcgccagctctccacaaggctgtggctggaccacgggcacctcaaccagcttccatagctggcacactgggaacacagtggcacccagaatcttggagatatcacgaaccaaagggccccaaagaaggacctggctcggggagctcccaggtctgggcgccccaaagggccacagctcttctttccttctctttgcccacaatgtggtgagcaaggggcatgtctcagccctgtttgtgttacagctctttcagcctcttccctaggatttgtcataattaattcccatatcatcttatttttttacatgtgtttcaacttcagaagatgtatggatctaaacacaacatgatgtgttagctagctgccatatgagcttctccctgtttcaccactatgtagcctaaagttattccgtcawccatgactatcatgtctaaagagtctga

SEQ ID NO: 143482 - DNA, 616 bp, Homo sapiens
aatagcaattctcattcagttttttgtgttctgtttgatttcaattggaaattctcattcagctttttagagtcctggaagattttcatagtccaatggtatgatccccaaagttatctgaaaccatatttaagagaacttgtcagagtcctttccattaaaagtaatttagatgatagctgattgtaaagactttttttttttttttgagacacggtctggctctatcactcaggatggagtgcagtgacatgatcttggttcactgcaatctctcccacccaaactcaagccatcctcctacctcagcctctgaagtagctgggaccataggcatgcaccatcatgcctggctaatttttgtattcttgtagagagaggattttaccatgttgcccaggctgctttaaaacttctgagtttaagcaattcacccacctcggccttccaaagtgctgggatttttacacgcgcgagccaccgtgccctgcayggccttcagcaccgcgcctggcctgtaaagggttttagagaagaactttaaacaatcactgtggatgataaaaacttagaagagcctttggttaaaatccagtggaagttctcaactggtgag

SEQ ID NO: 143483 - DNA, 616 bp, Homo sapiens
aatagcaattctcattcagttttttgtgttctgtttgatttcaattggaaattctcattcagctttttagagtcctggaagattttcatagtccaatggtatgatccccaaagttatctgaaaccatatttaagagaacttgtcagagtcctttccattaaaagtaatttagatgatagctgattgtaaagactttttttttttttttgagacacggtctggctctatcactcaggatggagtgcagtgacatgatcttggttcactgcaatctctcccacccaaactcaagccatcctcctacctcagcctctgaagtagctgggaccataggcatgcaccatcatgcctggctaatttttgtattcttgtagagagaggattttaccatgttgcccaggctgctttaaaacttctgagtttaagcaattcacccacctcggccttccaaagtgctgggatttttacacgcgcgagccaccgtgccctgcatrgccttcagcaccgcgcctggcctgtaaagggttttagagaagaactttaaacaatcactgtggatgataaaaacttagaagagcctttggttaaaatccagtggaagttctcaactggtgag

SEQ ID NO: 143484 - DNA, 412 bp, Homo sapiens
ctgtctcagagagaaaaaaaaaagatttagtgttacttatcttttggcaatgcttgccatacaatgttatcaactaagttttaacaaagatgtaaaaaaattgaaaagatttgaccaaaacagaatgacagtttattgtttttaattttattatttttttgagacagggtctcaccctgttgcccaggctggagtgcagtggtgaaatcatggctcactgcagcctcaacctcccaggatcaggtgatcctccaccttagtctcccaagtagccaggactatgagcacgtgctaccacacacagmtagcttttttatttttagtagagatggggttttgccattttgcccaggctagagttgaactcctgggctcaactgatccacccaccttggcttcccaaagggctgga

SEQ ID NO: 143485 - DNA, 412 bp, Homo sapiens
ctgtctcagagagaaaaaaaaaagatttagtgttacttatcttttggcaatgcttgccatacaatgttatcaactaagttttaacaaagatgtaaaaaaattgaaaagatttgaccaaaacagaatgacagtttattgtttttaattttattatttttttgagacagggtctcaccctgttgcccaggctggagtgcagtggtgaaatcatggctcactgcagcctcaacctcccaggatcaggtgatcctccaccttagtctcccaagtagccaggactatgagcacgtgctaccacacacagctagcttttttatttttagtagagatggggttttgccattttgcccaggctrgagttgaactcctgggctcaactgatccacccaccttggcttcccaaagggctgga

SEQ ID NO: 143486 - DNA, 216 bp, Homo sapiens
ggttgaatcttcttactagttacaggtctctttggattttttatttctccgtgatgctgtatggtggtttgtgtttctaggaatttataaatttattctaggttgyccagttttgtggcatatggttgctcacattagtctcttgtaatctttttcagttctgtggcatctgttgtactgtcacctcttttatttatgatttcagtatttgagatt

SEQ ID NO: 143487 - DNA, 216 bp, Homo sapiens
ggttgaatcttcttactagttacaggtctctttggattttttatttctccgtgatgctgtatggtggtttgtgtttctaggaatttataaatttattctaggttgtccagttttgtggcatatggttgctcacattagtctcttgtaatctttttcakttctgtggcatctgttgtactgtcacctcttttatttatgatttcagtatttgagatt

SEQ ID NO: 143488 - DNA, 595 bp, Homo sapiens
tttaaatcgtaagaactgagcaggaattagacaagctcgagtaatagtgtcccagtcagtaggaatcatctgactggaaacagcaacattctttaacggtcccatttcaaaaggagaacctggtccatactgatttatagcttgtttaaattttttgagtaatttaaaaggaaaaggctcaaatgtagctataatatttccctgttgatctgcggggtgtattcaaacagsgaactgccaagcctctaaatcccacttttgtctagcttgctgaattcctgcctgaatagaactaagagcagtcgctcaaggcgctgctcgaacagtcaccagggcaactacttttcacccagtgtcctccagaaaagaaagatctggagggtcgttttcttcaaaataataatgagggggtgcagaagggtagggatgaacctctccttccttttctgctttagatttaggtggcaaataaacctggtctgtaacctctactgttactttgttatactctccttcctcctcatcatcagtgtgaaaaagttccaaggtagaacgaaccacagcccacacttgtcccattgttaccctgaagctt

SEQ ID NO: 143489 - DNA, 465 bp, Homo sapiens
ttaacagcaagccagtcattagcattgtttctatagatattagattaagtaaaagtattccttatgggaaacgaagggatgggctgaattaaaggaataggttgggctagttaactgcagcagaagcatgttcttaaggcacagatcactcatgctattgtttgtggcttaagaatgtttttaagtggttttycaccctggacgggccaggtattccttgtcctcattccagtgaacctacaaccttacagcgtgggtgttatggccatcatgaacatgtcacagtgctgcagagattttgtttatggccagttttggggccagtttatggccggatttgaggggtcttgttcccaacagttcctcagggtaagggtgccctaacgcctgtggggaccttctttggtggctccccaggaagtaaggagatgggaattgttctgtagaggtctacagcagcactgc

SEQ ID NO: 143490 - DNA, 465 bp, Homo sapiens
ttaacagcaagccagtcattagcattgtttctatagatattagattaagtaaaagtattccttatgggaaacgaagggatgggctgaattaaaggaataggttgggctagttaactgcagcagaagcatgttcttaaggcacagatcactcatgctattgtttgtggcttaagaatgtttttaagtggtttttcaccctggacgggccaggtattccttgtcctcattccagtraacctacaaccttacagcgtgggtgttatggccatcatgaacatgtcacagtgctgcagagattttgtttatggccagttttggggccagtttatggccggatttgaggggtcttgttcccaacagttcctcagggtaagggtgccctaacgcctgtggggaccttctttggtggctccccaggaagtaaggagatgggaattgttctgtagaggtctacagcagcactgc

SEQ ID NO: 143491 - DNA, 505 bp, Homo sapiens
agcagcactgcttgctgaggcgggggacaattgttgtacatttgtaagggcagtggctgtgctgggtatgcctcggtttgttgaggggctcaaggtgggtccctcttcctatttcctgaaagaggttgcccatctttgctaaatttagaatgacacggacttgcctagtgattgcctttcttacaccagggacatacactgggacttttctgttgattgatggtagtagttttcgtctttttaattcctttctacattcctttcttgtgtccaatttgtccacaattaaggcaagagcctgagaaatgaagcatattttttcttactcttaatctagtcatagcctgagctaaaagaatagccttatgtaagttacctccaatgccatcgcargccttaatatattagttaaatgagccttctctctcaggggtctaatagcagtttgacactctgcattagcattattgtatgcaagaagctgtattacaacatcttgagctgt

SEQ ID NO: 143492 - DNA, 505 bp, Homo sapiens
agcagcactgcttgctgaggcgggggacaattgttgtacatttgtaagggcagtggctgtgctgggtatgcctcggtttgttgaggggctcaaggtgggtccctcttcctatttcctgaaagaggttgcccatctttgctaaatttagaatgacacggacttgcctagtgattgcctttcttacaccagggacatacactgggacttttctgttgattgatggtagtagttttcgtctttttaattcctttctacattcctttcttgtgtccaatttgtccacaattaaggcaagagcctgagaaatgaagcatattttttcttactcttaatctagtcatagcctgagctaaaagaatagccttatgtaagttacctccaatgccatcgcaggmcttaatatattagttaaatgagccttctctctcaggggtctaatagcagtttgacactctgcattagcattattgtatgcaagaagctgtattacaacatcttgagctgt

SEQ ID NO: 143493 - DNA, 524 bp, Homo sapiens
aagagcaatattgttagaatggctatactgccaaaagcaatctacacattcaacattattcctatgaaacaaccaatgtcgtttttcacagaatcagaaaaaaactattctaaatttcgtatggatttttaaagagcccagacaaccaaaggaaacctaagcaagaagaacaaagctggagacatcacattacttgacttcatactataccctaaggccacagtagacaaaatagcatggtggcgatatgaaaacagacacaaagaccaatgcaacagaatagagaaccccaaaataaacatgmacctacagccatcagctttcccaggataacacaaatagagccaagtggcacctgcacattacactgtggaagaaaaacccaagctcaagaaagccaaacttgtattatgggaagttcacttggctgtacccttcccaagagggagaaattatctgcattatactagacagtaaataaaattttcctttgttccagaaggaggtactggttttctattcca

SEQ ID NO: 143494 - DNA, 612 bp, Homo sapiens
attactttgctaacgcaaaacagaaaaaccttggctcattttcccagtaagttcctcattttcatctgagaccttataagcctgaccttcaatatccatcctctgtcagccttttaatcataactatttaacaagtctctgcaatggtccaaactttccctcatcttcctgtcttcttccaagctctccaaactctctaacctctggccactacccaatttggaacctgcttctacactgtcagctatctttgttgcagcctggcaatgtggtaaaagaagaaaagtccattatcaggggaaacatcaagatgrcctccaatatttgcattgaaaaaagctcagtgctaatagccaagagaatgggggaaacgcctagaagtcatttcataacttcacagcattaattttctgtatctacataaagaaaagaggtgtaattgactcacagttcttcaggctgtaaagaaagcacagtggtttctgcttgtaggaggactcaggaagccccccaattataccaaaaggccaagcggcaatgaaatgtttcatatggcaggagtagaagcaagacagagagaggaaggaggtgcgacatcctgttatacaacta

SEQ ID NO: 143495 - DNA, 319 bp, Homo sapiens
ggaaacatcaagatgacctccaatatttgcattgaaaaaagctcartgctaatagccaagagaatgggggaaacgcctagaagtcatttcataacttcacagcattaattttctgtatctacataaagaaaagaggtgtaattgactcacagttcttcaggctgtaaagaaagcacagtggtttctgcttgtaggaggactcaggaagccccccaattataccaaaaggccaagcggcaatgaaatgtttcatatggcaggagtagaagcaagacagagagaggaaggaggtgcgacatcctgttatacaactagatct

SEQ ID NO: 143496 - DNA, 319 bp, Homo sapiens
ggaaacatcaagatgacctccaatatttgcattgaaaaaagctcagtgctaatagccaagagaatgggggaaacgcctagaagtcatttcataacttcacagcattaattttctgtatctacataaagaaaagaggtgtaattgactcacagttcttcaggctgtaaagaaagcacagtggtttctgcttgtaggaggactcaggaagccccccaattataccaaaaggcmaagcggcaatgaaatgtttcatatggcaggagtagaagcaagacagagagaggaaggaggtgcgacatcctgttatacaactagatct

SEQ ID NO: 143497 - DNA, 612 bp, Homo sapiens
attactttgctaacgcaaaacagaaaaaccttggctcattttcccagtaagttcctcattttcatctgagaccttataagcctgaccttcaatatccatcctctgtcagccttttaatcataactatttaacaagtctctgcaatggtccaaactttccctcatcttcctgtcttcttccaagctctccaaactctctaacctctggccactacccaatttggaacctgcttctacactgtcagctatctttgttgcagcctggcaatgtggtaaaagaagaaaagtccattatcaggggaaacatcaagatgacctccaatatttgcattgaaaaaagctcagtgctaatagccaagagaatgggggaaacgcctagaagtcatttcataacttcacagcattaattttctgtatctacataaagaaaagaggtgtaattgactcacagttcttcaggctgtaaagaaagcacagtggtttctgcttgtaggaggactcaggaagccccccaattataccaaaaggccaagcggcaatgaaatgtttcatatggcaggagtagaagcaagacagagagaggaargaggtgcgacatcctgttatacaacta

SEQ ID NO: 143498 - DNA, 612 bp, Homo sapiens
attactttgctaacgcaaaacagaaaaaccttggctcattttcccagtaagttcctcattttcatctgagaccttataagcctgaccttcaatatccatcctctgtcagccttttaatcataactatttaacaagtctctgcaatggtccaaactttccctcatcttcctgtcttcttccaagctctccaaactctctaacctctggccactacccaatttggaacctgcttctacactgtcagctatctttgttgcagcctggcaatgtggtaaaagaagaaaagtccattatcaggggaaacatcaagatgacctccaatatttgcattgaaaaaagctcagtgctaatagccaagagaatgggggaaacgcctagaagtcatttcataacttcacagcattaattttctgtatctacataaagaaaagaggtgtaattgactcacagttcttcaggctgtaaagaaagcacagtggtttctgcttgtaggaggactcaggaagccccccaattataccaaaaggccaagcggcaatgaaatgtttcatatggcaggagtagaagcaagacagagagaggaaggaggtgmgacatcctgttatacaacta

SEQ ID NO: 143499 - DNA, 559 bp, Homo sapiens
actcactatcactaggtcagcatcaagaagatggtgcttaaccattggtgaaggatcygcccccccaacacagctccacctcctactgttccagacagaagcctgctgcagaggcagaggctcttgggaatcctgtactatggcagtgcagaaggaaaataagggctttgactgactatgcaggaggccaccatcctcgagaccccagattcatagacctaccaacagttcacaccctcagtatggaaaagtgataggcactcaacaccagcccagcccatgagagcaaacatgggggctaaagcctgcaaagccacaggcacactgccctggtagaggttttccatgagcctctgcctctgcagcaggctactcccccttcctactacccaccaccctcccaccgccctacagccagcctattcttccccaccctacccaccccttttttcttccacccctacccctcccatccatgattaaataatctcccaccaggccccacctccaagatttgggattacaattccacatgagtttttccaggggcacacagcaa

SEQ ID NO: 143500 - DNA, 559 bp, Homo sapiens
actcactatcactaggtcagcatcaagaagatggtgcttaaccattggtgaaggatctgcccccccaacacagctccacctcctactgttccagacagaagcctgctgcagaggcagaggctcttgggaatcctgtactatggcagtgcagaaggaaaataagggctttgactgactatgcaggaggccaccatcctcgagaccccagattcatagacctaccaacagttcacaccctcagtatggaaaagtgataggcwctcaacaccagcccagcccatgagagcaaacatgggggctaaagcctgcaaagccacaggcacactgccctggtagaggttttccatgagcctctgcctctgcagcaggctactcccccttcctactacccaccaccctcccaccgccctacagccagcctattcttccccaccctacccaccccttttttcttccacccctacccctcccatccatgattaaataatctcccaccaggccccacctccaagatttgggattacaattccacatgagtttttccaggggcacacagcaa

SEQ ID NO: 143501 - DNA, 400 bp, Homo sapiens
gaatcccccccaccctcccagygcccccaaccatccaacctccactctccaccatgattaaatcaccttccaccagcccccacctttaacatttcgcattaacattccacatgagctttggtagagacagagagccaaaacatattattctgtctctggtaccccaaagttcatgtctttctcacattgcaaaatgtaatgatgccttccctagagtctctcaaatcttaactcattccagcatttactcaaatgcgcaaagcccagagtcttatctgagaccagtctacagtcccttctgcccatgagccactgagttataaagcaagtttactacttccaaggtacaatgattgtacaggcaatggatgactcataggatacataagtgtccaaaacc

SEQ ID NO: 143502 - DNA, 400 bp, Homo sapiens
gaatcccccccaccctcccagtgcccccaaccatccaacctccactctccaccatgattaaatcaccttccaccagcccccacctttaacatttcgcattaacattccacatgagctttggtagagacagagagccaaaacatattattctgtctctggtmccccaaagttcatgtctttctcacattgcaaaatgtaatgatgccttccctagagtctctcaaatcttaactcattccagcatttactcaaatgcgcaaagcccagagtcttatctgagaccagtctacagtcccttctgcccatgagccactgagttataaagcaagtttactacttccaaggtacaatgattgtacaggcaatggatgactcataggatacataagtgtccaaaacc

SEQ ID NO: 143503 - DNA, 416 bp, Homo sapiens
caacctccactctccaccatgattaaatcaccttccaccagcccccacctttaacatttcgcattaacattccacatgagctttggtagagacagagagccaaaacatattattctgtctctggtaccccaaagttcatgtctttctcacattgcaaaatgtaatgatgccttccctagagtctctcaaatcttaactcattccagcatttactcaaatgcgcaaagcccagagtcttatctgagaccagtctacagtcccttctgcccatgagccactgagttataaagcaagtttactacttccaaggtacaatgattgtacaggcaatggatgactcataggatacataagtgtccaaaacccagcaggccagtcasttaatgctacagctccaaaatcatcatttttgaatt

SEQ ID NO: 143504 - DNA, 575 bp, Homo sapiens
attgttttctgtaaataaacctgttcatgtcttgttctctggaaagaaatctctttcaactatctgactttggtcacagtcatgtagagcagtagccagtctataatgacataattgaatttccatttccagtgtttcatttttgtgtcttacattgtacagttcagaaatgagcattttattcccaattgtcaaaatgctaagctgtccactgtactggaatactgtttttgttagtgcttcgtcattcaattttttttaaggtgtgcacttttatccaacttttctcaagtcagagtacaggtaagcsctggctgcctcgagccactctcagggagaccaaaacccttcatacactccaagttggggtacaaaaaaggggggccatgaaggctagtcattcaaaataaaacaaaatttaaaagtattaaggcaaagatttaaaaaattttgcattacgtaatttacacaaaagcaatgctatcacctagcctgtgtgaactcgggagaggactgggccattctccttagagagaagtagggtggcttttaggagggcaaggggcttcctgaaa

SEQ ID NO: 143505 - DNA, 575 bp, Homo sapiens
attgttttctgtaaataaacctgttcatgtcttgttctctggaaagaaatctctttcaactatctgactttggtcacagtcatgtagagcagtagccagtctataatgacataattgaatttccatttccagtgtttcatttttgtgtcttacattgtacagttcagaaatgagcattttattcccaattgtcaaaatgctaagctgtccactgtactggaatactgtttttgttagtgcttcgtcattcaattttttttaaggtgtgcacttttatccaacttttctcaagtcagagtacaggtaagccctggctgcctcgagccactctcagggagaccaaaacccttcatacactccaagttggggtacaaaaaaggggggccatgaaggctagtcattcaaaataaaacaaaatttaaaagtattaaggcaaagatttaaaaaattttgcattacgtaatttacacaaaagcaatgctatcacctarcctgtgtgaactcgggagaggactgggccattctccttagagagaagtagggtggcttttaggagggcaaggggcttcctgaaa

SEQ ID NO: 143506 - DNA, 581 bp, Homo sapiens
ttcactcttgttgcccaggctggagtgcaaaggtgcaatatcacctcactgcaacctctgtctctcaggtttaagaacttatcctgcctcagtctcccaagctgggattagaggcttgtgccaccaygcccagctcattttgcatttttagtagagacggggtttctcaatgttggtcaggctggtctcgaactcccaacctcaggtgatccacacacctaagcctcccaaagtgttggcattacaggcatgagccaccgcgcccggcctgcttgttcttttcatttcatccttatctccgaatacaggagagtagctgatttggtgttcactaacaagcacagaagctttgttacatttacagtgtcattcttgggaaaacctgaagttttgcctcccgggttcacaccattctcctgcctcagcctcctgagtagctgggactataggcgcccgccacctcacccagctaattttttgtatttttagtagagacggggtttcaccgtgttagccaggatggtctcgatctcctgaccttgtgatccacccacctcggcctcccagagtgctgggattac

SEQ ID NO: 143507 - DNA, 581 bp, Homo sapiens
ttcactcttgttgcccaggctggagtgcaaaggtgcaatatcacctcactgcaacctctgtctctcaggtttaagaacttatcctgcctcagtctcccaagctgggattagaggcttgtgccaccacgcccagctcattttgcatttttagtagagacggggtttctcaatgttggtcaggctggtctcgaactcccaacctcaggtgatccacacacctaagcctcccaaagtgttggcattacaggcatgagccaccgcgcccggcctgcttgttcttttcatttcatcctyatctccgaatacaggagagtagctgatttggtgttcactaacaagcacagaagctttgttacatttacagtgtcattcttgggaaaacctgaagttttgcctcccgggttcacaccattctcctgcctcagcctcctgagtagctgggactataggcgcccgccacctcacccagctaattttttgtatttttagtagagacggggtttcaccgtgttagccaggatggtctcgatctcctgaccttgtgatccacccacctcggcctcccagagtgctgggattac

SEQ ID NO: 143508 - DNA, 527 bp, Homo sapiens
ctttatgaaatatattttttaagtgataagacttgaaagttgaaattattctttgatccaagggcaccagaatgaatgttgggttagtaggcatgaaaacaatattcagctctttatacatctctgtaaaagcccttgagtaccaggggcattgtcagtgagcggtaatactttgaaaggaatcttatttcttgagcagtaggtgtcaacagtgggcttaagatattcagtaaaccatatttgtaaaccgatagtctgtcatccaggctttgttcccatttgtagastacaggcagagctgtgttttattataattcttcaggtcccttggattttcagaatagtaaatcatcattggtttcaagttaacatcaccaactacattagcccttaacaaaagagtcagtatgtcctttgaagccttaaagccaggcatcaactcctctctagctgggaacatcctagatggcatctccttctagtagaaggctgttttgtctccattgaaaatctgtttagtgtagcca

SEQ ID NO: 143509 - DNA, 514 bp, Homo sapiens
attttttaagtgataagacttgaaagttgaaattattctttgatccaagggcaccagaatgaatgttgggttagtaggcatgaaaacaatattcagctctttatacatctctgtaaaagcccttgagtaccaggggcattgtcagtgagcggtaatactttgaaaggaatcttatttcttgagcagtaggtgtcaacagtgggcttaagatattcagtaaaccatatttgtaaaccgatagtctgtcatccaggctttgttcccatttgtagagtacaggcagagctgtgttttatyataattcttcaggtcccttggattttcagaatagtaaatcatcattggtttcaagttaacatcaccaactacattagcccttaacaaaagagtcagtatgtcctttgaagccttaaagccaggcatcaactcctctctagctgggaacatcctagatggcatctccttctagtagaaggctgttttgtctccattgaaaatctgtttagtgtagcca

SEQ ID NO: 143510 - DNA, 516 bp, Homo sapiens
gaaatatattttttaagtgataagacttgaaagttgaaattattctttgatccaagggcaccagaatgaatgttgggttagtaggcatgaaaacaatattcagctctttatacatctctgtaaaagcccttgagtaccaggggcattgtcagtgagcggtaatactttgaaaggaatcttatttcttgagcagtaggtgtcaacagtgggcttaagatattcagtaaaccatatttgtaaaccgatagtctgtcatccaggctttgttcccatttgtagagtacaggcagagctgtgttttattataattcttcaggtcccttggattttcagaatagtaaatcatcattggtttcaagttaacatcaccaactrcattagcccttaacaaaagagtcagtatgtcctttgaagccttaaagccaggcatcaactcctctctagctgggaacatcctagatggcatctccttctagtagaaggctgttttgtctccattgaaaatctgtttagtgt

SEQ ID NO: 143511 - DNA, 516 bp, Homo sapiens
gaaatatattttttaagtgataagacttgaaagttgaaattattctttgatccaagggcaccagaatgaatgttgggttagtaggcatgaaaacaatattcagctctttatacatctctgtaaaagcccttgagtaccaggggcattgtcagtgagcggtaatactttgaaaggaatcttatttcttgagcagtaggtgtcaacagtgggcttaagatattcagtaaaccatatttgtaaaccgatagtctgtcatccaggctttgttcccatttgtagagtacaggcagagctgtgttttattataattcttcaggtcccttggattttcagaatagtaaatcatcattggtttcaagttaacatcaccaactacattagcccttaacaaaagagtcagyatgtcctttgaagccttaaagccaggcatcaactcctctctagctgggaacatcctagatggcatctccttctagtagaaggctgttttgtctccattgaaaatctgtttagtgt

SEQ ID NO: 143512 - DNA, 482 bp, Homo sapiens
gctttctgcagcttttccaacagtacttgctgctttatcttgtgcttttatgttatggagatgacttttttccttaaaccttaagaaacatgctcttctagcttcagacttttcttctgcagctgcctcacctctctaagtcttcatagaattgaagagaggccgggtgtggtggctgtcacacctgtaatcctagcacttcgggaggctgaggcgggcagatcacctgaggtcaggagttcgacaccagtctgaccaacgtggakaaaccccgtctctactaaaaatacaaaaaattagccaggcgtggtggttcatgcctgtaatccctgctactcaggatgctgaggcaggagaatggcttgaacttgggaggcagaggttgcgatgagccaagatcacgccactgcactccagcttgggcaagaagaatgaaactctgtctcaaaaacaaagaaaaaaaagtaaaaagagagttaggc

SEQ ID NO: 143513 - DNA, 482 bp, Homo sapiens
gctttctgcagcttttccaacagtacttgctgctttatcttgtgcttttatgttatggagatgacttttttccttaaaccttaagaaacatgctcttctagcttcagacttttcttctgcagctgcctcacctctctaagtcttcatagaattgaagagaggccgggtgtggtggctgtcacacctgtaatcctagcacttcgggaggctgaggcgggcagatcacctgaggtcaggagttcgacaccagtctgaccaacgtggagaaaccccgtctctactaaaaatacaaaaaattagccaggcgtggtggttcatgcctgtaatccctgctactcrggatgctgaggcaggagaatggcttgaacttgggaggcagaggttgcgatgagccaagatcacgccactgcactccagcttgggcaagaagaatgaaactctgtctcaaaaacaaagaaaaaaaagtaaaaagagagttaggc

SEQ ID NO: 143514 - DNA, 532 bp, Homo sapiens
agtagtgttctggaatcctatgtgagggcaaacattcagacccacgtggcagtgttctggaatcctatgtgagggacaaatattcagaccmcagcaggagtgctctggaatcctatgtgagggacaaacattcagaatctcgcagtagtgtcctggaatcttatgtgagggagagacatttagaccctcgcagcagtgttctggtatcccatgtgagggacaaacattcagaccctcccaaccatgttctggaattctatgtgagggaaagacattcaaaccccagcagcagtgttctggaatccgatttgaggggcagacattcagaccccagcagcagtgttctggaatgctatgtgaagaacaaacattaagactctcgtagcagtgtcctggaatcatatgtgagggacaaccattcagacaccagcagaagtgttctggaatcctaggtgtgggagaaacattcagaacctagtagcagtgttctggaatcctatgtgagggacatacattcagtccacggcagcag

SEQ ID NO: 143515 - DNA, 511 bp, Homo sapiens
ccagcagtagtgttctggaatcctatgtgagggcaaacattcagacccacgtggcagtgttctggaatcctatgtgagggacaaatattcagaccccagcaggagtgctctggaatcctatgtgagggacaaacattcagaatctcgcagtagtgtcctggaatcttatgtgagggagagacatttagaccctcgcagcagtgttctggtatcccatgtgagggacaaacattcagaccctcccaaccatgttctggaattctatgtgagggaaagacattcaaaccccagcagcagtgttctggaatccgatttgagggrcagacattcagaccccagcagcagtgttctggaatgctatgtgaagaacaaacattaagactctcgtagcagtgtcctggaatcatatgtgagggacaaccattcagacaccagcagaagtgttctggaatcctaggtgtgggagaaacattcagaacctagtagcagtgttctggaatcctatgtgagg

SEQ ID NO: 143516 - DNA, 432 bp, Homo sapiens
agcagcagtgttctggaatccgatttgaggggcagacattcagaccccagcagcagtgttctggaatgctatgtgaagaacaaacattaagactctcgtagcagtgtcctggaatcatatgtgagggacaaccattcagacaccagcagaagtgttctggaatcctaggtgtgggagaaacattcagaacctagtagcagtgttctggaatcctatgtgagggacatacattcagwccacggcagcagtgttctggaatggtatgtgagggacaaacattcagacccttgtagcagtgttccggaattctatgtgagggacaaacattcagaccacagccgcagtgttctggaatcctatatgacggaccaacatgcagacccttgcaacagtgttctggaatactaggtgagggagaaatattcacaccct

SEQ ID NO: 143517 - DNA, 432 bp, Homo sapiens
agcagcagtgttctggaatccgatttgaggggcagacattcagaccccagcagcagtgttctggaatgctatgtgaagaacaaacattaagactctcgtagcagtgtcctggaatcatatgtgagggacaaccattcagacaccagcagaagtgttctggaatcctaggtgtgggagaaacattcagaacctagtagcagtgttctggaatcctatgtgagggacatacattcagtccacggcagcagtgttctggaatggtatgtgagggacaaacattcagacccttgtagcagtgttccggaattctatgtgagggacaaacattcagaccacagcmgcagtgttctggaatcctatatgacggaccaacatgcagacccttgcaacagtgttctggaatactaggtgagggagaaatattcacaccct

SEQ ID NO: 143518 - DNA, 429 bp, Homo sapiens
gttctgtaatcctatgtgagggacaaacattcagaccscaagagcagtgttctgaaatcctatgttaagggaaacattgagaccccagcatgaatgttctggaatcctatgtgagggacaaacattcagaccacggcaggagtgttctggaatcctatgtgaggaacaaacattcagaccacagcaggagtattctggaatcccatatgagggataagcattcagaccctcgtagcagtgttctggaatcctatgtgagggagaagcattcagagcacagcaggagtgctctggaatcctatgttagggacaaacattcagaacctcgtaacattgtgctggaaacctatgtgagggacagacatttagaccctcgcagcagtgttctggaatcccatatgagggtcaaatattcagatcctcgcagca

SEQ ID NO: 143519 - DNA, 443 bp, Homo sapiens
gttctgtaatcctatgtgagggacaaacattcagaccccaagagcagtgttctgaaatyctatgttaagggaaacattgagaccccagcatgaatgttctggaatcctatgtgagggacaaacattcagaccacggcaggagtgttctggaatcctatgtgaggaacaaacattcagaccacagcaggagtattctggaatcccatatgagggataagcattcagaccctcgtagcagtgttctggaatcctatgtgagggagaagcattcagagcacagcaggagtgctctggaatcctatgttagggacaaacattcagaacctcgtaacattgtgctggaaacctatgtgagggacagacatttagaccctcgcagcagtgttctggaatcccatatgagggtcaaatattcagatcctcgcagcagtgttctggaattc

SEQ ID NO: 143520 - DNA, 459 bp, Homo sapiens
gaattctatgtgactgacaaacattcagactccagcagcagtgttctgtaatcctatgtgagggacaaacattcagaccccaagagcagtgttctgaaatcctatgttaagggaaacattgagaccccagcatgaatgttctggaatcctatgtgagggacaaacattcagaccacggcaggagtgttctggaatcctatgtgaggaacaaacattcagaccacagcaggagtattctggaatccyatatgagggataagcattcagaccctcgtagcagtgttctggaatcctatgtgagggagaagcattcagagcacagcaggagtgctctggaatcctatgttagggacaaacattcagaacctcgtaacattgtgctggaaacctatgtgagggacagacatttagaccctcgcagcagtgttctggaatcccatatgagggtcaaatattcag

SEQ ID NO: 143521 - DNA, 459 bp, Homo sapiens
gaattctatgtgactgacaaacattcagactccagcagcagtgttctgtaatcctatgtgagggacaaacattcagaccccaagagcagtgttctgaaatcctatgttaagggaaacattgagaccccagcatgaatgttctggaatcctatgtgagggacaaacattcagaccacggcaggagtgttctggaatcctatgtgaggaacaaacattcagaccacagcaggagtattctggaatcccatatgagggataagcattcagaccctcrtagcagtgttctggaatcctatgtgagggagaagcattcagagcacagcaggagtgctctggaatcctatgttagggacaaacattcagaacctcgtaacattgtgctggaaacctatgtgagggacagacatttagaccctcgcagcagtgttctggaatcccatatgagggtcaaatattcag

SEQ ID NO: 143522 - DNA, 443 bp, Homo sapiens
gttctgtaatcctatgtgagggacaaacattcagaccccaagagcagtgttctgaaatcctatgttaagggaaacattgagaccccagcatgaatgttctggaatcctatgtgagggacaaacattcagaccacggcaggagtgttctggaatcctatgtgaggaacaaacattcagaccacagcaggagtattctggaatcccatatgagggataagcattcagaccctcgtagcagtgttctggaatcctatgtgagggagaagcattcagagcacagcaggagtgctctggaatcctatgttagggacaaacattcagaacctcgtaacattgtgctggaaacctatgtgagggacagacatttagaccctcgcagcagtgttctggaatcccatatgagggtcaaayattcagatcctcgcagcagtgttctggaattc

SEQ ID NO: 143523 - DNA, 479 bp, Homo sapiens
ccactcaccaaaacccccaatactagaccccactaatgagaccctctctaagcagacccctgctgaccactatcccactaaatagtcctcactgacctaggtccactgaccaggcccacactgatcaggcccctcctarccacaccggaaatccaagcggcaatgacatgtttcatatggcagaagttggaacaagacagagagaggaaagagattccacagccttttaaactactagatctcatgagaactcactcactatcaggaggatggcattaagggcttggtgctttgccatttgtgaaggatccactcccacccctttatgattaaagctttttccacctaggccccgactctaacattagggagtgtactttcacatgagctttggaaggggcatagagaaaaaccgtattattctgtccctgaccccacaaatctcatgtccttctcacattgcaaaatacagtcatgcc

SEQ ID NO: 143524 - DNA, 301 bp, Homo sapiens
gccttttaaactactagatctcatgagaactcactcactatcaggaggatggcattaagggcttggtgytttgccatttgtgaaggatccactcccacccctttatgattaaagctttttccacctaggccccgactctaacattagggagtgtactttcacatgagctttggaaggggcatagagaaaaaccgtattattctgtccctgaccccacaaatctcatgtccttctcacattgcaaaatacagtcatgccttgccagcagtctcccaaagtcttaactcacttcagcattaac

SEQ ID NO: 143525 - DNA, 479 bp, Homo sapiens
ccactcaccaaaacccccaatactagaccccactaatgagaccctctctaagcagacccctgctgaccactatcccactaaatagtcctcactgacctaggtccactgaccaggcccacactgatcaggcccctcctagccacaccggaaatccaagcggcaatgacatgtttcatatggcagaagttggaacaagacagagagaggaaagagattccacagccttttaaactactagatctcatgagaactcactcactatcaggaggatggcattaagggcttggtgctttgccatttgtgaaggatccactcccacmcctttatgattaaagctttttccacctaggccccgactctaacattagggagtgtactttcacatgagctttggaaggggcatagagaaaaaccgtattattctgtccctgaccccacaaatctcatgtccttctcacattgcaaaatacagtcatgcc

SEQ ID NO: 143526 - DNA, 301 bp, Homo sapiens
gccttttaaactactagatctcatgagaactcactcactatcaggaggatggcattaagggcttggtgctttgccatttgtgaaggatccactcccacccctttatgattaaagctttttccacctaggccccgactctaacattagggagtgtactttcacatgagytttggaaggggcatagagaaaaaccgtattattctgtccctgaccccacaaatctcatgtccttctcacattgcaaaatacagtcatgccttgccagcagtctcccaaagtcttaactcacttcagcattaac

SEQ ID NO: 143527 - DNA, 301 bp, Homo sapiens
gccttttaaactactagatctcatgagaactcactcactatcaggaggatggcattaagggcttggtgctttgccatttgtgaaggatccactcccacccctttatgattaaagctttttccacctaggccccgactctaacattagggagtgtactttcacatgagctttggaaggggcatagagaaaaaccgtattattctgtccctgaccccacaaatctcatgyccttctcacattgcaaaatacagtcatgccttgccagcagtctcccaaagtcttaactcacttcagcattaac

SEQ ID NO: 143528 - DNA, 301 bp, Homo sapiens
gccttttaaactactagatctcatgagaactcactcactatcaggaggatggcattaagggcttggtgctttgccatttgtgaaggatccactcccacccctttatgattaaagctttttccacctaggccccgactctaacattagggagtgtactttcacatgagctttggaaggggcatagagaaaaaccgtattattctgtccctgaccccacaaatctcatgtccttctcacattgcaaratacagtcatgccttgccagcagtctcccaaagtcttaactcacttcagcattaac

SEQ ID NO: 143529 - DNA, 365 bp, Homo sapiens
ccagcagtctcccaaagtcttaactcacttcagcattaactcaaagttacaaagtccaaagtctcatctgggtcaaggctacattctcttttgcctacgagtctctgaaataaaaggcaagttcactgcgtctaaggtacaatgatggtacaggcattgtgtaagctttccatatccaaaaaggagacattttccagaaagcttcttatttttatctgaggccccctcrgcctggccttcactgtccatgtttttgtcagcattcttgtcacagccatttaaccagtctctaagatggtccaaaaatgttctcatttgtctgtcttctttggagccctccaaactcttccaacctctacccatta

SEQ ID NO: 143530 - DNA, 484 bp, Homo sapiens
tatattttgaagatgtcattctttaaaaattattaatatctacaggattgatacagatattttaattttaaacaaatatttttcactaatgtgaccagtatttatgtcctatttcattaaacagacatttcaagattttttagagttaatttttaaaaattaagtatcrcaaatatttctgaagtactaccttaaaaaataaaactctttcctagcttttcatatagttaaacattttcataatgactaaaaagataaaaataaattaacaaccataattaatttagaattctactttttatataagatgaaatactatataaaatgtccagaaaatctagtgttaatgaggctgtgcagcctggacatttgatgtctcatctgtgggaatgtgaactaacccaaccattctgaataattattggctctgtgtgttaacagtctagagtcctgaaacaaggatcttaattctaaaataaaatcc

SEQ ID NO: 143531 - DNA, 654 bp, Homo sapiens
tatgtttctctttgtgtacaactgtaaatrtacacatctatccatgtaaaattttacatctcaggaggataggtaccaacatgttaacatgctatatctgtaagataagaaattttactttcctacaatgtgatacacacacacacacacacactctctcaaacacacatacacacacaccgaggatatatacacacacaaatatatatataaacatacatgtttatataggtgcacacacacatacatatacacagatggtcaacttataatggttcaatttatgattttttttttactttatgatgaagcaaaagtgatagctttgaatagaatataaccattctgcttttcactttcagtacaatattcaacaaattacataaaatatccaatactttattataaagtgggttttgtattcaacgattttgcccaattgtctgctgatgtaagtgttctgagcacattaaaggtatgccaggctaagctgtgatattcagtaagttaggtattaaatacatttttaacttactgtattttcaatttataatcagcttatcaagacttaaccccattgtacattgaaaagcatttgtattgcattaaacatgttatataatatttttaattgaaattactggcaacttttga

SEQ ID NO: 143532 - DNA, 511 bp, Homo sapiens
catctacgttaccacacagagcttacttctttcagagtgtatacatttctctcctaacggtctgtatggtattattgcatagttctaaaaaccttgctgaggcagaaatttcatttaatgatatagcttcgaaaacaatgaaaaacagtagaaactttctatttttttatgaagcagaattgttgaattttcagtttcatttatttaatgttacaagatgacaaacatatttctttaattccctcttgttatttttgtctaacatcaascaaagccatttctttcatttgaaggtgaaaactgctcatcaaaatccagtttaagctgagaaacaaagaactaaattttgcatgagagattatacactgcataagtataaaagaggaccagaaacaatggtggattagcaatttttgaaaagacaaaagcaggttatcatcaaatcaattgttaccaacaccccaattccacctctaggccagaaaattagccacttacccacgggaaaaca

SEQ ID NO: 143533 - DNA, 622 bp, Homo sapiens
cacaaattttataattatgaatgcatataataaggaacaagttttattctaaatagcaattaaatcagaactacratacagggaataaaagtgaatattaaaccattgtaccgacaataacagagccctttttctgctgcgtgatggaatttagtgtttactaaggaagaaaaaaatgcaagatatcttaaatttggtacttcccaacaaatttaagaaatgtgtacacacttgaggagacttaagaagtctctgactaaaacactagaaaagaaaagcagtgaaaagccaaatagctattactcaacaataacaacatttgttactattatattaatattaaacacactattaagcaacatttcagttactcactgagcccaaagtcatttttcatgaaccattcacaacactgataacctattgaaacatgattgaaaaaaaaaagcttattgctttccaagtccttttaaagccttctcatgtgtcatttcatataatccttataacgaatctatggagtatatactgactttatctctgtacagaaaagaaaactgaatcacattcagaataagttgcaaagttccccagataatcagtgtcataggtgaaatttggt

SEQ ID NO: 143534 - DNA, 324 bp, Homo sapiens
caaatttaagaaatgtgtacacacttgaggagacttaagaagtctctgactaaaacactagaaaagaaaagcagtgaaaagccaaatagctattactcaacaataacaacatttgttactattatattaatattaaacacactattaagcaacatttcagttactcactgagcccaaagtcatttttcatgaaccattcacaacactgataacctattgaaamatgattgaaaaaaaaaagcttattgctttccaagtccttttaaagccttctcatgtgtcatttcatataatccttataacgaatctatggagtatatactg

SEQ ID NO: 143535 - DNA, 329 bp, Homo sapiens
tactttctgtcttgatgaatcatacaatatcaaatggaatttttaagatatttaaaatattttgtctggaagygaagtggaagttaatatcaatggctatgccttcagtgagttctcagaccatattacaatgtagttaactatttatcttttattacgttctagacctattatttctttctggcacaaaaatatcttctttgtagattatggcatttacctctatctccacacctttttgtttctgtcatccacagatcatcagcctcttgcttagtctccatttaatgacaatttctatttagtatacaacagtccttccccctgca

SEQ ID NO: 143536 - DNA, 329 bp, Homo sapiens
tactttctgtcttgatgaatcatacaatatcaaatggaatttttaagatatttaaaatattttgtctggaagtraagtggaagttaatatcaatggctatgccttcagtgagttctcagaccatattacaatgtagttaactatttatcttttattacgttctagacctattatttctttctggcacaaaaatatcttctttgtagattatggcatttacctctatctccacacctttttgtttctgtcatccacagatcatcagcctcttgcttagtctccatttaatgacaatttctatttagtatacaacagtccttccccctgca

SEQ ID NO: 143537 - DNA, 329 bp, Homo sapiens
tactttctgtcttgatgaatcatacaatatcaaatggaatttttaagatatttaaaatattttgtctggaagtgaagtggaagttaatatcaatggctatgccttcagtgagttctcagaccayattacaatgtagttaactatttatcttttattacgttctagacctattatttctttctggcacaaaaatatcttctttgtagattatggcatttacctctatctccacacctttttgtttctgtcatccacagatcatcagcctcttgcttagtctccatttaatgacaatttctatttagtatacaacagtccttccccctgca

SEQ ID NO: 143538 - DNA, 502 bp, Homo sapiens
ttccccctgcaatgcaatttcktcactctgaaaagctctgactctggctactggtctctgttatgtactcatccctagagccatgtcttcaaatatttctcagaacttcttcacatctaaaaatctaggattaatttattgctctctgattatattcttctggtatttcaagtatcctgtataacttcttcatctgcccttgcttttcttctacatcaagatgtcaagttcatggacttcccaattaatcattttaaaaatttatttcaagcctttatgagtcactacaatgtacatatgttctcaggaattatggccctacaatttgtatgtgagaatagttcctgtgtcaggcattatggacataagagtaaataaattctagcccctgcctacaaggagctaattcccagcctaagacagattgcaagccaataatatgcagagttgtaagtctaaggaaactgattgggatgtacctaattcgagctgggaatatcag

SEQ ID NO: 143539 - DNA, 430 bp, Homo sapiens
cgtcactctgaaaagctctgactctggctactggtctctgttatgtactcatccctagagccatgtcttcaaatatttctcagaacttcttcacatctaaaaatctaggattaatktattgctctctgattatattcttctggtatttcaagtatcctgtataacttcttcatctgcccttgcttttcttctacatcaagatgtcaagttcatggacttcccaattaatcattttaaaaatttatttcaagcctttatgagtcactacaatgtacatatgttctcaggaattatggccctacaatttgtatgtgagaatagttcctgtgtcaggcattatggacataagagtaaataaattctagcccctgcctacaaggagctaattcccagcctaagacagattgcaagccaataatatgcagagttg

SEQ ID NO: 143540 - DNA, 430 bp, Homo sapiens
cgtcactctgaaaagctctgactctggctactggtctctgttatgtactcatccctagagccatgtcttcaaatatttctcagaacttcttcacatctaaaaatctaggattaatttattgctctctgattatattcttctggtatttcaagtatcctgtataacttcttcatctgcccttgcttttcttctacatcaagatgtcaagttcatggacttcccaattaatcattttaaaaatttatttcaarcctttatgagtcactacaatgtacatatgttctcaggaattatggccctacaatttgtatgtgagaatagttcctgtgtcaggcattatggacataagagtaaataaattctagcccctgcctacaaggagctaattcccagcctaagacagattgcaagccaataatatgcagagttg

SEQ ID NO: 143541 - DNA, 614 bp, Homo sapiens
caattaatcattttaaaaatttatttcaagcctttatgagtcactacaatgtacatatgttctcaggaattatggccctacaatttgtatgtgagaatagttcctgtgtcaggcattatggacataagagtaaataaattctagcccctgcctacaaggagctaattcccagcctaagacagattgcaagccaataatatgcagagttgtaagwctaaggaaactgattgggatgtacctaattcgagctgggaatatcagaagaaaaactttttgaaagtcatgagacatgagctgtgcctaaaagaataaaaaatagagagagaaataagaataaataaattagggaatgagatgggtataatagtagaaaaaggaaatctctttagataaaacaggttatgagagtatataggaggcttattaactcagtgtggttggagaaaacaggttgaaaggagaaataggggagaaagttacaaagggaatcaaatgtgttagtagttgaggaaaaagcaaatattgaatacgacccatagatcttggataacccagtgtttggtagtagcttacataaaaggttgtgacaaaataaccagagctatgcggagaaa

SEQ ID NO: 143542 - DNA, 492 bp, Homo sapiens
gcaagccaataatatgcagagttgtaagtctaaggaaactgattgggatgtacctaattcgagctgggaatatcagaagaaaaactttttgaaagtcatgagacatgagctrtgcctaaaagaataaaaaatagagagagaaataagaataaataaattagggaatgagatgggtataatagtagaaaaaggaaatctctttagataaaacaggttatgagagtatataggaggcttattaactcagtgtggttggagaaaacaggttgaaaggagaaataggggagaaagttacaaagggaatcaaatgtgttagtagttgaggaaaaagcaaatattgaatacgacccatagatcttggataacccagtgtttggtagtagcttacataaaaggttgtgacaaaataaccagagctatgcggagaaaataataactgagtgttatatttcctctcagtagaaacctaaaaaaaaaaatgaaatcacatcc

SEQ ID NO: 143543 - DNA, 492 bp, Homo sapiens
gcaagccaataatatgcagagttgtaagtctaaggaaactgattgggatgtacctaattcgagctgggaatatcagaagaaaaactttttgaaagtcatgagacatgagctgtgcctaaaagaataaaaaatagagagagaaataagaataaataaattagggaatgagatgggtataatagtagaaaaaggaaatctctttagataaaacaggttatgagagtatataggaggcttattaactcagtgtggttggagaaaacaggttgaaaggagaaataggrgagaaagttacaaagggaatcaaatgtgttagtagttgaggaaaaagcaaatattgaatacgacccatagatcttggataacccagtgtttggtagtagcttacataaaaggttgtgacaaaataaccagagctatgcggagaaaataataactgagtgttatatttcctctcagtagaaacctaaaaaaaaaaatgaaatcacatcc

SEQ ID NO: 143544 - DNA, 614 bp, Homo sapiens
caattaatcattttaaaaatttatttcaagcctttatgagtcactacaatgtacatatgttctcaggaattatggccctacaatttgtatgtgagaatagttcctgtgtcaggcattatggacataagagtaaataaattctagcccctgcctacaaggagctaattcccagcctaagacagattgcaagccaataatatgcagagttgtaagtctaaggaaactgattgggatgtacctaattcgagctgggaatatcagaagaaaaactttttgaaagtcatgagacatgagctgtgcctaaaagaataaaaaatagagagagaaataagaataaataaattagggaatgagatgggtataatagtagaaaaaggaaatctctttagataaaacaggttatgagagtatataggaggcttattaactcagtgtggttggagaaaacaggttgaaaggagaaataggggagaaagttacaaagggaatcaaatgtgttagtagttgaggraaaagcaaatattgaatacgacccatagatcttggataacccagtgtttggtagtagcttacataaaaggttgtgacaaaataaccagagctatgcggagaaa

SEQ ID NO: 143545 - DNA, 614 bp, Homo sapiens
caattaatcattttaaaaatttatttcaagcctttatgagtcactacaatgtacatatgttctcaggaattatggccctacaatttgtatgtgagaatagttcctgtgtcaggcattatggacataagagtaaataaattctagcccctgcctacaaggagctaattcccagcctaagacagattgcaagccaataatatgcagagttgtaagtctaaggaaactgattgggatgtacctaattcgagctgggaatatcagaagaaaaactttttgaaagtcatgagacatgagctgtgcctaaaagaataaaaaatagagagagaaataagaataaataaattagggaatgagatgggtataatagtagaaaaaggaaatctctttagataaaacaggttatgagagtatataggaggcttattaactcagtgtggttggagaaaacaggttgaaaggagaaataggggagaaagttacaaagggaatcaaatgtgttagtagttgaggaaaaagcaaatattgaayacgacccatagatcttggataacccagtgtttggtagtagcttacataaaaggttgtgacaaaataaccagagctatgcggagaaa

SEQ ID NO: 143546 - DNA, 435 bp, Homo sapiens
gatgatttagcataaaactcaactttagcctaaaacacagatcatagggctcaaactttgttattttatgggattatactaaccagttaatattcaaaatttaccatttcaaaagaagaaatattggtctgggaaaattgccattgcttatacagaagaatggaggaagctttttgagaacaacaattctaatgatcttcctcatcactggttccaaaaccaagcccatggaagkcctgcatagggataatgtggagaacatgcaaaagaaatacacatcaccagctcctcaactcagagctccaagggaatggccaaggaagctgtattgtcctaagaaatttgaggctgtcttgacttacaataaatcctgctcaatcatatacatgtatacacacacacacacacacacacacacacagacggtgttgtcag

SEQ ID NO: 143547 - DNA, 435 bp, Homo sapiens
gatgatttagcataaaactcaactttagcctaaaacacagatcatagggctcaaactttgttattttatgggattatactaaccagttaatattcaaaatttaccatttcaaaagaagaaatattggtctgggaaaattgccattgcttatacagaagaatggaggaagctttttgagaacaacaattctaatgatcttcctcatcactggttccaaaaccaagcccatggaagtcctgcatagggataatgtggagaacatgcaaaagaaatacacatcaccagctcctcaactcagagctccaagggaatggccaaggaagctgtattgtcctaagaaatttgaggctgtcttgacttacaataaatcctgctcaatcatatayatgtatacacacacacacacacacacacacacacagacggtgttgtcag

SEQ ID NO: 143548 - DNA, 548 bp, Homo sapiens
acttaagtatctatctctctttgtcctttattttcacttccatcctggttctatcccttgtctccttcgtgtgtctcaggataagtgccctataacattttatatttctggaaacccttcaatataatgttattacatgtaaaaataaaaagtctgttttagtgaactttttcttcacaaattrtcttttcctacttccctattagacaatttctgtaggctccatatgctattaatttatattcacttttagaagaattttaatcaaaagcaaaattcttatgtaaattgattatatgctatttgtacttctgtgtatatatacacacatagccacatacacatatgtaactccggaggcctgcctagactgtttaataacagtattgaacaagagcaagaaaaagctgttcaaatttcaaacaaaaagttgaactgaagagctcatatttttgaacgaaatatacactagtagcctttaaaaattaaacatttctactgttttaaaaaattatagccatcatagtatgaggaaaaaatgtaataat

SEQ ID NO: 143549 - DNA, 548 bp, Homo sapiens
acttaagtatctatctctctttgtcctttattttcacttccatcctggttctatcccttgtctccttcgtgtgtctcaggataagtgccctataacattttatatttctggaaacccttcaatataatgttattacatgtaaaaataaaaagtctgttttagtgaactttttcttcacaaattgtcttttcctacttccctattagacaatttctgtaggctccatatgctattaatttatattcacttttagaagaattttaatcaaaagcaaaattcttatgtaaattgwttatatgctatttgtacttctgtgtatatatacacacatagccacatacacatatgtaactccggaggcctgcctagactgtttaataacagtattgaacaagagcaagaaaaagctgttcaaatttcaaacaaaaagttgaactgaagagctcatatttttgaacgaaatatacactagtagcctttaaaaattaaacatttctactgttttaaaaaattatagccatcatagtatgaggaaaaaatgtaataat

SEQ ID NO: 143550 - DNA, 548 bp, Homo sapiens
acttaagtatctatctctctttgtcctttattttcacttccatcctggttctatcccttgtctccttcgtgtgtctcaggataagtgccctataacattttatatttctggaaacccttcaatataatgttattacatgtaaaaataaaaagtctgttttagtgaactttttcttcacaaattgtcttttcctacttccctattagacaatttctgtaggctccatatgctattaatttatattcacttttagaagaattttaatcaaaagcaaaattcttatgtaaattgattatatgctatttgtacttctgtgtatatatacacacatagccacatacacatatgtaactccggaggcctgcctagactgtttaataacwgtattgaacaagagcaagaaaaagctgttcaaatttcaaacaaaaagttgaactgaagagctcatatttttgaacgaaatatacactagtagcctttaaaaattaaacatttctactgttttaaaaaattatagccatcatagtatgaggaaaaaatgtaataat

SEQ ID NO: 143551 - DNA, 496 bp, Homo sapiens
tcaccagccactacaaaaatgcaccgaagtacacagactagtaatgctaaaaaccaaccacatacacaagtctgcaaaataactagctgacagcatgaygacaggatctaatccacacataccattactaaccttaaatggaaatgggttaaatgctccgattgaaagacacaggggggcaagctggataaagaaccaagacccatttgactatgccgtctccaagaaacccatctcacatgcagtgccatacataggctcaaaatgaaggaatggtgaaaaatctttcaagcaaatggaaaacagaagaaatcaggtgttgcactcctattttcgacaaaacgtatataccaataaagataaaaaaagacagagaaggacattacaaaggtggtcctgacctttgataaatctcattattgattgataccaacctgggctatctttattgcccaaaccaacaggataatttgctgaggttgtggagcttctcccc

SEQ ID NO: 143552 - DNA, 562 bp, Homo sapiens
gcactaaatatggaaagaaaagaccatcaccagccactacaaaaatgcaccgaagtacacagactagtaatgctaaaaaccaaccacatacacaagtctgcaaaataactagctgacagcatgatgacaggatctaatccacacataccattactaaccttaaatggaaatgggttaaatgctccgattgaaagacacaggggggcaagctggataaagaaccaagacccatttgactatgccgtctccaagaaacccatytcacatgcagtgccatacataggctcaaaatgaaggaatggtgaaaaatctttcaagcaaatggaaaacagaagaaatcaggtgttgcactcctattttcgacaaaacgtatataccaataaagataaaaaaagacagagaaggacattacaaaggtggtcctgacctttgataaatctcattattgattgataccaacctgggctatctttattgcccaaaccaacaggataatttgctgaggttgtggagcttctcccctgcaaagagtccctgatctcccaaaatctggttgagatct

SEQ ID NO: 143553 - DNA, 541 bp, Homo sapiens
gaaatgacactttaaaaaacaatgaaactacatcttcaaaattaaaaaaaaaactgtcaactccaaattctataactagaaaaagtaattcttgagaaaataaagatttattcagataaaagaaagcttcgaacaaytgtcattagcagacctagatacaagaaatgcaaacggaaattttttaggctaaagaaagataacaacagatggaaattctgacctacaggaagcaaggagaagctctaggaatggcatgtgcataaacatgaaaaactaaggcttttttcttttagttttataacaaacaactgatggcttaaataaaaaattaagtgtactattgataatgtatgtagagtaaaatattctaaattaatagctctgacaggagactaaacgcaaaaattttaccacaacttttctttatgttacatgaaaacgttgactattaacagtaagtggactgtgataagcccaggatgtttattataatccctagagaaccaccacattatatgaagatattcttctaaaatgccaa

SEQ ID NO: 143554 - DNA, 496 bp, Homo sapiens
tcaccagccactacaaaaatgcaccgaagtacacagactagtaatgctaaaaaccaaccacatacacaagtctgcaaaataactagctgacagcatgatgacaggatctaatccacacataccattactaaccttaaatggaaatgggttaaatgctccgattgaaagacacaggggggcaagctggataaagaaccaagacccatttgactatgccgtctccaagaaacccatctcacatgcagtgccatacataggctcaaaatgaaggaatggtgaaaaatctttcaagcaaatggaaaacagaagaaatcaggtgttrcactcctattttcgacaaaacgtatataccaataaagataaaaaaagacagagaaggacattacaaaggtggtcctgacctttgataaatctcattattgattgataccaacctgggctatctttattgcccaaaccaacaggataatttgctgaggttgtggagcttctcccc

SEQ ID NO: 143555 - DNA, 496 bp, Homo sapiens
tcaccagccactacaaaaatgcaccgaagtacacagactagtaatgctaaaaaccaaccacatacacaagtctgcaaaataactagctgacagcatgatgacaggatctaatccacacataccattactaaccttaaatggaaatgggttaaatgctccgattgaaagacacaggggggcaagctggataaagaaccaagacccatttgactatgccgtctccaagaaacccatctcacatgcagtgccatacataggctcaaaatgaaggaatggtgaaaaatctttcaagcaaatggaaaacagaagaaatcaggtgttgcactccyattttcgacaaaacgtatataccaataaagataaaaaaagacagagaaggacattacaaaggtggtcctgacctttgataaatctcattattgattgataccaacctgggctatctttattgcccaaaccaacaggataatttgctgaggttgtggagcttctcccc

SEQ ID NO: 143556 - DNA, 496 bp, Homo sapiens
tcaccagccactacaaaaatgcaccgaagtacacagactagtaatgctaaaaaccaaccacatacacaagtctgcaaaataactagctgacagcatgatgacaggatctaatccacacataccattactaaccttaaatggaaatgggttaaatgctccgattgaaagacacaggggggcaagctggataaagaaccaagacccatttgactatgccgtctccaagaaacccatctcacatgcagtgccatacataggctcaaaatgaaggaatggtgaaaaatctttcaagcaaatggaaaacagaagaaatcaggtgttgcactcctaktttcgacaaaacgtatataccaataaagataaaaaaagacagagaaggacattacaaaggtggtcctgacctttgataaatctcattattgattgataccaacctgggctatctttattgcccaaaccaacaggataatttgctgaggttgtggagcttctcccc

SEQ ID NO: 143557 - DNA, 541 bp, Homo sapiens
gaaatgacactttaaaaaacaatgaaactacatcttcaaaattaaaaaaaaaactgtcaactccaaattctataactagaaaaagtaattcttgagaaaataaagatttattcagataaaagaaagcttcgaacaattgtcattagcagacctagatacaagaaatgcaaacggaaattttttaggctaaagaaagataacaacagatggaaattctgacctacaggaagcaaggagaagctctaggaatggcatgtgcataaacatgaaaaactaaggcttttttcttttagttttataacaaacaactgatggcttaaataaaaaattaagtgtactattgataatgtatgtagagtaaaatattctaaattaatagctctgacaggagactaaacgcaaaaattttrccacaacttttctttatgttacatgaaaacgttgactattaacagtaagtggactgtgataagcccaggatgtttattataatccctagagaaccaccacattatatgaagatattcttctaaaatgccaa

SEQ ID NO: 143558 - DNA, 541 bp, Homo sapiens
gaaatgacactttaaaaaacaatgaaactacatcttcaaaattaaaaaaaaaactgtcaactccaaattctataactagaaaaagtaattcttgagaaaataaagatttattcagataaaagaaagcttcgaacaattgtcattagcagacctagatacaagaaatgcaaacggaaattttttaggctaaagaaagataacaacagatggaaattctgacctacaggaagcaaggagaagctctaggaatggcatgtgcataaacatgaaaaactaaggcttttttcttttagttttataacaaacaactgatggcttaaataaaaaattaagtgtactattgataatgtatgtagagtaaaatattctaaattaatagctctgacaggagactaaacgcaaaaattttaccacaacttttctttatgttacatgaaaaygttgactattaacagtaagtggactgtgataagcccaggatgtttattataatccctagagaaccaccacattatatgaagatattcttctaaaatgccaa

SEQ ID NO: 143559 - DNA, 633 bp, Homo sapiens
aaatattaattggaaaaaggtggaggtcagacattgatagtgctgtggactgctccagggacgtaagcatgatctttagagaggtgactctaatcagtcaagggcaaccactggacagaaagaagtccagaccaaccgtacacagagacatcatacaactacactttagcaacctctccaaataacatgtctcttagtgaaacttgggaggttgaaagttaaaaacaaaatccagtgacatttatgtatcctaggcacttacatttgtctgattcttccaacttgcctttgcttggttagagttttgggtagataagaggtggatttacatgtgctagtgtgagaactttgatasactcatttagacattgacctactatcttgatgtttgaaagctaaaacccaaagaaatttgtctttttacataaaacaaattcagcccttgccttccttgtggattacatcttccactagcagtaataaaaaagtaacaatatgcataagtcaaagtatcttcttagatcctctgtagtgttttattatttagttgtgttaattaaagtaactgtctcaaaatttcaaggaattcctgagaagcaattcatgttcaaagggcttccctcttgtgacaat

SEQ ID NO: 143560 - DNA, 633 bp, Homo sapiens
aaatattaattggaaaaaggtggaggtcagacattgatagtgctgtggactgctccagggacgtaagcatgatctttagagaggtgactctaatcagtcaagggcaaccactggacagaaagaagtccagaccaaccgtacacagagacatcatacaactacactttagcaacctctccaaataacatgtctcttagtgaaacttgggaggttgaaagttaaaaacaaaatccagtgacatttatgtatcctaggcacttacatttgtctgattcttccaacttgcctttgcttggttagagttttgggtagataagaggtggatttacatgtgctagtgtgagaactttgatagactcatttagacattgacctactatcttgatgtttgaaagctaaaacccaaagaaatttgtctttttacataaaacaaattcagcccttgccttccttgtrgattacatcttccactagcagtaataaaaaagtaacaatatgcataagtcaaagtatcttcttagatcctctgtagtgttttattatttagttgtgttaattaaagtaactgtctcaaaatttcaaggaattcctgagaagcaattcatgttcaaagggcttccctcttgtgacaat

SEQ ID NO: 143561 - DNA, 511 bp, Homo sapiens
catctacgttaccacacagagcttacttctttcagagtgtatacatttctctcctaacggtctgtatggtattattgcatagttctaaaaaccttgctgaggcagaaatttcatttaatgatatagcttcgaaaacaatgaaaaacagtagaaactttctatttttttatgaagcagaattgttgaattttcagtttcatttatttaatgttacaagatgacaaacatatttctttaattccctcttgttatttttgtctaacatcaagcaaagccatttctttcatttgaaggtgaaaactgctcatcaaaatccagtttaagctgagaaacaaagaactaaattttgcatgagagattatacactgcataagtataaaagaggaccagaaacaatggtggattagcaatttttgaaaagacaaaagcaggttawcatcaaatcaattgttaccaacaccccaattccacctctaggccagaaaattagccacttacccacgggaaaaca

SEQ ID NO: 143562 - DNA, 633 bp, Homo sapiens
aaatattaattggaaaaaggtggaggtcagacattgatagtgctgtggactgctccagggacgtaagcatgatctttagagaggtgactctaatcagtcaagggcaaccactggacagaaagaagtccagaccaaccgtacacagagacatcatacaactacactttagcaacctctccaaataacatgtctcttagtgaaacttgggaggttgaaagttaaaaacaaaatccagtgacatttatgtatcctaggcacttacatttgtctgattcttccaacttgcctttgcttggttagagttttgggtagataagaggtggatttacatgtgctagtgtgagaactttgatagactcatttagacattgacctactatcttgatgtttgaaagctaaaacccaaagaaatttgtctttttacataaaacaaattcagcccttgccttccttgtggattacatcttccactagcagtaataaaaaagtaacaatatgcataagtcaaagtatcttcttagatcctctgtagtgttttattatttagttgtgttaattaaagtaactgtctcaaaatttcaaggaatkcctgagaagcaattcatgttcaaagggcttccctcttgtgacaat

SEQ ID NO: 143563 - DNA, 577 bp, Homo sapiens
catcatattgagagagactcctttaaacaagcaataagaaacttcctgtgacaacataataaattcaaaaagttctgtaactcagacaatttagatagaagtgaggactttggcctagacagccctgttcactctaaaggtggattaaacaaggaaaaatatattgatatcaaaaattcaatcaggaatttgattaaagcatttcattaaatgtgataatttcttagtatattatcttacatatgcaatattcatgtgtaacaaattaaatacaagtaaacatttgagcatattatctgcagcataatttacatattcagttttgcttacatgaaaacttsgatcttctcaataagaaaatttgtgaaatctttaattcctcatccccaggaatgtaaataaataaatataaatattgtaagtcagtgattttttcctaggaagacagtaaaaatactttacacgccttctcattgtaaacctaaataacaaacagagaaaggctctctaaagggaaaagacacatcttagggaggagggcactgcaatgggaatatgcatgacaaagcaaactgtg

SEQ ID NO: 143564 - DNA, 577 bp, Homo sapiens
catcatattgagagagactcctttaaacaagcaataagaaacttcctgtgacaacataataaattcaaaaagttctgtaactcagacaatttagatagaagtgaggactttggcctagacagccctgttcactctaaaggtggattaaacaaggaaaaatatattgatatcaaaaattcaatcaggaatttgattaaagcatttcattaaatgtgataatttcttagtatattatcttacatatgcaatattcatgtgtaacaaattaaatacaagtaaacatttgagcatattatctgcagcataatttacatattcagttttgcttacatgaaaacttcgatcttctcaataagaaaatttgtgaaatctttaattcctcatccccaggaatgtaaataaataaatataaataytgtaagtcagtgattttttcctaggaagacagtaaaaatactttacacgccttctcattgtaaacctaaataacaaacagagaaaggctctctaaagggaaaagacacatcttagggaggagggcactgcaatgggaatatgcatgacaaagcaaactgtg

SEQ ID NO: 143565 - DNA, 278 bp, Homo sapiens
gttctagaggctgagaagtccaaggtcaagggccccacatttggccagggcctttttgctacatcctcttattgcagaaggctgaaggaaaagagaccaagagaggaccaaatttgcttttataacaacccactctcaccataacaacattaatccagtcaggaaagtggagccttaatggcctaatccctctccatcgtcccatctcttmatattgccacagtgactgtcatgttccaacatgagttttggaggggacattcaaaccatagaaggtg

SEQ ID NO: 143566 - DNA, 519 bp, Homo sapiens
taattgccctttggattacttagagcattttatagactcagttttgagtggggagaagtagattctcaaaactttgattcttagaatttctgtgaacttgacatttgctcaacaattttggggagtgtgtgtgtgtgtctgtgtatatatgtgtgtgtgatggggaggatatatagctttgatatccaagacattagggatgcttgtagccatctgaggacttctgtaggcaacatattctcagaagaraacaaaaactcaaataacaacataagacacagtagtccctccttttctgaggttttgctttccatagttccagttacccatggtgcagtaaattcgatgttttgagaaagagagaccacgttcacataacttttactacaatatattgttaaaattgttctattttattattgttgttgttcattctttactgtgcctaatttataaattaaacttcatcataggtatgtgtgtgtaggaaaaaaaaattagtatatatagggtttggtg

SEQ ID NO: 143567 - DNA, 353 bp, Homo sapiens
ttggtgctggttattcaataaactaagaaaatcacaaaaaatgcagttatttcaggaaaaacaaaaaagttgtgtgacaaagaaaatgtaattacagcactgactcaagagtgggtaatatttacataatcgccaggtggctgcagggttcccctcttgctgggcagccctggaacacctcctttccctttgttcctccmgcgttgggagaggcagcagctgaacttaccgatttctgtttgcttttttcagcaattctaacactttctaactaataccctatattaaatctccctctattgagttatctggcatgagtatatggagtctgactggtcagtcaattaataatt

SEQ ID NO: 143568 - DNA, 600 bp, Homo sapiens
atgtctataaaatcacgaaggaaaaatgttatgacccacaagattaagctttaattgtactggtaatgtttcactccctccttcattagaaaaatttaaatactacaggtaacattaatggggtgtttgaccactgcccactcccaacaccacacacatgcacacacacacacacgcatgcacacatatgtgcacacagtgaaamtacctttcttaagagagataactactgttgaaaatttagtatgtatcctttcagaattttctctatacatttacatatatacacatgtatctaaaaaaatacataatactagtttgtgagaatgagagagtaggatccttgagaattttctacttgggtaagttgcctttcatttgggaaagcaacaaaaagacattcccagataaacaagtactatgtgtgtgtgtgtgtgtgtgtatatatatatatatatacacacacactatatatatatatttagtgtatatatactatatatactgtatatatagtgtgtataaatatatatatcacacatgtattcttttcaaaggaagttttttgaaaaaccgtttcattgaagggaagatacagaa

SEQ ID NO: 143569 - DNA, 600 bp, Homo sapiens
atgtctataaaatcacgaaggaaaaatgttatgacccacaagattaagctttaattgtactggtaatgtttcactccctccttcattagaaaaatttaaatactacaggtaacattaatggggtgtttgaccactgcccactcccaacaccacacacatgcacacacacacacacgcatgcacacatatgtgcacacagtgaaaatacctttcttaagagagataactactgttgaaaatttagtatgtatcctttcagaattttctctatacatttacatatatacacatgtatctaaaaaaatacataatactagtttgtgagaatgagagagtaggatccttgagaattttctacttgggtaagttgcctttcatttgggaaagcaacaaaaagacattcccagataaacaagtactatgtgtgtgtgtgtgtgtgtgtatatatatatatatatayacacacactatatatatatatttagtgtatatatactatatatactgtatatatagtgtgtataaatatatatatcacacatgtattcttttcaaaggaagttttttgaaaaaccgtttcattgaagggaagatacagaa

SEQ ID NO: 143570 - DNA, 548 bp, Homo sapiens
ttgtctatttctcctcagagtttcatcaactaagagccatgtaattaggtatatgcaagattaaaattgttgtatctttgtagtgaattaaagctttaactattatttagatactctatctctagtaaagccttttgctttaaagtctgttttatctgataataatatacatagctatgccaaattgtttttggttactatttgcctgcatatactttttctcatgcttttagtttcaacttttctgtgttcttatgtttaaagtctcatataaacagtcattggatagattatttaaaattcagtgkgaccagctttgtcctttaactaaaaggttcaatttgtgatttttttcccactgccttctggcttctgttgttattgaaagattacctatctttttgtaggtaatatctttttttctcttgctgcttttaagatcttttgtttgattattgtgttctgccattttacaacagcagatgcatatgggtgtaaacacaatgagtttataagtgggttttcttttagttgttatgcttggaatt

SEQ ID NO: 143571 - DNA, 634 bp, Homo sapiens
gcaagcggcaagtaacaactcatactagaatattgctgagaggggaacaagagcatgaagacagactctctctgaggcacaactcaaagagaagaccaaaaactgaggaaggaaaagacattaataaaagccctctaataaaccagctctcaccctaaacacaaggcaatactagaggagttttaagccttcaggacactgaggcttcaaattatgacaacaaatyccaaacccagtttactaaaatcctagcagaaggaaaagtgtgccctttccaggccataaaagctatttacagttactactatcctatacaagatgtctatctttttttaaaaaaattataaggcatatgaaaaagaaagaagaaaacaaaattgtcaagagacaaaacaaaacaaaaaaaccactaggcatatcatactaaaactgcagaaaacacaagacaagtaaaaaaaagaagaaaactttaacagagtcatgggaaaaaatacattacatataagggaacaaagataagaatgataagagacttcttgttagaaaccaagcaagccagaagacaattaagtgactatttaatgggcaaaaagaaaaaacaaaaaaaaaactggaattctataaccagcaaaaa

SEQ ID NO: 143572 - DNA, 576 bp, Homo sapiens
agatatgctatttatcttgatgtgatcattacacattgtatacatatatcaaaatatttcactgtactccatagatatgcacaattattatgtgtcaactaaaaataataaagcaaaaaaaaggagtaggagtttctgaatttccatttagctgtggaagcctcatactagcccaagctcatgtggaacagtcaaaagcaggaaagcagctcttgctgaagtagaggtaggctccagagtcagggaagtgacattttgatactggccactgttttgatgaaggaacattttaattcaggagaagatacaatccgttaaacttttaccttaaaattttaccaattttcagtcacgtgtgatggcacatgcctatagtcccagytacttgggaggctaaggtaggaggatcacctgagcctgggagacagaggttgtagtgagccaagatcacaccactgccctccaacctgggcaaccaagcaaggccctgtctcaaaaaaaaattaccaattctcttttaattagcaaatgtagtcaattgaataatagcccccctcccccgcaaaaaataagttc

SEQ ID NO: 143573 - DNA, 545 bp, Homo sapiens
tcctgtcctcagttggttctagggaagaaccatgttgcctctggagcatccagatgcatgagattttctctgatatgtaaacatgtctgaatggtctcgtgccaggagaacccattagttcatgtgatgacttcagatggcatctgaaagatagtcttgctcacaggtggctttgtccagatgaagattcagttgacatcagtggcatgggaggggctcttcttgagcggggcaggtgcctcaggaggctcaaggagcaggagcaygttgtggctctcctgacagctcttcagacttggtttaccctgtccaagggctttcaaaaggaaagttaagcttgatgtggcctcttggtcactctggagccatttctctgctctgcatcagaagaggtccaaggaactggagtctacctctctaaggatcttgatatatcttagaaccataggaaaagtttagctggaaaacatttaaataaatccatctgcacatccctatctcatatttgaaagatatagcaagggtaaggctcattttgtgttttc

SEQ ID NO: 143574 - DNA, 653 bp, Homo sapiens
attaatacacagcattatttaagtcagataggaagaaaaaccactccttgtagttgctagtcttcaaaattaagctgaaagattatgctcttttccctcaagttttataagcttttattttgtagtgatatgaacttatgtcagtatcaactagtttatagaaacctccacttctgagatagattgtcatatggttggtaactactgtttatagagtttaaatctgctaacaattttgattaaggggtaaagtgaaaatgcatgttagttaagtctccagcttcaattgtccatgtacttacaaacaacaagcagtgagcagwggcccccaagagggaaaacacctacagtgaaatcttgtacctcagtgagtcagaagagaaaagctttgtttttcacattaactttagattaatgtggctttgttttcaaataccatatgccaagtttaatgtctgttgccttttcctggaaagttcagaaaatcaaacttgtgaaagatcacttgggacatgaagcatgctgggcagggtatctgtgaaatgaacatgcaggatgatggaacgctcttcccatagctttagggaggtaggacggtcatctcgtatcattatctgcaactgcctccacctctcattcattatcatttccca

SEQ ID NO: 143575 - DNA, 651 bp, Homo sapiens
gtccaatcaacttgacagcattcttcagttaaaagcaagtcactacatccagatgactttcaatgagggaggaaagcagggatcatggggccatgttaaagtcatcctgacacaagtgtgttcagcatattaatatctactaacctcttcctcttgttttctttctgacatatgacgctcttaaaggaaaaaaaaaataaaagttgtaagtgagaaagggaccagaacatatgtgctttttgtgttgcttatatagcagtgtggtaggtcgatggtatggcaatgagcttgagactttcataatagcaaaggcattgcagtaagtgagcataagagacaatatttcataaagaagataaatatcaagatagcatctttgttttgttagtcatggtatttagtggctgcgtaaacagagtgagatcaattgtagttcaaaaggactggagatgaaactgaagttaggaaagttgagagaacaaaaaaataaaaaagatgagatgcaaaatatggagtagccacagggaacaaaaattggtgaaagagcaaagatgtttaaagatgatttgggggaagttttgctrtgcaaaattcaatttaactgtctctttcatagtgtcatgacattttccataaaatgttcgtatatat

SEQ ID NO: 143576 - DNA, 630 bp, Homo sapiens
gtaacctacttactcttatgttattaaaatggaaaatttcaacgcagcacttaaattccaccagaccctctttttccaaatgcaattctaacttaaattgtttttaaactaaggttaacctaaaaagttaaaacctataatttctgacatgtattttkttcttattatttataagcttgattatttatgagcttgaagttgtactattctgaggtactaaagaagaatgctgaattcatatttaaggtatgagtgtaaaaatagagaaccaacagaaacatggcctgaacatctttccttcatctttcaaccagaatatgtcccaacaaagtgaattatgtttcgttctcctttttttcttttcccctttttaggaactatagctgtctcacataacaaaaatgttttcatacacgttttattttaaacttgtctaagtcccgatctgttttcttaacatttgctttatttttaataattcactcagaatatataacatctgcttaaaacctttgaccaaatcagctttattgatataaatcaacaaaccaattgcaattcagggaaaaactgccataaaattcttgtgtaacccattgctgaatcactgtgaagggactaatgtttgga

SEQ ID NO: 143577 - DNA, 592 bp, Homo sapiens
cttgttatatcttagcaaagagactggtggcattttgytcccaccctagaggtctgtggaattttgaacttgaaaaagatgatttagggtatctggcagaagaaatttctaagcagcaaagcattcaagaagtgacctggcttttggtaaaagtgtatgcccatattcgttcacaaagaaaaaatcagaaattggaagttaaagggaagcagaccgtaaaagtttgaaaaatttgcagcctgaccatgcagtaaaaaagaaaaacctatcttctggcaataaattcaagctggctgcagatatttgcataagtaatgaggagcccaatgttaatggcaaagacaatgaggaaagtacctccagggcatgtcagagatcttcacagcagcccctcccatcgcaagcctggcagcctagtagggagaaatggttttatgggtcaggccagggccctgctcctctgttcagccttgggacattgtaccctgcatcccagccactccagctccagccgtggctaaaaggggccaaggtacagctcaaactatggcttaagaggatgcaatccccaagtcttacagcttccacgtgg

SEQ ID NO: 143578 - DNA, 591 bp, Homo sapiens
tcattcctttgtaggaactaaatctcatttgcaaagaggcttttaagcctgtttaaatgatgaaacaagccttctaacccttatgtaaatggtccagattagcaagaacaatgtactggctggccaattttatctccttttctttatgtctagctgctctattgtagtgtttgagaggagattagctgcttggatatagggagggaggaaagcgtaggaaaatcaaaccagatttttgtagctttttctcttttgctttacccctttggaagttttattttaattttcacaggcttagaaaaatagaaaggacagctcttagaaaatcaggggatgttatctgaggccactaagagaaatggcatggcatagcatagtgaaaacmgcaatggaaacattgcttcagacaagtaatatttggtggattgactttttttagtagggctgtgaagagaacttctaatatttatgtgataatatttaagcatcctgagtgaacacagtcatcagtggaagagttatacgatactttgttttaaactttgtagtacagttgtatatttacattttgactggagaggggtcgatgct

SEQ ID NO: 143579 - DNA, 450 bp, Homo sapiens
tttctgtgcctgcttatttatttcagcataatatcctccaggttcattgttgcaaatgacagaattttcttctttttaaaggctaaatagtattccattgtgtatatatataccacattttgtttatgcattgatccaatgatggacacctgcagtggttccataacttagctattatgaataatgctgcaatgaacttgggaatgcagatatcactgtgacatgctgtttttaattctaaagcttctgcacagcaaaggcaacactgaatagagccaacccacagastgggagaaaatatttgtaaaccatactctgatagggggctaatatccagaatatataaggaactcaaacaactcaataactagaaagcaaagaacccaatttaaaaatgggcaaaggattgaaataaacatatctcagaaaaagacatacacatggccaaca

SEQ ID NO: 143580 - DNA, 450 bp, Homo sapiens
tttctgtgcctgcttatttatttcagcataatatcctccaggttcattgttgcaaatgacagaattttcttctttttaaaggctaaatagtattccattgtgtatatatataccacattttgtttatgcattgatccaatgatggacacctgcagtggttccataacttagctattatgaataatgctgcaatgaacttgggaatgcagatatcactgtgacatgctgtttttaattctaaagcttctgcacagcaaaggcaacactgaatagagccaacccacagactgggagaaaatatttgtaaaccatactctgatagggggctaatatccaraatatataaggaactcaaacaactcaataactagaaagcaaagaacccaatttaaaaatgggcaaaggattgaaataaacatatctcagaaaaagacatacacatggccaaca

SEQ ID NO: 143581 - DNA, 553 bp, Homo sapiens
cctgcttaattagcttaatattcaactttctgaattctttttctggcaattcagatttcctcttgacttggatccattgcttgtgagctcgtatgatcttttgagggtgttaaagaacctcattttctcatattaccagaattgttttactggttccttataatttgcgcagactatgttagaaggaagatgtaggattcaagaactgctgttcagattcttttgtcccttagtgtgttcccytgatgttgtgttctcccccttcccctaggaatgaggcttcctgagagctgaactgtagtgagtgtttttgctcttctggttctagccatccagtggagctaccgggctctgggctggtactggggagtgtctgcaaagagtcctgtgatgtgatcagtcttcaggtcttgcagctgtggataccagcaccttccccgggggaggtagcaggggagtgaagtggaccctgtaagggactttggttatgtttttgtttagtgtgctggttctgtgttggttggcctccagccagaaagtagtgctttcaaga

SEQ ID NO: 143582 - DNA, 471 bp, Homo sapiens
tgggtttctaaagacaagtttgaattagtgacatagtttasggagtagccaacttatagttgatctgtttggaccttaaacagaacaggcctaaagagattactcctcagaatccacacttctcaattccttctctcctttgctcttatcctgacacaaacagccccaaggagtgtgccagcggtagatatgtgacgtgcagctgcagtgaattcatgcaaggcaagatgtttggtttagtttttttcctttacttctttaatctttaagtgccactagaactgcaataaatattgttggacttaaaacttaccgaatgaatctgggattttttcatctggagaatggagtattggtagtgactcttctgtcctttcttccaggttgtctccttgaagcctaaataattaaaaatgatcattgaaacatctcataatgttaaattgtgaaatgtgaactatgcaccatggg

SEQ ID NO: 143583 - DNA, 330 bp, Homo sapiens
tatgtctcaagtgcttgcagaagaactaacatgaagggttggtgggggtgtaactctattttgctttactcctcttgattccaaacagaaaaagaaacaaataactgtgatatatacacatttgaaacatgggtagaaatgaaaatgacaaatttgatgtctrgaaaaaggtataagtttcagaaagaaaaaacgtatctcaacaacttttaaatatacatgagagtaaaatatcagaacctgtacatagtctttccaaaaatcatgtgaaaaaaaggtggtagctagataacaataaaaaaagtcacatttattattttttggaatacc

SEQ ID NO: 143584 - DNA, 485 bp, Homo sapiens
atattgcagttatctgacaaagattttaaagtagccatcctagaagtgactcaataagaaatcaagaattgaattgaatcaaatgaaaaggataaaatgaatctcarcagagaaatagtagtcaaaagagactcaagcacaaattataaaagttaaaaatataataactgaaaataatttttaaaaacttacaggatgggttcaacagtagagtggagatgacagagaataaaatcagtaaacttgaggacagagcaataaaatttaactaatctgaacaacaaagagaaaaataagacaaaaaaaacagtcttagggacatgtggaacaatcacaaaaaagttaacatgtgtaccgttggagtctcagaaaaaaagagaatgggactgaataaagtatttgaagaaataatgcttgagaaacataaacctatggattcaagaatatgagcaatcccaaatagtgtaaaccccaagaaatccata

SEQ ID NO: 143585 - DNA, 485 bp, Homo sapiens
atattgcagttatctgacaaagattttaaagtagccatcctagaagtgactcaataagaaatcaagaattgaattgaatcaaatgaaaaggataaaatgaatctcagcagagaaatagtagtcaaaagagactcaagcacamattataaaagttaaaaatataataactgaaaataatttttaaaaacttacaggatgggttcaacagtagagtggagatgacagagaataaaatcagtaaacttgaggacagagcaataaaatttaactaatctgaacaacaaagagaaaaataagacaaaaaaaacagtcttagggacatgtggaacaatcacaaaaaagttaacatgtgtaccgttggagtctcagaaaaaaagagaatgggactgaataaagtatttgaagaaataatgcttgagaaacataaacctatggattcaagaatatgagcaatcccaaatagtgtaaaccccaagaaatccata

SEQ ID NO: 143586 - DNA, 314 bp, Homo sapiens
gatactaatcttatgctaattttgygagcaaagtgaaataaggtagaatagataatatgtcaggtaggtgaataatttctgattgaacaatgaggttcagagcatatcacatagtcatgagatagacaataagctaaggtaaaatctcttgtagtatcataatactcacaaaagttaatatttttgtcattttttctcagtatttgaattaagataattatttcacctatcaaatattaatacttacatatgtatacagatgttgaaatagcagctaatattattaaaaaattgagtcaaaatcaaaaagatct

SEQ ID NO: 143587 - DNA, 525 bp, Homo sapiens
catcattgggtggtggtaaaattggtcactgtattcaaagatcatatcactacctatggatatggatgtgattgaaatgacagacaggggagaattttttttaacttactagccatgtaatgattttttaaaatttattgctagaaaatcttcactattaccaaacttgcctcaataaatgatgttacgtataaatagcaacagcgatgtcagaagacctccttagcatttcttttcctggtatgatatggctgtctgtaagaagagagtaaacatagatagctcttgcttcttacggtatttcagaatccccctagaagttttttatattaaaaaacaaacaaaaaaaaaacacaaaactcccaaaccacccagacaaacccacccagcctaggtatgagaatgttctttcaggcctagagccagtcagggtccttagctttgtttgmaagatgccagtgcctttatactcagacttcgtggagctgccaccatacttctgtagtaatagcagtagtgagtggg

SEQ ID NO: 143588 - DNA, 596 bp, Homo sapiens
gaattctactgtttatctaatcagccctttgaaaaaggtgatgtgggagagcagaaaactgtacttgtactaacaggagttaagagcatgagctttgcagcctcaccagacctagactgtatttcccactctgtgacttgctgtttaagtgaccttgagcaaacgacttcacttctcatagcctcrgtttcctcctctgtaaaatgaggatagccccggcagtcttgaggagatttttaaagattatctggtcaggtacagagtggctcacacctgtaatcccaatactttgggaagctgaggcaggcggatcacctgaggtcagaagttcaagaccagcctggccaatatggggaaaccccatccctaggaaaaatacaaaaattagccaggtgtggtggtgggtgccggtagtcccagctactcaggaggctgaggcaggagaattgcttgaacccaagaagcagagattgcagtgagctgagatcataccactgcactccagcctgagcaagactccgtatcaaaaaaataaaaaatagagattatataaaattatgtaaataaaatgctcagcatagactgtagcagtcttt

SEQ ID NO: 143589 - DNA, 596 bp, Homo sapiens
gaattctactgtttatctaatcagccctttgaaaaaggtgatgtgggagagcagaaaactgtacttgtactaacaggagttaagagcatgagctttgcagcctcaccagacctagactgtatttcccactctgtgacttgctgtttaagtgaccttgagcaaacgacttcacttctcatagcctcggtttcctcctctgtaaaatgaggatagccccggcagtcttgaggagatttttaaagattatctggtcaggtacagagtggctcacacmtgtaatcccaatactttgggaagctgaggcaggcggatcacctgaggtcagaagttcaagaccagcctggccaatatggggaaaccccatccctaggaaaaatacaaaaattagccaggtgtggtggtgggtgccggtagtcccagctactcaggaggctgaggcaggagaattgcttgaacccaagaagcagagattgcagtgagctgagatcataccactgcactccagcctgagcaagactccgtatcaaaaaaataaaaaatagagattatataaaattatgtaaataaaatgctcagcatagactgtagcagtcttt

SEQ ID NO: 143590 - DNA, 476 bp, Homo sapiens
cattcccaccatgtgtaagaattccctttactctgcagcctcaccagcatctgtttttggactttctaataatagccattctgactggtatgagatggtatctcattgtaatttagatttacatttctctgatgattactaatactgagtgttttttcatgtttgttggccacctctgtgtcttcttttgagaaatgttgattcatgtcctttgcccrtttttaaagggggttatttggttttagcttgttgatttaagttccctactgtatagattcttggtattaggcctttgttggatacatcatttgtgaatatcttctcccattctgtaggttacctgttggctttgttgatagcttcttttttttattattattatactttaagttttagggtacatgtgcacaatgtgcaggtttgttacatatgtatacatgtgtcatgttggtgtgctgcacccattaacattaggt

SEQ ID NO: 143591 - DNA, 634 bp, Homo sapiens
agtaaaatggttgagccgtgatctggagttacttttttaaatttttaaacattaaaaatagaggtagagtctcactatgttccccagactggtctcaaactcctaagttatcctcccacctaagcctcccaaagcgctatgcaggcaactcttctttccaagagtggcgctagataaacatcattccccagatgtcccctgcttccctagactttttagatgaagcaggaaactcctcttatggtgctgtcaccttacaaaatctcacagctgggggtgcatgtgaaagagcccccgcatacttgggagccagcagattcgatccggtagccacagctgagagacagctcagaaagcatgtggtaaatgtaactaatgcagataggaaagggctggacctccaatcagctggcacattcttaagtagagaatgctattgtcctgaagggaaattctatctgaaaccaacaaaatcatattcatgggactttatgtgaatttcaaaaaagataggaatttcawtcctggaaaatgagatgtggcaattttaaaatactttaccaactctctaaactaagagatcaattggcaaatatttgctgaaatctgctgatagaaataaagggaaaagcgt

SEQ ID NO: 143592 - DNA, 403 bp, Homo sapiens
gggtaaggttcgtgagggaagaaagttgcagaaagaactaagctgaggctctcttaggatggagtattcctagcgtataaacagaacaacaatggccactggaactgagtgccagttaggtgctggacattgtatacccatttttctgatgctcacggcaatcctgcctgatcactatcatcaygctttttttgtttcggataaggaaattgaggcccatagagattaagtgatttgttcaagtattcgtttttttcttgctactatgacacattgccacagacttgtggcttaaaacaacacatattcatcggagaattctacaggttagaagtataacataggtgtcactgagctaaaattaaggtgtcagcagggctgagttcctttctggaagccctag

SEQ ID NO: 143593 - DNA, 566 bp, Homo sapiens
taactgatgaaaatttaaaccccaaaatcatccccctgccctgctccattccacctcgaggagaaagagccaggagaaaggatgacacgtctatgggaatagatgctgtttattgctttaccatccccaagcacacttgaacactgagtagacactaaggaaatatttacatagggaaggataggattttgctgtgaaagtagatgcaacccaaacgctctacaaacttctatagccaactggaatgaaaaagaatgaacaccaatgctgggcatcaagttgagaaaatcgagagtatcggtttgctccttcttccttttaggggaaatcaaggaccagagggttttgcccaagcttgagtgagaggcaaagtggtgactgacaccaggactkcacccctaaactccaacatttttgccatgacaccaccaccttctgcttccaaaattttccattatgctctactgtctttcctagaagtggaaagaaggacatttttgtcaagattttctgcatcagggtttgaaaattttgatgactttttggttagctgaaaattacccaga

SEQ ID NO: 143594 - DNA, 533 bp, Homo sapiens
ggtggctgccacacacttgcaggtgttaagaacggcacagtttgaactgcagggaggttttactttcagaaaattagcaagcgggggtctttctcctcacgcaaaataacaaggagagagctaggaaaggccccgcctctgaattcgcacttcatcaaggtggaatttcaaactttttgccttcgagaacagcccaagtggaccttggcaatgtcttcaaaggactgtttagtttagtcatgggcagggtacgtttctctctctcctggttctcccaaaacgttctgtgtgcagcccctcctggagaagcagcatcctggcttaggaaggttttgcaagctcatctccatcaccagccatgcaagtcccctcaaggtgtggccagtgctgttggggccccatccaggacactttcgtcaggctgcacctccgcacccggctgtgagggtgatacacycgtcacccccttgccacctttgtcaggctctctcagggaaggacagtagacccaaggagtggctcttgcaggtgta

SEQ ID NO: 143595 - DNA, 506 bp, Homo sapiens
ataaataaaggggcttaaaaagacaagtaatagacttggaaacatatttgcagtatatataacaggcaaataatacatacaaatctaggatatatatagaatcctataaattatattcatcacttaaaaaatctgataacaacaaatattaggaagcatatgaatgaagggcaaactcttactcatggatgagacactctacagcaatcagaatgaatgaatttgatcagtatgtcctgacacgatgagatcttcaaaaacacaatgttgaccttaaaaatcaagctgaagaatgataaatgataaataactatgatacttttatgtgtactttaaagacaccaarcaatattatatattattggtgatttgcaaagtatgaaaacacagattgatatgatttgtgccaaatacataaaacaacataataatcttttaaatttttcttttctatatattgttatataacatttaaggtaatattttacttagaagagaactgtatc

SEQ ID NO: 143596 - DNA, 400 bp, Homo sapiens
agaattcatgggaagaaatgagattgtttttaagacacaggcacctggatttctttgtttaattagcatcagtgaattattaattcagcgcaaaaaagcatagctctttgtcatataaaaaatcatcaataccacaagagaccctcacaaaccaggatgatgataacttacttatatttgcacagtgctttgcaatttacaaggccctgttctgtacttcacggatttaactctgttaactgtgtggaatggagtttttgcccgggctggagccagcaggacagtacagagattttacttcctcaccatcaygccccaaattatggagaaacactccagatttaatcagaagtgcctgggacaagaagtcattaatattcaacaaattttaaaattgcat

SEQ ID NO: 143597 - DNA, 571 bp, Homo sapiens
actaacagccaataaacacataaagtcaccatataacacagcaattacactcctagatatataatcaagagaaatgaaaatgtatgtccacaaaaaaaacttgtacacaaatgctcatagcagcattattgttgctatgagcaacaacagttgaaacagtagaaacaacagtagaaacaactcaaatgtccatcactgacgaatggataagcaaaacgtgttatatctatagaatataacagcattctgcaatgaaactaaggaagtgctggtgcatgctccaacctggaggaaccttgaaaacattatgctcagtaaaaagcagcagacgcaaaagacrtattatgagtctattcctctgctctcacacaacaaccaacacagaagatttctgtgactaaatgtgtggggaattctccctaccaataagcaattcaattctgctgctacctacctggagacagcatcagataccacaggtcaagggctcaatcccacaaggctgcctcctacttccgatgtcaatcgcaagcccccagttgtcttacttgtacttctggccaaccagcta

SEQ ID NO: 143598 - DNA, 549 bp, Homo sapiens
cagtttcagggtgaatcactggaaaggtgaaatagcagctatgacacaagatgacactgagccaggtggcctaaggctcaatccccaggtggggtccacagatagctgaatctgaggggaaacagacagacatccctcaacccctggctttctattcattattctctctcagtgcatactatgcagcatatgccctcatccaaggacaagagccacttcaggtagacaacactcaacagtgtacatcacaaattcatttctttttttttttttttttgagacgaagtctcgctctgtcactccagctggagtgcagtggcatgatctcagctcactgcaacccccgcctcctaggttcragcaattcttctgcctcagcttcccgagtagctgggactacaggcatgcaccaccacactcagctaatttttgtatttttagtagagacaggctgtcaccatactggccaggctggtctacatcacaaattcaaaatcagcaaaaggcatgcaggaaatgctaaggatactctgttcagcataaaagaag

SEQ ID NO: 143599 - DNA, 398 bp, Homo sapiens
atttggtcgtggacaccgtcagccacctcagtagaattggagaggattattttgcattgaataaacttacagccaaaaagacttaaaaaaaaaaaaagaaaaaaattgtattatgtcgcaaatgaacctgttgcaatgatcatacaggttttytcctttgatagtttgtactactttaatagttttttcttttattacataatcttagtttcctaggaaaaccccaacttggtcgtgatacatgtttaatccattgctggattatttgctaatattttatttagcgtttttgcatatatgtccataagaagttagtccatacttttgcctccttgtactatttatgtctggtttggttttaagcctatactaaattcacagtgagttggggagaattc

SEQ ID NO: 143600 - DNA, 477 bp, Homo sapiens
tagttcataagtaactaatctctaaagtctcttccagttytaaatgtcagtgagtccatatgaagcatatttctgttattcaattatcaaagttctaatacagtaccattaggttaaaaagaggcagaaaaggctgggcacagtggctcatgcctgtaatcttagcattttgggaggccgaggtggatcacttgagcccaggagttcaacaccagcctgggcaacatagggagattccgtttctacaaaaaatttgaaaactaattacctgggcaaagtggcacatgcctgtagtcctagttattgggaaggttgaagtgagaggatcgcttgagcccgggaggtcaaagctgcactgagctgtgatcacgccaccgtactccagcctaggcaacagagtgagaccctgtccccacccgccccccaaaaaaagaggcagaaaaagggataaatattttcaatgaattaaacagaatt

SEQ ID NO: 143601 - DNA, 405 bp, Homo sapiens
aaaatggaattcagttataggttcrgccttaaacagtttttttctatctacataaattattcatcaagatattctaggccaggcgcagtggctcatgcttgtaatcccagcactttgggaggccgtggatggatcccctgaggtcaggagttcgagaacagcctggtcaacatggtaaaactccgcctctactaaaaatacaaaaattagccgagcgtggtggcacatctcttaattccagctacttgggaggctgaggcaggacaatcgcttgaacccgggttgcagtgagctgggatcacaccactacactctgtcctgggtgacagagtaagatttggtctcagaaaaaaaaaaaaaagatattctaaagctgtgcagatcataggaaaagttctattttac

SEQ ID NO: 143602 - DNA, 405 bp, Homo sapiens
aaaatggaattcagttataggttcggmcttaaacagtttttttctatctacataaattattcatcaagatattctaggccaggcgcagtggctcatgcttgtaatcccagcactttgggaggccgtggatggatcccctgaggtcaggagttcgagaacagcctggtcaacatggtaaaactccgcctctactaaaaatacaaaaattagccgagcgtggtggcacatctcttaattccagctacttgggaggctgaggcaggacaatcgcttgaacccgggttgcagtgagctgggatcacaccactacactctgtcctgggtgacagagtaagatttggtctcagaaaaaaaaaaaaaagatattctaaagctgtgcagatcataggaaaagttctattttac

SEQ ID NO: 143603 - DNA, 404 bp, Homo sapiens
aaatggaattcagttataggttcggccttaaacagtttttttctatctacataarttattcatcaagatattctaggccaggcgcagtggctcatgcttgtaatcccagcactttgggaggccgtggatggatcccctgaggtcaggagttcgagaacagcctggtcaacatggtaaaactccgcctctactaaaaatacaaaaattagccgagcgtggtggcacatctcttaattccagctacttgggaggctgaggcaggacaatcgcttgaacccgggttgcagtgagctgggatcacaccactacactctgtcctgggtgacagagtaagatttggtctcagaaaaaaaaaaaaaagatattctaaagctgtgcagatcataggaaaagttctattttac

SEQ ID NO: 143604 - DNA, 405 bp, Homo sapiens
aaaatggaattcagttataggttcggccttaaacagtttttttctatctacataaattattcatcaagatattctaggccaggygcagtggctcatgcttgtaatcccagcactttgggaggccgtggatggatcccctgaggtcaggagttcgagaacagcctggtcaacatggtaaaactccgcctctactaaaaatacaaaaattagccgagcgtggtggcacatctcttaattccagctacttgggaggctgaggcaggacaatcgcttgaacccgggttgcagtgagctgggatcacaccactacactctgtcctgggtgacagagtaagatttggtctcagaaaaaaaaaaaaaagatattctaaagctgtgcagatcataggaaaagttctattttac

SEQ ID NO: 143605 - DNA, 405 bp, Homo sapiens
aaaatggaattcagttataggttcggccttaaacagtttttttctatctacataaattattcatcaagatattctaggccaggcgcagtggctcatgcttgtaatcccagcactttgggaggccgtggatggatcccctgaggtcaggagttcgagaacagcctggtcaacatggtaaaactccgcctctactaaaaatacaaaaattagccgagcgtggtggcacatctcttaattccagctacttgggaggctgaggcaggacaatcgcttgaacccgggttgcagtgagctgggatcacaccactacacyctgtcctgggtgacagagtaagatttggtctcagaaaaaaaaaaaaaagatattctaaagctgtgcagatcataggaaaagttctattttac

SEQ ID NO: 143606 - DNA, 405 bp, Homo sapiens
aaaatggaattcagttataggttcggccttaaacagtttttttctatctacataaattattcatcaagatattctaggccaggcgcagtggctcatgcttgtaatcccagcactttgggaggccgtggatggatcccctgaggtcaggagttcgagaacagcctggtcaacatggtaaaactccgcctctactaaaaatacaaaaattagccgagcgtggtggcacatctcttaattccagctacttgggaggctgaggcaggacaatcgcttgaacccgggttgcagtgagctgggatcacaccactacactctgtcctgggtgacagagtaagayttggtctcagaaaaaaaaaaaaaagatattctaaagctgtgcagatcataggaaaagttctattttac

SEQ ID NO: 143607 - DNA, 395 bp, Homo sapiens
agattacagagcagaggagcgaaggagcacagttcacagcacttccagtgtcttggagaaggggaagtggtggaaattaccactctctcttctccaactttgctcaagggtgtcacatcagcacacatcactgagacctctagtccaggaaagtcaaggtttgggggaataaaaagtagctytcctcataaaaacattgtggatcctgcctctgtgttctaagaataatctgaaacaatagtccatgaagtatgcctcatgtatttgtcaaacagtgtttcttaaaaacaccaaaatagatgcactgctcccaaaaataacagggaaaggcactgaaggccttgagcctctccccgacagcaagcaccatgtcctgtgcggtaccttgtacagtt

SEQ ID NO: 143608 - DNA, 419 bp, Homo sapiens
cagagcagaggagcgaaggagcacagttcacagcacttccagtgtcttggagaaggggaagtggtggaaattaccactctctcttctccaactttgctcaagggtgtcacatcagcacacatcactgagacctctagtccaggaaagtcaaggtttgggggaataaaaagtagctctcctcataaaaacattgtggatcctgcctctgtgttctaagaataatctgaaacaatagtccatgaagtatgcctcatgtatttgtcaaacagygtttcttaaaaacaccaaaatagatgcactgctcccaaaaataacagggaaaggcactgaaggccttgagcctctccccgacagcaagcaccatgtcctgtgcggtaccttgtacagttcactggatcctcacatgatcccaggtgggt

SEQ ID NO: 143609 - DNA, 395 bp, Homo sapiens
agattacagagcagaggagcgaaggagcacagttcacagcacttccagtgtcttggagaaggggaagtggtggaaattaccactctctcttctccaactttgctcaagggtgtcacatcagcacacatcactgagacctctagtccaggaaagtcaaggtttgggggaataaaaagtagctctcctcataaaaacattgtggatcctgcctctgtgttctaagaataatctgaaacaatagtccatgaagtatgcctcatgtatttgtcaaacagtgtttcttaaaaacaccaaaatagatgcactrctcccaaaaataacagggaaaggcactgaaggccttgagcctctccccgacagcaagcaccatgtcctgtgcggtaccttgtacagtt

SEQ ID NO: 143610 - DNA, 395 bp, Homo sapiens
agattacagagcagaggagcgaaggagcacagttcacagcacttccagtgtcttggagaaggggaagtggtggaaattaccactctctcttctccaactttgctcaagggtgtcacatcagcacacatcactgagacctctagtccaggaaagtcaaggtttgggggaataaaaagtagctctcctcataaaaacattgtggatcctgcctctgtgttctaagaataatctgaaacaatagtccatgaagtatgcctcatgtatttgtcaaacagtgtttcttaaaaacaccaaaatagatgcactgctcccaaaaataacagggaaaggcactgaaggccttgagcctcyccccgacagcaagcaccatgtcctgtgcggtaccttgtacagtt

SEQ ID NO: 143611 - DNA, 395 bp, Homo sapiens
agattacagagcagaggagcgaaggagcacagttcacagcacttccagtgtcttggagaaggggaagtggtggaaattaccactctctcttctccaactttgctcaagggtgtcacatcagcacacatcactgagacctctagtccaggaaagtcaaggtttgggggaataaaaagtagctctcctcataaaaacattgtggatcctgcctctgtgttctaagaataatctgaaacaatagtccatgaagtatgcctcatgtatttgtcaaacagtgtttcttaaaaacaccaaaatagatgcactgctcccaaaaataacagggaaaggcactgaaggccttgagcctctccccgrcagcaagcaccatgtcctgtgcggtaccttgtacagtt

SEQ ID NO: 143612 - DNA, 401 bp, Homo sapiens
aacgggctccaggcaactgagccctactggcaggtcctcgcctgggcccgaacaggaaggaagcgacagagtgcccaggtaaccgctcctgggagcagtggggaaccgtcggttgcttgaactctcgagagctgggctctgagcgtcctcgtccagccgccaactcsgcaaagggctaagccagcagtttcttctgttgccgggcaacgcgccttttaaacctgagggagtgggcgcgtgagcacatcacggcgcccgtgacagagcgagcttaacggattaataagcgcagccaggtacccgcgcgaggcacttgctggcaatggcgggaggcggacgtggggggtcatgcaataggtactggaaggagagaggcgggcacaaaggttgcgggaggaaca

SEQ ID NO: 143613 - DNA, 401 bp, Homo sapiens
aacgggctccaggcaactgagccctactggcaggtcctcgcctgggcccgaacaggaaggaagcgacagagtgcccaggtaaccgctcctgggagcagtggggaaccgtcggttgcttgaactctcgagagctgggctctgagcgtcctcgtccagccgccaactccgcaaagggctaagccagcagtttcttctgttgccgggcaacgcgccttttaaacctgagggagygggcgcgtgagcacatcacggcgcccgtgacagagcgagcttaacggattaataagcgcagccaggtacccgcgcgaggcacttgctggcaatggcgggaggcggacgtggggggtcatgcaataggtactggaaggagagaggcgggcacaaaggttgcgggaggaaca

SEQ ID NO: 143614 - DNA, 439 bp, Homo sapiens
atctcttgcctggttgatacccacagcctcccctttgggctttatccttatccccgtcatagctgccagagggaccctgtgaaaacactccccagcctgctcattcctctgccctaagcctgcatggcacagagcaaaagccagttgttatgggacctaggaggtcttgtgggatgggccccagctgcatcttcatcctcttctccccaccccactccattcactctttgcctatcgctcaccagcctataycacctgcctcagggcccttgcactgaccatttaggccacattccaggctcttttcacacgttgcctcctctgagaagccctccctgaccactctgcccatacctcatgcctcttgattccccttacctggcttgtggtttcagcactttccctgtgtgtgtttgtttttcttggcatgagggcagga

SEQ ID NO: 143615 - DNA, 595 bp, Homo sapiens
ctccggcaggggacaacaacaggttgagcatgcagctcttccttgcaactgggtctgaaagagctgcaggaggcagtgggtgactcccctgggttacgacaagccggagacctctcccgaggtggtcacatggagcgcccrggacacgagtccttgcgcagtttaggcttgtcatcatcgtcacacccacagcgctggccgccagtgaggaccctgtgaggggcacctgtgtggggtgtgaaccacctgaacgccttttctctacctcgcagggctcagcagcacccggtgaacagcagcaggaggagccgctagagcagctgctcatgggcagagcagcccttgggcaactcctgccaccaccccctccccagggagcccaaggcaggggaggctcagcatggaatgaaacaggggagtgagggacacaaggaggtgggaagtgggagggtcccagccccaccaagtacgcagagacccccttgtcgtcctggacaccacaggggcacctgcaggctgggagaccaggtcctctgtgcatgggcccgggaggcagacctgccccaagggtgatgcagaggccacaggtgctgca

SEQ ID NO: 143616 - DNA, 587 bp, Homo sapiens
attttaaaaaagttatatcttactagatataaggttcttggggctctagttcccttcccagcttcatttgacagacaaggacatggagacaaaataaattgtgatctacccagaaataaacagctaattaacacagggctagaccaagagcacaggtatgctgactcttgcgctggtgttttcttcatcacgcacttgggattttatgttgcgaaatccaatcaatatacacacactggggtgtgcagacttgcgggcatgctcacatgcacacacrcacagacatacatttaactgcattttgcctttttgtcttttcagaagacttcaaatagtgatggttaccaatctgttaactgaaaacctaaagttatgatataactgatctctgccctacagaggggctaagagggaatagaggctttaagccacttagagtccaagataagagattgagatacgcagactaattactccagacatctgaagcccccagttgggtttctggcattgaataagcctgatatagtatgcaaagagtggcatgaagctactttctatctctcatccctaagtacatccccaca

SEQ ID NO: 143617 - DNA, 649 bp, Homo sapiens
gttctaaacttcaagatgggatggaatatggcatctcattctgtaagtttagggagggaagagttgacttgacttcactacagttactgctagagtttgattgatctgacccctccaaatcttgtgttgaaattsgatctccattgtgggaggtagagcttaatgggagaatttgggacatggggccagatccctcattaatagattaatctcttccttgagactggggttaggtgagttctcactctattagttcccaagataatagttgttaaaaagagccagacacctcccctttctctcttgccatgtgatccctgtatatgccagctcccctttaccttctgccatgagtggaagtagcaaggtcttaggctacttcccaatcttgaacttttccatacatcagaatcatgagccaaataagcttccttttaaaaaaatttttacccagcctcaagtattcccttatagcaacacgaatgaactaagacagccacctaggactcttgtcttgcctgtgacaagacagactgtcaacactgaagggataccactaagaatgaatctggcagaaatctaccaagctcccctcattcccattctctgcaagacaaagttcaaaattctcaacctgggcattctagct

SEQ ID NO: 143618 - DNA, 538 bp, Homo sapiens
ctggcttcaaagctcttataagaggaggtcgaaattaaaatttccctacaaacagtaagatgaaataaaaaagttccaaagccaaaccaccataggcagagttgaccaaataaatggttgagaaatacctcttggattcaggttcattggttaaatcagatgtataaataggagttagaatggctcccactcctgcccrtgaaggaataaacaccctgggaattgctttgccactgcaaacaactacaagactggtcaaaatctatggaacatttgtttcaagatgttggacaaccaggctgtgcaagactgtgtgtacgatctctaagagaatggaaataagtcatgtgagctttgcagtcaccctacctctctgcctggaggcagttcccaggccctggcaggggaaagaaaagcccaagcagggcccagagttcccctgaattgagaagattgaggttggcatcctaggcagttagcattttggagacaagcactggagagaagggagctgaaaaggcctatagaggatccccca

SEQ ID NO: 143619 - DNA, 503 bp, Homo sapiens
tgttatatttgtattttgtacatatacttggtcactggtctaatcaaacagcattacaatctgttcctcataggtcttgctcctcgattaaatttccttcatttattttataaacatttattagacacctgcagtttcagrcttgcactgtggagtccttgagaacagacacaatgttttattcatgtcattctcttcaaaacttgccacagtgcctggctcctggtaggtgtttagtaaatatttgctaagctgaattcctatgccatctctgtttgctcttatgtatgatggcttctattggatctgtagtgagataatttaagagtagaaatatgtttagtggctaaacttcctcaaatataaatcactaactaagaaagggggaattctgaatataatattttttattagcatagattcagccacttttccgcagatatgttactaaaaaatattcagtgtgtcataggttagcaaccttctaacatattcaggttttc

SEQ ID NO: 143620 - DNA, 606 bp, Homo sapiens
ggcacagcatgtttgtgaacagtccagtgtactagtttcccagggccagtgtaagaccccaccacaaaggtagtggtttaaacaatacaaatctatgatctcacagttctgaagctcagaagtctcatgaaatcagtgtcagcaggattgcattctctctggaggttctaggggagaatccatttccttgcctttcccttcgtctggaagctttatgtgtcctctggctcatgggcctcttccattcttcaaatccagcagtcacatcaatctgacctctgcctccttcctcacatcttcttctctgactgaccctcttgcctccctctttctcttataaggactcttgtaattatattgaataataaaatcccaagataatctccccatttcaaaacccttaattctgtctgcaaagtcttttttttgctatatgtatggtaacattcacaggttccagaaattagcatgtgaacatattttgtggtggtggtggggtcactatatttccaaccaaacccaattacagacaaygaaaccaagctgaaataacgttaatagcaaacatttgttgaattcatattctatgcaaggcatcaagtacct

SEQ ID NO: 143621 - DNA, 399 bp, Homo sapiens
tataatggattatagctaatagtgggcctgtctcctttgtcctgtctcgttcttgaaatctagactatgctttgtatccacgtgaaattaaaaaaaaaatgcttgcctttattagggacccaacacatgtttaaggagtttatctcccactaggacattaatttcaaaatacaacttactgttcttgctgtagaatagttgtttttgaattaaattagattcagagaattaagtcagtattgatcgaggacctactatagaccagatactagttactaaccaatcaaagatcaaagtgccaagacacyttcctcaaacttatttcagaaggcaatcaggttctcattaacttaaacagactatgtttgacatagtttaggggctgaaaactgtaatatt

SEQ ID NO: 143622 - DNA, 524 bp, Homo sapiens
gctttatcttacctgctgcccacaccctactcttgagagcacgtactcctggcaggaccccaacccaggaaaccctcccatgccccaggtgccgtcccctgaccaaccagcctcactctcagagacaaggatgaaacgcatatgaatatccactctaatacggttcagagaaggatgatctgttatctgaaacttttactgcaaaagctcttttaatcaaaaccttcagaaaatttgaattttactccttgcaaagattatttggttaaaaaaaaaggacactcacaacaattaacatatgactggggatgtgtaagaacagcgaagagaactggacaggctgtgtcctgggaacagcgcccggtgcacacacccctttccatcttccctattggcaccttcagtcccsggaggcgctgctgatgctcataggaagggactaaggccttcacagtctgtcaacaggagggtcccatggggctccatcacggtctctgggaccccccttccactgcagcaaagtg

SEQ ID NO: 143623 - DNA, 503 bp, Homo sapiens
aattcttactttttcaagtgtagaaatgatgtagtgtgtaccccactgggaaccacccaatgctgttaacacacytttaaacacaggttatttgtgtgtctgtgggttcactctctagatgtctctgtagcacctacaacgtctgaggcctgaagtaggtgctgagctggtggatgggtgagcagaggaaggaaaggacggacctggaggatcctggccccccaggatctcgtggtagtggaggaaaatgaactccgtcctcccgtgttgaggctttaccttgtgctgagcttgctgagggctgctggggatgccggagtaagcagggcagttcacacaggcccctgcctcctccacaaggacagggacaagatgaagtgctctacggggtcctgcaggggcatggctggaagtgagggtggagggtctggggcaggcaaaggccagcctggtcttgaaggatgggcgggagacagtgcctactcagtgggtttggctggtgc

SEQ ID NO: 143624 - DNA, 517 bp, Homo sapiens
gaattcttactttttcaagtgtagaaatgatgtagtgtgtaccccactgggaaccacccaatgctgttaacacacttttaaacacaggttatttgtgtgtctgtgggttcactctctagatgtctctgtagcacctacaaygtctgaggcctgaagtaggtgctgagctggtggatgggtgagcagaggaaggaaaggacggacctggaggatcctggccccccaggatctcgtggtagtggaggaaaatgaactccgtcctcccgtgttgaggctttaccttgtgctgagcttgctgagggctgctggggatgccggagtaagcagggcagttcacacaggcccctgcctcctccacaaggacagggacaagatgaagtgctctacggggtcctgcaggggcatggctggaagtgagggtggagggtctggggcaggcaaaggccagcctggtcttgaaggatgggcgggagacagtgcctactcagtgggtttggctggtgcccatggtggggca

SEQ ID NO: 143625 - DNA, 517 bp, Homo sapiens
gaattcttactttttcaagtgtagaaatgatgtagtgtgtaccccactgggaaccacccaatgctgttaacacacttttaaacacaggttatttgtgtgtctgtgggttcactctctagatgtctctgtagcacctacaacgtctgaggcctgaagtaggtgctgagctggtggatgggtgagcagaggaaggaaaggacggacctggaggatcctggccccccaggatctcgtggtagtggaggaaaatgaactccgtcctcccgtgttgaggctttaccttgtgctgagcttgctgagggctgctggggatgccggagtaagcagggcagttcacacaggcccctgcctcctccacaaggacagggacaagatgaagtgctctacggggtcctgcaggggcatggctggaagtgagggtggagggtctggggcaggcaaaggccagcctggtcttgaaggatgggygggagacagtgcctactcagtgggtttggctggtgcccatggtggggca

SEQ ID NO: 143626 - DNA, 600 bp, Homo sapiens
cacatgcttatcattttttgtggtgaaaaacttaaaatctattctgttagcagttttcaaggatacaatacattgttatgaactccagtcaccatgttgtacagtagatctcttgaacttattcctcttatgtaactgaaattctgtatcctttgaacaacatttccccaattattccaactgcaatccctggtaaccaccacatataagtgagatcacatggtatttgtctttctgtgcttgtcttatttcaccgaatgtcctccaggttcatctatgttagcacaggtgacaggatttccttttttaatggctgaatagtatttcattatgtgtacttgcagttttaaacttcattacatcctcattccccaataaatttattttaatccaaaagatacagtagaaatgtactggataagtgtacagtactctatarcctacactacttagtaatgtgttcttttttgttgttatgctttaagttctgggttgcatgtgcagaatgtgcagtaatgggttctttacttcatattgagcttcttgtcaaatatttatatttttacaaatttgttacctttgtgataagcttgaaagttg

SEQ ID NO: 143627 - DNA, 600 bp, Homo sapiens
cacatgcttatcattttttgtggtgaaaaacttaaaatctattctgttagcagttttcaaggatacaatacattgttatgaactccagtcaccatgttgtacagtagatctcttgaacttattcctcttatgtaactgaaattctgtatcctttgaacaacatttccccaattattccaactgcaatccctggtaaccaccacatataagtgagatcacatggtatttgtctttctgtgcttgtcttatttcaccgaatgtcctccaggttcatctatgttagcacaggtgacaggatttccttttttaatggctgaatagtatttcattatgtgtacttgcagttttaaacttcattacatcctcattccccaataaatttattttaatccaaaagatacagtagaaatgtactggataagtgtacagtactctatagcctacaytacttagtaatgtgttcttttttgttgttatgctttaagttctgggttgcatgtgcagaatgtgcagtaatgggttctttacttcatattgagcttcttgtcaaatatttatatttttacaaatttgttacctttgtgataagcttgaaagttg

SEQ ID NO: 143628 - DNA, 513 bp, Homo sapiens
tttataaagagtttatgaagagcatcctttctctctgtctcaatctctcactcataatggcagcatattttcccataatatgaatgtaaaataatttatttaacccatatcatattcatgggcataaatggtatttctaatattttgctgcaatgaataaccatgtacatactcttgtcattcctagtatgtttaattgtacatgtaggacacctttctagaagtgaatttactcagttaaagagtatggcacatttaaaaaaataaaaaaataarcagtatatacatttgaaaattttaaagttatatcggaatttcccttcatagaaattttaccaatttacatttccacaaacaataaatgaaagcttggtcctcacatccttatcaacaccaaatataatcacacatatttttcctgaacttgagaggtggaaagaggtttttcagtgctctcatcatctttctcccatagttttactgctattggagtttcattgtttatatttaact

SEQ ID NO: 143629 - DNA, 607 bp, Homo sapiens
ctagtttccactttttccgtaaaaaggaaaaatcctacacatggctaacctaatckctctccttgaagctttgcacccatcttttcccaagtacccaattgttgcaaagtttcacctcaaatgataagttcacctcaatcatgacagtgatctttaaacatattttgtagaacggtagttgtttaatttttataccatgtcagaattcttcctagagcaaaacatggctgtatttccttaaacaagataatttgtaactgtcaaatgatagacataatctgtcctccaatatcaaaggaatagaggccgggcatagtagttcatgcctgtaatctcagcactttgggaggccgaggcaggctgataacttgaggccaagagttcgagaccagcctggccaatatggtgaaaccctgtctctactaaaaatacaaaaattagctgggcatggtggcatgcacctgcagtcctaactacttgggaggctgaggcatgagaatcgctcgaacccaggaggtggaggttgcagtgagccgagatcacgccgctgcactccagcctcctcggcaacagagtgagactgtctaaaaaaacaaaacacagaaaa

SEQ ID NO: 143630 - DNA, 463 bp, Homo sapiens
gttgtttaatttttataccatgtcagaattcttcctagagcaaaacatggctgtatttccttaaacaagataatttgtaactgtcaaatgatagacataatctgtcctccaatatcaaaggaatagaggccgggcatagtagttcatgcctgtaatctcagcactttgggaggccgaggcaggctgataacttgaggccaagagttcgagaccagcctggccaatatggtgaaaccctgtctctactaaaaatacaaaaattagctgggcatggtggcatgcacctgcagtcctaactacttgggaggctgaggcatgagaatcgctcgaacccaggaggtggaggttgcagtgagccgagatcacgccgctgcactccagcctcctyggcaacagagtgagactgtctaaaaaaacaaaacacagaaaacttatgtcttgccaacttgaaataaatgtgtca

SEQ ID NO: 143631 - DNA, 620 bp, Homo sapiens
  misc_feature (1)...(620): n = A,T,C or G
gacttttttggcacacaggataaaactgtgtttttacatagatcatataaattgattgactagtattgcaggtatctgtctgtaatttgctttgcctaaaacaagcttatntgaaaatagaagcatatatatttcacaaatatatgtgaaatccacaatagtgtgtaagtagtgtgttaaatgaatgcattttactgtcatcaatactacatggaaaatcagaattttaatgcaatctaattttcttttcttttcttttcttttcctttttttgagacagagtctcgccctgtcacccaggctggagtacagtgacgcgattgtggctcactgcaacctccacctcctgggttcaagcgattctcctgcctcagcctcccgagtagctgggacaataggtgcgygccaccatgcccggctaatttttgtagtttttagtagagacggggtttcaccatcttgaccaggctggtcttgaactcatgacctcatgatccacccacctctgcctcccaaagtgctgggattagaggcgtgagccactgcgcccagcttaattttctttaaagttgaaaaaagcatcatacaacaataatatgagagtttggaattgctccctt

SEQ ID NO: 143632 - DNA, 458 bp, Homo sapiens
aaccactgaagtaccgttttggttatattcaggacaggatggcttagcttaccattttggacagaaagaattgtagatatgttgtgatagaaactaagggagctttttcactgataaaaataaatagatccaatgtataacgctactgggtatttttctggggtgggatcattagtcacttttaactattttacgtggacaactttattaaaaaaaaaagaaaaactttaatgtactaaaaagacacaccactatcagtttcttcttatttaaatcacttcttacttgctaatttcctttcagagaaacaggttatttgttgatactgagtgggtcattgtaaatagcacagatacagcrcagtcttttcctcaagtccatttgtttttctgaatttgcccaaaggacttccttttaccatggacagttgatgtggggggcgggggtaggagggaaaa

SEQ ID NO: 143633 - DNA, 482 bp, Homo sapiens
atatcagttattgaagaagctagcaagaactggtcaaatcgtatgaaaaagcactcaggaaccaaagtaaaaatgcttcctctgccaaaagcgggactatttgagcttcaatgagaataataattgcactgattgaaaccttccaaatatgtttaaatttatgaactcataattatactttaaaactctaacyggtctttggatgatgacaggaaatcattttatcttgaaaactggtaaataaatggaaagaaatcaaatattttctattagttattttcatttatttaatatttctgtataaactgatggagggggtctctttataaaactatttccattaataaataaaaaataaatactagaagtttgtaaccaccaataaatgtataggtctaggtattgagcaccaatgaatgttaacatcacaaaagagaggtaatgtaatattatatccctcctgagaaaagaatacaccacca

SEQ ID NO: 143634 - DNA, 482 bp, Homo sapiens
atatcagttattgaagaagctagcaagaactggtcaaatcgtatgaaaaagcactcaggaaccaaagtaaaaatgcttcctctgccaaaagcgggactatttgagcttcaatgagaataataattgcactgattgaaaccttccaaatatgtttaaatttatgaactcataattatactttaaaactctaactggtctttggatgatgacaggaaatcattttatcttgaaaactggtaaataaatggaaagaaatcaaatattttctattagttatttycatttatttaatatttctgtataaactgatggagggggtctctttataaaactatttccattaataaataaaaaataaatactagaagtttgtaaccaccaataaatgtataggtctaggtattgagcaccaatgaatgttaacatcacaaaagagaggtaatgtaatattatatccctcctgagaaaagaatacaccacca

SEQ ID NO: 143635 - DNA, 495 bp, Homo sapiens
ttacatgttaaggcttgagaaatattcccacaggcttgatgctatgacctggtggtggctccacctgtcttgaccccaggtgacagcactgcctatggcctctgaaatccaggaggtgagggtgctatgcmctgggcctgtaccctccgagtccatggtgacagcattagcctgctggcctctgacccaccctggggggtcattcttcccgttttctgaaatataatacatatttgcatccaaatagttcgattggtttattttcttcctgtggaatcccagaagtctgacagtgttctttctttttaacccatgcctttacccttcagtccaggatggcagtgtttatgctgagatgactaattggatccacaaatcacatgcctaatctcctgagcaaacagttttccagcaataacattggtgataccgccaaagcacattttctattttttttttttttttgtaatgtggataggctgagaattttccaaa

SEQ ID NO: 143636 - DNA, 572 bp, Homo sapiens
caccacacacacacacacacacacacacttacatctgtgttctagaacagtgaggaatgagcagtgggctccccaaacacagctccatctgcctgtcctgaggatgttgctgtcaggtaaggccctctcccgaggtgaataattatctcactgctaatgtgttaggagaaggaaaagtcctaaaaaaactactgggcaaggaaatttccaagaaaagaatctaaaatggatctggatgtgtttattttattcccagtcatacaagcaaaataattgcagggatggaagaaaaagatgaaaaaggtaaataaagttcaaaattttargctaaaaattgggccacgtttttgaaaaggaattattggtaaagaacaaagagaaagtagggagcaatagaataactcactttgatcttaagtttcaaaaaagcaacttgatatttcttatatgcccagctatgggtttgacagatagctttatgaaagcgccccaggaaggcaagtatatctggaaagctaatggcaatgtggtcggacctttgagcttaaggatctatcttgattaattcatta

SEQ ID NO: 143637 - DNA, 546 bp, Homo sapiens
aggaatgagcagtgggctccccaaacacagctccatctgcctgtcctgaggatgttgctgtcaggtaaggccctctcccgaggtgaataattatctcactgctaatgtgttaggagaaggaaaagtcctaaaaaaactactgggcaaggaaatttccaagaaaagaatctaaaatggatctggatgtgtttattttattcccagtcatacaagcaaaataattgcagggatggaagaaaaagatgaaaaaggtaaataaagttcaaaattttaggctaaaaattgggccacgtttttgaaaaggaattattggtaaagaacaaagagaaagtagggagcaatagaataactcactttgatcttaagtttcaaaaaagcaacttgatatttcttataygcccagctatgggtttgacagatagctttatgaaagcgccccaggaaggcaagtatatctggaaagctaatggcaatgtggtcggacctttgagcttaaggatctatcttgattaattcattactccaggtctgtcctcaagtgaacct

SEQ ID NO: 143638 - DNA, 571 bp, Homo sapiens
agtctcttgctgtttgataggttgaaggtgtgttttctttttcttcccactagttacgactgttttgctgggagagggtctcagagctccccataccatcattatagaagtcatctagctatgcatttaatctttacaatttttaagcctattttctctgttaatcattagaacaacytaagagtaaggtagtaaacatcagagccagggtttgaatcagacatttgaatagtatcttattgtggtacatgcttagtaacatgtcctcaataaattaatgaaccaaaaatatcaagcaatacaatttaggaacgaataagcttccagatgatggatagtaataataaaggctactgtggttgggttgagagagacatcatgaagcgttatttttgctatgatgggaaaaatgtaatttctcacgaactgctgaattctttgtacctaaactatcggtctttatgaccaaaatacactgtacagccagttcatcaattctgccatagtagtggtgcttaattcattgtgagagattatgcatttggtgacttcacatacagagcaaaacccc

SEQ ID NO: 143639 - DNA, 571 bp, Homo sapiens
agtctcttgctgtttgataggttgaaggtgtgttttctttttcttcccactagttacgactgttttgctgggagagggtctcagagctccccataccatcattatagaagtcatctagctatgcatttaatctttacaatttttaagcctattttctctgttaatcattagaacaacctaagagtaaggtagtaaacatcagagccagggtttgaatcagacatttgaatagtatcttattgtggtacatgcttagtaacatgtcctcaataaattaatgaaccaaaaatatcaagcaatacaatttaggaacgaataagcttccagatgatggatagtaataataaaggctactgtggttgggttgagagagacatcatgaagcgttatttttgctatgatgggaaaaatgtaatttctcacgaactgctgaattctttgtacytaaactatcggtctttatgaccaaaatacactgtacagccagttcatcaattctgccatagtagtggtgcttaattcattgtgagagattatgcatttggtgacttcacatacagagcaaaacccc

SEQ ID NO: 143640 - DNA, 523 bp, Homo sapiens
aagtggctacttaatgttaacactgctggaattctggcaccttggggcatgtttgggaaagccgcagggagttttatttgcccagtgcccagtgggattgctggaagtaattgaagatgataaacacatggaggaaggtagagaaaaagagcaatttctaaacatatcaagtaatgtcctaatgagcagagagcttaccttggaatgataaaaggtttaaatggtcaggctcagttcaggaaaacaggctgatgatttaggatgttctactgtgrtataacgtatattatcttttagcccaatacctgggaataatatgtcccaattttagaaaaatgagagaatgagcgtgagagagagaaagtgagaccgagagcaagagcaagagagagagagagatcgataaatgaaatggaggtttgtaggcctagggatattgtaagctttctttgcctttattgtggtgttatgtatggaaatgggaagattgacaagaagtcctatgaaaaattagtgaagttag

SEQ ID NO: 143641 - DNA, 523 bp, Homo sapiens
aagtggctacttaatgttaacactgctggaattctggcaccttggggcatgtttgggaaagccgcagggagttttatttgcccagtgcccagtgggattgctggaagtaattgaagatgataaacacatggaggaaggtagagaaaaagagcaatttctaaacatatcaagtaatgtcctaatgagcagagagcttaccttggaatgataaaaggtttaaatggtcaggctcagttcaggaaaacaggctgatgatttaggatgttctactgtggtataacgtatattatcttttagcccaatacctgggaataatatgtcccaattttagaaaaatgagagaatgagcgtgagagagagaaagtgagaccgagagcaagagcaagagagagagagagatcgataaatgaaatggaggtttgtaggcctagggatattgtaagctttctttgcctttattgtggtgttaygtatggaaatgggaagattgacaagaagtcctatgaaaaattagtgaagttag

SEQ ID NO: 143642 - DNA, 619 bp, Homo sapiens
ttagtccaagcttgcaggaggacatacactccaggaataatatcagtttcctagttaggcagcagctgctgtctctcttgcttcctgaatgattgtgttcctggttctttgtagtgtgaatcaaatcgtagaggcataatgagaaaaaaacaacaacatggctgtcatccattttttcttttttttttttttgctaagactcttatttagttgttttaaatagggatttggaagatagaacgcaagacttttctgcatctggatccaccmgtgcttagtgtgtaaggtgtattcatttacttctgttaaattgagctctttagtaaggaaaggcaaaattagaaaggggaaaaatataagtgctatcacttagattccattgcttgttaagacagggggttctggtttctgaaaatgcagttaatcattagaaaggaaaaagtatttgatcaacagaatgttatttctaatggctttcaatcaattctttcaaaacacaaagagaaaaagacatcaacaaaataatataaaagcaaacatcaaaacttaggaggttaacaatcaatttaaaagcctcaggaattttgttactgaaacagtcattagaaagcagagaaga

SEQ ID NO: 143643 - DNA, 619 bp, Homo sapiens
ttagtccaagcttgcaggaggacatacactccaggaataatatcagtttcctagttaggcagcagctgctgtctctcttgcttcctgaatgattgtgttcctggttctttgtagtgtgaatcaaatcgtagaggcataatgagaaaaaaacaacaacatggctgtcatccattttttcttttttttttttttgctaagactcttatttagttgttttaaatagggatttggaagatagaacgcaagacttttctgcatctggatccacccgtgcttagtgtgtaaggtgtattcatttacttctgttaaattgagctctttagtaaggaaaggcaaaattagaaagggraaaaatataagtgctatcacttagattccattgcttgttaagacagggggttctggtttctgaaaatgcagttaatcattagaaaggaaaaagtatttgatcaacagaatgttatttctaatggctttcaatcaattctttcaaaacacaaagagaaaaagacatcaacaaaataatataaaagcaaacatcaaaacttaggaggttaacaatcaatttaaaagcctcaggaattttgttactgaaacagtcattagaaagcagagaaga

SEQ ID NO: 143644 - DNA, 552 bp, Homo sapiens
tacagcattatgctatatataagaagcacacatatttatatacctaaaatttatataattttaaaggagagagattcaggaaaatttaagggtgggcagtgaatacaaggaaaatgcaaataaataaaaggcaatgatcacaatgtttatatttgaaaaggaagaattcaaaacaaaaagcattaaaggagaaaaagaatattaaaaatgctaaaggtataattcacaatgaaaacatattaataattaaaatttctgttcccagtaacacagcaaaacattacataaagtggaaactgcagaatattcaaagagaatacataaaaccatatttaaaagattttagaagaatttaacacacctctcctaatccaagaaagatcaagcggacaaaaaattgtaagactatagaaaacctaaataacaaatcaacaaggtcttatatataaaacmctaaacttcaatagataatatatcttttttcaagggtaaacaaaacatttatgaaaattgctatatcttaggtcacaagaaatggtagatcaataccaa

SEQ ID NO: 143645 - DNA, 335 bp, Homo sapiens
gacctaccttatctacaaaccagtgaaatccaactgggtcaaataacatttagatgctaactaaatactgatgactgaagcaacaatcttaaaatctttcatcattttgtgaagaatggtattaagtgatttctgtataaaatagtcaaagaatactatgatctcataaaatttcaaagactgcagttcactgtcctttgcctcatatctgagcacttgggtaacctgaggagatttatttatgagaattcatgtaaatcccattargctcttcttaatacccagtggcactttagagctaatatattttatttgcatttacataatacaacttg

SEQ ID NO: 143646 - DNA, 553 bp, Homo sapiens
gtaatttacataggccattatcctagtacttatttaaaagactatactargcaatggggatatgaatttaccccctctccaaacccctaccacctatcaccaaatcaagtgactgcctggattacagtactgttaggaagagacacttcttccccattcctatgtttccttccatatggcgggggcaagagtgtgacatttctagcctctgtctgcctcttcactcatccattcccaggggaactgaacccttatctcatttgcgagtttgggtagaataaagcgagcatgcttggatctactccttcctttatttcttttgaaagtcagctgcctataggcagtaagtgctctactcatcctaatgaaggctctacccttcattagctgtggatggagtgggagccctgtcttgtccatcagtgcctatgactgggtgtgttagtctgtctaatctaggttcagtattaggcactctctctcccactgatataagccacatccacctactcagctattttggtagtaactgacattttagtcccccatctgc

SEQ ID NO: 143647 - DNA, 553 bp, Homo sapiens
gtaatttacataggccattatcctagtacttatttaaaagactatactaggcaatggggatatgaatttaccccctctccaaacccctaccmcctatcaccaaatcaagtgactgcctggattacagtactgttaggaagagacacttcttccccattcctatgtttccttccatatggcgggggcaagagtgtgacatttctagcctctgtctgcctcttcactcatccattcccaggggaactgaacccttatctcatttgcgagtttgggtagaataaagcgagcatgcttggatctactccttcctttatttcttttgaaagtcagctgcctataggcagtaagtgctctactcatcctaatgaaggctctacccttcattagctgtggatggagtgggagccctgtcttgtccatcagtgcctatgactgggtgtgttagtctgtctaatctaggttcagtattaggcactctctctcccactgatataagccacatccacctactcagctattttggtagtaactgacattttagtcccccatctgc

SEQ ID NO: 143648 - DNA, 553 bp, Homo sapiens
gtaatttacataggccattatcctagtacttatttaaaagactatactaggcaatggggatatgaatttaccccctctccaaacccctaccacctatcaccaaatcaagtgactgcctggattacagtactgttaggaagagacacttcttccccattcctatgtttccttccatatggcgggggcaagagtgtgacatttctagcctctgtctgcctcttcactcatccattcccaggggaactgaacccttatctcatttgcgagtttgggtagaataaagcgagcatgcttggatctactccttcctttatttcttttgaaagtcagctgcctataggcagtaagtgctctactcatcctaatgaargctctacccttcattagctgtggatggagtgggagccctgtcttgtccatcagtgcctatgactgggtgtgttagtctgtctaatctaggttcagtattaggcactctctctcccactgatataagccacatccacctactcagctattttggtagtaactgacattttagtcccccatctgc

SEQ ID NO: 143649 - DNA, 553 bp, Homo sapiens
gtaatttacataggccattatcctagtacttatttaaaagactatactaggcaatggggatatgaatttaccccctctccaaacccctaccacctatcaccaaatcaagtgactgcctggattacagtactgttaggaagagacacttcttccccattcctatgtttccttccatatggcgggggcaagagtgtgacatttctagcctctgtctgcctcttcactcatccattcccaggggaactgaacccttatctcatttgcgagtttgggtagaataaagcgagcatgcttggatctactccttcctttatttcttttgaaagtcagctgcctataggcagtaagtgctctactcatcctaatgaaggctctacccttcattagctgtggatggagtgggagccctgtcttgtccatcagtgcctatgactgggtgtgttagtctgtctaatctargttcagtattaggcactctctctcccactgatataagccacatccacctactcagctattttggtagtaactgacattttagtcccccatctgc

SEQ ID NO: 143650 - DNA, 547 bp, Homo sapiens
gtgtatctttaaagtggagcatttaggccatttacatttaaagttagtatagagatgtgaggtactattctatttgttatgctggttgttgccttaataccttgggttttttcccattgtgttattgttttataggtcatgtgaaatgcatcatttaattaagatctattttggtgtatttcaaggttttgttcagtatttacaactcctttgaacatttcttgtggtgctggcttggtagtggtgaattctctcagcatttgtttttctgaaaaagaccttacctctccttcacttatgaggcttagtttttctgagtacaaaattcttggctgaccattattttgtttcargaggctaaagatgggaccccagtcccttctggcttgtaatgtttctgctgagaaatctgctgttaatctgatatgttttcctttctaggtaatctgatgcttttgcctcatagctcttcagattctctcctttgtcttgactttagataacctgatgactatgtatgtaggtgaagatctttctgtgatgaatc

SEQ ID NO: 143651 - DNA, 563 bp, Homo sapiens
ctgacactgctccatgaaaatgacagtagaatcgttttacctaccaacccagaaagcagcaagaaaacttactgtgtgcctataactcagtggcaataaaaagaatcccatggaaggtaaaacaccatggttacacctgtacttgggtaagaagcccaaatttatgccatccacatagtgttaaaatccaaaacccaggatttaacataaaaactgatgaatctagactttggcaaaaacaaacccaaaattactctgcagagacactatttctattcaggctataggggatgctcacagaatgaatgcatacactgaaaatgagcttgtaatcaaaattcatgaactattcaaaggaagaatgcaccataataaagagtaatcagacagaacaaacaggacaattaggaatcaaagaacctgagatactagayaaatccaaagataaaaattttttaaagcatttaagagaagcaatgaaaaatgtaataagagaataaggcaccagaataaaaaatatagattttaaaatataatattgaggttaaaattttgacaagtca

SEQ ID NO: 143652 - DNA, 427 bp, Homo sapiens
gagaaagagaaactggtgtttctgggtggacgatgaaagtgcttgatcgttttcactattcccctaactgattattgccatcagacacttctagtagatttgatatatgtcatgttttctttcttttagatttatactgataactcaatgttaaaatatcaatgcaaacctagcatcattgtgcaattccctgctcaaacatttatttatttaaaaattcccagtcctgatggtattactgttttagaaacaaaccctggrctaggtgtttagggcatgatgcagctctactgcagaatgaggatttaaagagctttttgttttctttctcattgcatggaggtaaagacttttctggtattgatagaaagtaaaagttgtgccacgctgacagtacagatgagacaaggcacggcattaactgttc

SEQ ID NO: 143653 - DNA, 440 bp, Homo sapiens
gagtgggttcatttctgcattctctatccttttccatttgttaatgagcctatttctattccagtaccatgctatttaaattactttcacttcatatataatttgaaatcaaatagtgtgatgtttccagctttcttctttttgcttatgattgccttagtttttcaagatttttgtgctytcatatgaattttaggtttgtattttttctatttataggaaaaatgacgttgaaattttgatggaaattgcattgaatttgttgatcactgtgcctaggatggatattttaacaatattaatttttccataccatgaacacgaggtatctttccatttgtttattttcttcaattttttcattaacattttatagttttcagtgtacaagtctttcacttccttccacagaaagtttttaatagttattgtaaatgaga

SEQ ID NO: 143654 - DNA, 440 bp, Homo sapiens
gagtgggttcatttctgcattctctatccttttccatttgttaatgagcctatttctattccagtaccatgctatttaaattactttcacttcatatataatttgaaatcaaatagtgtgatgtttccagctttcttctttttgcttatgattgccttagtttttcaagatttttgtgctctcatatgaattttaggwttgtattttttctatttataggaaaaatgacgttgaaattttgatggaaattgcattgaatttgttgatcactgtgcctaggatggatattttaacaatattaatttttccataccatgaacacgaggtatctttccatttgtttattttcttcaattttttcattaacattttatagttttcagtgtacaagtctttcacttccttccacagaaagtttttaatagttattgtaaatgaga

SEQ ID NO: 143655 - DNA, 440 bp, Homo sapiens
gagtgggttcatttctgcattctctatccttttccatttgttaatgagcctatttctattccagtaccatgctatttaaattactttcacttcatatataatttgaaatcaaatagtgtgatgtttccagctttcttctttttgcttatgattgccttagtttttcaagatttttgtgctctcatatgaattttaggtttgtattttttctatttataggaaaaatgacgttgaaattttgatggaaattgcattgaatttgttgatcactgtgcctaggatggatattttaacaatattaatttttccataccatgaacaygaggtatctttccatttgtttattttcttcaattttttcattaacattttatagttttcagtgtacaagtctttcacttccttccacagaaagtttttaatagttattgtaaatgaga

SEQ ID NO: 143656 - DNA, 227 bp, Homo sapiens
aaagacttagcaagttctgctacattaactctttgacttggttcacttctgctatgcaatacaccscttatgaactgcttgatagctctggaccaaaggctgtgcctccttgacctgggcttatccttatgttgcacagtgaaagaactgatttgtcttacagtgtcagtgtcttcattccttattcacttaacaacattggctttaccgagtattaaccgcatgtc

SEQ ID NO: 143657 - DNA, 482 bp, Homo sapiens
cataatttaaaaatcaaaaaacaatagatgttgatgtggatgtggtggaaagggaacacttttacactgctgttgggaatgtaaactagtacaaccactatagaaaacactgtggagattttttaaagagctaaaagtacaactaccatttgatccagtaatcccaccactgggtatctatccagaggaaaagaagtcattayatgaaatagatattgcacactcatgtttatagcagcacaactcacaattgcaacaatttggaaccagcctaaatgcccatccaccaatgagtggaaaaagaaaacgtggtgtatatgtgtacatatatatacatatacaccatggaatactactcagtgataagaatgaatgaaataatggcattcacagcaacctcatggagtttgaaaccattattctaagtgtagtaactcaggaatggaaaaccaaatattgtatattctcacttataactggaa

SEQ ID NO: 143658 - DNA, 610 bp, Homo sapiens
tatatgtgtacatatatatacatatacaccatggaatactactcagtgataagaatgaatgaaataatggcattcacagcaacctcatggagtttgaaaccattattctaagtgtagtaactcaggaatggaaaaccaaatattgtatattctcacttataactggaagctaagctacgaggattcaaaggcataagaattacaaattggactttggggacaccggagaaatgggggaagggtggttaaggataaaaaactacgtattgggcacaacgtacactgctcggatgatgtgtgcaccaaaatctcagatatcaccactaaagaacttatctatgtaacaaaaaccaccagttcccccaaaactactgaatttcttttttaaaaaaggtaattaagataccttgtagacaaggacctttgattacacaytggtagaaatttcactttaccatttcagccaccatatgcctgctgtctgcccggggcttgggattcaaagacaaatgtttccagttcccttcctcccacaggtgcttgtggcctggtgggaagcaggcaacatgtgcacatagatcaaaggaagcaccaagtagctgttttcacg

SEQ ID NO: 143659 - DNA, 607 bp, Homo sapiens
gcttcaaatgtctcctctcccctgtcttgctctttagggkttaagggtgattccaccaggccaacccagataaatccaggataacctccctattttaaagtcaactgattagaaacctgtccacaaggctcttttgccttgtaaagtaacagattcatagtcccagaaattagggtttgaattctcttagaggactataatgctgcctgccagtctcccacctggaacttgccagaaatcagcacctagcactaagtctttatttaattttttatgtttagagagcagtattgctgttgcccaggctggattacagtggtgcaatcaccactcactgcagcctcaacctcctaagctcaagccatccttcatctctgcctagactagccaactataggtttgccaccatgcccagctctttttttttttaaagagatctggtctggatatgttgcctaggcaggtatcaaactcttgggcttggacaatcctcttgtgtctggagttggttccttccggtgggttcctggtcttcaagaatgaagccatggaccttgctggtgagtgttacagctcttaaagatggcagggaccctgcagtagcaag

SEQ ID NO: 143660 - DNA, 491 bp, Homo sapiens
cgtccctcaagagtttgctgctgcacaaatacaaaatcaagtcatcctggtttctcggtgtctttcctgatgctgttttagatgagtaatgcctgcttgctttgcctaggctcagggcactgtgctcctaggactagtggccacaaccttgtcctgctgaaggcccgcaggaagcccttrggacacgagcacttccactgtctggtgctcttgaactggttattttagggagatagggtgtgtccagctatgggctggtctctgtggggctgtgacaattcaaagtgacagtaaacggactcagtgttaaaaggttctctgtgccaggggtgcgtggtggcagaggctgagatggatgggtcccaacccatcagccctgccttacctgtgctctctagctacgccctcatccatctgaagcatgtgggttgaagggggaggcaagtaaggctatccatgcacaaggcatgcacaaggctgccccaccctgt

SEQ ID NO: 143661 - DNA, 491 bp, Homo sapiens
cgtccctcaagagtttgctgctgcacaaatacaaaatcaagtcatcctggtttctcggtgtctttcctgatgctgttttagatgagtaatgcctgcttgctttgcctaggctcagggcactgtgctcctaggactagtggccacaaccttgtcctgctgaaggcccgcaggaagcccttaggacacgagcacttccactgtctggtgctcttgaactggttattttagggagatagggtgtgtccagctatgggctggtctctgtggggctgtgacaattcaaagtgacagtaaacggactcagtgttaaaaggttctctgtgccaggggtgcstggtggcagaggctgagatggatgggtcccaacccatcagccctgccttacctgtgctctctagctacgccctcatccatctgaagcatgtgggttgaagggggaggcaagtaaggctatccatgcacaaggcatgcacaaggctgccccaccctgt

SEQ ID NO: 143662 - DNA, 609 bp, Homo sapiens
agtgggctgggcttagggttccttcatcagatggatgtctctgtctttcttgcatattgatgactggatgcactgaatgcagttgcattacaggaaaaagatgtccacctcacacaaataatggaagagggttccaaagccccaggctcaccaaatgcaggagaagccaccttctcatcatctaaagtgtgctgctgcctcagcaacgggcccagagaacactcaaaacgagtgttaaattccaggcccrcatcacagcgctgggggaggaaactgctctgggtccatcggggcagacctactcctcctagcacctagatccttccatcctggtctgggactacctgtttttcatcaaacttactttactgcaagtttctttctttctttctttctttttttttgagacggactcactctgtcgcccaggctggagtgcaatggcgtgatcttggctcactgcaagctctgcctcccaggttcacgccattctcctgcctcagcctcccgagtagctgggaccacaggcgcctgccaccgcgcctggctaatttttttgtatttttagtagagacggggtactgcaagtttctttactccacctacaac

SEQ ID NO: 143663 - DNA, 303 bp, Homo sapiens
gtggcaggcttcccgtggcctcttcctgcactaccaygtggaggccctaaccctgcgtcgcatcagtagcttccgccagtacaagtatgacctggtggcagcgggcaaggctttggagggcatgttctgcaagctcaaccacctcctggaacacccgcaccagctgttcttcctctacctgctccccactctgtcccgcttcgtctccatcggcctctacatgcccgccaccagcttcttgctcctggtccttggtttcaaggctctgcaactgtggatgcagctgcatgaggccggagtggg

SEQ ID NO: 143664 - DNA, 567 bp, Homo sapiens
aattataatgcctagtacaatgtaaatgatatgtaaatagtcattatactgtactatttgtattgttatattgttatttttctctaaatatttttgatccatagttggttgaatccacggatgtttggatccagcccctggatacggagggctgactttaatcttcccccatccttaagtatcctgtgaagttataaatgatgtgtgccatgtcttacaccagcaactgtgcccccttggcctgggcacatgtggcaactgtccatgcatcatgttgtttaggtgagcttgctgtttctgtccctactgctgttggyccaactaggaaatatgaactaggtaaataattttcaaaaatccagacattaacttatttgcctctgtaggagtcttttttccagagctgatgataacaagacagtttcctctgcagcttctttcacctggcatctatttcacagaggagggaggtaagttttattttcaatggcactaaagattgttttcctggattgttttcacaaactgcacatgaacagtttcaaaagtatttcctgaattaggtga

SEQ ID NO: 143665 - DNA, 449 bp, Homo sapiens
aattcacctgtgggaaagcaacacacaaaggatgttactaagtaacatcctaagtaacaggcatggcactttatttactgagagagcaattaaggaaaaacagtgaggaaaaaaaccgttgaagcctttctcaatagaggaactttttttttttttkgagacagtttcgctcttgttgtccaggctggagtgcaatggcaccatctcgactcactgcaacctctgcctcccgggttcaagcgattctcctgcctcagcctcccaagtagctgggattacaggcacctgccaccacgcccggctaattttgtattttcagtagagatggggtttctccatgttggtcaaattcccgacctcaggtgatccgcccatcttggcctcccaaagtgctaggattataggcgtgagccaccacacgtggccagtagaagaactttttatttatg

SEQ ID NO: 143666 - DNA, 442 bp, Homo sapiens
ataaaacataaaatctgttaaactagttaccaaaaggcaaaataaatgaccttatgcactgcacagaatattatgctggaataattcaattccttcagacctttaaggaaacattgttagcatcaggccacaaccartagaacttgaggaaaaaaaaaaacataattagctgaaaatcagttgaaggaaagcattactatttcaagccctttaaaaggggagagaaaaccaaaaacagcaagatgcaataaaagttaaacttcgggttaaaaaatcaaaatatcttataatttattaaaacaaaaattaatccctacaaaatttcattgttccaaacaaaaaactcaaactcgtcttccctgctggcagtgagctcaaactctataaaggagttgcctgccttccatcatcatcgaaacaggaaatcttgccttcatcgttg

SEQ ID NO: 143667 - DNA, 471 bp, Homo sapiens
taattggaaaagaaaaaactgtaacctatgcttttttcattatgattctttcactgtgacttttaaacattgcatttaataagttatcactttggttcaacaacaattttcataaattatgtttatccaggatatataccagtcgtcattgtcatgtattctctgagagaattcaaaatagagtgggttaggttaatttcttattgaggaggcttctgaacctctaattaaatttcagggayaacagccaaaatttctggcatatgacctatagttgtaaatacacattatcctgaataaaaggagaattaattttttgaattataatgaagataaacaattgaaaataaagccagtcatgcagggaagataatctcattaaatatttatatttcattaatgtcagcattttaaaattttctcctatttcaataaaaattaagttcttattactctgcagtaataacagca

SEQ ID NO: 143668 - DNA, 480 bp, Homo sapiens
gaattcttactttgctttgggcagctaaagcagaatacctgagactgggtaatttataatgagtagaaatttatttctcacagtcggaaactctaagatctcatagtctgaaagtctaagatccaggggccagmatctggcaaaggccttcttgctgcatcattccatggcagagagggtgaaagagggccaagcttgttcttttccagtggcacaaatcccacccatgtgaatagagtccccctagcctaattacttcttaaaagtcacacttcttaatactgttactttgataattaattttctaaatgagtcttggacgggacaaacattcaaaccacagaagtttccctatatttcaaagacaacatgagaaaaacatagaaacacttctcagcaaaccgccttccacttcacaattatatggttctataaatggcattgccattctttatgtttgttcttcctttaacagtcctt

SEQ ID NO: 143669 - DNA, 556 bp, Homo sapiens
tgtgctgtgtttattcaccacgataaaaaaaattagttatttcacatgagaaacagacagtagtcttttcatggttgtttcaacatctcaacctgattaaggatgtaagctgttccaacatttccaagcattcacttgactatgtgtggacttgcatttaatatctttgctgattttaatagaatacattttgtatytgggcttgtttttttcatattgctggtcttggcattatcatattctcacacaattgtattttgttataaaatgcaaatggtccagacaggaaaggaatggtggtgttcttgcacctttcttttcctcagaaaggaaaatttgtcttagaatccatcaatgtctctcccctgggaagtcagagaaatgacgttttatgactgttagcaggtaataaatgagacctaccataacttaattgcctcaaattccatattcttctatgaattgtatgaatttgacaaaccacccaaaatatataccaaatttaccattctgttaaaaaattccattaaaaggttttcatattcatgagttactt

SEQ ID NO: 143670 - DNA, 449 bp, Homo sapiens
ctaaaaatatatatccccttcaacctcactcttyacatgaagaattccaagaaatatcacactttcaagaaatgacaaatatttttcctttgatcattttcttcccactcccacatctccttctcaaggatgtataactgatgtataatcagctattttttttagaagcctctctcctacatccacatagccctctgtcagaatcatggggaactgaactgtgattgatatctcaccagccatgctaacaagagagcgttcctttctggaatttaaactggaccctaatgtttctaatcactccccaaagactgtgaacaacaaagtcttgcagaagaaatgctgggcctgaaattgagaacatggaaacagataagacaaaagaggcagaaaaagaaatcttataactttagataaagaggaatactgagaagcagagatagtgagag

SEQ ID NO: 143671 - DNA, 520 bp, Homo sapiens
ttagagatctatgaggagacatagattctcacrcaataatactgggagatttcaacacctccctgacagtattagacagatcattgaggcagaaaattaacaaagatattcaggacttgaactcagctctggatcaagtgggcctgataggtatctacagaaccctccacctaaaaccaagaaaatgtacattcttcttattgccacatggcactgactctaaaattgattacataatcacaagtaaaacactcctcaacaaatgcaaaagaactgaaatcataatgaatagtctctcaggccacagcacaatcaaattagatttcaagattaggaaattaactcaaaaccacacaattacatggaaattgaatgaccaactcctaaatgactcttaggttaaacaatgtaattaaggcagaaatcaataagttatttgaaactaataagaaccaagatatgacataacagaatctctgagacacacctatgcagtgttaatagggtagtttatagcact

SEQ ID NO: 143672 - DNA, 442 bp, Homo sapiens
  misc_feature (1)...(442): n = A,T,C or G
aataaccaaaatataattattacataaaacagtaatgcttaacccaaagcctgcatgtcccatgtaaaccaacgagcttgactgcccagctctagacctaatttcacatccaaaccctcattttctctataggaaaagaaaactcagagtcagtaatagtgcagaacwttataccatctgattattaagaggtttatccctctacttatggctccagtagaggaaagagattccaatcaactgagcttttctttaggtggttattagctgttgacctgtactatcagtatccaaagacctaaaaatttntggaaatattcatgccggcatttgaattacaactgggtgtgagacctggggctgaaggtacctcttcctaactcagaagacgaagtgacctacgctgaaagctactttacattgtttataataaaatcagtat

SEQ ID NO: 143673 - DNA, 442 bp, Homo sapiens
  misc_feature (1)...(442): n = A,T,C or G
aataaccaaaatataattattacataaaacagtaatgcttaacccaaagcctgcatgtcccatgtaaaccaacgagcttgactgcccagctctagacctaatttcacatccaaaccctcattttctctataggaaaagaaaactcagagtcagtaatagtgcagaacattataccatctgattattaagagktttatccctctacttatggctccagtagaggaaagagattccaatcaactgagcttttctttaggtggttattagctgttgacctgtactatcagtatccaaagacctaaaaatttntggaaatattcatgccggcatttgaattacaactgggtgtgagacctggggctgaaggtacctcttcctaactcagaagacgaagtgacctacgctgaaagctactttacattgtttataataaaatcagtat

SEQ ID NO: 143674 - DNA, 571 bp, Homo sapiens
gaaattaagacaactgtcattagtatgctaaggactctaatggataaagtagacaacatgcaaaaatagatggggaatgtaaacggagagatagaaattctaagaaataatcaataataagtgcaagagattaaaagctctgtaacagaaatgaagaacacctttgatgagcttattaatagactggatacagctcaggaaaaaatgcctatgctgaaaatatctcaatggaaacttccaaaattgagaagcaaaaagaacaaagaatgaaayatcttagaacagtggtacaactacaaaagatgtaacatacatataaagagaaaatgagactaccagaaagagtagaagaggaaaaaatcagaataaatatttgaagcaataatgcctgagaattaatatcataaaccataccacagatccaggaagctcagagaatactatgcagatgaaatgctgcaccaaggcgtatcattttcaaatgacaaaaaaatgaataataaagaaaaatatcttaaaagaaaacagaaaagaaattgcctctagaggaagaaaaataaaaactggactc

SEQ ID NO: 143675 - DNA, 571 bp, Homo sapiens
gaaattaagacaactgtcattagtatgctaaggactctaatggataaagtagacaacatgcaaaaatagatggggaatgtaaacggagagatagaaattctaagaaataatcaataataagtgcaagagattaaaagctctgtaacagaaatgaagaacacctttgatgagcttattaatagactggatacagctcaggaaaaaatgcctatgctgaaaatatctcaatggaaacttccaaaattgagaagcaaaaagaacaaagaatgaaacatcttagaacagtggtacaactacaaaagatgtaacatacatataaagagaaaatgagactaccagaaagagtagaagaggaaaaaatcagaataaatatttgaagcaataatgcctgagaattaatatcataaaccataccacagatccaggaagctcagagaatactatgcagatgaaatgctgcaccaaggcrtatcattttcaaatgacaaaaaaatgaataataaagaaaaatatcttaaaagaaaacagaaaagaaattgcctctagaggaagaaaaataaaaactggactc

SEQ ID NO: 143676 - DNA, 612 bp, Homo sapiens
gctttgtttttgtactttaacttacaaagatagtttcatagatgctaatgttgggagaatataattgaaaacaaaacctcttccaacccagaagtcccctgtacaaaggtagtagaaaaagaaaatagctctataaaaaaaaaaaacaaaaaacacttaaaccagaatgtgaccacctcataaaaaatcctccaagacagaaagatatttcacactcttatgaagccaagtaagtaaaatcaattacatatawgtctttaagataataataactagcattgaagtaagagaacttgatagcaccatttgtcacttggggtttatcatagatttacctggtaattagggtactaatctttgtttgctaagtagctttattcataggaaaaatagaattctcatatctttatgataataggtatttttgcaacttagagcaaggtgtccaccaaagttaggctcttaccctcctacagaatcagagatagggagagctcttccctgtgtttacatttcaaagatatggttgcagtgtctttgagaagacattcttgggtctacagctgacaaaaggcctatctaaatttcaaaagagtttttgtacatacaaaa

SEQ ID NO: 143677 - DNA, 530 bp, Homo sapiens
gcattcaaggggaagcagagcataaaagtttgaaaattcacatcctaatgatgccatagaaaagaaaaacccattttctgagaggaaatgcaagccygctacagaaatttgcataagtaatgaggagatgaatgttaatcaccaagacaaagggcaaaatgacttcagggcatgtcacagattttcacagcagcccctcccattataggcccagaggcctgggagagaaaaatggtttcataggccatgcccagggaacccctgctctgtccagcctagggacatggtgccctgcatcccagctgcttcagccccagccatggctaaaaggggccatggtacagctccagccattacttcagagggtgcaagcctcaagccctggtgtcttccacatggttttgagcctgtgggtgcacagaggtcaagaattgaggtttgggaacctctgcctagatttcagaagatacgtggaaattcctgggtgaccaggcaaaggtttgctctaggggtggataccttatggagaa

SEQ ID NO: 143678 - DNA, 399 bp, Homo sapiens
gataaatttgtgtagcaataaaaatatttttgtgtgattttcctgattttcaaatatgaagtaacagtggtctaaaatcctaggaaagaaagcttcayccacatccactctatatttgcttctaaaagaaatctggttaaaaggacttctttctgggagtttcaataaaatctcctccaaataacaacttttcaaacttactgtgctgagggcatagggtttcaataaaattcctttccaaataatgatttttcaaactgacctcaccaaggggcataaacatatgaatgatttactttgatcttatttgtgatcttatcctttcagccacacaggcttgaaaactctgtctttgactctttcctcttctttatcccatcatccactcaggttacaata

SEQ ID NO: 143679 - DNA, 610 bp, Homo sapiens
tctttggcactttataacaagtatcacccttcccacagtatccaatatcatgttactcatttctatctaagacctcctcatgatggyctttattgcctatatatctatgaatattctgtcaggaccacctacaaaatctctaagaaaataagttttccttatagctctccttttctgagccatcaccagaattgcccttaacattctatttccagcaatatagtatttttctagcatctgtctcaaaacttttccaatctccatccattgacctgttcgaaagccacttccacatttttttcccacactttttccccactctccatgccaatttctgtctaagtctgttcaggttgctatagtaaaaatactacaaacagggtggcttataaactacaaacatttatttcccatagttctggtggctgggaagcctaagatcaaggcaccggcagatttagtggctgatgagagcatgtacctcatagagagcacttttgagctgcatccttacatggtggagggggcaaacaagctctcttgggcttaatttataaggacactaatctcattaatgggagctatgccctcatgttctagccatgtccca

SEQ ID NO: 143680 - DNA, 610 bp, Homo sapiens
tctttggcactttataacaagtatcacccttcccacagtatccaatatcatgttactcatttctatctaagacctcctcatgatggcctttattgcctatatatctatgaayattctgtcaggaccacctacaaaatctctaagaaaataagttttccttatagctctccttttctgagccatcaccagaattgcccttaacattctatttccagcaatatagtatttttctagcatctgtctcaaaacttttccaatctccatccattgacctgttcgaaagccacttccacatttttttcccacactttttccccactctccatgccaatttctgtctaagtctgttcaggttgctatagtaaaaatactacaaacagggtggcttataaactacaaacatttatttcccatagttctggtggctgggaagcctaagatcaaggcaccggcagatttagtggctgatgagagcatgtacctcatagagagcacttttgagctgcatccttacatggtggagggggcaaacaagctctcttgggcttaatttataaggacactaatctcattaatgggagctatgccctcatgttctagccatgtccca

SEQ ID NO: 143681 - DNA, 597 bp, Homo sapiens
tcatttaatcttgttctgcctgacacaaaaccaaagtttctgagagttgtgagatgctacctcctggatgtcatctaacaattgccatctgtgtaacataatccagctcaaacttatctccagcattatcggcctcttctctcccattagtcctctgtcttaacatgtttgtgttcccaaaattaccacacactttataaatgagaagcattctaagggttcartaaacatgtattaattaatgaatcaacatacagataatggacaagttagctttttaaaacttacagattttcaaatcctattcataaatattcagttcaaaatatttctgacaagttcttttaatgttgttcaaaatacagtatcattacaagcttgacaaacatcagcacagtcactaaatattgtaaacagaaagaatgtaattaagttgtccaaagtacacagtcaaatgtttgtagctctcctcttactgaatttaaatatagccacaatgtaaccacaagattatttgctcatacagcggcatttttgtcatttttgactcttctagatttttaatatatttattgttcatgtgattgtatttttacc

SEQ ID NO: 143682 - DNA, 560 bp, Homo sapiens
agtttatcagagagatatctacactctcatgtttattgcagcactaatcacaatagcaaaaatatggaatcaacctaagtgcccatcaatgaatgaatggataaagaaaatgtggtatgcaggcatatacatatacatatatattattcacacacacaatggaatataattcagccatagaaaagaatgaaatctgatttgtaccaacgtggatggatggatgtaactggaggtcactatgttaagcgaaataaggcaagcaaacaaagacaaatctcatgagttctcactcatatgtggaagctaagaaggtgggcatcawgaagagagagtagatggatggttatcagaggttaggacgtgtatggcaaacagatgatgaagaaaggctgactaatgggtacaaatacacaaatggacagaagagataagacctagtgcttgataaattaataggataactatagtgtactataatctattgtacgtctcaaaagagctagacgaaaataatttgaatgtacatagcatgagaaaaaaataattattgaagatgctgg

SEQ ID NO: 143683 - DNA, 560 bp, Homo sapiens
agtttatcagagagatatctacactctcatgtttattgcagcactaatcacaatagcaaaaatatggaatcaacctaagtgcccatcaatgaatgaatggataaagaaaatgtggtatgcaggcatatacatatacatatatattattcacacacacaatggaatataattcagccatagaaaagaatgaaatctgatttgtaccaacgtggatggatggatgtaactggaggtcactatgttaagcgaaataaggcaagcaaacaaagacaaatctcatgagttctcactcatatgtggaagctaagaaggtgggcatcatgaagagagagtagatggatggttatcagaggttaggacgtgtatggcaaacagatgatgaagaaaggctgactaatggrtacaaatacacaaatggacagaagagataagacctagtgcttgataaattaataggataactatagtgtactataatctattgtacgtctcaaaagagctagacgaaaataatttgaatgtacatagcatgagaaaaaaataattattgaagatgctgg

SEQ ID NO: 143684 - DNA, 560 bp, Homo sapiens
agtttatcagagagatatctacactctcatgtttattgcagcactaatcacaatagcaaaaatatggaatcaacctaagtgcccatcaatgaatgaatggataaagaaaatgtggtatgcaggcatatacatatacatatatattattcacacacacaatggaatataattcagccatagaaaagaatgaaatctgatttgtaccaacgtggatggatggatgtaactggaggtcactatgttaagcgaaataaggcaagcaaacaaagacaaatctcatgagttctcactcatatgtggaagctaagaaggtgggcatcatgaagagagagtagatggatggttatcagaggttaggacgtgtatggcaaacagatgatgaagaaaggctgactaatgggtacaaatacacaaayggacagaagagataagacctagtgcttgataaattaataggataactatagtgtactataatctattgtacgtctcaaaagagctagacgaaaataatttgaatgtacatagcatgagaaaaaaataattattgaagatgctgg

SEQ ID NO: 143685 - DNA, 594 bp, Homo sapiens
attggcctcattaaagttaataaattcttataattagttattttctattaggtattgcttctagtgaggtcccactaagtcactgattaacatagatctagtcacttgtctagtacagaatctgtgctgcaatttacagtgagtacttgctcttaggaatctgcagaaatgatcccagtgcaggctaagctgggaggatcacttgaggccaggagttcaagatcagcctgggcaatatagtgagaccctcactctaccaaaaaaaaaaaaattaattagctgggcctgtagtcctagctactcaggaggctgaggcagaaggatcacttgagcccaggagcttgaggccacagtgagctatgactgcaccactgcacgccagcctggacaacagagtgaaaccctgtctctagaagaaaaagaaatagaatctgaagcaaygtttcctggcaaggaataacaatataatcaatagtttactgcacgtctaaagctctttctaacctcatatgtccgcctgagggagaatatgtttcctatacacattgtaggcctgagttaaggggaaatcagaatgtctaaaatgtttaataa

SEQ ID NO: 143686 - DNA, 594 bp, Homo sapiens
attggcctcattaaagttaataaattcttataattagttattttctattaggtattgcttctagtgaggtcccactaagtcactgattaacatagatctagtcacttgtctagtacagaatctgtgctgcaatttacagtgagtacttgctcttaggaatctgcagaaatgatcccagtgcaggctaagctgggaggatcacttgaggccaggagttcaagatcagcctgggcaatatagtgagaccctcactctaccaaaaaaaaaaaaattaattagctgggcctgtagtcctagctactcaggaggctgaggcagaaggatcacttgagcccaggagcttgaggccacagtgagctatgactgcaccactgcacgccagcctggacaacagagtgaaaccctgtctctagaagaaaaagaaatagaatctgaagcaatgtttcctggcaaggaataacaatataatcaatagtttactgcacgtctaaagctctttctaacctcatatgtccrcctgagggagaatatgtttcctatacacattgtaggcctgagttaaggggaaatcagaatgtctaaaatgtttaataa

SEQ ID NO: 143687 - DNA, 423 bp, Homo sapiens
cgtcttaaaaaaaaaaagaataaagttctcatcctttattctgttaatatgttgtataacattgattaatttttgtttgttaaataaaccttgtattccaggataaatcttatttggtgatgttgtgtgttactttttatatgttgctggactgtttactagtattttattagcaacttttgcatctatatttataagagatgctctgtagttttattttatatatgtcattgtccagttttgatatcagggcaatactggccttgtagaaygaattgaaaatggtctcttctcttttaagtttttgaagagtttgtaaaggattagtgttaattcttccttaaacatctggtagaattcaatagtgaattcatctgttgttttattgtgggaagttatcttgaaatactgattcaacctttt

SEQ ID NO: 143688 - DNA, 465 bp, Homo sapiens
aaatcttttattcttgctttaaacatatgacaagcatagcatccttctaccaaaggaggatcatgttccctaattagaatgtccaccagggaggtaatgacaccatgccataggacacaatccctgggcagcactcacatattccagcctatgccttcacaaggaaataacaaasgtccaggggactgttcacccagccacctcccagtgtatattgaactttttctattttcaattaagagagacaataggaaaatagtctttactcctgctttctagatgtcaaatatcatctatacaattattttatcttataaaatttattccattaaaaatactaccagctattattatttacagtggaatactatgtaggttatgattatgtctgaagaggaatgcatgatactaaatacctttaatattatatcagttctatttctgaatgcatgaaaaaagactatg

SEQ ID NO: 143689 - DNA, 316 bp, Homo sapiens
ggttcactgccaagtctctcaaggagtttggctaaagctccatttgttcttgagcctggaaccaaaactatctgccaagaggtccagaaggaatcttgcacactctcacctgcccactgacattggtctcagcagtgaacctgasagtaaccctgtggtgctgctccatccttcctcagctgaccttacagctcagagatgctcacacaaggacccagagggagactcacccatatcccccagcctgggagtctaagcctcacagatgggcatgccaacctctatcccacagcaggtcccaaggggacccagtctc

SEQ ID NO: 143690 - DNA, 634 bp, Homo sapiens
catacaacctaccaagattgaaccatgaagaaatagaaaacctggacagaccaataatgagcaacaagattaaagaagtaataaaaatgaccccatcaaagaaaggcacaggacctgatggattcactgctgaatcttagcaaacayttgaagaagaactaataccaattctattcgaactatctcccaaaattgtagaagagagaatacttccaaactcattatacgaggacaccaaaggtgtcaaaggaaaccagacaaagacacaacaacaaaaaagaaaacaacagaccaatatccctgattagcatagatacaaaaatcctcaacaaaatactagcaaataaaatttaacaacacattaaaaatatcattcaccacaatcaagtgggatttttcccaggaatgtaagaatggttcaacatatgcaaatcaatcaatgtgttacattgcatcaacagaatgaaggacaaaaaaatgatcgtttcaatagatgctgaaaaagcattcgataaaattcaaacatcactttatgatttaaaaaaatctcaagaaatggaaaaatattacatgctaatggattaaaataattaatattgttaaaaatgtctatgctgcccaaagcaatctacag

SEQ ID NO: 143691 - DNA, 538 bp, Homo sapiens
aaatctgtctaaagctcttaaaccacatggtgcatggactgaaaacatttaaaatttattatcttgaaaggattctcattttgtcctagcagcattgccaaatcctatgcctataaatttacacaaattcctgattacccaaggattaacttggagatcagcatcatgaaattgttgcccttccccgatctgttttctttgatattaatacaagcttccatgataattcctcttttcatgtcctgggactcactgcccataaaaatgatacttccaacagcgtargattatgggtctttgtgttctcaaccatagttgcctctctttgcactccacttcagttatttactatatgggctcaagacctataccatatctaaaatattttctttctgactataacaattcatcctttacactaacccccttatttcatgacccgtgaactctgatcttgtggtgatctgatggaaaacttttccctactctccaagaatgttacttcttgcccccctggcctcacccaaagatctcatag

SEQ ID NO: 143692 - DNA, 379 bp, Homo sapiens
tgtctactttgaggggatagcagtggaccctcaggggttgcaccctccccaaaggcacctgccaacctcataggttattttttagcaggtgagttgtatggggtagactggccatctcatccaaggggcagggagggagcgcgagaattgctgatacttgccccataagtacagagacccacagagagacatgagtaagacattgctctgtatttttttttttttttttttttgcattttaagagactggaggggaaaaaaagataatggaatgattccccccccsgccccccacataaaagagtaatatggaggaaatttgttcctcgagaagactttgctgtttgaatatatatatatttattcattctatttttga

SEQ ID NO: 143693 - DNA, 379 bp, Homo sapiens
tgtctactttgaggggatagcagtggaccctcaggggttgcaccctccccaaaggcacctgccaacctcataggttattttttagcaggtgagttgtatggggtagactggccatctcatccaaggggcagggagggagcgcgagaattgctgatacttgccccataagtacagagacccacagagagacatgagtaagacattgctctgtatttttttttttttttttttttgcattttaagagactggaggggaaaaaaagataatggaatgattcccccccccsccccccacataaaagagtaatatggaggaaatttgttcctcgagaagactttgctgtttgaatatatatatatttattcattctatttttga

SEQ ID NO: 143694 - DNA, 508 bp, Homo sapiens
gtgatcaaggtggatagagcatgtcaagggggtagcatttctggggaaaccacacctggctcaggatgtggttataaacaccggatgctgattggaagggaaggcttttacagacaggtaagggtcagcttggkggctgagttgttacgggttggcctgcaggggcactggagccactagctatgagaagagaggtgtgggaactgggaaggcccgtgagcagggcaccagctccatggtgaagccgggacttggccaggggaggacagcacaaggctgggaggagccatgggggcaagacaggaagagcgcagcaggagggggtggcgaacaagcacagagtgcgggattccaaaatgcaacagggggtcaggtgcccacagatcctgcctccagacccagggtcagtgggggtgtgagaggacaaagcctctccagagaggcctgcaggggcaacagcaaggaaaggcagaagccacaaaggtagcttgcaaagaaagtgtcagga

SEQ ID NO: 143695 - DNA, 508 bp, Homo sapiens
gtgatcaaggtggatagagcatgtcaagggggtagcatttctggggaaaccacacctggctcaggatgtggttataaacaccggatgctgattggaagggaaggcttttacagacaggtaagggtcagcttgggrgctgagttgttacgggttggcctgcaggggcactggagccactagctatgagaagagaggtgtgggaactgggaaggcccgtgagcagggcaccagctccatggtgaagccgggacttggccaggggaggacagcacaaggctgggaggagccatgggggcaagacaggaagagcgcagcaggagggggtggcgaacaagcacagagtgcgggattccaaaatgcaacagggggtcaggtgcccacagatcctgcctccagacccagggtcagtgggggtgtgagaggacaaagcctctccagagaggcctgcaggggcaacagcaaggaaaggcagaagccacaaaggtagcttgcaaagaaagtgtcagga

SEQ ID NO: 143696 - DNA, 508 bp, Homo sapiens
gtgatcaaggtggatagagcatgtcaagggggtagcatttctggggaaaccacacctggctcaggatgtggttataaacaccggatgctgattggaagggaaggcttttacagacaggtaagggtcagcttgggggctgagttgttacgggttggcctgcaggggcactggagccactagctatgagaagagaggtgtgggaactgggaaggcccgtgagcasggcaccagctccatggtgaagccgggacttggccaggggaggacagcacaaggctgggaggagccatgggggcaagacaggaagagcgcagcaggagggggtggcgaacaagcacagagtgcgggattccaaaatgcaacagggggtcaggtgcccacagatcctgcctccagacccagggtcagtgggggtgtgagaggacaaagcctctccagagaggcctgcaggggcaacagcaaggaaaggcagaagccacaaaggtagcttgcaaagaaagtgtcagga

SEQ ID NO: 143697 - DNA, 611 bp, Homo sapiens
ggggttaagcatgggtactcagccacaggctgcaggtaaaattcttctgtgcccctcatcccaactgccctgtcaatagtgctagctctggggtggggacatttcgaatgaggggagattgacagaatcccaccttgaggcagagccaggaagcaaagaaagcaatgcaggaaaggtctgaacactttagcacagtatcagaaagggaaagggcttgtgtctctggccatctaaaatttatattacattgtgacttcttcaaaaaaagaaaaaaagtacatcccggcacaatgagggaagacagtcccaagtgtggtaacgtagggcatgcaacgcaggaccagaagactggaagcactggcagcttaccagggtgatgaagactactatggaaaaagctgtttccctttttataaatgtttacttctttgtcttatttttaaatatatcaacaggttgtaaattacttttctaactttgtaaaataagaagacattttaaagaaatataggccgggcaccrtggctcacgcctgtaatcccagcactttgggaggccgaggtggctgttatcacttgaggccaggagtttgagatcagcctggccaacca

SEQ ID NO: 143698 - DNA, 451 bp, Homo sapiens
ttctttcttaacatcatagccttttgctctttcttctggcatatcagtatgccagatactttctttgtcaagtgtcaggcagtggrtctagagacttgtaccacccctttagaaagccacagtatggccctgagaatcattagtttctgaaaaagaactttgatgtgcagaaataagtgtcgtagatgacagctattagcttcctcatgaagtacttgggtcaagagactgagttcaaaaggacttttagttattcacacttccatatttctactttgactttttttcccaagcaatgcgaatgtgttcaaatgtacactttttaacaatttcttttgagtatgcccaaactgttaggttgtgtgtatgctgtgatttagcaaacttaagaaactgtaaatgaacagaaaacagaattattaagacctgggatgcctataaccctgaattc

SEQ ID NO: 143699 - DNA, 408 bp, Homo sapiens
gtggggggagtccagttgagacattatgataaaaatccagtatagcagatagagtcataacttagagcagtggaataaataggttgatattattaggctaggtttgtccattcttagcaatcaattagaaaaaggcaggtggataaagaataaagagatggaaatcttaaggtatgtactcagccaactgggtgagtgatggtagcacttaccaggtcaggggaggaaagctgaagagtttgctagtgaacacacaaatagaaatgttcagtagattattgtcatcatcatcatcaccatcactatcatcatcattatcatatttcctcagcactatcatttattaatttgtgaggcttggtactcctagaagytttgcacagatcacagttcacttaatcttttcaa

SEQ ID NO: 143700 - DNA, 468 bp, Homo sapiens
atctgtggctcgtgtaccccaaattaagtgtttctgattggcaagtgtctctcatgtaaataatgattaagaaaccatggcttcttccatcttgtgrctctaccatcttcaacacatggtgaggggctacagaggggaagagaaatagggggttgtactcacaaaatttttatgtggcaggcctgaaagtggcacatacacagacccatacacatttccttaacttataatcaatgagcatgtaatgtaacactcactgacatctctatagctacctgtaagggagtctggagatgtggtctcactgcatgccaagaaagaaacattctttcctgcaatgcctatatatgtatatgtataaatatatatatgtatatacatgtttacatatgtatgtatatatatatgtgtgtatacatatactgtatgtgtgtatatgtatatatacacacacacacacatcttaag

SEQ ID NO: 143701 - DNA, 468 bp, Homo sapiens
atctgtggctcgtgtaccccaaattaagtgtttctgattggcaagtgtctctcatgtaaataatgattaagaaaccatggcttcttccatcttgtgactctaccatcttcaacacatggtgaggggctacagaggggaagagaaatagggggttgtactcacaaaatttttatgtggcaggcctgaaagtggcacatacacagacccatacacatttccttaacttataatcaatgagcatgtaatgtaacactcactgacatctctatagctacctgtaagggagtctggagatgtggtctcactgcatgccaagaaagaaacattctttcctgcaatgcctrtatatgtatatgtataaatatatatatgtatatacatgtttacatatgtatgtatatatatatgtgtgtatacatatactgtatgtgtgtatatgtatatatacacacacacacacatcttaag

SEQ ID NO: 143702 - DNA, 434 bp, Homo sapiens
cctatatcaaaaaaagaagaaaaacttcaaaaacaaaaaaccctaatgatgcacytgaaagaactagaaaagcaagatcaaaccaaaccaaaaacgagcagaagaaaaggaatgatcaagatcagtgcagaagtaaatgaaattgaaatgaagaaaacaatacaaaggatcagtgaaataaaaagttgattttttgaaaagataaacaaaattgacaaacctttagccagactctgacaggatttttctaacatagcatcttaataagaagacacaaataaataaaatcagagatgaagaagggtacattacaactgatactgctgaaattagaagtatcattagaggctactataagcaactacatggcagtaaattggaaaagctagaagaaatgaataaattcctagacacatacaacctaccaagattga

SEQ ID NO: 143703 - DNA, 490 bp, Homo sapiens
tggtatgagtaaacaaactttcatcttgtatattaaagtactggtaattttaggcttcaagctagaaaaaaatattcaggattayagtgattgtaataaaaatatgaaagatttctaatattctggggattcttgtctctcccttttgaaagctttcaaggaaaacaaatactgcattgaaaaaaatgttccatatttattttactatttatgaattaaacaatgttgggacaatatgaattttaatcaaagcaatacttttcaagaagagagaactgtacaaactatttatcttttccattttgtctatcaacatgtttggacaatgaaaactttacatatgtaattttaaagtttaaattatgcttatgaccatttcatgtaagtttctttcaaaatagtatttgttttaaggctttatttgttatataaaagagtaaaatagtgctacaaaaatttgtgtatgttgattaatttggtttacatgctg

SEQ ID NO: 143704 - DNA, 617 bp, Homo sapiens
aattgtattgactacgtgctattagcttctagggacagatttattaaatrgcacccttcaattgcattcaggttttcagaaaacctattattctataccatccttcactttgtatcattgctaagggtctcttcactcagttaagtcactagaagtgccaattaaaggtgaaattaaggaagctcagttcacacacttgcagggacactggtgtttacctgctaatggatagacaatgggctgaaaagagggattaaagcagtttttattttcttaagtcagatccagctctttctggactgcatatcaaccaatacagcctggaattttaaaaatgaagaatatgcaatccagccaagatgacctatatgtctaaaaccatatgctgaactgcttactccaaggatatttctacattataggccaaaaaggcttcagacagaagcatggatatgctaataatcaggtctgccactctaatcatctcctctggttccttgacacacatcctccacttcaaggaggctgatcactcctcactgccctgggcacacgttcatacatacttcttgattatgtttattttgtctttcctgctagcaaggcctacccattca

SEQ ID NO: 143705 - DNA, 573 bp, Homo sapiens
tcatagtcaccttcattttcttttcataccacgtaagggttactttggcataatcggagtcagcttatgtcactctcagataattattgatgtcagcagggccttcttcagaaagagggaagtaacttcagtcagaaattgcaaaacattcaaatattttagaaagaaaattaaagattagatgccaagatggccaactagatagcttctgcacagcaaagaaactaacagagtaaacagaaracctgcaaaatggaagaatatatttgcaaactatgcatatgacaatggcctaattttcactatctacagggaacttaaacaaatcaataagcaaaaaacacataaccccattaaaaagtgggcaaagggcttcatgaacagaagacatacaagtggccaagaaatatatgaaaaatgcttacgtcactaatcatcagagaaatgcaaatcaaaaccacaataagataccatctcacaccagtcaggatggctattataaaaaagtcaaaaaatgacagatactggcgaggctgaaaagggaatgcttatacaccattggtgggaatgtaa

SEQ ID NO: 143706 - DNA, 422 bp, Homo sapiens
tttgtgatccataggcataggtcaaaatatcaacattaacaagagtttggaagaaattgattccaaccctcatggatgactctgaggggttcaagtggagaaagtaactgcagwtgtgctggaaattgcaagagaactagaattagaaatggaacctgaagttgtaatgaaattactgcaatcttatgataaaacttgaaagaatgaggagttgtttcttggatgaagcaaagaaaatggtttcttgagacagaatctacttctggtaaagatgctgtgaacattgttgaaatggcaacaaaggatttaaaatattatataaacttagtagataaaccagcagcagcgtttaagaggattgactccaattttgaaagaagttctactatgggtaaaatgctgtcaaacaccattgcatgcta

SEQ ID NO: 143707 - DNA, 604 bp, Homo sapiens
ctccacataccacccagggcaatttttcttttcttttctttgtgagacagagtctcactctgttgcccaggctggagtatagtggcgtgatctcggctcactgtaacctccgcttcctgggttcaagtgattctcctgcttcagcctcctgagtagctggaactacaggcatgcaccatcatgcctggctaatttttgtgtttttagtagagacagggtttcctcatgtttgccaggctagtctcaaactccagacttcaagtgatccgcctgcctgggtctcccaaagtgctggcattacaggcatgagccactgcacccagcctaatccttcttaaacacaaattaaatcatgccactcaccagcttacaactgccaatgtcatcctgttacactcacataaaaatccaaactccctactctggcctctgaggccctacatgacctgtcctcctatctcatttcagatcactctcaccagaactcacaatgcatggcccaccacaggctcttgataaagtgtctmtcaagtgcatgagcgaaagaggagccctagtgatatcaagtatcaccagaccaactgttatgagaactttcaacatg

SEQ ID NO: 143708 - DNA, 414 bp, Homo sapiens
gatcttcaaagagatttagactcccatagggtaacgtgggagacttcaacaccccattgacagtattagacagataatccaggcaaaaaattaacaaagatattcaagacctgaactcaacactggaccaaatggatctgatagacatctacagaactccccaccagaatacaacagagtatacattcttctcattgccacatggcacatactctaaaatcaaccacacaatcagacacaaaacaaatttccrcaaattcaaaaaaatcaaaattgtactgatatggtttggatctgtgtccccacccaaatctcatgttcaactgtagtccccaatgttgggaactggatcattggggtagatccttcatgaatggtttagcaccgtccctttggttctgttcctgtaacaga

SEQ ID NO: 143709 - DNA, 474 bp, Homo sapiens
cttgcccctctctcttcctcctgctcccaccatgtgagatgcctcgctcccccttctgccataattgaaagtttcctgaggccttcccagaagctgagtagatgccagcactatgcttccttacagcctgtggaaccatgagccaattaaacctcttttctttataaattactccgtgtcaggtatttctttacagcaatgtaagaatggtctaatacatataccatccacactctcagaccayagcacaataaaaacagaattcaatacaaagaaaattgcacaaaaccattcatttacattgaaattaagcatcctgctcctgaataacttttgggcaaataatgaaattaaggcagaaatcagtaagttctttgaaactaatgagaacaatgataacataccagaatctctgggacacagctaaggcagtgttaacaggaaaattttgagcgctaaatgcccatattgaaa

SEQ ID NO: 143710 - DNA, 412 bp, Homo sapiens
ccaggatgaaaacaggcaccaagtaggttagaaggaattgggaagagatttcttccaaaagatgaagcgatgaagttctgacarttctgaacacactgagaggatgtttaattctggcaaagagcatggagcttgtaagtgataacaggaaagtcagcacgttttaaaataatacaataattacctctaaggcaaacaaaagctgtgcaagaaaagaaagttaaacactctgcaacacggttcaactgtgtataacactgtcataaatttaataccattcacgctgcctattctctaattggcattatggtatatcaatattaggagaatgagaagggaacccattttggcagggtaggtgggtgaggcatgaaaaaaaagctaaagtctcattttccatagtaggaattca

SEQ ID NO: 143711 - DNA, 412 bp, Homo sapiens
ccaggatgaaaacaggcaccaagtaggttagaaggaattgggaagagatttcttccaaaagatgaagcgatgaagttctgacaattctgaacacactgagaggatgtttaattctggcaaagagcatggagcttgtaagtgataacaggaaagtcagcacgttttaaaataatacaataattacctctaaggcaaacaaaagctgtgcaagaaaagaaagttaaacactctgcaacacggttcaactgtgtataacactgtcataaatttaataccrttcacgctgcctattctctaattggcattatggtatatcaatattaggagaatgagaagggaacccattttggcagggtaggtgggtgaggcatgaaaaaaaagctaaagtctcattttccatagtaggaattca

SEQ ID NO: 143712 - DNA, 591 bp, Homo sapiens
agtatctataatgtatgactgatgtgcagcttgaatacaataatttagcaaaattctgcagaaagcacttcgaataaatcatagctgttataaccttacactttgtattcttaactctcccactaggcaaactcaaattttttcagagattcaaaataaargacttatgcattctttgcaagtaccgttgtttctgaggtggagagagaacttggatctcgatcctgacttgtcctagatggagccctccaaaacttgaatgagtcatctaaacctgcaacaacgagaaaattgttaacatggacaccctcctaggaactgtaacaattaattaaaagggtacgcattacaggaaaccaattcaaaactaaagaaaggaaaaaacttatatggatctggcttctgagatagaccactatttaaaaaaaaaaaaatctaaggagagtttttttttaatgtgcataagaatcactgagagcttgctaaagcagctgcttcagccccagccccagaggctccaataccccaggtcagagtggaagccctgagtgttcacttctaacaagttcacagaagatgccaatgctgtta

SEQ ID NO: 143713 - DNA, 591 bp, Homo sapiens
agtatctataatgtatgactgatgtgcagcttgaatacaataatttagcaaaattctgcagaaagcacttcgaataaatcatagctgttataaccttacactttgtattcttaactctcccactaggcaaactcaaattttttcagagattcaaaataaaggacttatgcattctttgcaagtaccgttgtttctgaggtggagagagaacttggatctcgatcctgacttgtcctagatggagccctccaaaacttgaatgagtcatctaaacctgcaacaacgagaaaattgttaacatggacaccctcctaggaactgtaacaattaattaaaagggtacgcattacagraaaccaattcaaaactaaagaaaggaaaaaacttatatggatctggcttctgagatagaccactatttaaaaaaaaaaaaatctaaggagagtttttttttaatgtgcataagaatcactgagagcttgctaaagcagctgcttcagccccagccccagaggctccaataccccaggtcagagtggaagccctgagtgttcacttctaacaagttcacagaagatgccaatgctgtta

SEQ ID NO: 143714 - DNA, 567 bp, Homo sapiens
ctttctcccaaacacagtggtaggttattcacattcattccttgctacacgcatctagttaaaataacttagactttttcaggaaagacaaactgaggccaaaagctattgctcatctcattgctaaaactctggcaacattttctgaattccacagatccacagtttgagaagatgattgtttaacttgtggcatcatgagggcccaacagtytagaaaacagtgggacagcctgttgccctgcagccaggtgataatccacagtaaccaaaataataacaaatattcatgaaaccactgtctttctttttcagctcattattgaatatttgcactgtatttattatttctgctgcaaagaaagtaagaaattaccaaccaatagatcatgttcttatcaagtgccaggcaaaaataattcttataactacacactaggaagagagtaggaaactggtaggaagggaccaaaatgttatacaacaaaatactatgcacgacaaagatatggtatactatagaaagcagattatttttaaagaagcgatatagacttttctgcaaat

SEQ ID NO: 143715 - DNA, 567 bp, Homo sapiens
ctttctcccaaacacagtggtaggttattcacattcattccttgctacacgcatctagttaaaataacttagactttttcaggaaagacaaactgaggccaaaagctattgctcatctcattgctaaaactctggcaacattttctgaattccacagatccacagtttgagaagatgattgtttaacttgtggcatcatgagggcccaacagtttagaaaacagtgggacagcctgttgccctgcagccaggtgataatccacagtaaccaaaataataacaaatattcatgaaaccactgtctttctttttcagctcattattgaatatttgcactgtatttattmtttctgctgcaaagaaagtaagaaattaccaaccaatagatcatgttcttatcaagtgccaggcaaaaataattcttataactacacactaggaagagagtaggaaactggtaggaagggaccaaaatgttatacaacaaaatactatgcacgacaaagatatggtatactatagaaagcagattatttttaaagaagcgatatagacttttctgcaaat

SEQ ID NO: 143716 - DNA, 567 bp, Homo sapiens
ctttctcccaaacacagtggtaggttattcacattcattccttgctacacgcatctagttaaaataacttagactttttcaggaaagacaaactgaggccaaaagctattgctcatctcattgctaaaactctggcaacattttctgaattccacagatccacagtttgagaagatgattgtttaacttgtggcatcatgagggcccaacagtttagaaaacagtgggacagcctgttgccctgcagccaggtgataatccacagtaaccaaaataataacaaatattcatgaaaccactgtctttctttttcagctcattattgaatatttgcactgtatttattatttctgctgcaaagaaagtaagaaattaccaaccaatagatcatgttcttatcaagtgycaggcaaaaataattcttataactacacactaggaagagagtaggaaactggtaggaagggaccaaaatgttatacaacaaaatactatgcacgacaaagatatggtatactatagaaagcagattatttttaaagaagcgatatagacttttctgcaaat

SEQ ID NO: 143717 - DNA, 567 bp, Homo sapiens
ctttctcccaaacacagtggtaggttattcacattcattccttgctacacgcatctagttaaaataacttagactttttcaggaaagacaaactgaggccaaaagctattgctcatctcattgctaaaactctggcaacattttctgaattccacagatccacagtttgagaagatgattgtttaacttgtggcatcatgagggcccaacagtttagaaaacagtgggacagcctgttgccctgcagccaggtgataatccacagtaaccaaaataataacaaatattcatgaaaccactgtctttctttttcagctcattattgaatatttgcactgtatttattatttctgctgcaaagaaagtaagaaattaccaaccaatagatcatgttcttatcaagtgccaggcaaaaataattcttataactacacactaggaagagagtaggaaactggtaggaaggraccaaaatgttatacaacaaaatactatgcacgacaaagatatggtatactatagaaagcagattatttttaaagaagcgatatagacttttctgcaaat

SEQ ID NO: 143718 - DNA, 597 bp, Homo sapiens
ggagtttgagaccagcctggccaacatggtgaaaccaaatctctgctaaaaatgcaaaaatttgccaggtatggtggtgcatgcctgtaatcacagctacttgggaggctgagrcacgagaatagcttgaacccaggaggtggaggctgcagtgagccgagattgcatcactgcactccagcctggtgacacagcaagactctgtctcaaagaaagaaactactctaacaaggatatggaatattattcacaaaacatgtgtagtccaacacaacccccaaatttaatttatagtgatctcagatcagtagtgctctggtttacaaaagaaccaattccattctccttagaaaaacatacattaaaaactcagttctcaaataagctacataaagttatagaaaaaatgaagttgtaaataataggagaaaacaatgtgcaataaataaaaaaaaatcagttaaactcagatatataaagattgtaaattctcaaatttttataaaaatgtcagacaaaaaatgtgaaaaaaatatttagagaggaaaaatgaaaatcttgaaggacattattaaaaagataactagatagagaaaa

SEQ ID NO: 143719 - DNA, 484 bp, Homo sapiens
tttaaaaagatctcccagtgatttttatggatactaaattttaaataactgctataccataaggatgccttaaccagattttaaaatttgcattccagataatgcactacaatgtccttgcatgaaatgaaaataatgcatattggccgggcgcggtggctcacgcctgtaatcccagcactttgggaggctgaggtgagtggatcacctgaagtcgggagttccagaccagcctgaccaacatggagaaaccctgtctctactaaaaatacacaattagccaggcgtggtggtgcatgcctgtgatcccagctactagsgaggctgaggcagaagaattgcccgaacccaggaggtggaagttgtggtgacctgagatcgtgccactgcactctagcctgggcaacaagagcgagaatctgtctcaaaaaaaaaaaaaaaggaaaaagaaaataatgcgtattcacttggcacaactaggaaa

SEQ ID NO: 143720 - DNA, 484 bp, Homo sapiens
tttaaaaagatctcccagtgatttttatggatactaaattttaaataactgctataccataaggatgccttaaccagattttaaaatttgcattccagataatgcactacaatgtccttgcatgaaatgaaaataatgcatattggccgggcgcggtggctcacgcctgtaatcccagcactttgggaggctgaggtgagtggatcacctgaagtcgggagttccagaccagcctgaccaacatggagaaaccctgtctctactaaaaatacacaattagccaggcgtggtggtgcatgcctgtgatcccagctactagcgaggctgaggcagaagaattgcccgaacccaggaggtggaagttgtggtgaccygagatcgtgccactgcactctagcctgggcaacaagagcgagaatctgtctcaaaaaaaaaaaaaaaggaaaaagaaaataatgcgtattcacttggcacaactaggaaa

SEQ ID NO: 143721 - DNA, 625 bp, Homo sapiens
cagggcagaataaggacttggggaatttgctcattaggatgatggttctggcttgtgtgtggcacacggctctgaggggacaaagagcagcagcaggaagatcaggtggagaaggggttactgcagggagccaggagggagcagacaggaattgagattagggtagggggcttctgactgttttgaagagaatctaaaatgaacactgaaaaacccacatgcattatttttaagaatctaagtttatccctccctcycaaaagattccctctgtacttctgtaggaacagggtgcacaggaccacacaggatgagacatcaaattccatgtcatatcataggcttctcaaagtgaaaaaattaaaaattagaggaagacggccaagtgctggtggctgacacctgtaatctagcactttgagaggctgaggcggaagaatcacttgaacccaggagatcaagactaggctgagggatatagccaagacctgtctctacaaaaaatagaacaaaaaagttagctgggtatagtggtgtgcggctgtagtcccagctactctgagactacagtgggaggatcagttgagcctggaaggctgaggctgcagtaagttatgatcatgcc

SEQ ID NO: 143722 - DNA, 625 bp, Homo sapiens
cagggcagaataaggacttggggaatttgctcattaggatgatggttctggcttgtgtgtggcacacggctctgaggggacaaagagcagcagcaggaagatcaggtggagaaggggttactgcagggagccaggagggagcagacaggaattgagattagggtagggggcttctgactgttttgaagagaatctaaaatgaacactgaaaaacccacatgcattatttttaagaatctaagtttatccctccctctcaaaagattccctctgtacttctgtaggaacagggtgcacaggaccacacaggatgagacatcaaattccatgtcatatcataggcttctcaaagtgaaaaaattaaaaattagaggaagacggccaagtgctggtggctgacacctgtaatctagcactttgagaggctgaggcggaagaatcacttgaacccaggagatcaagactaggctgagggatatagccaagacctgtctctacaaaaaatagaacaaaaaagttagctgggtrtagtggtgtgcggctgtagtcccagctactctgagactacagtgggaggatcagttgagcctggaaggctgaggctgcagtaagttatgatcatgcc

SEQ ID NO: 143723 - DNA, 438 bp, Homo sapiens
ggcttggacgctaatacaagtttctacatctgatgtggtcttcagtaagttatgtgagggccctactctgctatcatatctgcaatgtaagggaatgtaataattttccagagttgttgtaatattaaacagtgcaactcctaacagaccattgagtactagcatggagatgctcaattagtaattcctctatcccaacctcctgcctrggaaaggaggctcaacattatattattttttttcctagataataaaaggcattttaaggttagggaccaaaatatctttcctaaaatctgatatggtctacttgaacagtattcatggaagtcaagcttttccatttaaaaagacagagggaaaaaaatatctgcaaaatacctttcaatgtttgctgtgcttgccatgaggaatctgagatttgaagacacatttgta

SEQ ID NO: 143724 - DNA, 585 bp, Homo sapiens
tgaccagtgataatgatgtacagtaaactgaagagtgtgtgtgtttaactccatcatttgcatttctgtgtttgaggttaaaaatcaatatataattgtataaagttctctactttttttgttggtttttatctttyaaattttatttttactatttttttatttattgattttaagagaaaggatctcactatgttgcccaggctggtctcgaactcctgggctcacatgatactcttgcctaggcctatcaaagtgtttagattacaggcataagccaatgcacctggccctataactctctatttaacctaactataatattaaggagacataaaaggaaactaatatataaaataataagtatatggagatacataatgctctgacccaaattccgaattcttttgtatttgagagttacaattgcagatgatacaggagttgcagagggccctcaaatatcaccagcagtgtctcagtgaggttgtgatttttcagttttgtggctgttggtaaaatccccaataacacaaagcatattctacttttgaattaaaaagtagcggtgttcttggaaaatta

SEQ ID NO: 143725 - DNA, 585 bp, Homo sapiens
tgaccagtgataatgatgtacagtaaactgaagagtgtgtgtgtttaactccatcatttgcatttctgtgtttgaggttaaaaatcaatatataattgtataaagttctctactttttttgttggtttttatctttcaaattttatttttactatttttttatttattgattttaagagaaaggatctcactatgttgcccaggctggtctcgaactcctgggctcacatgatactcttgcctaggcctatcaaagtgtttagattacaggcataagccaatgcacctggccctataactctctatttaacctaactataatattaaggagacataaaaggaaactaatatataaaataataagtatatggagatacataatgctctgacccaaattccgaattcttttgtatttgasagttacaattgcagatgatacaggagttgcagagggccctcaaatatcaccagcagtgtctcagtgaggttgtgatttttcagttttgtggctgttggtaaaatccccaataacacaaagcatattctacttttgaattaaaaagtagcggtgttcttggaaaatta

SEQ ID NO: 143726 - DNA, 534 bp, Homo sapiens
aagcctatttaaaacaaggtcttacctaatttttctctaccggttgcctttaattgtgctagagttgtttcatcaattagaaactaagctcttagagtttttccctatcccccaaggtgtcttaaacagtcctgactggtataaatctcttttaygtcctgcatcaaaagatatagggataggtaagagtagtgaaaggaaacaatgaataacaagaaagataaacatggcctcaaggactcattcctgtatttttatccagaattttgctgaaatataaaagatatgttaatcagacacataaatattaaagagcaaatgtactgaagttcagagagttcagtagattgaattatgaggcaaacctagggataaaatctaacaaggacaaatatgaaagccagcattgaagacccagcaatcaatagtacaggcatacagatcaggggaaaccagagctgttagctccatgaagggaaaaaaaaaaaggtccctggctttagggatttcaagatcagaagtatctccagtatg

SEQ ID NO: 143727 - DNA, 480 bp, Homo sapiens
actgaattcatcttttttcaataagcaagccattttgctttgatttagatcagtaaatctaaataatatcaatctatatattttaccattaattttaaattgtttctaaacatttaaaacacttaattaaaatggcgtttaatttggagttaaatttttttcattttgtgaagatgcaaatctctccttttatcttttcataggataatcattttttcaacttcatatattgaacatatacttatttcccaatctcagataccagttccatataaacttccataaatatgtgggttgtctacttgatccattggtcaaattgccatcaccayatgtacatatacatttccatattaattttaaaatttgctcttcagtgtctgaaaaaggcaaactttgaagagctttagactgggattgcactgaatatgtagctcaatgtgagaactgacttgagcagtattgaagttttagacagat

SEQ ID NO: 143728 - DNA, 513 bp, Homo sapiens
aactgagtggccatttattttgacaagaacaatatgaggatgaacatatttgaaggacgtatgacttttgaaatgacttctacacaccacatggatacatccagtaaagacttgatggtcttcacatctccattatcctgaaatgtacatcctcctcctgggatagttcttgaacttcatcttttatcactctgaccatactgagcgtgattttagtaaagcaaatgtattcctcctaaaggtgttctcgcccagtgatgatcattggctggctccttcttgacattcagttcacagcttcagtcttctgcacagagcagccttcctggaccacaaactctaaaatatctaaagcttgttgwcatctctacagcagctctccacatgccatctctcactatcagatgtgttccccacttgctcattttttaactatgttcactctttcaagtaatatttccatgaaggcagaaacaatactggtttaatatggaaataaacaaacacacaacc

SEQ ID NO: 143729 - DNA, 590 bp, Homo sapiens
aaccaaaccacaacaacaacaaaaaacctccccagtcttctatgacccatagcaattggaagggcggaatgtgcacatttctcttctataactgtgcaggagagatagccccttacagcacattggcatttctgcttcccattcagcattgtctctcttccagaacagtcacattcaaactccatgctggattcagcttccaaacgttcatgaaagggtgcrgggcagccaacatactgctgaagctgcaacagcagtttgatgatgcataatgtattacgcagcagtggggccatgttttgcttcgactggagtgccaatgactcaaagacgagttttcattcttttattctccccctatttgaaaggcacaaaatactgtgggcacaacattgtctggccaggctgtagctgtagcttcctcaccagtgactgcccacatgataatgtaactaacgtaactctgtaataatattaggggtgtgtggaaaaatctatggccaatttagtcactcaagcagtgctcaaaatctctgggttagggctgcaatgggagataacttgccataagatgagctgcctggagctct

SEQ ID NO: 143730 - DNA, 382 bp, Homo sapiens
cacttctataatttttaagagcatttactgtgcaaaatcccttttaagcctttgactgttgcctttatctttccaggaggagacacatggctgaatgagacggccttcttggacagtcgtgaggatgggctttgattctggtgatcttcgagctcaaatctgagctgggcagttggcagatgtgagatcttgggtgcagaaatgagctgctgtgtgagtattctcatctgcacatggagatggcaatacctacytcataggatcgtagtgaagatgaattctgtccaatgtctccaatgctcctagtgcattttactcacacagatagtggcccacaaaagtgagtctagagtaagaggctgggtattcggaggtggaaact

SEQ ID NO: 143731 - DNA, 382 bp, Homo sapiens
cacttctataatttttaagagcatttactgtgcaaaatcccttttaagcctttgactgttgcctttatctttccaggaggagacacatggctgaatgagacggccttcttggacagtcgtgaggatgggctttgattctggtgatcttcgagctcaaatctgagctgggcagttggcagatgtgagatcttgggtgcagaaatgagctgctgtgtgagtattctcatctgcacatggagatggcaatacctacttcataggatcgtagtgaagatgaattctgtccaatgtytccaatgctcctagtgcattttactcacacagatagtggcccacaaaagtgagtctagagtaagaggctgggtattcggaggtggaaact

SEQ ID NO: 143732 - DNA, 564 bp, Homo sapiens
cagacaaatatttgtagcagattaccatagggtgactcactcaagcacccattcctgttcttctttacccttgctttcttcttttataaagtcaggaaagcagcagccatagtagctcatgcctgtaatgccagcactttgggaggccaaggaggaaagatcgcttcagcccaggagtttgagactagcctggacaatatggtgagacctgtctctacaaaaaaatattttaaaaatagccagaattggtggcacatacctgtagtctcagctacccaggaggctgaggcaggaggatcgcttgagcccaaagctgctgtgagctgtgattgcaccactgcactccagcccgagtgacagaraaagaccctgtctcaaaaaaaaaaaaaaaaaaaaaaaaaagacaggaaagccacatatctgatgtttgattttcatttccagttttgagctagcaatagccacataggacaactgtgtcctctgagacatgaatggacatctgctgagaaaggcttcttctctaagtagaatgcaaagccttgcaagaagaagggttttaaa

SEQ ID NO: 143733 - DNA, 441 bp, Homo sapiens
cggtttctaaaaaagaatagttgtctacatacacatcaaatggtaaagcaattaattcgaggttaacctaactaccagaggatccatccttaatgaaggtttgggatggatgggagaaaactaagagatgtggggagtagggatagttaaggaaaagaacgaggaaggtactagtaaattttatcatatagatattaataactgcaagataaygttatgtccagaatgtcttctctgcatcattaaaaaaatttaaacaaatatagcactgaaactcatgctttttacatttaaatcttttttttgtttaacaaattacctttttatttaaacaaatgtagctctgaaactcatgcctccatgttactattgctttaaaggagtgaagaatataacttggaatttatcaaagacaactcagaatgcattaaacaacaacaa

SEQ ID NO: 143734 - DNA, 384 bp, Homo sapiens
cagtctctctctctcagaaagggtcaaagcagctagaggggagggaactgctcaccatatccatatcatgggcatttatgcatcatcaggtatacaagggaaaggcaggaacaagaacatctccatttctatatcaggagtcacaatrgcccagttacacaatgacggcagacacagaatgctccagttccttcaggtcaagctccctgatgtagttttattatatctttaaaaaatgtatttgtactttaaaaacacctattcgacatagtgtgaactcatttccatcattccagggcagttggaacaaagctttatgctcagttgttacactgttcatgattttattactgtactgttgcttcctttcccgtgttaagaatc

SEQ ID NO: 143735 - DNA, 426 bp, Homo sapiens
ctgcatgccttagtggctgctggagtcttttagtgtgctgtttcctattctatcatgctccccagattttggygctcctggccatgctggacatttctgagggtttacctgacaatagaagacaaagacaaggcttatcactcacttcacctagacatcaaataacaccaaggcatcctgttttgattgagactagttgacacaaagattcaagttccagtgtgctgaatagctgctcacttaccccagtctcaaacccttcacgcttccttataaaataagccttcttattttgtttgatgatttttttttccaaaacacaaattagagcctatgaaatcctgggctaaagaaaggtcaccttcatgtttatttaaatgatggcatgcatgtctgctccagtgtgcctattgtgaaaatccccct

SEQ ID NO: 143736 - DNA, 426 bp, Homo sapiens
ctgcatgccttagtggctgctggagtcttttagtgtgctgtttcctattctatcatgctccccagattttggtgctcctggccatgctggacatttctgagggtttacctgacaatagaagacaaagacaaggcttatcactcacttcacctagacatcaaataacaccaaggcatcctgttttgattgagactagttgacacaaagattcaagttccagtgtgctgaatagctgctcacttaccccagtctcaaacccttcacgcttccttataaaataagccttcttattttktttgatgatttttttttccaaaacacaaattagagcctatgaaatcctgggctaaagaaaggtcaccttcatgtttatttaaatgatggcatgcatgtctgctccagtgtgcctattgtgaaaatccccct

SEQ ID NO: 143737 - DNA, 638 bp, Homo sapiens
aaactacaatatctgccttttaaaatattgtaaaattatatttttttataaattataaataaattatatttaaaatgtagcaattttttcaagttacattgaggcatcatccttctgtcgattctggttctagatccctgattagtaatagccatgcagctttctgtgactaccttgcctcttgtcttcctcctggctctggattagcatcccacctgcaagttcttccaggactgaaaacagtgagtaccattctatttctcttagctaggtaaaggaggagaactgtcacaaaatttccatttgattggtttttcttctatgctggttatccttgtatactaaagcgctctgttactccataagccatttgatcatgtgtcaattcaacaaatatttattgagcatctagtatatcaaagcactgcatttggtggggttataggtctagcaaaataagaaagaaacatggccctcttcctcagggagytggaggtggggtatcagacattgatgaaacaaaaaacacaattgcaattattgcaaattgaggtaggtcatatgtaggaaatgccaagaggataacgtgctaaaattagttatgttccaattgttcctgctgttacgttgttattgct

SEQ ID NO: 143738 - DNA, 586 bp, Homo sapiens
taatacggggagatgaagaacttctcagtgaggatgtctgttataaaggttcttgcagaaataatatctttccaggtcacatttcccaatcaaggttttttgttttgttttgttttgagatggagacttgctctgtcgcccagtctggagtgcagtggtrcaatctcagctcactgcaagctccacctcccaggttcacaccattctcctgcctcagcctcccgagtcgctgggactacaggcgcccgccaccatgcccggctaatttttttgtatttttagtagagatggggtttcactgtgttagccaggatggtctcgatctcctgaccttgtgatccgcccgcctcagcctcccagagtgctgggattacaggtgtgagccaccacgcccagcccaatcaaggttaaaaggctgcttgtgtattagcataccagatattttagcatccaaagtcaggcataatcttacgtgttctggacatggataaagtgtcatgttcatgtggcaactatacaattagttttatatttttataaataccatttatataattcattttatatttatatttcatctctcttc

SEQ ID NO: 143739 - DNA, 337 bp, Homo sapiens
tctttatatggtcataaaaatatacagccataaataagcaaccacttaatgagtagcacaggtactacaatgagctgtggaaacttaatgggaacgtaacaatccctggaattctagctttcaatggatgctgtgatgagaaaccatgaagatgttattccaaagagcttgcatatcagaaaaatagcagaggccaggagagagaaaaggcagaatgtcaaacrggagataaaaatcaaccacagtgtcccatcgataagttagggatgtaagcatcggcagggggaggaaggcagggtacatgatggtgcagctaagatgaggtaggatcggcaga

SEQ ID NO: 143740 - DNA, 506 bp, Homo sapiens
tagctttttgaggtgggcatttagtgctataaacttccctcttaatactactttagctgcatcccagagattctggtacattgtctctttgttcttactggtttcaaagaacttcttgatttctgccttaatttcattatttacccaggagtcattcaggagcaggttgttcacttcccatgtagttgtgtgattttgagcgagtttcttgagttctaatttgattttgctgtggtctgagactgttatgatttcawttcttttgcatttgctgagaagtgttttacttgcaattatgtgactgattttagagtaagtgtcatgtggcactgagaagaatgtatattctgttgtttttgcgtggagagttatgtagacatttatcaggtccacttgatccagaactgatactgaggtcctgaatatctttgttaattttctgtctcaatgatctaatattgacagtggggagttaaagtctcccactattattgtgtgggagtcta

SEQ ID NO: 143741 - DNA, 599 bp, Homo sapiens
tcatcggggcccaaagactcaaaaagttctgaaagcaatcaggctgtgaggtgatcattccaattttgtattaaaaatgccaagtgcatgcaatggggaaggaataatgggggactgtaagcttmttataggcagggaggcacatcagtgtgtattcaactcctagcagtgcctggcacattgtaagttctcagttagtgtttgcaaatgactacctgggctattattagacacaaaaatagtggggaagagaatgccatgagtacatgagatgaaggctcggcagtatgaaactcaatttgatagaacttcccacttctgaagtcagtgaaggaatgaaaacattttcctcaatattggggtccagttccagggcttacgttttgctttttgttttaaaaacactttcattttactagaaacaccgagggtggtcaagaataattctttacatgataggaaaagatgacagcaacaggtttatagacatttttgtagctcgctgaggcagcaaatgcaccacacagggagttggaaatctcaggtctcagccttgccactgccattatcagtgtgatatttgggttgccactaagcct

SEQ ID NO: 143742 - DNA, 599 bp, Homo sapiens
tcatcggggcccaaagactcaaaaagttctgaaagcaatcaggctgtgaggtgatcattccaattttgtattaaaaatgccaagtgcatgcaatggggaaggaataatgggggactgtaagcttcttataggcagggaggcacatcagtgtgtattcaactcctagcagtgcctggcacattgtaagttctcagttagtgtttgcaaatgactacctgggmtattattagacacaaaaatagtggggaagagaatgccatgagtacatgagatgaaggctcggcagtatgaaactcaatttgatagaacttcccacttctgaagtcagtgaaggaatgaaaacattttcctcaatattggggtccagttccagggcttacgttttgctttttgttttaaaaacactttcattttactagaaacaccgagggtggtcaagaataattctttacatgataggaaaagatgacagcaacaggtttatagacatttttgtagctcgctgaggcagcaaatgcaccacacagggagttggaaatctcaggtctcagccttgccactgccattatcagtgtgatatttgggttgccactaagcct

SEQ ID NO: 143743 - DNA, 350 bp, Homo sapiens
gcatcagcattacctggagggcctataacaatatgagttgctggatcttattctgagggtatctgattcagtgggtttgaggtaaaacctragaatctgcatttttaacaagtttgcaagtgatgctgatgctctggtccagggatgaactttaagaatctgtgggagatgtcagagcagcaagatggaaggaacctgagccctagtagctaggccacctattttccctaaaccacctacctactttatattattacttaaacaagaagtacaagtttactctgaactgcaacagcagcctattctatttcctaatacacatcccttggactgcagtccttcaacagcaa

SEQ ID NO: 143744 - DNA, 409 bp, Homo sapiens
agatctgaaaaaaagttaccatttcatgcaaattcacacacgtaatttataccccttggctttagagagattttcctacaagagaagaatggtcttggaacactgcacagttcacaacagaatcagtttctcatggtaattggtgaaaacaattcacagagttctgttttggaagcattatttagactggagggattatgatccaagcagacagttccgttaattttcccatttaagccacagccacagttgggtaacccaaggcttccagtgmgaagttactttgatccaaaccatagcagcaattctgaatgattgtagaaaccctttctacataacacatgggggagtgtatcagttcctctttgctctttctctctttacacacaaacataaaatggacctatgc

SEQ ID NO: 143745 - DNA, 506 bp, Homo sapiens
gaccccacgaccctcaactcggccctctcctcccactcgggccagatccggccttcgattggtgctcgcgggcgtgattcccgcccccgccccttccgtcattgccaagatggcgccggtcgcggtggccgcggaggctagagtcggagaaagaggcggaggcagtggcggccgcgaggggagggggagtcccgtctgactgagacggcaggcctgggcgggcgggcgggggtgccgcgaagggcggagcgccgggctggggatgagctaagcgggctcagagcgccgcggcattcagcccctcgtgttccgctaccgcgcgtgmgggattccggcgccgctctccgagctcgatccgctgctcgcacgggagccagctgggtggtgagtgcgggggcggcgacccgggcagcggtggcaggtggagctgtcacggcccggagaggtgacagccgggggcgcgggagcggggcgggtgggttcggggaggaggcacggatggccga

SEQ ID NO: 143746 - DNA, 506 bp, Homo sapiens
gaccccacgaccctcaactcggccctctcctcccactcgggccagatccggccttcgattggtgctcgcgggcgtgattcccgcccccgccccttccgtcattgccaagatggcgccggtcgcggtggccgcggaggctagagtcggagaaagaggcggaggcagtggcggccgcgaggggagggggagtcccgtctgactgagacggcaggcctgggcgggcgggcgggggtgccgcgaagggcggagcgccgggctggggatgagctaagcgggctcagagcgccgcggcattcagcccctcgtgttccgctaccgcgcgtgcgggattccggcgccgctctccgagctcgatccgctgctcgcacgggagccagctgggtggtgagtgcgggggcggcgacccgggcagcggtggcaggtggagctgtcacggcccggagaggtgacagccgggggcgcgggagcggggcgggygggttcggggaggaggcacggatggccga

SEQ ID NO: 143747 - DNA, 332 bp, Homo sapiens
caaaaccttgtctttaaaagaaaaaaaaaaaaaggtgataaattgtagatctaaaaatatcaaaggccgggtatggkggccctcacctgtaatcccatcactttaggaggctgaggcaagaggagcgcttgagcccaagagtttaagaccaacctgggcaacctaagaaagaccctgtctctacaaaaatttaaaaaattagccaggcatgctgggacactcctatagtccaaggtactagggagactgaggcaagaggataccttgagcacaagagtctgaggttgcagtgagctacaatcataccactgtactccagcctgagcaaccga

SEQ ID NO: 143748 - DNA, 559 bp, Homo sapiens
attcactcatctgacaaatatttattgaatactgaaatggacatgtatcagttttatttttgaccatgtagcatgtgaactccctttctatgtttagaaaatctgccmctgtatgtatcttataaaaaaggctggatgtccgaaccaatcatgaaagcagaaaaagaccagatatttggccaggcacggtggctcacacctgtaatcccagcactttgggaggccaaggcaggcagaccatgacgtcaggagtttgagaccagcctgaccaatatggtgaaaccctgtctctactaaaaatacaaaaattagctgggcatggtggcacccgcctgtaatcccagctactcaggaggctgaggcaggagaatcgcttgaacctgggaggcggaggttgcagtgggccgagatcgagccactgcactccagcctgggcaacaaaatgagactccgtctcaaaaaaaaaaaaaaaaaaaaaaaaaaaaaagacctgatatttgctctccctatttagggaccaagcacacagattggtcaattatatgcactcatgcagaat

SEQ ID NO: 143749 - DNA, 558 bp, Homo sapiens
ccaataactcttagatttgcccttttgaggtaattttcttaatttgtaaacatatttcattcttttttattttttccttttgtcttctctgactgtgtatctcaaatagcctgtcttcaagctcactaattgtttcttctgcttgatcaattctgctcttaaaagactctgatgcattattagtatgtcaactgcattgttcaactctggaatttcttcctgattccttttaattattttaatctgtttgttaaattaatctgataggactgaattccttctctgtgtcatcctgaatttcattgagtttcctcaacacagctattttgaattctctgtctctccataattggtcactggtgccttattaaggttttctggggaggtcatgttttcctggatggtcttcatgcttgtggatgtccatcagtgtctggacatttaagagttagctatgaattgtagkcttcacagtctgggcttgtttgtatttatccttcttttgaaggctttccagttatttgaaggcatttgggtgttgcaatctaaggtttgggt

SEQ ID NO: 143750 - DNA, 532 bp, Homo sapiens
gaattctcagaaccagcagttgaacgtaggatcatttaaggatacagcctagggtgctatacttaaaaatacaggccacagaactctaaatgttcatttgtccaaatatgaggaaatgtctctctgaaattctaacartctaaataatattttaaacaactctaaacttatcctgggtatcactaatttttgccaatgagaaacctatttcttacactcattatgtgcattatgaaagccccaactgttgccaaaagctaaacatagttgaagcgtatttattagccaccccataagtgtgacctttccaattaaatgctagctaattataccagaaatgtaaattcctgatttaggtaactggcttctcctatgtatagactgaaatgagctaacaatttatatcacattagatatattcaacaattttaaataaattacagatataaatataccagcaaaagatgctactcattaaggaagacaattaccatcctaattaactgaatttatatacaactagggaatccca

SEQ ID NO: 143751 - DNA, 600 bp, Homo sapiens
cactgaattcttgtcagtcactataataggttacattgaactttatttatagttgctctgtcaataactgtaaatctaagacacatagcctttttctttggattcatattatacatactatacaattyttttttgtagtcatggaagttagcacatcctactcagctttgtcacttgactaaatttttcatttctttgccttttcagaatcctgaggaatagaaataggaattctctttaactttaaagatctttgaatttgatgaaatatttttattcctacctataatttcaggatccttgaattcttatggatatttttatcagctgaatcctacatatttcttatgttcttgagtaacttataataacaacctataaggtcagtctactgatataattgctattatgccacaatgcaggagacactcaagtatatgaactccttcttttctaagggatcattctcaagaagaaaacatacaatgttatttttaggtatatatgacatatgccagtggctctcaaatatatatctttaaccccaattactttcctgaattctagagttttatttccagtcttctactagacatttct

SEQ ID NO: 143752 - DNA, 600 bp, Homo sapiens
cactgaattcttgtcagtcactataataggttacattgaactttatttatagttgctctgtcaataactgtaaatctaagacacatagcctttttctttggattcatattatacatactatacaattcttttttgtagtcatggaagttagcacatcctactcagctttgtcacttgactaaatttttcatttctttgccttttcagaatcctgaggaatagaaataggaattctctttaactttaaagatctttgaatttgatgaaatatttttattcctacctataatttcaggatccttgaattcttatggatatttttatcagctgaatcctacatatttcttatgttcttgagtaacttataataacaacctataaggtcagtctactgatataattgctattatgccacawtgcaggagacactcaagtatatgaactccttcttttctaagggatcattctcaagaagaaaacatacaatgttatttttaggtatatatgacatatgccagtggctctcaaatatatatctttaaccccaattactttcctgaattctagagttttatttccagtcttctactagacatttct

SEQ ID NO: 143753 - DNA, 621 bp, Homo sapiens
tgggtgtggtggcacatgcctgtaatcccaaatacttgggaggctgaggtaggagagtcacttgaacccaggaggcagaggttacagtgagcaaagatagtgccactgcactccagcctgagtgacagagcaaaattccatccaaaaacaaaaacaaaaacaaaaacaaaacaaagaacaacagaaaaacctgagaagtgtgcttatcatttctgtaatcttttttcaggagaggttgagaaaatataaagtactatgaccagttggccactggaggtcactattatttcacaaaaggagaacttgtcactctttcaaaaaaaraaaagcctaatcctattttaaaaatccaagagaaatggtagtaatagttgttatataacatttactgatttcccaaggctttaggaattacaactatagaaagctcatccttagtgtattaacatttaccaaacattctgctgaactgacatagtcaaatttttctgtgacatttctgctcatttatcattaccatttcatttttacaatgtacagatagtggaagtgtataataaggttctttcctcaaagttatccctaccccgcccccaccaccccaacccacattgttatatt

SEQ ID NO: 143754 - DNA, 580 bp, Homo sapiens
gttttcaaatgaattggtttgacttgttcagaatgttgttcttcttaagtgttcatgaaaaaattcactgaattttggtaagatctttgcattttatatctcagacaaaatgataactacctttttttttaactgaattgtcattgtgaaggcagaaaccatacctgttttttcctcrgtcatattctctatgcttttagcttcagtagatatttgttatttaacatataagtatacttagtaattaagaaacattccagcataaaaatggtaaagtatacaaagtacattattatgtaaatataaagtagtgcaatgcacaaacacaaatggccaataatcatgaaaggtgttatacctcattaagaatcaaataatatagatggaaaaaacctatatatcttttttccaaagattcaaaatacttgattatcttcaggattggcaaaggaatagggaaaaatgagcactttcattctctattgataaaatgaaaattacttcagttcattctggaaagcagtttggaaatatgtaccaaagatagaagatatggagcttttgttcccatagtaccata

SEQ ID NO: 143755 - DNA, 521 bp, Homo sapiens
caatatataactttataaacctagcttttcaatgtcagccttgaaagtgtcatgtttgtgacttctggatatgtatttggagacacagaaaagtaaaagcagagaagccagctgatcttacccatcatatagrcaaggtatgttagtagccctgactagctagattgctgtggaaataaaaagacgtagatgcactctgggattttaagaagacaaattagcaggatttggtgatggactagatttagagagataaggtgaggctccatcaaagataattcacggtttgctggcttgtgcaaatggggtataatggctaccctttcccccacgaaatagaaggctgtcatcatctgctgagaaacagaagtgaggggtcagaagtcgaggactttgccagccaggtgacaggaggatgggtactttaggcagaaggagcagcattaacaaaggcttgaaagtgtgaaaatgatcagtgttttctggaaattttgaatactgtagtggaattagaacacaat

SEQ ID NO: 143756 - DNA, 466 bp, Homo sapiens
tgctggcttcaggtgtaaccccacacatgccagctatggtggctatagggagagactcctcctgtttgaggaaagtagatctaagagtaaaagggactttgctttgcagcttcagtaccagttcagctacagtggggaagaaaaccaagtgggatcctggagtccccagtctgggaattgggtctggatgtctggatgccatttctagacctgccctgggtcagaggcaaatccacttcctgtaaggagagactcaggactggcagcattcaccacatgcaagctgaggtactcttagaccatgtgtgaacatcagcagtaaccaggtgatacttgccaagaacccagggtggtggtagycatgcttagaaactcctctgcttgaggaaaggggagggaagagaggaaagaacttttacagcttggttgccagctcagccacagtagagtagagcactaggtagat

SEQ ID NO: 143757 - DNA, 447 bp, Homo sapiens
cctgtcctacaagaaatgttaaagggagttcttcaatctgaaagaaaataatgttaatgaacaataatgaaacatctgaaggtgcaaaactcactggtaataayaaatacacagaaaaacagagaatatcaaaacactgtaattgtggcatgtaaactgctcatattttgagtagaaagtctaatagaggaacctaccaaaaataacagctataacaactttttaagacataaacagtaaaataagatataaatagaaacaacaaaaagttaaaaagcaggggatgaaattaaagattagtttgtattagttttctctttgtttacgcaatcagttttaagttgtcattggtttaaaataacagtttataagatattatttgcaagcctcaacctcaaatcaaaaacagatacatggaatagttttaaaacgttaaaacataccact

SEQ ID NO: 143758 - DNA, 447 bp, Homo sapiens
cctgtcctacaagaaatgttaaagggagttcttcaatctgaaagaaaataatgttaatgaacaataatgaaacatctgaaggtgcaaaactcactggtaataacaaatacacagaaaaacagagaatatcaaaacactgtaattgtggcatgtaaactgctcatattttgagtagaaagtctaatagaggaacctaccaaaaataacagctataacaactttttaagacataaacagtaaaataagatataaatagaaacaacaaaaagttaaaaagcaggggatgaaattaaagattagtttgtattagttttctctttgtttaygcaatcagttttaagttgtcattggtttaaaataacagtttataagatattatttgcaagcctcaacctcaaatcaaaaacagatacatggaatagttttaaaacgttaaaacataccact

SEQ ID NO: 143759 - DNA, 579 bp, Homo sapiens
tacttatatcagaaaaatacttttcaagcaaaagaaaaaactataaaaagagacaaaaattgtgattatgtattgaatgccaaaggrgtcaattctgcaagaaaaataataattgaaaatatatgcaccccacattgagcacccagatatataaagccaatatttgtggagctaaagagagagacagaccacagtgtaataatacctgggaattttgtcacaccactttcagcactggaaaaatcatcaagacagaaaataaataatgaaacaccagatttaatctgcaatatagaccaaaaggacctgattgatatttacaaaacaatttattcaatggaagcagaatacacatttttttcctcagtacattaaacattctcaaaggtaagccatacattaggccatataatttctttaaaaaaatttttaaaaatgaaattatatcaagtatcatctctgatcactatggaataaaactaggaatcaatagcaagaagaattttgtaaattatcaaccacatagaaaattaaacaatattctctctcttaatggccagtaggtcaatgaaaaagtta

SEQ ID NO: 143760 - DNA, 607 bp, Homo sapiens
ttctgtctttaaaaacttgtacccaagtttatcaattccagtttttaattctcaattctaccaaattccaaagtttaaaacactacaaattttaaaataaaactcaaaattagccaaagtttgttataaaaatatagctatgattctgtctcagattctttgtgggtttttaggtaaagggcaaaaatataaatgaaaagaggtaacaaaaatggtgcaaatttaagacagcttatttttctgacattctggtaattttaaatcaagatagagaattgytagcagaagtgccagaacataagatctgctaaataaaatgatgctacatttaaagtgaagataaaagacataaattacagtagacagaaggatcccttttgggaattaacttagaaattgtatcagactttgaaataagaacaaaataagagtgaaagaaaaaggatgatgattttaacttctaaagcttattataaaatgtttgaaaaatgtcataattgtaaagatatttaaataaaaatatttaaatatataattaagatagatataatagataaacagacagggatggatggatacatggatggatatgtagatacttggatgg

SEQ ID NO: 143761 - DNA, 579 bp, Homo sapiens
tacttatatcagaaaaatacttttcaagcaaaagaaaaaactataaaaagagacaaaaattgtgattatgtattgaatgccaaaggggtcaattctgcaagaaaaataataattgaaaatatatgcaccccacattgagcacccagatatataaagccaatatttgtggagctaaagagagagacagaccacagtgtaataatacctgggaattttgtcacaccactttcagcactggaaaaatcatcaagacagaaaataaataatgaaacaccagatttaatctgcaatatagaccaaaaggacctgattgatatttacaaaacaatttattcaatggaagcagaatacacatttttttcctcagtacattaaacattctcaaaggtaarccatacattaggccatataatttctttaaaaaaatttttaaaaatgaaattatatcaagtatcatctctgatcactatggaataaaactaggaatcaatagcaagaagaattttgtaaattatcaaccacatagaaaattaaacaatattctctctcttaatggccagtaggtcaatgaaaaagtta

SEQ ID NO: 143762 - DNA, 504 bp, Homo sapiens
ttctggtgttgataaagacacagaagttttgccaattggtgtatttcagcagatgttaaagtaaatacagaacccgwgttttgaagtgcgaaagccattcaatgcccttttacgtttttgctgtgttaattattttagcatattctggatttccagtttgggaaaaatcattgatgttttttacaaagatttttttcttccattttagtcagtttaaaaaaaatgtatctattgcttattcatttttactatgtggttactggacatacctcaaagggcaagtcctctctatcctgctaatatttgtaagtttttttcctttgaggaaactcatcatggttagaggtcttctccatggcaattgttgctttactgggcttagggatcccagacttaattcaggtttaattaacctcttggctgtgccatgtgggtgccatgtgcattttcctttataagcctgagtattaggaacatcaaaggcattttgaagggtgattacag

SEQ ID NO: 143763 - DNA, 504 bp, Homo sapiens
ttctggtgttgataaagacacagaagttttgccaattggtgtatttcagcagatgttaaagtaaatacagaacccgagttttgaagtgcgaaagccattcaatgcccttttacgtttttgctgtgttaattattttagcatattctggatttccagtttgggaaaaatcattgatgttttttacaaagatttttttcttccattttagtcagtttaaaaaaaatgtatctattgcttattcatttttactatgtggttactggacatacctcaaagggcaagtcctctctatcctgctaatatttgtaagtttttttcctttgaggaaactyatcatggttagaggtcttctccatggcaattgttgctttactgggcttagggatcccagacttaattcaggtttaattaacctcttggctgtgccatgtgggtgccatgtgcattttcctttataagcctgagtattaggaacatcaaaggcattttgaagggtgattacag

SEQ ID NO: 143764 - DNA, 566 bp, Homo sapiens
tatatggaaccaaatgaggcccagagtagcaaaagctatccttagcaaataacaaaactgaggaatcatgctacctgacttcaaattatgctagagaactatagtaatcaaaacaggatgacactggcattaaaaacagacacacagagcaatggaacacaactaagaacacagaaataaatttatatatccacagtgaactcatttttaacaaaggtgctaaaaacataccctggataaagaaaagtctcttcaataaatgatgcagggacaaccagatatccacatgaataaagaaattgttcccctatctctcacagtatgcaaaaccaatcaaaatggattaaagacttaaatctaagacctcaactttaatcttttagtcaaaggactaaaagaaaacattggagaaactctccaggacattagtctgagacaagatttattgagtaatrccccacaatcacaagtaaccaaagctactttagacaaatggaatcacatcaagttaaaaagcttcttcacagcaaaggaagcaatcaataaagtgaagagacaacccacag

SEQ ID NO: 143765 - DNA, 511 bp, Homo sapiens
tttgtttttgttgccattgcttttaggaacttagccaacaattctatgccaactatgatgtcatgttgagaaaggtatttcctaggttttcttctaggattgttacagtttgagatcttacttttaaactagatttgtaatcaccacacaaaagccctgaaatacctagaaatatagctaaccaatgggatgaaagagctccacaaggagaactacaaaacactgctgagataaatcagagatgtcacaaataagtggaaaaayatttcatacttatggactgaaagaattaatgtccttaaatggttatacttcccaaagcagtttacagattcaatgctatttctactgaaatagcaatgtcatttttcacagaattagaaaaaaaaaatcctatggaaacaaaaaagagcccaaatcacttaaacaatcctaagcacaaagaacaaagccggaggcatcacactacagacttcaaacgatactacaaggctacagtaaccaaaacagc

SEQ ID NO: 143766 - DNA, 511 bp, Homo sapiens
tttgtttttgttgccattgcttttaggaacttagccaacaattctatgccaactatgatgtcatgttgagaaaggtatttcctaggttttcttctaggattgttacagtttgagatcttacttttaaactagatttgtaatcaccacacaaaagccctgaaatacctagaaatatagctaaccaatgggatgaaagagctccacaaggagaactacaaaacactgctgagataaatcagagatgtcacaaataagtggaaaaacatttcatacttrtggactgaaagaattaatgtccttaaatggttatacttcccaaagcagtttacagattcaatgctatttctactgaaatagcaatgtcatttttcacagaattagaaaaaaaaaatcctatggaaacaaaaaagagcccaaatcacttaaacaatcctaagcacaaagaacaaagccggaggcatcacactacagacttcaaacgatactacaaggctacagtaaccaaaacagc

SEQ ID NO: 143767 - DNA, 511 bp, Homo sapiens
tttgtttttgttgccattgcttttaggaacttagccaacaattctatgccaactatgatgtcatgttgagaaaggtatttcctaggttttcttctaggattgttacagtttgagatcttacttttaaactagatttgtaatcaccacacaaaagccctgaaatacctagaaatatagctaaccaatgggatgaaagagctccacaaggagaactacaaaacactgctgagataaatcagagatgtcacaaataagtggaaaaacatttcatacttatggactgaaagaattaatgtccttaaatggttatacttcccaaagcagtttacagattcaatgctatttctactgaaatagcaatgtcatttttcacagaattagaaaaaaaaaatcctatggaamcaaaaaagagcccaaatcacttaaacaatcctaagcacaaagaacaaagccggaggcatcacactacagacttcaaacgatactacaaggctacagtaaccaaaacagc

SEQ ID NO: 143768 - DNA, 558 bp, Homo sapiens
cacttagttgaaatgaatcagtcttgattccattgcctgaaagtctggatcactcctggaattctcctatgctgtagcttggtctctgcagccatacttcatgctcaagtgcgtgacacaggttgtactcagggattcacaaaacagctaacttcctccaggtcactttcaactccctaacagctgaaggcaaattatataatgcaatcagtaaaggtcagaaagctcctcaaagctttagatatttaatctgaatcactcccactttgtrgtcaccagcattccagtaaaccaatctcttttgtatgaaattatttatcttcctttctcaaggataagtctatctaaagactggctgcagtttttactactaaagaaaacataatatccaagaccattttcagattcaaggacattagagttttctgtttttcaaaaaatggctgtgtatttatcatattacatctatgtaaataaagaatccgcttctcatgtttttccaaaacacagggggtttgaatagcaatgctatctttacttccattctaagttgccagc

SEQ ID NO: 143769 - DNA, 530 bp, Homo sapiens
tttgttaatctacatgctttagttaactattgtcacataagttatcrctcaacattaagtagcttaagacaataatatatagttttttcaatttcagagtctttgtgggtcagtagtccaggtgcagcttagcacctctggctctgagtttcatactagtcttcatctatgccaacacttaactagaaaggatctgctttgttactcattcacgtggttgttgacaggatttagtttctcattaattgtgggggtaaagacttagttcccctaagttgttggtgagattcctccttcagtcccttctaacaaagggctttttgaaagcacctcacaatatggctgcaagcttcatcagtgcaagcaagagagaagaaaaacgagtgccaacaaatggcagagtgctagcaagaaagacgttatagtcttttgtaatctggtcatggaagtaacatcactttggcatattctatttattcaaagaaaatcaatagattcagtgcacaaagggagaaaattacacaaaactg

SEQ ID NO: 143770 - DNA, 240 bp, Homo sapiens
tgcctgctggagctcaccctggttccayggagattccatgtccacatgccacactggccacaggagaggagagagactgtgggggaggctctttaaatgcagatttctgagccctacccagacccagtaggtcatatcccaggaaagaagtccaggaatctgcttccccaggtgcctgagacacagagtctgggctagaacatcaggggatgaaacaccagtcggagggaggccacgaga

SEQ ID NO: 143771 - DNA, 585 bp, Homo sapiens
aattaccagtgcctcagcccaagatgctgaattaattggtagggcttggactgctttgtcaaagtacttctaggaggtgattccaggttcacagctagtttgagaaacagaacactaaaaagaggtcaagttgctgagtctacatcctcacctaaaaagtgaggttacattgattattgcctaaccaatcttttaggatgtgtaagacactcaaatgagatttatacatgtgttttttcagctttcagtgccagacctttagctctgttaaatttctgttagtgaatgaaatggtattctgcaagagtttgtagtgtgtatggggatggatgcggggagtaggggtggagacaaagcatgagagaaagagagatttatcaatttggatatcatttctttctggtgsatttgtcgtatttttcatgtaggccaaaattgtattaatgggttttttaaaaccaggctttatatataagattcatgtttctctggttagtataggtgaactaattttatctctatataagcacctgctgtgataaattttgttttttgtgtctctatttacaaattcattcacatttc

SEQ ID NO: 143772 - DNA, 385 bp, Homo sapiens
tgtcactgtttttgataggcctggggcctgcagtttgtctctgagacaaagaagaatagcttgctgctgacaygaacaagagagtaggactctataattcaactgccacctgccaattcatcctccttttaaactcaattctgaagaatctccagagcctggcccatctcccacctggcccactgtggccattcaaaggactcagctgtgatgaaagttgctgataggactgatggggctgattggagcagacaggacagtggggaggagcagagccctgcaattgttggcagtttccctctgcttaccattaagggttcttctaatccattaacagtcccttttgaactttggctcacagacccatcccaagccagagcagtca

SEQ ID NO: 143773 - DNA, 348 bp, Homo sapiens
acactaatacagtagtgccaggaggtatgtactgtgattttcacctcattttatagatgaggaaatggacacaaagatgctaaataattcatttaaggtgatgcagctaatatgggatgaaattcagatttaagcccgggcattctgaccttggaatccacattcttcacatttttctaggttgatttaggggtagaggaggcagaagggacggcaacttgaggaaggaaagtaataagaaacacagaccactgtagtttttctgttcgtttttgttttgtgctggttttgcctgcygtcattgctgctttggtttacgtggagcagagcgtctcaaacttaattgag

SEQ ID NO: 143774 - DNA, 440 bp, Homo sapiens
ctatatgacagagtgtagagagcagaagacagatgctcaaggtgagtctgaagaggtaggcaggggtaggttgtgttaaggagtttgggttttattctaaaggcagcaagaaattattgaagaaggatttaaagcatccccaatttggtttgcttgtacacatatcataatgtttggaaaaaaatcagggctttaggcaatacacctcttcatagggtacatattttgatcaagctttatattcactgtggacccagtggatatgaaaatgaaagtcttttctacaaaaagaagcatattaaaagttactacattatggatattgctgaaaataagtgcctattctttgtctgtctgtctggccatttatgccactgtgtttcaattagaatatgaattggctaatacrggttttatgcacaagttatttaaattcagat

SEQ ID NO: 143775 - DNA, 440 bp, Homo sapiens
ctatatgacagagtgtagagagcagaagacagatgctcaaggtgagtctgaagaggtaggcaggggtaggttgtgttaaggagtttgggttttattctaaaggcagcaagaaattattgaagaaggatttaaagcatccccaatttggtttgcttgtacacatatcataatgtttggaaaaaaatcagggctttaggcaatacacctcttcatagggtacatattttgatcaagctttatattcactgtggacccagtggatatgaaaatgaaagtcttttctacaaaaagaagcatattaaaagttactacattatggatattgctgaaaataagtgcctattctttgtctgtctgtctggccatttatgccactgtgtttcaattagaatatgaattggctaatacaggtkttatgcacaagttatttaaattcagat

SEQ ID NO: 143776 - DNA, 498 bp, Homo sapiens
gagatttcacatctgaagagtgagaaggctgcgatatttttcctttatgccatcaatctttagctgagtgcttctccaggggtcacgaacctcctggaactttctacctcccctctgcataagtgagggacactagaaagccctcaggtgattaatcataggtacttgcagtagggcacttcaggcgtgtgctgggtttttaatgtagggaggagatgtatgcaagggcacagccagtgtctgctgaatgaaccatgtgatgggttattcgggaagggaatctcaacttttaaagaatcacaggctttgtacttcttcctgtaatttccctaataatgctgtaagcaagctgtaarccctctgagaacaggatgcatatctcattcattcttgggccctcagaaggcctgatcataataagtgctcaacaaatgtccagtagtgactttgtaatcaacggactaaaatactttgctgtaaactacattcagattaact

SEQ ID NO: 143777 - DNA, 590 bp, Homo sapiens
gtcagtggtacctgatacattataataatacaaagaggaaaattacagccaagaaatccattctgtcagttatccatatgtgttctaaaagagatggcctaaatctctgcccatttatactgtacagtattttcaaacagactccaaaactgccaagataattacagtgtgaaatatcttgtgccaaatagttatggcattttcttgccaataattgtgacaaaaaaattcccatagaataaaaaataacagccaaaatagcaagcttctccttgtggaagccaatggttttctttagagaggaaacaacagatgaaatatgagtaattatactatgtaatgtagtctctttggccaagagcataattgtttacctaagctttttacttatagattagaatcttgtgttgcagtctagtagattgatttaactgcctctgtgacttctttttatttttaagattaggcagtccatgacaaagaggttaattgcaacccaatagagctaaactaatattttattaagaaggagctggcatcctgagcttttaggagaacaaatrttctcataatgccatgaacaacttaca

SEQ ID NO: 143778 - DNA, 584 bp, Homo sapiens
aaaaacttaaaaagatattcaacatatcttacttatgaagtttaaaattatacaaaagaattaaaaacaagtagaaaacgcagatttcagtaagatgcaaagtttataaggtcttaaaatgtggaaatatataaccattcccatccaaaatatcttgtaggaaatgaatgtataaatggatggtattttaaagacacactaaggcaagaaaactttaacgccagtagcaaggtaggatggcatctttttgatttttttctagttgcattaaaagcacaatagttactgcttcacttctacgtttctcatgtttaagtcaaacgaaatatatagatgaatgtacagtgaaaaacatagcaagaagaaacttgaagcaccaatttgtccacagtaattggcttcccattttgcaagcactgaactctttcttaggttcaacctcaactactctccccggcacaaagcacctttcccmgtgaccacgagggccaaaagcctttccagagatttaaatcttgttaagtagccactttcgcagccattcccaacttgagggaaacctttccactgagattaactcagaa

SEQ ID NO: 143779 - DNA, 561 bp, Homo sapiens
ttttgggtctgacttcaatagcacaggtaactaaagcagaaattaccaaatgaaattacatcaaactaaaaagctgtacagcaaaggaaacaatcaacagagtgaagagacaaccyatggagtaataaaatatatctacaaaccaaacatataaggggttaatatgcaaaatatataagaaactcaacttgatagtaagaaaacaaataaccagattaaaacatgggcaaaggatatgaatagacattcctcaaaagatgaaatgcaaagagctaacagttacatgaaagaaagcttaacatcactaatcatcagggaaatgcagattaaaaccacaataagatgttacctcatacctactggaatggctattatcaaaaagacaaaagataacagctgaccaagatgccaagaaatgggaactcttctacactgctggtaggaatataaattagtacaaccattatagaaaacagtatggaggttcctcaaaaaattaaaaatagaaccaccatatgattcagcgattccacgactcagtaaatatccaaaggaaattaa

SEQ ID NO: 143780 - DNA, 659 bp, Homo sapiens
aactgatgtgtgcctctttggtttacctagaaaaataactcatattaaactcaagattttattaagcagccaaagaatccattgagaatcactaaattcctactttgaaataaaaactrtgtatctaatatttagtattacctggatacttactgtatgccaaacacattgttaaattattactaatttaaataattacaaatacagtcatccttcagtatccttggggaattggttctagcacctacagataccaaaatccgggatattcaagaccagcagtcagctttgcagaacccattgaaatgaaaagtttgttcttcatatacatgggtttcatatcctgtgagtactgtatttttgacctgtgtttggttgcagatgtgaaacctgcctatatggcgggccaattgtatttattgaaaaaattccctgtataagtagacccatgcagttcaaaacccagttgtttaagggtcaactgtattgacatttaatcttcatgcctctgtgaagtcaatttttaattagaaatgattatattcatcaaattataagtatttaataatgatttttaatgtccatttccagttgtctgattaatcaattgtttaagctcttcctatctctatttttatttagatcttgcctgggttctc

SEQ ID NO: 143781 - DNA, 659 bp, Homo sapiens
aactgatgtgtgcctctttggtttacctagaaaaataactcatattaaactcaagattttattaagcagccaaagaatccattgagaatcactaaattcctactttgaaataaaaactatgtatctaatatttagtattacctggatacttactgtatgccaaacacattgttaaattattactaatttaaataattacaaatacagtcatccttcagtatccttggggaattggttctagcacctacagataccaaaatcygggatattcaagaccagcagtcagctttgcagaacccattgaaatgaaaagtttgttcttcatatacatgggtttcatatcctgtgagtactgtatttttgacctgtgtttggttgcagatgtgaaacctgcctatatggcgggccaattgtatttattgaaaaaattccctgtataagtagacccatgcagttcaaaacccagttgtttaagggtcaactgtattgacatttaatcttcatgcctctgtgaagtcaatttttaattagaaatgattatattcatcaaattataagtatttaataatgatttttaatgtccatttccagttgtctgattaatcaattgtttaagctcttcctatctctatttttatttagatcttgcctgggttctc

SEQ ID NO: 143782 - DNA, 659 bp, Homo sapiens
aactgatgtgtgcctctttggtttacctagaaaaataactcatattaaactcaagattttattaagcagccaaagaatccattgagaatcactaaattcctactttgaaataaaaactatgtatctaatatttagtattacctggatacttactgtatgccaaacacattgttaaattattactaatttaaataattacaaatacagtcatccttcagtatccttggggaattggttctagcacctacagataccaaaatccgggatattcaagaccagcagtcagctttgcagaacccaytgaaatgaaaagtttgttcttcatatacatgggtttcatatcctgtgagtactgtatttttgacctgtgtttggttgcagatgtgaaacctgcctatatggcgggccaattgtatttattgaaaaaattccctgtataagtagacccatgcagttcaaaacccagttgtttaagggtcaactgtattgacatttaatcttcatgcctctgtgaagtcaatttttaattagaaatgattatattcatcaaattataagtatttaataatgatttttaatgtccatttccagttgtctgattaatcaattgtttaagctcttcctatctctatttttatttagatcttgcctgggttctc

SEQ ID NO: 143783 - DNA, 659 bp, Homo sapiens
aactgatgtgtgcctctttggtttacctagaaaaataactcatattaaactcaagattttattaagcagccaaagaatccattgagaatcactaaattcctactttgaaataaaaactatgtatctaatatttagtattacctggatacttactgtatgccaaacacattgttaaattattactaatttaaataattacaaatacagtcatccttcagtatccttggggaattggttctagcacctacagataccaaaatccgggatattcaagaccagcagtcagctttgcagaacccattgaaatgaaaagtttgttcttcatatacatgggtttcatatcctgtgagtactgtatttttgacctgtgtttggttgcagatgtgaaacctgcctatatggcgggccaattgtatttattgaaaaaattccctgtataagtagacccatscagttcaaaacccagttgtttaagggtcaactgtattgacatttaatcttcatgcctctgtgaagtcaatttttaattagaaatgattatattcatcaaattataagtatttaataatgatttttaatgtccatttccagttgtctgattaatcaattgtttaagctcttcctatctctatttttatttagatcttgcctgggttctc

SEQ ID NO: 143784 - DNA, 584 bp, Homo sapiens
gatatagaagccaaagtaattttacgttttaggtcaaactagctaaaatatttgattttgtargagtagagcaatgttgcatttatacgcataaaaatgattttttttaaattgctaactatttgtttggaaatgcaaagtctgttaataaaccactgtctttgcagtggtaaatgcctttgtgtgtttttgtattgttttatttttctgtttggagagagagagagagaaagagaagaggaggaatggggagaggagccttaagtatagcttagaatcaaatatagttgagaatatgatagattttcaggagtcaaacccaactttagagttatataccaaacactaaaaaacaaaagaaggctaataaattaagatgacatcacaaaccacaaaatcggccctgctcctttactgtagttaaagatgccggtgatgttggcatgggcaagagcattttcttgcctggagcagtatcccaagttctacagttcatccatctgcaacctgttgactgtgtttcacattggtgatgaattatactccgtttcctcagtctaatccttttcatttatttatatttt

SEQ ID NO: 143785 - DNA, 558 bp, Homo sapiens
aataccacttttttactgtatcttttctatgtttagatacacamatacttacgattgcctgcaatattcagcacagtaacatgctgtacaggtttgtagcgtaggagcaagaagctctactatctaggtttgtgtaagtacattttgtgatatttgcacaatgacaaaatcacctaagtatgcatttctcagaatatatccccatcattaagcaacacataagtgtattggaaaatgagagagcctctgagacactttgtacatcaaaaaagagagtcatccaggttatgatgactgaaatccccatgacttggaagatgcttccatatggaaatcatgaggtctgcaagggtaaatacaggcagtcacctcactccccaccccagatcttctttctttgtcgaggaaatagaagagagagatttttaacaaagattgctgtacttttgtgggagagaagactaagagaaatcaggtactcacagctattattgggaccctctggtacactccagctggtgtgttctgcattgagttactcatgttaaacacctggtg

SEQ ID NO: 143786 - DNA, 546 bp, Homo sapiens
agtcaggaaaaatagaggctttaaaaatatttacatgcaaacaaaatctcctaaacaaaaacaaaagcaaagaacaaccactacaaccaagacttgtaaaataaaacttctgtttcagaagaaacctatttatttatttaccacaagacagggtcttgctacattgcccagtctggagtgcagtggtgtgatyatagttcactggagtcttgaactcctgagctcaagtgatcctcccacctcagcctcctgagtagctggaattgcaggcatacgccaccacacctggctaatatttttactttttgcagatacagggtctcaccatattgcccaagctggtctccaactcccggtctcaagcaatcctcccacctcagcctcccaaagttttggaattgcaggtgtgagccaccgtgcctggccagaaacctgtttattaacttttgtttttagaacttccagaagtttctctatgaagccagcatattcaggaacactgttttatacaaagatatatatatatatttaaattgtatttattat

SEQ ID NO: 143787 - DNA, 546 bp, Homo sapiens
agtcaggaaaaatagaggctttaaaaatatttacatgcaaacaaaatctcctaaacaaaaacaaaagcaaagaacaaccactacaaccaagacttgtaaaataaaacttctgtttcagaagaaacctatttatttatttaccacaagacagggtcttgctacattgcccagtctggagtgcagtggtgtgatcatagttcactggagtcttgaactcctgagctcaagtgatcctcccacctcagcctcctgagtagctggaattgcaggcatacgccaccacacctggctaatatttttactttttgcagatacagggtctcaccatattgcccaagctggtctccaactcccggtctcaagcaatcctcccacctcagcctcccaaagtkttggaattgcaggtgtgagccaccgtgcctggccagaaacctgtttattaacttttgtttttagaacttccagaagtttctctatgaagccagcatattcaggaacactgttttatacaaagatatatatatatatttaaattgtatttattat

SEQ ID NO: 143788 - DNA, 385 bp, Homo sapiens
gtgggcaggaccctctaattggctggaggccaagataaaacaaaaagacagaggaaaggtgaactatatgtctctctgtctctgtctctttctctctgtctctctccttcccccttctccctctctccatcctaaagataaaatgycattcttcccctgtccttggatgtccgaatgctagaaactccagcctttggactctgggacttgtgccagtggacgccgggttcttaggcctttagcctcagattgagagttacactattggcttctctagtttggaggcttccagacttggactaagccatgctattggtatccctgtaccttcagttttcagatggcctattgtagacttctcagcctctaaaattgtgtaagccca

SEQ ID NO: 143789 - DNA, 503 bp, Homo sapiens
acaatcaatatatgccaacagcgagataatagagatgtcaaatttacctgacaaaatttttaaagcagccatcataaaaatgtttcagttagcaattacaaaaatggttgaaaaaaattaagaaatagagtctgcaaataaatagaattataaggcagaataaaatgaaatttttacaactgaaatctatcataagaaataaaaagctcagtggatggtcccaacaccagcatggagagaacagaagaaggaatcagtgaactgaaatatagaatgatagaaattatgcaatctggatgacagaaaaaaatgagttaggagtaggggagagcagaaactcaggagattagaaaaaataagtaagtaccattggtgtcactagcatctcagaaagagaggagaaaaaaggcaggactgaaamgaagtttgaaaaacttgatgtttgaaaacttccaatatttgacagaagacataaatctatagaggctgagcaaatgcctaaa

SEQ ID NO: 143790 - DNA, 594 bp, Homo sapiens
gtcaattcttttagtttaaaataaaaagattacaaaagtgttcaattactcagaaattttataagaaaaatttataaaacataactacatacaaaatatggtgttaaagtggagatccatgaaatgtaatactacctcaaagtaggtaaaatttttttgacctgttaatcagtatgcacactgtacacaaatagagcacctcatgcagmtatagagtccagatcaggcttattagtttagaggccaaaaagtctgagctgcgtctcaaattagagcatgaaaatgtacgtttgttgagtacaaatggacctaaaggtggaaatgataaaaactgggcactggagggggtaactactagagggggaagaggagaaggggagcaagggttgaaaaactacctatcgggtactatgctcactacctgggtgatgggatcatttctacaccacacctcagtggcatgcagtttactcatgtaacaaatctacatatgtacccccagaacctaaaataaaattgaaaaataaaaaccatgtctggataaggaaagatgagatttgccagaattattaaaacagataataggaggaattc

SEQ ID NO: 143791 - DNA, 504 bp, Homo sapiens
caaaatatggtgttaaagtggagatccatgaaatgtaatactacctcaaagtaggtaaaatttttttgacctgttaatcagtatgcacactgtacacaaatagagcacctcatgcagctatagagtccagatcaggcttattagtttagaggccaaaaagtctgagctgcgtctcaaattagagcatgaaaatgtacgtttgttgagtacaaatggacctaaaggtggaaatgataaaaactgggcactggagggggtaactactagagggggaagaggagaaggggagcaakggttgaaaaactacctatcgggtactatgctcactacctgggtgatgggatcatttctacaccacacctcagtggcatgcagtttactcatgtaacaaatctacatatgtacccccagaacctaaaataaaattgaaaaataaaaaccatgtctggataaggaaagatgagatttgccagaattattaaaacagataataggaggaattct

SEQ ID NO: 143792 - DNA, 504 bp, Homo sapiens
caaaatatggtgttaaagtggagatccatgaaatgtaatactacctcaaagtaggtaaaatttttttgacctgttaatcagtatgcacactgtacacaaatagagcacctcatgcagctatagagtccagatcaggcttattagtttagaggccaaaaagtctgagctgcgtctcaaattagagcatgaaaatgtacgtttgttgagtacaaatggacctaaaggtggaaatgataaaaactgggcactggagggggtaactactagagggggaagaggagaaggggagcaagggttgaaaaactacctatcgggtactatgctcactacctgggtgatgggatcatttctacaccacacctcagtggcatgcagtttactcatgtaacaaatctacatatgtacccccagaacctaaaataaaattgaaraataaaaaccatgtctggataaggaaagatgagatttgccagaattattaaaacagataataggaggaattct

SEQ ID NO: 143793 - DNA, 565 bp, Homo sapiens
gagcaggggtatgctctattgctgaagttgtgcctattgaaaccagcaggtgcaagatggctccctgtgctctttgaaggggtctacaatatgagcatgagctctttaaccctatttagctgggaatctctccagctctgaggatctaggtggaggtcctgcttggtggactgtgtaacctctacactttctatcctagctcacaccattgccttracctcctgcctggctccccaccctaccagagcatgtctgactacctgccccttctttgtggcttattcatgcaacaaatttaaaccttaaagttgacttatctccttctctccagttgacacaacaaacatctgtatgacatccatagaggaaatggagcaaatcaggaacctgcattgttatcactagctgtctgggttccacatattaagcaagctaagaagcagttgcagtgactatattactcatctgaagatcttatgctgattagctataactgaaaattcataaaaagattcttaatataaatcccaaaagctcttctgagaaatagtggtgaattgaatgt

SEQ ID NO: 143794 - DNA, 574 bp, Homo sapiens
gagttatcataaagcacaagtagtaaatgcagacaaacctaaaagaccccacatcatagcatttagtccatatgcaaagggtaagtggagattttgggtcarctaagcatcatctattaattttgttaaatatgttttgagttttgttggaaatttttctttgcatttgatttgtaaatgtggttttggctgttataggaagcatagataaagggatactgtaactcattttttgcatatcatgttttatgatgaaaaagtaagttaactatggatccatcagattgttttccctttaaaagggtttaattcctaaatgaattttggaaaacactgattttggagcaggatagaatatgaatctgttttcatgctaccgttaaacagaactgttatcactaacttgtcaataagaactctgaggctccgagtagaacgttaaaggaatgtggcaattagggataacagttgtctcattagataattgtcaggtttttagaatcatgtatgtaatgttctcttagatttttattcctcatccagagtctctcttgagctcagtagccaccattta

SEQ ID NO: 143795 - DNA, 574 bp, Homo sapiens
gagttatcataaagcacaagtagtaaatgcagacaaacctaaaagaccccacatcatagcatttagtccatatgcaaagggtaagtggagattttgggtcaactaagcatcatctattaattttgttaaatatgttttgagttttgttggaaatttttctttgcatttgatttgtaaatgtggttttggctgttataggargcatagataaagggatactgtaactcattttttgcatatcatgttttatgatgaaaaagtaagttaactatggatccatcagattgttttccctttaaaagggtttaattcctaaatgaattttggaaaacactgattttggagcaggatagaatatgaatctgttttcatgctaccgttaaacagaactgttatcactaacttgtcaataagaactctgaggctccgagtagaacgttaaaggaatgtggcaattagggataacagttgtctcattagataattgtcaggtttttagaatcatgtatgtaatgttctcttagatttttattcctcatccagagtctctcttgagctcagtagccaccattta

SEQ ID NO: 143796 - DNA, 574 bp, Homo sapiens
gagttatcataaagcacaagtagtaaatgcagacaaacctaaaagaccccacatcatagcatttagtccatatgcaaagggtaagtggagattttgggtcaactaagcatcatctattaattttgttaaatatgttttgagttttgttggaaatttttctttgcatttgatttgtaaatgtggttttggctgttataggaagcatagataaagggatactgtaactcattttttgcatatcatgttttatgatgaaaaagtaagttaactatggatccatcagattgttttccctttaaaagggtttaatkcctaaatgaattttggaaaacactgattttggagcaggatagaatatgaatctgttttcatgctaccgttaaacagaactgttatcactaacttgtcaataagaactctgaggctccgagtagaacgttaaaggaatgtggcaattagggataacagttgtctcattagataattgtcaggtttttagaatcatgtatgtaatgttctcttagatttttattcctcatccagagtctctcttgagctcagtagccaccattta

SEQ ID NO: 143797 - DNA, 540 bp, Homo sapiens
cacttggtgtagttggcaggatactgaggtgactgagttttcagcctctgctgattccgggtcagccatgtggctgcaacatgggttgtggtacccagtggtagtggtgctgctcgaatgagctccggtggaaacctgggttggtggtagataggtcccctgaaagcatggagaagatactaaagcaactggaagcacagagcactaagaaggagcaagcttttgccagcagagttagatgggcatttgtgactgtgctgtgcaaagtgcatgctcagtccctacaggattccaccttgagctatgggaattgaataaacagtgccatcagcrtccagaggaacctctgccaacctggattcttcatctatgggacgagggagcagatagtatctgcagtttcacctctggaatagacaggtgacttccatcaggactcatccctccctccatcagcagttgcatgtgagcaggcactttgcagtggggcgaggcaaccatactttaattaaattgctaatggtggccatacggacagtg

SEQ ID NO: 143798 - DNA, 451 bp, Homo sapiens
aagcaagccataaaatgaacgccttcttcaaaccataaagctcattgaagccaacactttcaattagagttcattccaagcatccacgatattttcatcttcttctcagtcatcaggatttttcatgaagcagrtataaactcagtaatgaatcaatagctctgtgactaatggaagagttgtaaaatgattttaattactgtagtttataaataggaaatcatacaataatggtaaatgataatgtttataatattctcatcctcaccctacgctgtccaactttgtttcatgatagcagagctttattaaatatataattggcataaataaatgcagatgagattgctttttcaatcctttataaaacaaagattaattttgtgaagtaaatgaatgtttatggtttattattttggatagtcatcttttaggatttttagaaatgcag

SEQ ID NO: 143799 - DNA, 515 bp, Homo sapiens
caatgactcacttgggacccagaacttgcccttcttcaagggaaaggatctgtccaaatgcaacctgcccatgggagctgaaaacccctaatgtctgctgtgtcaagcagatgacatttacttgcagtctcttcaaaactggcaagtaggctcagcttgattcagatgagacccgaagaatttattctctgaggatgagcctgttctcactcttgcctcataacaaagtgtgagcagtttgtacagagagagagtcccattgctaagagacagtcccatatctygtgtctgtttctgcatcagacaatgaatgctccttcattatttgccaccagctgacccttctgcctggcagttctagcctatgccaaataacctggacgcatgtttaaagcaatatgttaaagttgctctcataaattattattgatgctagcatttcatttactttctacattcaggaaatattaatcaccgtttactttcttacaaatttctaaattcgaatttacttt

SEQ ID NO: 143800 - DNA, 385 bp, Homo sapiens
aaaaaaaaaaaaaaaaatgctatctgaaaaagctcaaattgcaccaagcctcgagaatgtagaatttcattgcttagcataggaatttgttccacaggacaacactgggttttaaaaacctgttcctcacactaaaccaaaatctgtctcctaatagtgccacatgaaaatgtagatacaaactggattttatctatatttaattgraaattatactgggaatatagtgaccatgatttaaatgacttctattttagaaattatttattattacttactaagatgttaattttaataaatgtatactgatttatagtgatcctatttagtattctcaaatcatttgcttaatcatctagtctagaatattttcaggatgtgtggt

SEQ ID NO: 143801 - DNA, 575 bp, Homo sapiens
ggtaaatttgacttgcaaaaaatcatcaggatgcataattatgtgcactttattacgcatatattttatttcaataaacaaaatttaaaaatgtatttatattccctaagtcaattcctatttccaataaagtatgaaatgaaacaataaaaaactcaagatataaaagtaattttttttccttgctccttcctgttattttctctttagtgttcagtttggctatagtcccatgtgttcaagtctsccaaacatcataatgattcaaggcaaaatgttcaatccagacatgggatttcaaagctgaagaaaaagaacttctgaacaaatgactctttccataagagtccatcctatattgaatataagggctgactttttcattgtaagtcaacaaatggtgagagccttctacatgtaaagtaaattaaaaattaccaattgagaatgtcagctttgaaattacttaaagacattttctagatgaaatcatcagttttaacatgcctcctgtttttaaggtttttttacttgtcttttgttttatctttcataatgtgaaatgtctactgtta

SEQ ID NO: 143802 - DNA, 421 bp, Homo sapiens
attctttcatgcaactcttccctttgaaacattaatctcttgatgtaatacattttttctgttcttcaagtctgtctttgcttgttaataccaaatttttggtcggaagcattaaaatgtgctactttgacaccccttcccttgagccttttaagatcttaaagcacatgcaaagacttatgccagatgaatcaaattcatccttttatcttaagaaataatcatccacattctgaaagactcactattaaatcctaatgcataaatagtgttttttagttaacagtggacttttacatgtaatctcatttttgtttttattctcataattacttgggtatttctttttacagggaagctrtgattatttatattttcaataaaagaaaatgaacataatttgaagtgctctctgatccac

SEQ ID NO: 143803 - DNA, 606 bp, Homo sapiens
ttatagatacacagaaattagaaaaataattttgaaaaatgttatataactacatttgaaaacagaaaaaatagataaatttcaagaaagatataactcactaaaaattatctaagacaaagtaggcagtctaactagttctacaattactaaagwaattgaatcaatggtttaaaatctttctgccttaaaattttaaaaagtgatgatattcagatggcttaaaatttcaaggagtggataatgcaaaatatcttaaatattccaaggaaacaagaaaatttccaacaaattctacaaggctcttatgagtttgtaaatatcagacaagaagaatattaacataaatgattaggtttcaatccatttgcacttgtcaatgagcccccagcatttcccacttaaggcagatgtgtataaacaataaaacaagatttctgtgtgcctcaatctttaaaagctattttcagagagaaatataagttgtgtttctctcttttgttttaagcaaatagacatttagatttctattgtaaatgaaaacaatgaatctgttgggggggaaaaatgagtaaaaagcaggctgggtgtggtggctcacacctg

SEQ ID NO: 143804 - DNA, 597 bp, Homo sapiens
aggcatgcattgcctcaaaaatccaaataggcccactaggcattgtgcctctttcttagttgtaggagaggccaaatgcagcaacttatctttcaccttagaaggaatatctcaacaggcctcacaacactgaacccctataaattttactgatgtagcaagtccctaaattttagttggatttatttcccatcctctgcatgcaaatgtctcactaataagtccaatgtgcttgctacttcttgtccactgaatccaatcagaataatgtcatccatgtaatggagcagtgtaatatcttgygaagtgaaaagcactcaaggtctctctgaatacaattattacacaaagccggagagttgatatacctctgtgttaggacagtaaaggtatattgctggcctttccagctgaaggcaaattgcttctgatgggccttttggacaggaatggagaaaaaggcatttgtcaagtcaatgtctgcataccaggtaccaggagatatgttaatttgcccaatcaatgaaaccacatctggtacaacaactgcaattggagtcaccatttggataagcttacgataatccactgtcattc

SEQ ID NO: 143805 - DNA, 551 bp, Homo sapiens
gaattcagtttgtatttctttgatagagtccttacaaatgaagtgaaaagttttggaccaaaagtaaaacaattgtagggaaaaaaggagggatccttcttcccactgacagacttgttctccctgtggctctttcctgatcaaatgatataaaattttatgctttcttaaataaccatgacatttcacaccaaggttgatgaatcctataaatagactgcctgatcatgtcatgtccctgcttgaaaccctttgttaatgtcaacaccactcaggagaaagctccaattccatgacacggcaaaacaacaacaacaacaaaaagttcctatctgcccaatcacatgtttctattccctatgcccatcatatccactctagacttgctacagttcccaaattcaataagttgttttatatatccatatcttttctcacttcactgcttccagctataaagcagctcttcccaagcccaccaaccctccacaaagacatctctmcattcagcttttcaaaaaccttcccatgctcttctttcaagacactct

SEQ ID NO: 143806 - DNA, 433 bp, Homo sapiens
tacattttggtttttcacctatttctttatggatgtagttcatctgctcataactattatacccatgtgactgtcaatagtatacctcagtgtattatgyttgcaaaaatatgtatgttattgttgcctactttattgcataaagtgacctatgaagtgttgtcatgtttttatatgtttctcaaataaatccatttaaaaaatgtaaacaaatatctttttacaaattttttaaattttttccaaaattgtatttctaggattttgagatttggggatttcaacatttgggattatgtcatacaggattgtgtcttttgggactataaagagctcccatgacaaaatcctattagacgtgccagagggacggcaggggagagaaggagagtcagagaagttggaggggagaattacaaaagggcaaaaagaa

SEQ ID NO: 143807 - DNA, 416 bp, Homo sapiens
atctccattcttgcataaacagggtggattattcccagggaattttttggtggtggctgttgctatttcgaaggttgccatgtctttgttctttcttggatccttcatacatggctactttaattgacccagttccacataccagatttaaaatgtctcttctccttgttaactttgacttcatcctgaaggcttccacattcttgtagatgacccctccagcatccctgacttcccyctattataatgacaatgacattcccctctacttctattgagtcacccattctcaggatcaccccttagatcttgttatcaccccaaaatctcccatttcaaaagaaatctgagaatgcaactctctactgtattttcttattcattcggatttttcattcccttcctcaaattttaca

SEQ ID NO: 143808 - DNA, 586 bp, Homo sapiens
gaattctgttgaccataaagtgttctttccccacctcatgtccacagcacttcctgctagacaaagtagtggggtgggggaaacctctcagctgagtttaacttactggaagcaagaaagtatgagactaaagcagtgtgtctgtgtgtgtatttggctcactgaaacctctgcctccccaggctcaagccatcctcccacctcagcctcctgagtagctgagaccataggcacacaccaccacaccggctaattttttgtattttttgtggagtcggggttttaccatgttggccaggctggtctcaaacccctgagctcaagcaatacctcctgcctaagcctcccagggtgctgggattacaggtgtgagtcactatgcctsgcctcattttacaattttaattccctgtaccccctccttttttctggagcattttaaagcaaattctagacactatgtaatttgaccctgaaatacttaaacaaaaattatagttttaactggctgcatagtcttgtctttggcatgccatagtcaatgaaactatcccctagacatagggacatttacttagatacatac

SEQ ID NO: 143809 - DNA, 586 bp, Homo sapiens
gaattctgttgaccataaagtgttctttccccacctcatgtccacagcacttcctgctagacaaagtagtggggtgggggaaacctctcagctgagtttaacttactggaagcaagaaagtatgagactaaagcagtgtgtctgtgtgtgtatttggctcactgaaacctctgcctccccaggctcaagccatcctcccacctcagcctcctgagtagctgagaccataggcacacaccaccacaccggctaattttttgtattttttgtggagtcggggttttaccatgttggccaggctggtctcaaacccctgagctcaagcaatacctcctgcctaagcctcccagggtgctgggattacaggtgtgagtcactatgcctggcctcattttacaattttaattccctgtaccccctccttttttctggagcattttaaagcaaattctagacactatgtaatttgaccctgraatacttaaacaaaaattatagttttaactggctgcatagtcttgtctttggcatgccatagtcaatgaaactatcccctagacatagggacatttacttagatacatac

SEQ ID NO: 143810 - DNA, 590 bp, Homo sapiens
tgtgtctctgtcaagtgtaacaatcagctgaagcaacaatcaattctgaccttgggtgaagtttagtggcacacctgggaagagtttgtaattctactgttttgtcattgtagctggctggccaccaggtcaggtaaaaggaaaatatcaagatccaaaaaagtagttggtagcagagctgcatccaaaccacagttttgatattcttaggtttctaaaattaacagtgacaaggtcataattaaggtgaggcaagtgagacactcaccttcaggtgcaaaatttaaggtgcaraaaaattcagtaatcctaatgtgaatgcaatatttaaaaaaatgcaaaatgaatgcaaacaatccatgatgaacaaaagatcaaaatgtattcaaataaagacaagatcagtaagctaaagttatttagaaattgtttaagatcatcacttagttaagagaaatgatcaaacatggcaatttcctcaatcaaaaacaagatgcgtgatatggtttggctgcgtccccacccaaatctcatcttgtattgtagcttccataatccccacatgttgtgggagggacgcaaggggaggt

SEQ ID NO: 143811 - DNA, 590 bp, Homo sapiens
tgtgtctctgtcaagtgtaacaatcagctgaagcaacaatcaattctgaccttgggtgaagtttagtggcacacctgggaagagtttgtaattctactgttttgtcattgtagctggctggccaccaggtcaggtaaaaggaaaatatcaagatccaaaaaagtagttggtagcagagctgcatccaaaccacagttttgatattcttaggtttctaaaattaacagtgacaaggtcataattaaggtgaggcaagtgagacactcaccttcaggtgcaaaatttaaggtgcagaaaaattcagtaatcctaatgtgaatgcaatatttaaaaaaatgcaaaatgaatgcaaacaatccatgatgaacaaaagatcaaaatgtattcaaataaagacaagatcagtaagctaaagttatttagaaattgtttaagatcatcacttagttaagagaaatgatcaaacatggcaatttcctcaatcaaaaacaagatgmgtgatatggtttggctgcgtccccacccaaatctcatcttgtattgtagcttccataatccccacatgttgtgggagggacgcaaggggaggt

SEQ ID NO: 143812 - DNA, 305 bp, Homo sapiens
tatttagccactgaagactatcttctgtttatataaatccacctaatgccactayatatttttgcattttctaagcttcattcatagccattgcttttgtttttaaaaacttcttcatttctacctttttactcgtaagatatatacctcctccaccacctccaggaattgttttctccaggcctcagggcagtgtctcctcctctacccactccagtaacagcagtagtgtgtgctattgctgcaagaaagtggatgcagtttcaggctgtctggcagtcacatcaagggaacagattccctca

SEQ ID NO: 143813 - DNA, 564 bp, Homo sapiens
ctatgttagctcagttattcaataaacactcccaatttaacaccttgtcacactgccagctaggtcggggagaccctaacccagcagcgctagagaaattaaagacacacacacacaaatatagaggggtgaagtgggaaatcaggggtctcacagacttccgagctgagagccctgaacagagatttacccacatatttattaacagcaaaccagtcattagcattgtttctatagatattaaattaactaaaagtatcgcttatgggaaacraagggatgggccaaataaaaggaataggttgggctaattaactgcagcaggaatatgctcttaagcataaatcgctcatgctattgcttgtggcttaagaatgcctttaggtggttttccgccctgggtgggccaggtgttccttgccctcattcccgtaaacccacaaccttccagcatgggcattagggccatcatgaacatgttgcagtgctgcagagattttgtttatggccagtcttggggccagtttatggccaaattttgggggacttgctcccaacatcaca

SEQ ID NO: 143814 - DNA, 367 bp, Homo sapiens
agatctaattgaaaaaattgaactgagtatttgaaaatcttgtttctcttgcttgttgtcactacaagcattgttgcctagarggaagtcttcagtggggaatagcagcacttgttcttctgaggctatttatttataaggtgctgttgggatgtagacttcttggagaagtcttggagaaccatcaaatgatggttctcattgttcctgccgttagatagccctcttgagcttgtcctgaaaaaacaaaatggaaggtcaatatgtaccattaaatttgtattgcaatttcaagatttattgaatcttattaattgatttaaattctgagtggcaagggaaataaaaacctggaagcagaagtgct

SEQ ID NO: 143815 - DNA, 550 bp, Homo sapiens
tctgcctcttcactaaacatctacacagagaagttaagaaatagctaaatgtagtaaagtactcaagttagtttggaaaaatgagcagcgcagaaaaaaaggacaagtgctgtaaatgatttacataccagatagcaggctcctgacaaatagagcttccattttattttgttttcattatttcaaggtgcataatttaaaaatcgagttcactgtgtcacataccaggatacttaatcttctctaaaatgacattgttgaatggtgtcatatttcaggtggaaattgaaactaggcacctacaaaataacacgcatcatgaaaacgttaatcacaaaaatctgccaaactctggaattaaaaatgaatgcatataaaacaagaattaaaacattttattacattgtcattctttttctatctctgtatttttaaataccgtgagataactaaaactaaaatttygcttattttttaattgttaactttgaatttaagttggatgataaaataattatacagaataaaaagtcaagtgagtggatatttt

SEQ ID NO: 143816 - DNA, 492 bp, Homo sapiens
atctgcagcttcggggtcacattgcggcagggcttctttatcactggaaagggctgatgggggacaaaaggaggagatgagtcttctgggagagctgtcagcactaatggtttgctagaccctgacgtacggaactgcttagactgatttttcttcctacatctctgttagatcctaaatcttgatctggtctcactctaattttttttgtaccttttaacaatctaggctgttttaaactgtactctctttgctgtcacttggggaatctccctatggcaatctcactctcaactcctgtctgaactgaacagcatgaacacatctaccaagaagaaaattaattaggtagccacaggcaacgtaaatacagtcacgactccacctagaaacctaaactttttcaaatgtrtgctttgaggattttcagaatgcacagtgccaatcaatttacttcctggaatttgtatgtttcagtgctttgatttttct

SEQ ID NO: 143817 - DNA, 504 bp, Homo sapiens
cttgtttgatctgcacaacctccccctgaggtaggtactattattaccccattctacagaaaaagaaattgagactgggttctcacaagccagaagaacatcactgcaagtaaggggcagccttgggtttgcataagkcctgtccagagccttagctcgtatgctctccctgcccttcctccctgagcttgcttgtctgcttcatcaaggcccaagcctacactgaacacataattgcaaagcccaggtccctcttatcatagcttctccttgaacaaagagccgccaggatccttctgcatctcctcaccaaaatgcagtaacccctctgattctcagggcactcctgaatacaggtaaaggcccagccctgtgagctaccttttggccctagtggcctagctgccagggctgggccagggacctgactcaactggaacctttgtcttgtagctggataaagacttggaagaggtcaccatgcagctgcaggacacaccagaa

SEQ ID NO: 143818 - DNA, 435 bp, Homo sapiens
aatggtcattctatgcactgagggcagagccttttatctttctagacaagaaggttttatagaaaataagatgctcagcctcatttatctcgagacagtgtttactcagcttggtaagaagttatgcatgcattcagagcagcagcagagaatgccatataggaaagagattgagaactatgtccctccacctgaccaccttccacatagaagtgggactccagacagtcacaaccagaactggtaaggaggaaagacccgacactggctctgcccacgggccaagggggcaggaactgagtccactygagcagacaggctatttttggacggggggacatctggtcaccattcaccctgcaaggtaggcaacagaacagctgggtgggtcccaattcatcccaagggaatgcccccttcatcccaagggaattc

SEQ ID NO: 143819 - DNA, 291 bp, Homo sapiens
tagacatatcttaagagagatacttctggtacctactactttgagtatttgaaaggtgatagaaagtaattaccacaactattttgttttttggtaactataagsttagatattttccatgacgcagccagcaagaagttatcttgtatattttgcagccatctataggaaatgttctaaatttcagctcttcctctccattttgctttttaatacaatttacctatttttctaaaaactttccaaaatctgtaatctgcgaatccctcttcccattccccttgtggtttt

SEQ ID NO: 143820 - DNA, 569 bp, Homo sapiens
atgcagcaagtttgctgggtgacacaccaaaaatcatccaaacgacaatgctgagcaaaactttttaggtcataattgttcacctcattgttaagacatttctacatattcttcctaagtaggacaagctcagaagaacagaattgagtgaacaaaagaaaaagtcattttaaatggctagttaagttaatttcaattgttaaaaatcactaaaatttgagacttggtctgagacttggttctgctattggttgtttgtgtcgacttcaaacaagttttaaacccttctcagtttttcrcaaatataaacaaatggaaaacaaaactatttctaagcaccctccatattctatgttcaacagctctgtgataaaaatcaatttaaataatgaattatcgttctgtttatttccaaatgtcatacattttgagacaactcctcaaattttcttagtataggaatataaataaaattaactttccctcggaagacaaaaattctctttcctttaatgaacagtcagtctacatgatgaaggcaataaaacaacaatcaaattaaccttatc

SEQ ID NO: 143821 - DNA, 585 bp, Homo sapiens
ctgactatggcaggattctgctaatttaacayacttagagttctagctttcttcgaagccaacatccctctggaaatgactgcacaatggggagaaacattccactttgatgttcttatttagttgatttagcaaaatgaacatagcttgaaaaacatggctttaattcttttttttctctgcctgtgttatactagaacctatattatacttgcataatgcaagagcactacacttctgttgtaagatttggcgcagtcactctgaaaattggcagtactgacttaaggcaaacaaaagaatactctatggccaaacagttctactcctggtgaaaaaaacaacagaaatgcatgcacatgttcaccagataacatttacaagaatgtccctcatagaactactggtgatagaaaaaaaaaaaaaggcttggaaatgatccataggaaatatatttgttatgctcaattagtgaaatactatacagcaatctccccaaaatctgcatacactgcaacatcaataaatctttaaaaaaacactattgagacaaaagaaaaggtatgaagggtctccaacaagttc

SEQ ID NO: 143822 - DNA, 585 bp, Homo sapiens
ctgactatggcaggattctgctaatttaacacactkagagttctagctttcttcgaagccaacatccctctggaaatgactgcacaatggggagaaacattccactttgatgttcttatttagttgatttagcaaaatgaacatagcttgaaaaacatggctttaattcttttttttctctgcctgtgttatactagaacctatattatacttgcataatgcaagagcactacacttctgttgtaagatttggcgcagtcactctgaaaattggcagtactgacttaaggcaaacaaaagaatactctatggccaaacagttctactcctggtgaaaaaaacaacagaaatgcatgcacatgttcaccagataacatttacaagaatgtccctcatagaactactggtgatagaaaaaaaaaaaaaggcttggaaatgatccataggaaatatatttgttatgctcaattagtgaaatactatacagcaatctccccaaaatctgcatacactgcaacatcaataaatctttaaaaaaacactattgagacaaaagaaaaggtatgaagggtctccaacaagttc

SEQ ID NO: 143823 - DNA, 544 bp, Homo sapiens
agtgccaattttaaaaagttgagtgatttgtgacagcaaagaatcaaaatgtttgcattccacatcttcaaactgaaaaaaaaatcatgccaatgagcagaagtgaaaagaacaacacattaatttgaacaagtttatttaatagaaatgtagaatattgttagacttcagagaaaaaaatcaaaagtgtactccataacacatcgatcaattttacatcctatacaaaacttttcccttcattttgacttgcatatatggcacagtcagagtatttctcataataaaactggtacagaaaattagtacttcagaaaaaccaaagaacatttcaaaggcagtgtgggtagagggcaagaaagtctgatygtcttgtctgtaatcccaatactaccctttccattgactactacggtctttcaaatcataacaagaactggaagattatggtaaataccaatctaaggaagagttgccagagtgttaaacgtgttcagagagagcatgcatttatagagaatccaagcagaattcataagttgat

SEQ ID NO: 143824 - DNA, 518 bp, Homo sapiens
taaaaaaactcaacctaaagttagcaggaatggatctctgtgtgtcatcacagtcccattttatactcctccgtcttgctatttgctatatggaaattaatgatccagcatcttctctaggaatgcaactagaaaaaggaggtgrggaactggtacagtggcagtgaagggacacgtgcccacacagttcttcttctgatcatgccaagagttactttgagtcaaattcgaaggcctgaaaaactattactcaaattgacccagcactgaaaacatcaattccctgttccttctcatgtaccttcctgcagtttataagccagaaacgtaatagctaaatttctcagcctcattcgcatttaggattttggccacaattttgattccatccatcaggtgcttttgtacataccctagaaggcagaagtgaggcagaggcctggtttgtgtttctcatatgctttgattctggaaagaactattttggaggtgccttatttttctgcaattgcttcctg

SEQ ID NO: 143825 - DNA, 479 bp, Homo sapiens
agaatcatttaggatcattcaaatccaactaggagtaacaatacaaagagaaatggctattagtcacatgggtgtcaaaattatttctctttcttgagaatataaaaaaaaaccttagagctacaatgttatattagtgaacataatgaaataaaactgtgcaatattgactcccaatagccttaccttcattcactacctttagctgtagaggttttctcattcctycacagacttcaacagcataatgtaggaaatcagcaatttaaacacagtccattttattattgatgcaaagacaaaccagtgaggagagaaacatagatctgaatttcaagtatccaaagctgtataattaaaattcaagattatacttaatcatccagatttcccaattgtataagcagtgctctagaattagggcagtcttgactcactatagcatcttttactgttctcatttgctgactgaaatacta

SEQ ID NO: 143826 - DNA, 413 bp, Homo sapiens
cgagataatgttttcctccagaccaaaagttgggcaagtttactttcagccccttttaaaaggctggggtttccaaagcgcactgttctgcagttgtattgcaaacccacagaatatgctacctggaccatgctgggtaacttccatgggacttgggtggcaaagagaattgatgcaracataaagctcatgttgtcatttgtgtcttcagtaagtcatttgagtcatttgagtcttgtgtcttctgtcagcagctacaaatctgtagcaggctaatttgctagttttcaagggagatagaaattcagacccttcacagtactttacgatctgatttattatttttcttttatggtctacacttttggtgctgtatctaagacatcttagtcttaccctagatcacaaagctt

SEQ ID NO: 143827 - DNA, 370 bp, Homo sapiens
ctttttaatttcaacttccagttgtttattagtagtattgaactatacaactcattttacatcttcttttacccttctttcatcttactaaactcactattagtcatagcagatttttagtagattacatcatatattttaccagataactatgtcatctgggaatttcaaagattatttctgcctttctaatctgggtgatgtttacttytttttattccctgagaccactagctagaatctccagcatgttaaacagagttagtgagaaaatatattcttaccttattccttgccatagcacgagaacattcagtctttcacaattatgtctgatagctgtagatgcccctttttaagttgaaatttc

SEQ ID NO: 143828 - DNA, 386 bp, Homo sapiens
ggaaaggtgaattattagggcaacagtccacagagcatggtccctgggtcagcaacatgagcatcatctggaaactcrctagaaatacaccctcagaccccaccctatccatactgaataaaaaactctggcgtagggaccagaaatctgtgttttaacaagctctgcaggtgattctgttacatgccacagtttgataactactgaacttggtaataattgttaggctaaatgtttaaagaaaaagtctggttcaacgtcaccagcttcctaaccatcagcagtcaaccaagaggtggaggttagtaggtaactagcttatcagagcaagtcgtaatcaaagagtccatgaaggagttttttgttttgttttgttttgtttcaga

SEQ ID NO: 143829 - DNA, 556 bp, Homo sapiens
tatgaagcaaaaaaaaatcacgatccttacctcacaccaaacaaaacaactattgcagatggattgcacatctaaatattaaaagtaaaacaacacagattttagaaaaaaaaatagggaaaacattttcatgacctagaagtaggcaaagattttttttgttttttttttttttgagatggagtcttgctctgtcgcccaggctggagtgcagtggtgcaatctcggctcactgcaagctctgcctcccaggtgcacaaggtggtagccataccattaagagagtcagaggtgacccatasaatgggaggagatatttttaatatgtatatctaacaaaaactcttatacagaatatataaagaactcctacacatctataagaaaaagacatgctgctccatagaaaaatgggcaaaatacacgaacagtcacttcaagaggacgtccaaatggccaataaacctaggcaaatgtgctaacttcatttgtcatcaggaaaatgcaaattaaaaccaaaatgagatatcaccttatgccagccagaatgactaaa

SEQ ID NO: 143830 - DNA, 527 bp, Homo sapiens
aatagttgccattttttatatttttgcagtttaattgctttcgtccaaatagatggaatcacttcctttgtaatatatgaagtgttttaattcatttttataactagcattcctgacagcacaggtatccaccccctgaagttcccattctatagaacaaaatagcaaataagtattttttttttgttccataatggacacccagtatacacccagtatacacagggasaccgcatacagggaatcagctttattttacaacagagcttcactttacccctctggcaattaatagattctgggtatttattaagaactttaaatttaatgcaaagactgttaaataccaccagctcagctctggcaaaggactgttggctttgtttatctcctatcttcatccagatacactgccatccctatcccagcccgatcttgggtccttgaaaaaaatgacctatcattccaactaccagggaggaactccctttgaattaatgaatctggatgacttataagacttcaaa

SEQ ID NO: 143831 - DNA, 483 bp, Homo sapiens
ctgtcttccatctccacatcttgccccactggaaggtcttcaggggaaatattaataacatacatgaacctgtcatttcctgtgatgataatgccttcttctggataattcttgaaggacttgcctgaggctgttttacagttaacattctttttagaagtataagcagtatactctaaaataacaataacaagtatactatagtaaatacataaaccagtaacaaagtcgttttatgatcgtttataaatattatgtgatgtatgcaatggtatgtgctacagtgttgtgtaactggcagcccaggtttgttgtttatactggcatcaccacaaacacaacgtcactgggcaagagaaacttttcaggtccattataatcttatgggactaccatcatatatataataaatcacatgactgtgtatgaatatacaaacatacactctcaaaackcagtaagaaagcaaataatccattacaa

SEQ ID NO: 143832 - DNA, 525 bp, Homo sapiens
cgttctgggagtgctttgggagttatccaatttagyggtttgtcatcatggatctcttgaaaatctttgaaggaagttttggttgccatgatgattggagggcactagtgatgtttagtcgggaggacactggatatcctgcaatgctcaggacaggtcacacaaggagaaattgacccaggactggtaagactttccatcatcctaccggacatgctgagacagaaggcaggcttcaacttgtggtgggatttcaagttcagagacacatttgctgtgatgtgtcattattactgccacatcccatgtcgtaacagcagcccctttggggtaagcaacgtgtgttcatccattctcacactgctataaagaactacctgagactggtaatttacgaagaaaacaggtttaattgactcacagttctgcagacttaacaggaagcgtgggtaggaggcctcaggaaacttataatcatggtggaaggtgaaggggaagcaaacaagtcttttaaaccatcagatc

SEQ ID NO: 143833 - DNA, 526 bp, Homo sapiens
gactctataggatgaggcttgtggtatgtgctggagagggctgcacgcagtactaataatgccaaagttatagtgagcaaacttgcatttttctatcagccaagaatctggtgataagtcagacctaggaaggttgtgagttacttgcacaggaaggcgaggtgttctggaccatgaagaaatatagacttagaggttatctgctcttctttttgctttctccttctcctactagcctgatttcttttctctagttaggactccacacttagataatawctaaatcaaaactcatgtctaaagcatgaaaagtagagacaatttaaactttcctcatggggctattcccaagatcgacacagcagatactgtactatataaaagacctgacaatctacgttattttcatgggcattgctcaaatgactaaataatatggcttgactctgtgtccttacccaaatctcatctcaaattataatccccacatgtcgagagagggacctgactggaggttattggatca

SEQ ID NO: 143834 - DNA, 526 bp, Homo sapiens
gactctataggatgaggcttgtggtatgtgctggagagggctgcacgcagtactaataatgccaaagttatagtgagcaaacttgcatttttctatcagccaagaatctggtgataagtcagacctaggaaggttgtgagttacttgcacaggaaggcgaggtgttctggaccatgaagaaatatagacttagaggttatctgctcttctttttgctttctccttctcctactagcctgatttcttttctctagttaggactccacacttagataatatctaaatcaaaactcatgtctaaagcatgaaaagtagagacaatttaaactttcctcatggggctattcccaagatcgacacagcagatactgtactatataaaagacctgacaatctacgttattttcatgggcattgctcaaatgactaaataatatggcttgactctgtgtccttacccaaatctcatctcaaattataatccccacatrtcgagagagggacctgactggaggttattggatca

SEQ ID NO: 143835 - DNA, 531 bp, Homo sapiens
tctttaagtgaactataattttactttagrttaatgagtctatgtagaaacaaggcattaatttaagacacccaaatcaatatattttgcaagcaggaaattttaatttggggttaaaaaatccatagaacatttctttttaggttatatactagtttatatagttagttttataaaaaaaaaaaggaaactcttgtaactttagctcatttcctccttaaaactaataatactgagagaaatagatggcctttcttgctatctatattgcaacaagtcgaatatatgcatatggatatatatatgtgtgtgtgtgtatgtgtgtttaaaaatgtttacatgactgttcactttgaacaatataaagaatcataatataaatgaccaaaactacacaaataaagttccgtttaagtaaaaattaagaaataacatagctaaatcagcaggctggaagttcttttatcagtgcaaataaaactgatgactcaaaagatgaaggctaagacaaatatcacaatatgtgagata

SEQ ID NO: 143836 - DNA, 531 bp, Homo sapiens
tctttaagtgaactataattttactttagattaatgagtcyatgtagaaacaaggcattaatttaagacacccaaatcaatatattttgcaagcaggaaattttaatttggggttaaaaaatccatagaacatttctttttaggttatatactagtttatatagttagttttataaaaaaaaaaaggaaactcttgtaactttagctcatttcctccttaaaactaataatactgagagaaatagatggcctttcttgctatctatattgcaacaagtcgaatatatgcatatggatatatatatgtgtgtgtgtgtatgtgtgtttaaaaatgtttacatgactgttcactttgaacaatataaagaatcataatataaatgaccaaaactacacaaataaagttccgtttaagtaaaaattaagaaataacatagctaaatcagcaggctggaagttcttttatcagtgcaaataaaactgatgactcaaaagatgaaggctaagacaaatatcacaatatgtgagata

SEQ ID NO: 143837 - DNA, 531 bp, Homo sapiens
tctttaagtgaactataattttactttagattaatgagtctatgtagaaacaaggcattaatttaagacacccaaatcaatatattttgcaagcakgaaattttaatttggggttaaaaaatccatagaacatttctttttaggttatatactagtttatatagttagttttataaaaaaaaaaaggaaactcttgtaactttagctcatttcctccttaaaactaataatactgagagaaatagatggcctttcttgctatctatattgcaacaagtcgaatatatgcatatggatatatatatgtgtgtgtgtgtatgtgtgtttaaaaatgtttacatgactgttcactttgaacaatataaagaatcataatataaatgaccaaaactacacaaataaagttccgtttaagtaaaaattaagaaataacatagctaaatcagcaggctggaagttcttttatcagtgcaaataaaactgatgactcaaaagatgaaggctaagacaaatatcacaatatgtgagata

SEQ ID NO: 143838 - DNA, 531 bp, Homo sapiens
tctttaagtgaactataattttactttagattaatgagtctatgtagaaacaaggcattaatttaagacacccaaatcaatatattttgcaagcaggaaattttaatttggggttaaaaaatccatagaacatttctttttaggttatatactagtttatatagttagttttataaaaaaaaaaaggaaactcttgtaactttagctcatttcctccttaaaactaataatactgagagaaatagatggcctttcttgctatctatattgcaacaagtcgaatatatgcatatggatatatatatgtgtgtgtgtgtatgtgtgtttaaaaatgtttacatgactgttcactttgaacaatataaagaatcataatataaatgaccaaaactacrcaaataaagttccgtttaagtaaaaattaagaaataacatagctaaatcagcaggctggaagttcttttatcagtgcaaataaaactgatgactcaaaagatgaaggctaagacaaatatcacaatatgtgagata

SEQ ID NO: 143839 - DNA, 471 bp, Homo sapiens
tttaccattttctgcctgcaattttctttcttccaacatcttcaatkttgtcaatttaaaagtaacaaaatatccagaaatgtatatggttgtatttcaaggagtaatgatgtgtgaaaaatggcacatttctctttatgtaattatgcaaaaccttgataatatttaaaatattttcaccagtgttttttaggtgtattatttatactaagaagtaattattaacattaatattatagttaattgtggtagtaagtgaatttgagtactaatttacatgaacaaaatttatataccaatatttattagtttttttaataaacccagttctgtagaaacatcatttttactaatttaacattataacatattgtacaataatgttgttttctaatttccctcaacattagttatcatctctatattttcagttaagtctcctataacataagcagctgaaacagaaagctt

SEQ ID NO: 143840 - DNA, 489 bp, Homo sapiens
aaagttttgttggtttgagccactaaatttatggtagtttgatacagaattcataggaagttaatatagccaacagaaaaaataaataagttaaagaaagaaaatcacagcacatcccaattcaggcaaaaaaagaaaacaaacatgaaaaacatcagcatatagtcatgataaaataaaaagctcacaaatacgagggaataaaatgaatttctaaattacattaaagacaccagtagataacgttgacctttaataaggtcaatataaakatcaaattatcattctatatgcttgcaataaacaagtagggagtttttgaaaactaacaatactgaaaaagaaagaatgaaagccactgccctgagatcaactcacttccaatcagtttgcgagcttggaagaaaagttatgaaacacttctgggtaagggcaggtgatcttgtctaatttcctcgtaaatatgatgatcaatgcatgctaacaagg

SEQ ID NO: 143841 - DNA, 542 bp, Homo sapiens
gccacaaaaatttgcaagaagactctaaggagaactgttataatcatgagtatagtatattacaatgaaaagatacataataaagtcaacaaataaaaaaaagtatgagaaaagtcctacgattaaccagataaaagcattcaggcactctatttcagcagaatcacacagaagcacttgttttcccaacaaaaatgtgtggcaaattatgtgaagtattgccacagaaaagctcacatgagccttggtgtccagggccgttattggaattcagtcakttatacatacagccacctgtgtaattgtcatcaattacttagactacagcaccccacagcaaaaccagaagtgcaccataagtctcaaattagtattaactatcagattgtgttagtctctttttacactgctataaagaactacctgataccaggtaattaaaaaaataggtttaattgactcacagttctgcatggttgaagtgacctcaggatacttacaataatggcagaaggtgaaggagaagcaagacctatccttca

SEQ ID NO: 143842 - DNA, 473 bp, Homo sapiens
ttactatcacaaaaacagcaccaacgggatggtggtaaaccatttatgagaaatccacccccatgatgcaatcacttcccaccaggccccagctccaayaccagggattaaaatttcacatgagatttgctggggatacagatccaaaccatatcatgcaccaagtccagagtgctttaaaaagtacaattttgtaatattttaatatcttctgtgataataattctattttttaaacatttcttggccaatttaaaacttttactctttagattatgtttagaaaaaaaatttaaattccattgtacgaaaatctgtgattttcattagggctgaattatatttatagcttaagtagaaatacagttatcatttttaaatattgaatttttccattgagaagcatagtatgtcttatcatgtattaaaagacaaatttcttggaagtcaaattttttaaaatgtgaaaaaaa

SEQ ID NO: 143843 - DNA, 559 bp, Homo sapiens
gttttacaaaataatttaactgtgttttagtttgtttttaaatttgtattctctatgtcaccgttatttcctttgatgaattatatcttgtatcacttccaatttcatcttcatacttttgagggcattattttttcttcaatttttacctaagttttaccagtttatgtttcctgtactcatmaactttttataatttcttccttgactttttgcacttctgctttgtgatctccctttgtaggagtgagcacaaacttgtgtgtgtgtgtgtgtgtgtgtgtgcattattttataaaagaatatatgcttacaaattgccctgatgaactttttttcgtttaagtaattctttagcagtttgaaagttttgtttctcttttctaaattcctctaatagcaatattataataatgttctaacatatactatattgttactcattattgaacatattggtttttattagactaattatttgcagggattttctattcaccacggagaggttagagtctgaagcacccaagaaagatttttttgtttttttgaaataagc

SEQ ID NO: 143844 - DNA, 559 bp, Homo sapiens
gttttacaaaataatttaactgtgttttagtttgtttttaaatttgtattctctatgtcaccgttatttcctttgatgaattatatcttgtatcacttccaatttcatcttcatacttttgagggcattattttttcttcaatttttacctaagttttaccagtttatgtttcctgtactcataaactttttataatttcttccttgactttttgcacttctgctttgtgatctccctttgtaggagtgagcacaaacttgtgtgtgtgtgtgtgtgtgtgtgtgcattattttataaaagaatatatgcttacmaattgccctgatgaactttttttcgtttaagtaattctttagcagtttgaaagttttgtttctcttttctaaattcctctaatagcaatattataataatgttctaacatatactatattgttactcattattgaacatattggtttttattagactaattatttgcagggattttctattcaccacggagaggttagagtctgaagcacccaagaaagatttttttgtttttttgaaataagc

SEQ ID NO: 143845 - DNA, 558 bp, Homo sapiens
attttaaattacatttttgaatactttcataatataaaattaattccttcacaaaaatatctgaaaattaaaacttcattctttttttctattaatggaaataatttgactatgaaatcagattcccaaatgttgaatttattcatggtttcttatctcataaactgttcaatgaaataaaagaatacttagtcacgagtattrtttaatcttcctatctcatgttaaattaaaaaaaaaattctccattaacttaattattttaacccaattctatttcccagtttccctctactgaatcacttctttttgcactacttactgcttctccacaattttatgatttgttttcccttgaaaaaatcagtttagcattgttgtcaacagtgtaaaatatgacagtttatacttcttaaaacacatgaagaatcaaaatgtatatttgtaaaattagttatgaaaaaagaaaggaaaatatattcctatgtatcttgtctacttcatccacctatcaacctctttcataaatgcaatttctcaatattgttctatttatta

SEQ ID NO: 143846 - DNA, 665 bp, Homo sapiens
cttgtatcttacccacacgttgtcaaaaaaacactctaaaattattcctcaagtctatattctttaaacctagctcttacattggccactttttccatccaaaaaacaaatagaaaagtttaggacccttgctggaaagcctttaatatcttggggagaatattaacactttctttttgaatgataacttattatyatttttcagaacacagtaagttggaactaatattctcacaacaaaattacatattaaactttaactttatttgccctcaaaaaaaaaagtaattgtcatggctacaaggagacagaaaaaagaaattgcaaggtaatacatctcatgctgttgactgttctctcactcttaggtgtctaagacagtggctcctcacttttactagaacctaattctgaaaataaataggaaataattaagtcaaaaaatgtgggagaatgtagaggaggggaagagtttgctaatgtcggtggattacctttctattgctgctttaacaaattgtcacaaatttaatgatgtaaagtagcacctactggatttctcaccgtttttgtggattagaagtctgagcacagtgtagcccacttatctctctgacagagatgcataagcttaaaatcaaggttttagcaggctgtgttccttt

SEQ ID NO: 143847 - DNA, 665 bp, Homo sapiens
cttgtatcttacccacacgttgtcaaaaaaacactctaaaattattcctcaagtctatattctttaaacctagctcttacattggccactttttccatccaaaaaacaaatagaaaagtttaggacccttgctggaaagcctttaatatcttggggagaatattaacactttctttttgaatgataacttattatcatttttcagaacacagtaagttggaactaatattctcacaacaaaattacatattaaactttaactttatttgccctcaaaaaaaaaagtaattgtcatggctacaaggagacagaaaaaagaaattgcaaggtaatacatctcatgctgttgactgttctctcactcttaggtgtctaagacagtggctcctcacttttactagaacctaattctgaaaataaataggaaataattaagtcaaaaaatgtgggagaatgyagaggaggggaagagtttgctaatgtcggtggattacctttctattgctgctttaacaaattgtcacaaatttaatgatgtaaagtagcacctactggatttctcaccgtttttgtggattagaagtctgagcacagtgtagcccacttatctctctgacagagatgcataagcttaaaatcaaggttttagcaggctgtgttccttt

SEQ ID NO: 143848 - DNA, 649 bp, Homo sapiens
cattaactactcatcaatatacttccctagccccttgtacatacccctcctatatagaatttatttcagtaactatttgtgcaacattgtttcacatcagaataatactttccttcaaccaatggccatatgaccatatcttcatcttttgtttagttttaaataagtgcatagagtattgcagagtatatgaatgatagagatataaaatctccatgtcagctttggttcaattgccttcataaataaagatgcttatatttaatattgagtgtgaggaaatagaaggaactatgtgaaatctgagtaccttaactgatgttcctatagaagtttgtagcatcaaaagtctgtcagcatgagtctgtaataataatggtaccaaagraaagataaatattaatcacccccattcctagtgcctgctaatgagccaggtttttaaattattatttcacatgttataagattatatgaggaaatgaaatatgaccttcaatggtatattgtgtgtgaaagatcccttcaaacaacagccaagatatgattatttcaaacaactccatgatgtttcagccttccagttactcgtgaaattggaaaagactaggccaccaaaaacaacaaaaaccaaaaagcaaaaaataat

SEQ ID NO: 143849 - DNA, 572 bp, Homo sapiens
atatatatatatttaataaggtatgtatatatatattgagttatctgatccatccactatgagggtgaggttagcaagatactattctattatatttctttgatcctgtgtaaatcatgcacttgtgctttgtttcgcccacctctagatattgactttgtatgtttggcagtaaaatcaaacaaatataaacagatcacctgctttttgctgattgttggcatttagagaatctaagcttgaaaaccttattgttcaccatatgawacaaaatgacctatgaattgacaagcacaatattaattatctaatttctatataatgatatttttaaacgtattacattcaatttcttcctttttgcaaattttttgaagactatttgcttgttatgcattaagaaatatgagctatggattaatgtattttcatttaataaaacactaccctttaaggttactaagttgtgcatttttatctaactttcactgtaataattattccactttaatagtgccatcatgattttcttaatttactaatatagttttatccacaaaatcactttacat

SEQ ID NO: 143850 - DNA, 572 bp, Homo sapiens
atatatatatatttaataaggtatgtatatatatattgagttatctgatccatccactatgagggtgaggttagcaagatactattctattatatttctttgatcctgtgtaaatcatgcacttgtgctttgtttcgcccacctctagatattgactttgtatgtttggcagtaaaatcaaacaaatataaacagatcacctgctttttgctgattgttggcatttagagaatctaagcttgaaaaccttattgttcaccatatgatacaaaatgacctatgaattgacaagcacaatattaattatctaatttctatataatgatatttttaaacrtattacattcaatttcttcctttttgcaaattttttgaagactatttgcttgttatgcattaagaaatatgagctatggattaatgtattttcatttaataaaacactaccctttaaggttactaagttgtgcatttttatctaactttcactgtaataattattccactttaatagtgccatcatgattttcttaatttactaatatagttttatccacaaaatcactttacat

SEQ ID NO: 143851 - DNA, 572 bp, Homo sapiens
atatatatatatttaataaggtatgtatatatatattgagttatctgatccatccactatgagggtgaggttagcaagatactattctattatatttctttgatcctgtgtaaatcatgcacttgtgctttgtttcgcccacctctagatattgactttgtatgtttggcagtaaaatcaaacaaatataaacagatcacctgctttttgctgattgttggcatttagagaatctaagcttgaaaaccttattgttcaccatatgatacaaaatgacctatgaattgacaagcacaatattaattatctaatttctatataatgatatttttaaacgtattacattcaatttcttcctttttgcaaattttttgaagactatttgcttgttatgcattaagaaatatgagytatggattaatgtattttcatttaataaaacactaccctttaaggttactaagttgtgcatttttatctaactttcactgtaataattattccactttaatagtgccatcatgattttcttaatttactaatatagttttatccacaaaatcactttacat

SEQ ID NO: 143852 - DNA, 616 bp, Homo sapiens
cctgcaagaaatgttcaagggggtcctaaacctagaagtaaaagcataacatttaccatcctgaaaacacatgaaagtagaaaactcactggtaaaccaaacacgcaaatgaggaagagaaaggactcaaatggcaccactatagcattaaaataaccaaaaaacaattaacaatatgacaggaacaaaacttcacatatcaataataacmttgaatataaatggttaaattatccacctagaagatatagaaatgagattgaactatgtgctgtctacaagatattcaatttacttgtaaagacacatgtatactcaaagtaaaggaatggataaagttactccacatatatggaaaccaaaagtgaacaggagtacctatacttagaacaaactttaagtcaaaaacagtaaaaaaaaaaaaaaaaaaaaaaaaaaggacaaagaagatcactatataatgatgaagagatcaatccagcaaaaggaaataacaattctaaatatatatgcagtgaacactgaagcacacagattcataaagtatacattactagatccaaatgagaggtaaacttcaattatttcacaataatattgggggacttcaacaaca

SEQ ID NO: 143853 - DNA, 616 bp, Homo sapiens
cctgcaagaaatgttcaagggggtcctaaacctagaagtaaaagcataacatttaccatcctgaaaacacatgaaagtagaaaactcactggtaaaccaaacacgcaaatgaggaagagaaaggactcaaatggcaccactatagcattaaaataaccaaaaaacaattaacaatatgacaggaacaaaacttcacatatcaataataacattgaatataaatggttaaattatccacctagaagatatagaaatgagattgaactatgtgctgtctacaagatattcaatttacttgtaaagacacatgtatactcaaagtaaaggaatggataaagttactccacatatatggaaaccaaaagtgaacaggartacctatacttagaacaaactttaagtcaaaaacagtaaaaaaaaaaaaaaaaaaaaaaaaaaggacaaagaagatcactatataatgatgaagagatcaatccagcaaaaggaaataacaattctaaatatatatgcagtgaacactgaagcacacagattcataaagtatacattactagatccaaatgagaggtaaacttcaattatttcacaataatattgggggacttcaacaaca

SEQ ID NO: 143854 - DNA, 616 bp, Homo sapiens
cctgcaagaaatgttcaagggggtcctaaacctagaagtaaaagcataacatttaccatcctgaaaacacatgaaagtagaaaactcactggtaaaccaaacacgcaaatgaggaagagaaaggactcaaatggcaccactatagcattaaaataaccaaaaaacaattaacaatatgacaggaacaaaacttcacatatcaataataacattgaatataaatggttaaattatccacctagaagatatagaaatgagattgaactatgtgctgtctacaagatattcaatttacttgtaaagacacatgtatactcaaagtaaaggaatggataaagttactccacatatatggaaaccaaaagtgaacaggagtacctatacttagaacaaactttaagycaaaaacagtaaaaaaaaaaaaaaaaaaaaaaaaaaggacaaagaagatcactatataatgatgaagagatcaatccagcaaaaggaaataacaattctaaatatatatgcagtgaacactgaagcacacagattcataaagtatacattactagatccaaatgagaggtaaacttcaattatttcacaataatattgggggacttcaacaaca

SEQ ID NO: 143855 - DNA, 565 bp, Homo sapiens
ctataactgcagtagattccccaagctcattatttctcagctgcaatacaagtctgctatgagtgtaatattcatacgtgccctattgcattgmccctgtgggcctcaggggcaaaggagacagatacaaataagctgaaactcatgttgttgtttgtggtgccatgagtaatatagttcacaggtgttgccattctttaattttagccatcctagagaacatattatctctctatgatattaacttatatttctctaatggttaatgattttaataccaaatgttgaccaggataagaagcaactggaattgacacacattggcaatgggagtataacatgttcaagggcttttgaaaatagtttgacagtttctttagagtttcacatactgaaattccactcccaaaagcgatgtaaaataatgtttgtagaaatttattcataatagatccatactggaaacaagccacaagtgtccattttaaaaagaatggataaacaaacagcacaattgaaatctactcagcaatagaaggaaatgtgccacaaatccacgcaacaa

SEQ ID NO: 143856 - DNA, 565 bp, Homo sapiens
ctataactgcagtagattccccaagctcattatttctcagctgcaatacaagtctgctatgagtgtaatattcatacgtgccctattgcattgaccctgtgggcctcaggggcaaaggagacagatacaaatawgctgaaactcatgttgttgtttgtggtgccatgagtaatatagttcacaggtgttgccattctttaattttagccatcctagagaacatattatctctctatgatattaacttatatttctctaatggttaatgattttaataccaaatgttgaccaggataagaagcaactggaattgacacacattggcaatgggagtataacatgttcaagggcttttgaaaatagtttgacagtttctttagagtttcacatactgaaattccactcccaaaagcgatgtaaaataatgtttgtagaaatttattcataatagatccatactggaaacaagccacaagtgtccattttaaaaagaatggataaacaaacagcacaattgaaatctactcagcaatagaaggaaatgtgccacaaatccacgcaacaa

SEQ ID NO: 143857 - DNA, 565 bp, Homo sapiens
ctataactgcagtagattccccaagctcattatttctcagctgcaatacaagtctgctatgagtgtaatattcatacgtgccctattgcattgaccctgtgggcctcaggggcaaaggagacagatacaaataagctgaaactcatgttgttgtttgtggtgccatgagtaatatagttcacaggtgttgccattctttaattttagccatcctagagaacatattatctctctatgatattaacttatatttctctaatggttaatgattttaataccaaatgttgaccaggataagaagcaactrgaattgacacacattggcaatgggagtataacatgttcaagggcttttgaaaatagtttgacagtttctttagagtttcacatactgaaattccactcccaaaagcgatgtaaaataatgtttgtagaaatttattcataatagatccatactggaaacaagccacaagtgtccattttaaaaagaatggataaacaaacagcacaattgaaatctactcagcaatagaaggaaatgtgccacaaatccacgcaacaa

SEQ ID NO: 143858 - DNA, 466 bp, Homo sapiens
ataattgtacatttttatgaggtgcaatgtgatgtttggatacatgcatacactgtaaaatgatcgaatcaggctaatcarcatatcagtcacctcaaatatgtatcattcttttagcggtgagaatagttaaaattctctcatatatttcaaaacagacaacacttattaactctattcactatgctgtgcaaaagaacaacagaaattattattcctatctacccaaaactatgtacctactgaccaacatctcccccttccctatccaccctctcctctagcgtctggtaaccaccattctactctctacttctgtgagcactgtctttaaattccacatgtaagtgagactatatggtatttgtctctctgtgcctggtttatttcacttaacataatgtcctccaggttcatccatgttatcacaagtgtcagagttccctgcatcacgggttttaactca

SEQ ID NO: 143859 - DNA, 466 bp, Homo sapiens
ataattgtacatttttatgaggtgcaatgtgatgtttggatacatgcatacactgtaaaatgatcgaatcaggctaatcaacatatcagtcacctcaaatatgtatcattcttttagcggtgagaatagttaaaattctctcatatatttcaaaacagacaacacttattaactctattcactatgctgtgcaaaagaacaacagaaattattattcctatctacccaaaactatgtacctactgaccaacatctcccccttccctatccaccytctcctctagcgtctggtaaccaccattctactctctacttctgtgagcactgtctttaaattccacatgtaagtgagactatatggtatttgtctctctgtgcctggtttatttcacttaacataatgtcctccaggttcatccatgttatcacaagtgtcagagttccctgcatcacgggttttaactca

SEQ ID NO: 143860 - DNA, 530 bp, Homo sapiens
ctttttaaacacaatcctcattcactcagaaaattgagaaaaaagttctaagtgataattgatgtcaacctgtaaaatttttcaacagcttgagtgtytattttctctacaatattgtcatcaactcataaccaaatatcacaaataggcagcataatggcctcattagggcagtttccacagtgacccacatcatcaacaatggcatgcatctgtcatgcatcttcccagaaagtcctaaaattctacaggaaaaacctcttggaaagaaagtttcgaatgttgatgaggtccacccatatagttaatctcttcaggtgagaagctagaaacataagacacttcttcggtttcatccattttgtaaactcatttgctgaaatgttcttcacagtaatatctgtgttcactgcattgtttccaagtatttaaaatccctgaagaagtaagtaatccatgtgttttacgccatttcaacagaaatgtcttaggcaatgtttatctttgctgcttacagatccccaaataag

SEQ ID NO: 143861 - DNA, 530 bp, Homo sapiens
ctttttaaacacaatcctcattcactcagaaaattgagaaaaaagttctaagtgataattgatgtcaacctgtaaaatttttcaacagcttgagtgtctattttctctacaatattgtcatcaactcataaccaaatatcacaaataggcagcataatggcctcattagggcagtttccacagtgacccacatcatcaacaatggcatgcatctgtcatgcatcttcccagaaagtcctaaaattctacaggaaaaayctcttggaaagaaagtttcgaatgttgatgaggtccacccatatagttaatctcttcaggtgagaagctagaaacataagacacttcttcggtttcatccattttgtaaactcatttgctgaaatgttcttcacagtaatatctgtgttcactgcattgtttccaagtatttaaaatccctgaagaagtaagtaatccatgtgttttacgccatttcaacagaaatgtcttaggcaatgtttatctttgctgcttacagatccccaaataag

SEQ ID NO: 143862 - DNA, 530 bp, Homo sapiens
ctttttaaacacaatcctcattcactcagaaaattgagaaaaaagttctaagtgataattgatgtcaacctgtaaaatttttcaacagcttgagtgtctattttctctacaatattgtcatcaactcataaccaaatatcacaaataggcagcataatggcctcattagggcagtttccacagtgacccacatcatcaacaatggcatgcatctgtcatgcatcttcccagaaagtcctaaaattctacaggaaaaacctcttggaaagaaagtttcgaatgttgatgaggtccacccatatagttaatctcttcaggtgagaagctakaaacataagacacttcttcggtttcatccattttgtaaactcatttgctgaaatgttcttcacagtaatatctgtgttcactgcattgtttccaagtatttaaaatccctgaagaagtaagtaatccatgtgttttacgccatttcaacagaaatgtcttaggcaatgtttatctttgctgcttacagatccccaaataag

SEQ ID NO: 143863 - DNA, 374 bp, Homo sapiens
aacaaatgaaatcacagacttaagaaaaataaacagaaaaacgaaaagttaaattgttyatgtttcatagccatactgcctataacaaatgccagaacatatttatttggtccaatgtgcaatgcattaaatgtgctcaaatacagaaaacaccaagaaatgcaacagggagttaaaaaaaaaaaaaaaaaaaggctgggcgcggttacaggctcacgcctataatcctatcacttcaggaggctgaggtgggtggatcaggaggtgaggagatccagaccaccttggctaacatggtgaaaccccgtccctgctaaaaaaaaaaaaaaaaaaaaacaaaaaattagtcaggcctggtggcgggtgcctgtagt

SEQ ID NO: 143864 - DNA, 557 bp, Homo sapiens
aataagaaaataggaaagcacaattatataaaatacagtagacacttttgaatctttttaatatatgcctacaaatacattttattaatagtgtaaatttaatttcctctgagaatttattcaaagaagttctatctgagtttgtgctcagaaaatgccaggatgattccttgtcacaatgtatttggtgtttaaagttccctctaatttacacagcaagacaacattcaattttctacacttctgcttaagcatatgtaaaagaaacacactcctcatgagatatgtttacaaatataaatggaatagtcacagtggagcatgaataaaccattacatggttatttctctacagtggatgtaaagagagaatcaagtccaccataataagaaataaactaagagttgtagttaaaacataataaaaattttyttaaacgcttctttactttgccaattttgtcatccaaatagggataattaaataatctgggacaacaaaatgtatactgtggcagaacaaaagaatccaaggtaaaaaaaaaaggacatggcag

SEQ ID NO: 143865 - DNA, 557 bp, Homo sapiens
aataagaaaataggaaagcacaattatataaaatacagtagacacttttgaatctttttaatatatgcctacaaatacattttattaatagtgtaaatttaatttcctctgagaatttattcaaagaagttctatctgagtttgtgctcagaaaatgccaggatgattccttgtcacaatgtatttggtgtttaaagttccctctaatttacacagcaagacaacattcaattttctacacttctgcttaagcatatgtaaaagaaacacactcctcatgagatatgtttacaaatataaatggaatagtcacagtggagcatgaataaaccattacatggttatttctctacagtggatgtaaagagagaatcaagtccaccataataagaaataaactaagagttgtagttaaaacataataaaaatttttttaaacgyttctttactttgccaattttgtcatccaaatagggataattaaataatctgggacaacaaaatgtatactgtggcagaacaaaagaatccaaggtaaaaaaaaaaggacatggcag

SEQ ID NO: 143866 - DNA, 489 bp, Homo sapiens
ctcattgcttggtaaaacattcagagtatttgatataggaacatttttctatatattccccataagtgacaatgtcacatttatacaggtgagtcagacactggaatttgtgattttttacatacaaagagcagcatwatctagctaagaaattgcatttaacatctttagcatgaagagcacccaatatttttacacagcaagaagccattgaaatgtgcagagctgttaagaaaggtttgctttctctacgctttccttaaatgtccccctcaatgtttatgccacaagagaggctttcttgatttccccagcacacatgctctctggataacactgtgcagtcgggattcccagatgtcagcaaatatgctacagagtgggctaagaaaaatagataaatacgaatccaactggctacgaactttacttacattttctaaaaaggcattttaaaactgtgaagaagctaaagtacaagaaggcaac

SEQ ID NO: 143867 - DNA, 623 bp, Homo sapiens
ttgttctaaaaaaagaaaaaagaaaaaaaaaaagattcctgtcctttctcagactgtctcgattaggtcaaattcactaactccacagcaggcttctctctggttccacatattgagtcagcagggagcacagcctcgggaatcgaatcacaaacagggaagggggtgcccataccttcttcaggccacgtctggatgttcatctggatacggcgctattccattcttcccatttcatcacctgtcttttcagttcttaatgtaccttaacattatcttaatgagaggttaaataatgcttttatttagaaggtaccaaaagttcatcttgttatgaatctgaattgatctgtgcattgctatctagagggaatgctttggaaaaagtacattttactcacagtgaacataagcagtgatggtcaatgtaaaaatctacttttttccatataaaaacttctgttttacatggtcttgatctccattcgattatcttcagtcactgtcttccctacatctcactccatggggtctgaagggggctcaccctaccacctggggccagcacagggacamgcctcaggcctggcaactgaatgccatgcctgtcctactggaaagga

SEQ ID NO: 143868 - DNA, 488 bp, Homo sapiens
ccgcatgttctcacttatgagtgggagcaaaacactgagtacatatggacacaaagaagggaacaacaggcactggggcctacttgagggtaaagggagggaagacggtgacaactgagaaactacctatctagtactgtgcttattacctgggtggcaaaataatgtgtacaccaaaccccyatgatgtgtaatttacctaacaaatcagcacatgtacccctgaacctaaaataaaagttaaaaaataataacaataatcaccctttaaacctatctttcaacatttgaagtttgcaaaggcaaagttttattcacctatggaacatggtttactaactgagcaactctgggcaagtactctcttggcctcttaagtggggataataacagggcatgcctccaaatcttcctgtgaacattaagtgaatggatacgtactggacactcagaaaaatgcttgggttgtagtgatatttaagtgccat

SEQ ID NO: 143869 - DNA, 556 bp, Homo sapiens
gttgatattttgaatgtttcttcatgtctctatctccttcagtctgcctgtgtgcagttctagtttcagtctgttttagagmtcaagcttgaatacataagaagaaagaagaagactgagaagaaggagaaggaggggtggaagaggaggaataagagaggagaaataagaaggagagagagagggagggaggaagaagggaaagaggaaggatgatgagagggagggaaggaaagaggaagggaaggaaggaggaaatcaagttaggcaaatcaccgctaggtcatccttcaggtcctgagctccataccaagttcaggggtacatgtgtagctattgaaatgggaaaggttcccttgtcccttttgcagggcatgtgatggaggtgtggcttgcttcttcagtgcttcagtgccccgctggtcaaacctctaggggagcatacagacaggctgcagggcttcaaccccatggcaatgtctaggggtgaatgtttactactcttatccaacgttcagagtcttctgttagtaacattatgcattttgaccatgat

SEQ ID NO: 143870 - DNA, 556 bp, Homo sapiens
gttgatattttgaatgtttcttcatgtctctatctccttcagtctgcctgtgtgcagttctagtttcagtctgttttagagctcaagcttgaatacataagaagaaagaagaagactgagaagaaggagaaggaggggtggaagaggaggaataagagaggagaaataagaaggagagagagagggagggaggaagaagggaaagaggaaggatgatgagagggagggaaggaaagaggaagggaaggaaggaggaaatcaagttaggcaaatcaccgctaggtcatccttcaggtcctgagctccataccaagttcaggggtacatgtgtagctattgaaatgggaaaggttcccttgtcccttttgcagggcatgtgatggaggtgtggcttgcttcttcagtgcttcagtgccccrctggtcaaacctctaggggagcatacagacaggctgcagggcttcaaccccatggcaatgtctaggggtgaatgtttactactcttatccaacgttcagagtcttctgttagtaacattatgcattttgaccatgat

SEQ ID NO: 143871 - DNA, 556 bp, Homo sapiens
gttgatattttgaatgtttcttcatgtctctatctccttcagtctgcctgtgtgcagttctagtttcagtctgttttagagctcaagcttgaatacataagaagaaagaagaagactgagaagaaggagaaggaggggtggaagaggaggaataagagaggagaaataagaaggagagagagagggagggaggaagaagggaaagaggaaggatgatgagagggagggaaggaaagaggaagggaaggaaggaggaaatcaagttaggcaaatcaccgctaggtcatccttcaggtcctgagctccataccaagttcaggggtacatgtgtagctattgaaatgggaaaggttcccttgtcccttttgcagggcatgtgatggaggtgtggcttgcttcttcagtgcttcagtgccccgctggtcaaacctctaggggagcatacagacaggctgyagggcttcaaccccatggcaatgtctaggggtgaatgtttactactcttatccaacgttcagagtcttctgttagtaacattatgcattttgaccatgat

SEQ ID NO: 143872 - DNA, 556 bp, Homo sapiens
gttgatattttgaatgtttcttcatgtctctatctccttcagtctgcctgtgtgcagttctagtttcagtctgttttagagctcaagcttgaatacataagaagaaagaagaagactgagaagaaggagaaggaggggtggaagaggaggaataagagaggagaaataagaaggagagagagagggagggaggaagaagggaaagaggaaggatgatgagagggagggaaggaaagaggaagggaaggaaggaggaaatcaagttaggcaaatcaccgctaggtcatccttcaggtcctgagctccataccaagttcaggggtacatgtgtagctattgaaatgggaaaggttcccttgtcccttttgcagggcatgtgatggaggtgtggcttgcttcttcagtgcttcagtgccccgctggtcaaacctctaggggagcatacagacaggctgcrgggcttcaaccccatggcaatgtctaggggtgaatgtttactactcttatccaacgttcagagtcttctgttagtaacattatgcattttgaccatgat

SEQ ID NO: 143873 - DNA, 618 bp, Homo sapiens
acactctagaaaattactctttttggaccatcccctcaggtcccttaaatatctgtgtcccttaaatatctgtgtccctttactgagcagcaatttgggtcagaaaaaatgggctctgaggatgctcagaaacaaaagtgttttggggagwaagatatggttctcaaggcctggagaggcaaaccatgtctagaaaaggtccctgatgatagaactccctgagtattcttgcagaaatgaatatccaccaggcttcttcttcttctttttttttttttttttgagatggagtctgtctctgttgcccaggctggcgtgcaatggtgcgatcttggctcaatgcaagctccgcctcccaggttcacgctattctcctgcctcagcctcccaagtagttgggactacaggtgcctgccaccatgcccggctaattttttttgtatttttcgtagagacggggtttcaccgtgttagccaggttggtctcgatctcctgacctcgtgatccacccgccttggcctcccaaagtgctgggattacaggcgtgagccaccgcgcccggccccttgtttttcaatcacaagatatgagtcattgcaggaaacaaataaaatgga

SEQ ID NO: 143874 - DNA, 618 bp, Homo sapiens
acactctagaaaattactctttttggaccatcccctcaggtcccttaaatatctgtgtcccttaaatatctgtgtccctttactgagcagcaatttgggtcagaaaaaatgggctctgaggatgctcagaaacaaaagtgttttggggagaaagatatggttctcaaggcctggagaggcaaaccatgtcyagaaaaggtccctgatgatagaactccctgagtattcttgcagaaatgaatatccaccaggcttcttcttcttctttttttttttttttttgagatggagtctgtctctgttgcccaggctggcgtgcaatggtgcgatcttggctcaatgcaagctccgcctcccaggttcacgctattctcctgcctcagcctcccaagtagttgggactacaggtgcctgccaccatgcccggctaattttttttgtatttttcgtagagacggggtttcaccgtgttagccaggttggtctcgatctcctgacctcgtgatccacccgccttggcctcccaaagtgctgggattacaggcgtgagccaccgcgcccggccccttgtttttcaatcacaagatatgagtcattgcaggaaacaaataaaatgga

SEQ ID NO: 143875 - DNA, 618 bp, Homo sapiens
acactctagaaaattactctttttggaccatcccctcaggtcccttaaatatctgtgtcccttaaatatctgtgtccctttactgagcagcaatttgggtcagaaaaaatgggctctgaggatgctcagaaacaaaagtgttttggggagaaagatatggttctcaaggcctggagaggcaaaccatgtctagaaaaggtccctgatgatagaactccctgagtattcttgcagaaatgaatatccaccaggcttcttcttcttctttttttttttttttttgagatggagtctgtctctgtygcccaggctggcgtgcaatggtgcgatcttggctcaatgcaagctccgcctcccaggttcacgctattctcctgcctcagcctcccaagtagttgggactacaggtgcctgccaccatgcccggctaattttttttgtatttttcgtagagacggggtttcaccgtgttagccaggttggtctcgatctcctgacctcgtgatccacccgccttggcctcccaaagtgctgggattacaggcgtgagccaccgcgcccggccccttgtttttcaatcacaagatatgagtcattgcaggaaacaaataaaatgga

SEQ ID NO: 143876 - DNA, 618 bp, Homo sapiens
acactctagaaaattactctttttggaccatcccctcaggtcccttaaatatctgtgtcccttaaatatctgtgtccctttactgagcagcaatttgggtcagaaaaaatgggctctgaggatgctcagaaacaaaagtgttttggggagaaagatatggttctcaaggcctggagaggcaaaccatgtctagaaaaggtccctgatgatagaactccctgagtattcttgcagaaatgaatatccaccaggcttcttcttcttctttttttttttttttttgagatggagtctgtctctgttgcccaggctggcgtgcaatggtgcgatcttggctcaatgcaagctccgcctcccaggttcacgctattctcctgcctcagcctcccaagtagytgggactacaggtgcctgccaccatgcccggctaattttttttgtatttttcgtagagacggggtttcaccgtgttagccaggttggtctcgatctcctgacctcgtgatccacccgccttggcctcccaaagtgctgggattacaggcgtgagccaccgcgcccggccccttgtttttcaatcacaagatatgagtcattgcaggaaacaaataaaatgga

SEQ ID NO: 143877 - DNA, 536 bp, Homo sapiens
tgggggcggtttcccccatactgttctcgtagttgagaatcaatctcacaaggtctgacggttttataagggggacccccttttgcttgatagtcattctctcttgtttgctgccacgtaaaatatgcttttcgccttctgccatgattgtgaggcctcctcagccacatggaaatgtgaatccattaaaccttttttctttatgaattacccagtctcagatatgtcttcatcagcagtgtgaaratggactaatacagtagacaaaaactggaaacaactcaaatgtccatcagccactgaatggataaccacaatgtggcatattcgttgaactggttgctatttagtaataaaattaaagctactgataggccatgatttctttatgtacttaattgttgcttaatgttaccaattactcttaatgaagaatgccgtcccactcctctctaggattttcgcatcactctcttacagtttgcgttcttccttctaaaaatgttgtcctttcacttttttcctgttcaaaaaaa

SEQ ID NO: 143878 - DNA, 536 bp, Homo sapiens
tgggggcggtttcccccatactgttctcgtagttgagaatcaatctcacaaggtctgacggttttataagggggacccccttttgcttgatagtcattctctcttgtttgctgccacgtaaaatatgcttttcgccttctgccatgattgtgaggcctcctcagccacatggaaatgtgaatccattaaaccttttttctttatgaattacccagtctcagatatgtcttcatcagcagtgtgaaaatggactaatacagtagacaaaaactggaaacaactcaaatgtccatcagccactgaatggataaccacaatgtggcatattcrttgaactggttgctatttagtaataaaattaaagctactgataggccatgatttctttatgtacttaattgttgcttaatgttaccaattactcttaatgaagaatgccgtcccactcctctctaggattttcgcatcactctcttacagtttgcgttcttccttctaaaaatgttgtcctttcacttttttcctgttcaaaaaaa

SEQ ID NO: 143879 - DNA, 499 bp, Homo sapiens
agtgtaagtaatgtactaatatttgttgagccccaccatatgctagactctattgtcttacttatacctctcagcaaacctataagttaggtcctattagctgatttatagatggcaaaataggctcagtgaggtcaagtaacttgccctatgttatagagttatcagtgggaaagttgaaagtggtcaagggctatttatagtcaggagaaattaagygagtttagagtcattccttttctgtagcattacattagtcctgaaataaagcaaaatgtatcaaattcatataccatatataaatatatattttattttattattattttaagacagagtttcagtcttgttgcccaggctggagtgcaatggtatgatcttggctcactgcaacctccgcctcctgggttcaagtgattctcctgcctcagcttcctgagtagctgggattataggcatggaccaacacatccggctaattttgtatttttagtagaga

SEQ ID NO: 143880 - DNA, 499 bp, Homo sapiens
agtgtaagtaatgtactaatatttgttgagccccaccatatgctagactctattgtcttacttatacctctcagcaaacctataagttaggtcctattagctgatttatagatggcaaaataggctcagtgaggtcaagtaacttgccctatgttatagagttatcagtgggaaagttgaaagtggtcaagggctatttatagtcaggagaaattaagtgagtttagagtcattccttttctgtagcattacattagtcctgaaataaagcaaaatgtatcaaattcatataccatatataaatatatattttattttattattattttaagacagagtttcagtcttgttgcccaggctggagtgcaatggtatgatcttggctcactgcaacctccgcctcctgggttcaagtgattctcctgcctcagcttccygagtagctgggattataggcatggaccaacacatccggctaattttgtatttttagtagaga

SEQ ID NO: 143881 - DNA, 553 bp, Homo sapiens
gctttatctgtctcccattggaatacacttttgttgttcgtttttttttaacttaattaaacttgaaagccaacttttgtcaaaacagaagaaaataaagcaatttttaaaaaaatccagtgtttaaaatacttgtcatttataatatatgcatataacagaaaagtagaaaataattctacattttaaaagcttagcttctacatggcaagtgtgggacataaagttgatacytgaccattaactggatatattctagattttcacatttaatgataatggatgtgtgcgtctcatggtcaaactaaaatgatttattttttacaaattatctttatcattagcaaacaagtcttacttttattagtcaattataagtccacagagatataggagctcaatttgttacagggaacttgagcattccatggattatctgagctgaatttgaagaatgtactgtggagatcttctatgtgatatatataaaggacgtaggtcaactactggttattatttagaaaatactttagggaaaaaaattatcttctgg

SEQ ID NO: 143882 - DNA, 580 bp, Homo sapiens
atgataatggatgtgtgcgtctcatggtcaaactaaaatgatttattttttacaaattatctttatcattagcaaacmagtcttacttttattagtcaattataagtccacagagatataggagctcaatttgttacagggaacttgagcattccatggattatctgagctgaatttgaagaatgtactgtggagatcttctatgtgatatatataaaggacgtaggtcaactactggttattatttagaaaatactttagggaaaaaaattatcttctggggccaataattgagttctattaaactacagaggtagataattttgaaatgagaaatcaaaatatattttgattttatattactcatattttcattttattcataaagttttttggaaaaagacaacagaaattgtactttgttgagaagactcctagagccaaatagtcacagactcagaatacacagagacaagcaaagatggttccagcaagctctaaggacacagacatgtgaaagaggcgctgaagacacacgaggactgatgcatggtagatgtcatcctgatatggctgggct

SEQ ID NO: 143883 - DNA, 546 bp, Homo sapiens
tctcatggtcaaactaaaatgatttattttttacaaattatctttatcattagcaaacaagtcttacttttattagtcaattataagtccacagagmtataggagctcaatttgttacagggaacttgagcattccatggattatctgagctgaatttgaagaatgtactgtggagatcttctatgtgatatatataaaggacgtaggtcaactactggttattatttagaaaatactttagggaaaaaaattatcttctggggccaataattgagttctattaaactacagaggtagataattttgaaatgagaaatcaaaatatattttgattttatattactcatattttcattttattcataaagttttttggaaaaagacaacagaaattgtactttgttgagaagactcctagagccaaatagtcacagactcagaatacacagagacaagcaaagatggttccagcaagctctaaggacacagacatgtgaaagaggcgctgaagacacacgaggactgatgcatggtagatgtcatcc

SEQ ID NO: 143884 - DNA, 581 bp, Homo sapiens
aatgataatggatgtgtgcgtctcatggtcaaactaaaatgatttattttttacaaattatctttatcattagcaaacaagtcttacttttattagtcaattataagtccacagagatataggagctcaatttgttacagggaacttgagcattccatggattatctgagctgaatttgaagaatgtactgtggagatcttctatgtgayatatataaaggacgtaggtcaactactggttattatttagaaaatactttagggaaaaaaattatcttctggggccaataattgagttctattaaactacagaggtagataattttgaaatgagaaatcaaaatatattttgattttatattactcatattttcattttattcataaagttttttggaaaaagacaacagaaattgtactttgttgagaagactcctagagccaaatagtcacagactcagaatacacagagacaagcaaagatggttccagcaagctctaaggacacagacatgtgaaagaggcgctgaagacacacgaggactgatgcatggtagatgtcatcctgatatggctgggct

SEQ ID NO: 143885 - DNA, 546 bp, Homo sapiens
tctcatggtcaaactaaaatgatttattttttacaaattatctttatcattagcaaacaagtcttacttttattagtcaattataagtccacagagatataggagctcaatttgttacagggaacttgagcattccatggattatctgagctgaatttgaagaatgtactgtggagatcttctatgtgatatatataaaggaygtaggtcaactactggttattatttagaaaatactttagggaaaaaaattatcttctggggccaataattgagttctattaaactacagaggtagataattttgaaatgagaaatcaaaatatattttgattttatattactcatattttcattttattcataaagttttttggaaaaagacaacagaaattgtactttgttgagaagactcctagagccaaatagtcacagactcagaatacacagagacaagcaaagatggttccagcaagctctaaggacacagacatgtgaaagaggcgctgaagacacacgaggactgatgcatggtagatgtcatcc

SEQ ID NO: 143886 - DNA, 580 bp, Homo sapiens
atgataatggatgtgtgcgtctcatggtcaaactaaaatgatttattttttacaaattatctttatcattagcaaacaagtcttacttttattagtcaattataagtccacagagatataggagctcaatttgttacagggaacttgagcattccatggattatctgagctgaatttgaagaatgtactgtggagatcttctatgtgatatatataaaggacgtaggtcaactactggttattatttagaaaatactttagggaaaaaaattatcttctggggccaataattgagttctattaaactacagaggtagataattttgaaatgagaaatcaaaatatattttgattttatattactcatattttcattttattcataaagtyttttggaaaaagacaacagaaattgtactttgttgagaagactcctagagccaaatagtcacagactcagaatacacagagacaagcaaagatggttccagcaagctctaaggacacagacatgtgaaagaggcgctgaagacacacgaggactgatgcatggtagatgtcatcctgatatggctgggct

SEQ ID NO: 143887 - DNA, 546 bp, Homo sapiens
tctcatggtcaaactaaaatgatttattttttacaaattatctttatcattagcaaacaagtcttacttttattagtcaattataagtccacagagatataggagctcaatttgttacagggaacttgagcattccatggattatctgagctgaatttgaagaatgtactgtggagatcttctatgtgatatatataaaggacgtaggtcaactactggttattatttagaaaatactttagggaaaaaaattatcttctggggccaataattgagttctattaaactacagaggtagataattttgaaatgagaaatcaaaatatattttgattttatattactcatattttcattttattcataaagttttttggaaaaagacaacagaaattgtactttgttgagaagactcctagagccaaatagtcacagactcagaayacacagagacaagcaaagatggttccagcaagctctaaggacacagacatgtgaaagaggcgctgaagacacacgaggactgatgcatggtagatgtcatcc

SEQ ID NO: 143888 - DNA, 511 bp, Homo sapiens
gcaggctctgcaccttcccaggcctgcaggggctttgcaccttcttgcggaacagttgccagctgttatcgcttcactcttaggtcactgccttcagtcaagtctttttttttttttttttttttttaaacagaatttcgctcttgttgtccaggcttgagtgcagtggtgcagtctcggctcactgcaacyttcgcttcccgggttcaagcaattctcccgtctcagccacctgagtagctgggattacaggcacccgccaccaagcccagctcattctttttgtatttttagtagagatggggtttcatcatgttggccaggctggtcttgaactcctgaccttgggttatgcacccaccttggcctcctaaagtgtagggattacaggcgtgagccaccatgcccggccccaagtcaagtctttttcacagccttggttcaccataaaactaaggtggacaattgtcatggacagaattgtgttgcctcaaatttatgttgaagtcct

SEQ ID NO: 143889 - DNA, 619 bp, Homo sapiens
gattaaatgtataccttcttccactcaaatgttaacgtgtcccttcctcaatayattttattaggctatgtatatatctcaagcatagattaatttgttttgtaagatttcaaaacattccttttttagccctgtaatgaatataaaatggatccctactgcccatcttagagaatgcgtgtttcatagaactgtttaaaaaataaatccttttaaattgcccatctgcttaagctatgtttgtggaacattaggactaagtcatgtctgacaaacatgtgtcatactactatttgagggcattactgcattttaaggaataaaataatattattaagaagtataatttttccaagtgatacaataagaatattgctagagatttgacctatttgtgaaaaatctttgcatgattattagcttgctaaaaataaaatgaactctgcaaacgtgatccaagctgttctgtatgaaattatgtgctagttgcacagtcccctgggagaccagtgtgagtccagatgcctctttgctggtttgtttcatttctggggttcattttctagaggtttttatcatattttcaaagtacagaagtcaggcatctcaaattcaagtc

SEQ ID NO: 143890 - DNA, 492 bp, Homo sapiens
aacaataaagttgacatatttgagtaccttttcaaaaaaaggtaaccataaccttttttttttttttattaaaaggaccaggtgctaaaccttggaagaatattaaggcaagagtattaaggcattttaattcagcttaagtatcatgttaagtggtgaaattcagatgtaatagaatgcataaaagtgttaatcaccagtgcttaagatggcccacagaggttgttctaccaggcatatagaaatctttctcactatgcctgtttgygagcaggatcagtggttttgcactgcaggcacacatttcattttgtcaaatatttttgcaacctcccctctacttaatagtttaatcactacatctatacaaactacttggtcaatgagggcccattttacttgtgtcttccagaaatattttgcattaccccaaatgacatcttccagcagatcttcctcagatataaagtttccaaaaaactggcaaataaa

SEQ ID NO: 143891 - DNA, 571 bp, Homo sapiens
ggaattctgcccagcgcaaaccacccagtctccctagcactggtgggggaaaaccaccggctagacccgcagtaatggyggtcacccttccccccaggaacttggtcttcttaggcagactccaagtgctgtgctagccagtggggattccatgccagtgggtcttagcttgtggggttctgtgggagtgggtctgcttggctccctggcttcagccctcttctcatgggagttgatggatctcctgcttcactggattactgcgagccaccagagtacgcagaaactcctacagctcagtacctgcccaagtggctgccagctggagcccctgctatgggtctgcacagctttgtgcttgggacccaaggccctggtggtgtggactcacaaagggattacctgttctggggtttgcaaaaatctgtgggtaaagcacagttctccgggtgggtagcacaatcccccactgcctcccttggctggaggagggaggtctctttgccctgtgtagctcttgggtgaactgtcgcccaactctgcttttccttgctctccatgggtcacacca

SEQ ID NO: 143892 - DNA, 571 bp, Homo sapiens
ggaattctgcccagcgcaaaccacccagtctccctagcactggtgggggaaaaccaccggctagacccgcagtaatggtggtcacccttccccccaggaacttggtcttcttaggcagactccargtgctgtgctagccagtggggattccatgccagtgggtcttagcttgtggggttctgtgggagtgggtctgcttggctccctggcttcagccctcttctcatgggagttgatggatctcctgcttcactggattactgcgagccaccagagtacgcagaaactcctacagctcagtacctgcccaagtggctgccagctggagcccctgctatgggtctgcacagctttgtgcttgggacccaaggccctggtggtgtggactcacaaagggattacctgttctggggtttgcaaaaatctgtgggtaaagcacagttctccgggtgggtagcacaatcccccactgcctcccttggctggaggagggaggtctctttgccctgtgtagctcttgggtgaactgtcgcccaactctgcttttccttgctctccatgggtcacacca

SEQ ID NO: 143893 - DNA, 609 bp, Homo sapiens
gaattctgcccagcgcaaaccacccagtctccctagcactggtgggggaaaaccaccggctagacccgcagtaatggtggtcacccttccccccaggaacttggtcttcttaggcagactccaagtgctgtgctagccagtggggattccatgccagtgggtcttagcttgtggggttctgtgggagtgggtctgcttggctccctggcttcagccctcttctcatgggagttgatggatctcctgcttcactggattwctgcgagccaccagagtacgcagaaactcctacagctcagtacctgcccaagtggctgccagctggagcccctgctatgggtctgcacagctttgtgcttgggacccaaggccctggtggtgtggactcacaaagggattacctgttctggggtttgcaaaaatctgtgggtaaagcacagttctccgggtgggtagcacaatcccccactgcctcccttggctggaggagggaggtctctttgccctgtgtagctcttgggtgaactgtcgcccaactctgcttttccttgctctccatgggtcacaccaactgcctagtcagtcccaatgagggaatctggatacctc

SEQ ID NO: 143894 - DNA, 570 bp, Homo sapiens
gcacaatcccccactgcctcccttggctggaggagggaggtctctttgccctgtgtagctcttgggtgaactgtcgcccaactctgcttttccttgctctccatgggtcacaccaactgcctagtcagtcccaatgagggaatctggatacctcagttagaaatgcagaattcactcgctgtttatgtttgtctcagtgggggctgcagagtagagctgtttctactcaaccatcttggcccctccccccaattaaaataattaatattcaaaatttgtaattctaattatgaaacagttataagtagttaaaccttcaagtggtatttctgtaaatgtgtagcatttacagttctggacttggtaatgcttaaagtgcacgataacttatggkactgctacataggcatacctcagagatactgtgggtttggtttcaggccactgtggagatgagctctttagggcagtgcccaatggaagtgccattgagtcacattgagacggagtcagaatgcagtccagcagtgggggagcaatgaaggcttttggaggaggtggagggcaggc

SEQ ID NO: 143895 - DNA, 516 bp, Homo sapiens
aaacagtcaaaacatccttcagcagaaaaaacaaaagtggaagcatcacattaccttattccaaactaaattataaagctgtagtaatcaaaatagtatgctactagcataaaaacagacatgtaggccaagggaacagaatagagatcatagaaagaaataaatccatgactttacaatcaattgatctctagcattggtgccaagagtacacaatgataaaatttagtctctttattaaatggtgttgggaaaactggatatccacatgcagaagaatgaaactgaacccttatctcactgtacatacaaaaattgtctcaaaatggatgaaagacytcaacaaaggaccaatattgtaagactcttagatataaatatcggagaaaagctccttgatactggtattggtaataaattttcagatttgataccaaaagtatagacaacaaaagcaaaactagacaaatgggagtaaatcaaactaaaagcttcagcgcagcaaaggagacaacc

SEQ ID NO: 143896 - DNA, 516 bp, Homo sapiens
aaacagtcaaaacatccttcagcagaaaaaacaaaagtggaagcatcacattaccttattccaaactaaattataaagctgtagtaatcaaaatagtatgctactagcataaaaacagacatgtaggccaagggaacagaatagagatcatagaaagaaataaatccatgactttacaatcaattgatctctagcattggtgccaagagtacacaatgataaaatttagtctctttattaaatggtgttgggaaaactggatatccacatgcagaagaatgaaactgaacccttatctcactgtacatacaaaaattgtctcaaaatggatgaaagacctcaacawaggaccaatattgtaagactcttagatataaatatcggagaaaagctccttgatactggtattggtaataaattttcagatttgataccaaaagtatagacaacaaaagcaaaactagacaaatgggagtaaatcaaactaaaagcttcagcgcagcaaaggagacaacc

SEQ ID NO: 143897 - DNA, 516 bp, Homo sapiens
aaacagtcaaaacatccttcagcagaaaaaacaaaagtggaagcatcacattaccttattccaaactaaattataaagctgtagtaatcaaaatagtatgctactagcataaaaacagacatgtaggccaagggaacagaatagagatcatagaaagaaataaatccatgactttacaatcaattgatctctagcattggtgccaagagtacacaatgataaaatttagtctctttattaaatggtgttgggaaaactggatatccacatgcagaagaatgaaactgaacccttatctcactgtacatacaaaaattgtctcaaaatggatgaaagacctcaacaaaggaccaatattgtaagactcttagatataaatatcggagaaaagctccttgatactggtattggtaataaattttcagatttgataccaaaagtatagacaacaaaagcaaaamtagacaaatgggagtaaatcaaactaaaagcttcagcgcagcaaaggagacaacc

SEQ ID NO: 143898 - DNA, 401 bp, Homo sapiens
acttgttgcagcttctgtatcagcactttctgcttcatcttgtgcttttgtgttatggagatgactcttccttccttagccctcatgaaccaacctctgctagcttcaaatttttcttctgcatcttcctcacctctttcagccttcatggaattgaagagtgttggggcctttctctggattaggctttagcttargagaatgatgtggtttgatcttctgtccagaccactaaaactttctctatatgagcaataaggctgttttgatttcttatcattcatgtgtccactggagtagcacttttaaattcccttaagaacttttcctttggattcaaagtttggctaactgtctggtgcatgaggcctagctcttagtctatctcaattttcaacatg

SEQ ID NO: 143899 - DNA, 560 bp, Homo sapiens
cttgaattctggctagccccatcactgtgggctaaagggctctggagtcctaaataaatttgaaaggcagtctagaccacaaggactgcaattcctgggtaaataaggcctggtgctgtggaaggctgtgctagggccaatggacttgcggtgcacacaacccagtgagacaccagctggggycaccaagaagtgcttgtatcaccctttctccaactgcagagagggcagcttgtaacttgtggagagactccttctgcttgggaaaaggaaatggaaaagtaaaaaggattttgtcttgcaacttgggtaccagctcagccacagtaaaataaagcaccaagcagactcataaaatccatgattccaggcctaagctttcagatggcagttctagacccactctgggccagaagagaacccatttcccagaaaggaaagatccaggcctgacaagattcactacctgctgaccaaggagtccttgggccttgaataaacaacagcagtagccaggcaatagtcaccacaggccttaagcaagacccagtaccatgctg

SEQ ID NO: 143900 - DNA, 533 bp, Homo sapiens
aacatataaacaaaagagttgtttttcttggttccctagtagaaacctaaatctatattttaaatctacccaaaatccactccccgtgattctcttgatgatgttctcattttcttttgggaaactgtctgtcaaccatgatctattttggtatttcggatgcttgctgtgtggtagaagcttggctcatcagaaagttccagcgtccaaccacagttgaaatggcccacatccattggaacaaagaaaakgtcaagaatttgttagaattttgagaaaagagagggtttctttccactgggattgtggaatttagtaggaataccatggtttgggagaaaggtacttgagatagaaaaactccatagaagaaagagaagcccagagatgggaaaagagccccaagtcccagccaggcctaaaaccaaccaactgtgcacatttgtttcattttagcttaattcagttggagtttttattaaaaaaaaaacctgattaatatgggattttatacactgtcaaactgaaaggaa

SEQ ID NO: 143901 - DNA, 385 bp, Homo sapiens
gaattctaagagataagatacgcgtgagccgcagggatagaccagaccaacgggtttcaatctgttttaatattatggcaggtgagtcccggtcttacataaaaaccctggcataaaagcccatgtgttcaatacccaggtgacagctgccatcccagcacactgtgagaacactgtaaaacaaattccgggtgcaccaggrctggggttggcactgtacatgaggtgggctcctcccttccaaaggagtacggcccaataaacaaatcccagaaagttggtctaccctagtaggaaattatgctttctcaaactggacgtttttaattggtcaactatacttatttcttaggaccctgaaggaaccaaatgtccagggggcatg

SEQ ID NO: 143902 - DNA, 595 bp, Homo sapiens
ataatcttgttccattagaacaatcatcatgcaaggttaaccatgctgccacccttgattattagatgattaaaattaaggtgtttggaaattatgctttatgaaagatcattcagtgcagtctcaatgaacaaggtgggtctctctgctgtggcaaaaccagtacttctaaatgtcatccagcaggtactgcactagtctggcttctgatgaatcaaaggaataggaagaaattatatagcaaaacacaatgaatagccctgtttgcttgcagtaatttgggaaataaccaaatacaagcaaactaaatacaaaaatcataacttcttctactaacactattatagaactctttggggaatgtcattgtcatttaattaagtcaaagagctagatctrttttgtctgatgttgcccttagagattcacaccaaaagttggttgagatgacttcgtttcaagggccccagcttccaggtaaactgaggtaatgatccatgtgttttaggatcccagcacctagcagaatgtctcacaaatactgtacttagtaaacatttgttgcttgcaatttttgatgctcaggtgtcaagta

SEQ ID NO: 143903 - DNA, 568 bp, Homo sapiens
ttagtatcttccctcatagtctgagctccttgagccatgttattcaatcccttgtatgtctgtgcaaccattaatatttagaaaaatattttgtatctgttgtctcacccccaaaaatggagcttagaaaatattgtatgcattattttaacaagtaaatgttgattatctaatctgtgcaatgtattttgctagatgctggattgatttttcttcrgaaaatggaaaaatgtaagtgatagcgtccagtgaatgttagaagttgaaattttcccgaccattttattccattgagcaagcttgcattcattcattcattcattcacgtgtccatgtgcagtcaccatgtacaaaatcctctttttatgctggattccacagaaggacttaacatctctgtactttaatttccttatctgtaaaatgggaatgataataatgatagtatttcattaagttttttgccaggagtaagtgagttaatgtgtctgacacaatgggtctggcacacaaggcctatgcatatattgattactgtttcagcctcagaactttaagaagtattaca

SEQ ID NO: 143904 - DNA, 568 bp, Homo sapiens
ttagtatcttccctcatagtctgagctccttgagccatgttattcaatcccttgtatgtctgtgcaaccattaatatttagaaaaatattttgtatctgttgtctcacccccaaaaatggagcttagaaaatattgtatgcattattttaacaagtaaatgttgattatctaatctgtgcaatgtattttgctagatgctggattgatttttcttcagaaaatggaawaatgtaagtgatagcgtccagtgaatgttagaagttgaaattttcccgaccattttattccattgagcaagcttgcattcattcattcattcattcacgtgtccatgtgcagtcaccatgtacaaaatcctctttttatgctggattccacagaaggacttaacatctctgtactttaatttccttatctgtaaaatgggaatgataataatgatagtatttcattaagttttttgccaggagtaagtgagttaatgtgtctgacacaatgggtctggcacacaaggcctatgcatatattgattactgtttcagcctcagaactttaagaagtattaca

SEQ ID NO: 143905 - DNA, 568 bp, Homo sapiens
ttagtatcttccctcatagtctgagctccttgagccatgttattcaatcccttgtatgtctgtgcaaccattaatatttagaaaaatattttgtatctgttgtctcacccccaaaaatggagcttagaaaatattgtatgcattattttaacaagtaaatgttgattatctaatctgtgcaatgtattttgctagatgctggattgatttttcttcagaaaatggaaaaatgtaagtgrtagcgtccagtgaatgttagaagttgaaattttcccgaccattttattccattgagcaagcttgcattcattcattcattcattcacgtgtccatgtgcagtcaccatgtacaaaatcctctttttatgctggattccacagaaggacttaacatctctgtactttaatttccttatctgtaaaatgggaatgataataatgatagtatttcattaagttttttgccaggagtaagtgagttaatgtgtctgacacaatgggtctggcacacaaggcctatgcatatattgattactgtttcagcctcagaactttaagaagtattaca

SEQ ID NO: 143906 - DNA, 528 bp, Homo sapiens
tgtaaacaatgtgtggtgtgttcataaaacagaacagcacagtattcaccaataaaaacaaaacaaattatggataagaatgaactactgatacacaccataataaatcttcaaaaccttatgctgagtggcaggacccaatgtaaaaggtacctatgattccatttcaatgaagttctaaagcaaacaactatcaacggtgagagaaatcaggagtggtgcttttataggatggagaatgacaggtgaagagcacatgggtagatctctggctttattagggtgtggttacacaaatgaatacattgtcaaaactcaagttgtacacttaagatgcatttcattgtatataaatcttatctcataaaaagattataagactgtaaactaagcttccatttttttactttaatattttagacatcagttttgcattgctccctaattaaaagtacaaccaaccatttagcagcatgagaggagacaagcatctggatgtcytgaatcaagccaaatggtgaccggcgt

SEQ ID NO: 143907 - DNA, 469 bp, Homo sapiens
gctctggtatcaaatgaaactcatgtccttgaaatctgcactgccatcccccttgcaggtgcaggtgctagcagagagaaaatttacacacccattttgaggtccgtggagtgttaagaggggactccctgtgcttacccacccactggagcagtctccacagcatgggtctgccttgatcctacttgtgatatcagcaaaagtgaaatccatcttttcccttgacatagttaagactaattttccaaaagaaaaatggtaagggaaaacaaaacaattaaatartaagcacaagggacagagaatgagtttcaaatatttaaaaaaatctcagcaaaagaaccaaagcatttagctgagccccatatttcctcttcttcagataagcacactggctacattcaggaaaccaggctccttgccttcctccacctgctgacactcaagactgtctcactgtcctggagag

SEQ ID NO: 143908 - DNA, 485 bp, Homo sapiens
gctaggattctaacatgctctggtatcaaatgaaactcatgtccttgaaatctgcactgccatcccccttgcaggtgcaggtgctagcagagagaaaatttacacacccattttgaggtccgtggagtgttaagaggggactccctgtgcttacccacccactggagcagtctccacagcatgggtctgccttgatcctacttgtgatatcagcaaaagtgaaatccatcttttcccttgacatagttaagactaattttccaaaagaaaaatggtaagggaaaacaaaacaattaaatagtaagcacaagggacagagaatgagtttcaaatatttwaaaaaatctcagcaaaagaaccaaagcatttagctgagccccatatttcctcttcttcagataagcacactggctacattcaggaaaccaggctccttgccttcctccacctgctgacactcaagactgtctcactgtcctggagag

SEQ ID NO: 143909 - DNA, 400 bp, Homo sapiens
gaattcacatttgactatttaagtttgactttccaaaagccctaataaagccttccagtattattatttctccagccagttttctctaatagttctagaatatgaagtccactagaacacaggtctcacaaaggcagacatttttgtgtgtcttttgttcacatgtgcagaatagtgcctgccacatattaggtacttgatggataattgctgaaggaaaagggtctaaaaatgagagagagaggggaggattctttaacaggctgtttattccattctcatttatccctgcccccttgcacttycctttacccagggaatagagtttttaaaggtgccagagagggcacaagacgatttcttcttgtttgtggcttgaaggatggatctccctctgcag

SEQ ID NO: 143910 - DNA, 611 bp, Homo sapiens
gttcactgaaacattattcacaatactcaagataaggaatcaactcaagagtccatcaacagattaatggataaagaaattatggtaaatatactcaatagaatactatttggccatcaaaatgaataaaattctgtcattcgtggcaacatgagtgagcctggaggacattataataggtgagatagktcaggcacagaaggataaagaatgcatgttcacactcacatgtgggagctacaaaagttgagctcataaaaatagagagtagaattgtggatactagattctgggaagagtggatggtaagggaataaagagaggctggttaacaaacacggaattacagctagataggataatttctagcgttttatagtactttagggagactatagttaacaataatttattgtgtattttcaagcaagttaggagaggatttcccaaaacaaagaattgtattgggatatgctaattaccttgattcagtcattacactttctaacaatgtactttctaacaatgccttgatctattccagcaaacaaagttcttaaactatacgcacacacataaaaatcaagacaacatatgtgagatccagctca

SEQ ID NO: 143911 - DNA, 611 bp, Homo sapiens
gttcactgaaacattattcacaatactcaagataaggaatcaactcaagagtccatcaacagattaatggataaagaaattatggtaaatatactcaatagaatactatttggccatcaaaatgaataaaattctgtcattcgtggcaacatgagtgagcctggaggacattataataggtgagataggtcaggcacagaaggataaagaatgcatgttcacactcacatgtgggagctacaaaagttgagctcataaaaatagagagtagaattgtggatactagattctgggaagagtggatrgtaagggaataaagagaggctggttaacaaacacggaattacagctagataggataatttctagcgttttatagtactttagggagactatagttaacaataatttattgtgtattttcaagcaagttaggagaggatttcccaaaacaaagaattgtattgggatatgctaattaccttgattcagtcattacactttctaacaatgtactttctaacaatgccttgatctattccagcaaacaaagttcttaaactatacgcacacacataaaaatcaagacaacatatgtgagatccagctca

SEQ ID NO: 143912 - DNA, 611 bp, Homo sapiens
gttcactgaaacattattcacaatactcaagataaggaatcaactcaagagtccatcaacagattaatggataaagaaattatggtaaatatactcaatagaatactatttggccatcaaaatgaataaaattctgtcattcgtggcaacatgagtgagcctggaggacattataataggtgagataggtcaggcacagaaggataaagaatgcatgttcacactcacatgtgggagctacaaaagttgagctcataaaaatagagagtagaattgtggatactagattctgggaagagtggatgstaagggaataaagagaggctggttaacaaacacggaattacagctagataggataatttctagcgttttatagtactttagggagactatagttaacaataatttattgtgtattttcaagcaagttaggagaggatttcccaaaacaaagaattgtattgggatatgctaattaccttgattcagtcattacactttctaacaatgtactttctaacaatgccttgatctattccagcaaacaaagttcttaaactatacgcacacacataaaaatcaagacaacatatgtgagatccagctca

SEQ ID NO: 143913 - DNA, 569 bp, Homo sapiens
catcaatgtcaagaaagaaaaagacagactgaggaactgtattaaatttacaatggctagaggaacatgacagctgaatgcaatacatgatccagtattattgggacaactggtagttcctaataaatgtatagatggtaatactgaattcctgttcacttcctgattttgatatttgtattttacttatgtaagaacatatacttatttttagaaaatatacattgaagcatttagctgcaaaggatatgaagatatgttagaattacatatagtcagtcttccatatckgcaggttccttatttacagattcaaccaatcacagatagaaaatatttgggaaaaaatacaataaaaataatacaaataatacagtataactatttacacagcatttacattgtattaggtagtataagaaacctagagatgatttaaattatatggaagaagatgtgtaggttatattcaaatattatgccatctcatataagggggacttgagcatgtgcaaattttggtgtctgtgagggatcctggaatcaatcccccatggatacagagggac

SEQ ID NO: 143914 - DNA, 627 bp, Homo sapiens
gctacatttatttttaaactgttgatctaactactcagagatgacctgttagtgagtgtggttatcactgaatgtcccgggctgattttagacttctgaaggaaaaggttgacttcagacctttggtcaaaggattcccatgattccttttaggtttgctctcaggggtttaagactacacagagctgcaaactttaagaagtcccattaaaccaaaaccttgtcatatcattccttaattctaggactccttaactctacacctctcagaactgcttcttgctgaaacaactgtacagccaacttccagtcaaactcagaaactaatttaaaaagtcagtaattcatctgcggagtgaagagcaaaaatgatgatggctcaccctgtcaaatgcccttagcctctcatgagaaatgtcataggaacctatctgactgagcccattcctttctgcagacttcaccttttactgcatccctctttgttatctacrttccatttccatttttccaacatgccatctttcttcttaggtggtttccacacatctgtggtctaactactgtatgtgcctttaaccaatgcgtgctcctacttgtcctttataatttgcttaaaggcagttt

SEQ ID NO: 143915 - DNA, 386 bp, Homo sapiens
atgttaaaaaaaaaaaaaaaaaamaactacccaagaccgagaaaagaactacctgaaaatattagagggagcaatcactaacacttacacagggccaggagtacacagaggagggagctgcacacagggcagagtatgcagaggagggagctgcacacagggtgaagtacacaagaggagggagacacacacagggctgagtacacagaggagacagctgcacacagggcagagtatatgagaggagagagctgcacacagggcagagtacacagaggagggagccgcatacagggcagaggacacagaggagggagccgcatacagggcagaggacacagaggagggagctgcacacagggcggagtacacagaggagagagctg

SEQ ID NO: 143916 - DNA, 598 bp, Homo sapiens
agatctgtccatgttctgtctcaatttaatagctacctggcatgtaactgatgcctctgagcctacctctggagtgaataaataaacgtggtccaggtgatttgatttctgccatttgtagtggagaagtaaatctcagtgaagaagattttttttcatatttcttcttttttctttttcttttggcttctatcctcctgcttccatgggactgacaatccagcttctcaaactccaygaaagtcttaatacaaggtgaatcccagagccacaaacagtttggacttcaaacagtgagaaaattggaccgaatgattcggcacacaaagcagaaaactttcatttcctgtaggcaggatggaattgactgttatattaagacttctgaagaagccctgccctggagtaatttcagtgctgtcagacgatgttgacatctagattaacctctgtgcagtgaattttactgcaaagctcattgagatgcatgtgatgtgtctccacaaatcccatctggaacccgtggtggcccaccctcagcaaccctcctctccccactgactctgctttctctgtccataaacttttagcctccagg

SEQ ID NO: 143917 - DNA, 598 bp, Homo sapiens
agatctgtccatgttctgtctcaatttaatagctacctggcatgtaactgatgcctctgagcctacctctggagtgaataaataaacgtggtccaggtgatttgatttctgccatttgtagtggagaagtaaatctcagtgaagaagattttttttcatatttcttcttttttctttttcttttggcttctatcctcctgcttccatgggactgacaatccagcttctcaaactccacgaaagtcttaatacarggtgaatcccagagccacaaacagtttggacttcaaacagtgagaaaattggaccgaatgattcggcacacaaagcagaaaactttcatttcctgtaggcaggatggaattgactgttatattaagacttctgaagaagccctgccctggagtaatttcagtgctgtcagacgatgttgacatctagattaacctctgtgcagtgaattttactgcaaagctcattgagatgcatgtgatgtgtctccacaaatcccatctggaacccgtggtggcccaccctcagcaaccctcctctccccactgactctgctttctctgtccataaacttttagcctccagg

SEQ ID NO: 143918 - DNA, 572 bp, Homo sapiens
ggcatgtaactgatgcctctgagcctacctctggagtgaataaataaacgtggtccaggtgatttgatttctgccatttgtagtggagaagtaaatctcagtgaagaagattttttttcatatttcttcttttttctttttcttttggcttctatcctcctgcttccatgggactgacaatccagcttctcaaactccacgaaagtcttaatacaaggtgaatcccagagccacaaacagtttggacttcaaacagtgagaaaattggaccgaatgattcrgcacacaaagcagaaaactttcatttcctgtaggcaggatggaattgactgttatattaagacttctgaagaagccctgccctggagtaatttcagtgctgtcagacgatgttgacatctagattaacctctgtgcagtgaattttactgcaaagctcattgagatgcatgtgatgtgtctccacaaatcccatctggaacccgtggtggcccaccctcagcaaccctcctctccccactgactctgctttctctgtccataaacttttagcctccaggagcagaggagcc

SEQ ID NO: 143919 - DNA, 572 bp, Homo sapiens
ggcatgtaactgatgcctctgagcctacctctggagtgaataaataaacgtggtccaggtgatttgatttctgccatttgtagtggagaagtaaatctcagtgaagaagattttttttcatatttcttcttttttctttttcttttggcttctatcctcctgcttccatgggactgacaatccagcttctcaaactccacgaaagtcttaatacaaggtgaatcccagagccacaaacagtttggacttcaaacagtgagaaaattggaccgaatgattcggcacacaaagcagaaaactttcatttcctgtaggcaggatggaattgactgttatattaagacttctgaagaagccctgccctggagtaatttcagtgctgtcagacratgttgacatctagattaacctctgtgcagtgaattttactgcaaagctcattgagatgcatgtgatgtgtctccacaaatcccatctggaacccgtggtggcccaccctcagcaaccctcctctccccactgactctgctttctctgtccataaacttttagcctccaggagcagaggagcc

SEQ ID NO: 143920 - DNA, 509 bp, Homo sapiens
aatttgccagtcctgggtggggcaaatcctcgagcttgatgtgtrgggaagggagggggcctgaataatccctgaggagtagtagaatagcagatggaacactgagaagttatttccttgaggatagatttccaggatggaaaggaaatgagaggttctaagaggtgggctagtggcttgtactatagcataacctgcctttgctggtgtgtgtcgattaggcctggtggaaccgccatcaataaatcaagcgtgatcagggtgaggaacaggaaagaaggaaatatggggaaatggggtgaatatcaggtggatcagagagatacagtcatgggggtcaggtgtggtatcaggaataatgtgggaggccagattgaagtcccggccaggaacaatggtaattgtgggacttaaagagtgagtacagctgaaggagcaggggagcagaaagtatatgcgtcaggtatgaggaataaaatagattttggaagttatgagaactgtagaga

SEQ ID NO: 143921 - DNA, 509 bp, Homo sapiens
aatttgccagtcctgggtggggcaaatcctcgagcttgatgtgtagggaagggagggggcctgaataatccctgaggagtagtagaatagcagatggaacactgagaagttatttccttgaggatagatttccaggatggaaaggaaatgagaggttctaagaggygggctagtggcttgtactatagcataacctgcctttgctggtgtgtgtcgattaggcctggtggaaccgccatcaataaatcaagcgtgatcagggtgaggaacaggaaagaaggaaatatggggaaatggggtgaatatcaggtggatcagagagatacagtcatgggggtcaggtgtggtatcaggaataatgtgggaggccagattgaagtcccggccaggaacaatggtaattgtgggacttaaagagtgagtacagctgaaggagcaggggagcagaaagtatatgcgtcaggtatgaggaataaaatagattttggaagttatgagaactgtagaga

SEQ ID NO: 143922 - DNA, 509 bp, Homo sapiens
aatttgccagtcctgggtggggcaaatcctcgagcttgatgtgtagggaagggagggggcctgaataatccctgaggagtagtagaatagcagatggaacactgagaagttatttccttgaggatagatttccaggatggaaaggaaatgagaggttctaagaggtgggctagtggcttgtactatagcataacctgcctttgctggtgtgtgkcgattaggcctggtggaaccgccatcaataaatcaagcgtgatcagggtgaggaacaggaaagaaggaaatatggggaaatggggtgaatatcaggtggatcagagagatacagtcatgggggtcaggtgtggtatcaggaataatgtgggaggccagattgaagtcccggccaggaacaatggtaattgtgggacttaaagagtgagtacagctgaaggagcaggggagcagaaagtatatgcgtcaggtatgaggaataaaatagattttggaagttatgagaactgtagaga

SEQ ID NO: 143923 - DNA, 509 bp, Homo sapiens
aatttgccagtcctgggtggggcaaatcctcgagcttgatgtgtagggaagggagggggcctgaataatccctgaggagtagtagaatagcagatggaacactgagaagttatttccttgaggatagatttccaggatggaaaggaaatgagaggttctaagaggtgggctagtggcttgtactatagcataacctgcctttgctggtgtgtgtcgattaggcctggtggaaccgccatcaataaatcaagcgtgatcagggtgaggaacaggaaagaaggaaatatggggaaatggggtgaatatcaggtggatcagagagatacagtcatgggggtcaggtgtggtatcaggaataatgtgggaggccagattgaagtcccggccaggaacaatggtaattgtgggacttaaagagtgagtacagctgaaggagcmggggagcagaaagtatatgcgtcaggtatgaggaataaaatagattttggaagttatgagaactgtagaga

SEQ ID NO: 143924 - DNA, 549 bp, Homo sapiens
tgggggccacggaggctgaggcagccccaggagagcttaagttcccacagtgggccgggctaatgaggtcctttggcacaggacctacaactctggccagttccctcttggggatcaggagcagattttttgagtcttgtgaaaggaatcaatyttctgcaggaaggtcaaggtgaatgagtacacatggataggcagccagttgtcagaacccagagctctccaagcaggaactgtgctgccagcaggggtgttggccacaccccaaggccctctggctgcttcctgtgtggacatcatttcaactgcccaagaaggcatcaacagagcttccttgtttttgtttgaaagaaggccacagacagtgagtttgatactttcctggcagacagaacaggcccagaataccttatctacaattctgaaatccaaagagctcagaaaatggaaacttttcttataacttaattggcagaaaaacctgacctgagctgaatgcatttggctgcaaaacttgaccttatctgatgtgaggttatctgtttagtg

SEQ ID NO: 143925 - DNA, 508 bp, Homo sapiens
aagacacatcctgaccctccatttcactgtttttttgtgttttttttttgttttktatttgtttgtttgttttcatagttgccccttacaaactgcaagtggctttgagcctgtgggaccagccagtctccagttcgtagtcctgagcccatggattctaatggcttctcttccatactctatggctaccactgtggcacaggatctcactgcctctttcctgggccagtgcaatggcctgcctttatggtcttagtttccagcaatctatcccacatgccactgccttatgaattgtccttacacatgacctgattcacacctcaacagatgacaaatcctctgtgactgtccattgactacctaagccaaaatagttggcctttcaaaagctgccatggtggtctttcctttaccaacatttctttccatgcatcttccatagatccttagtttcggccagttgaatcacacaccgttctagatcattcttctggtttccttacct

SEQ ID NO: 143926 - DNA, 508 bp, Homo sapiens
aagacacatcctgaccctccatttcactgtttttttgtgttttttttttgttttgtatttgtttgtttgttttcatagttgccccttacaaactgcaagtggctttgagcctgtgggaccagccagtctccagttcstagtcctgagcccatggattctaatggcttctcttccatactctatggctaccactgtggcacaggatctcactgcctctttcctgggccagtgcaatggcctgcctttatggtcttagtttccagcaatctatcccacatgccactgccttatgaattgtccttacacatgacctgattcacacctcaacagatgacaaatcctctgtgactgtccattgactacctaagccaaaatagttggcctttcaaaagctgccatggtggtctttcctttaccaacatttctttccatgcatcttccatagatccttagtttcggccagttgaatcacacaccgttctagatcattcttctggtttccttacct

SEQ ID NO: 143927 - DNA, 508 bp, Homo sapiens
aagacacatcctgaccctccatttcactgtttttttgtgttttttttttgttttgtatttgtttgtttgttttcatagttgccccttacaaactgcaagtggctttgagcctgtgggaccagccagtctccagttcgtagtcctgagcccatggattctaatggcttctcttccatactctatggctaccactgtggcacaggatctcactgcctctttcctgggccagtgcratggcctgcctttatggtcttagtttccagcaatctatcccacatgccactgccttatgaattgtccttacacatgacctgattcacacctcaacagatgacaaatcctctgtgactgtccattgactacctaagccaaaatagttggcctttcaaaagctgccatggtggtctttcctttaccaacatttctttccatgcatcttccatagatccttagtttcggccagttgaatcacacaccgttctagatcattcttctggtttccttacct

SEQ ID NO: 143928 - DNA, 607 bp, Homo sapiens
cacagttctaaaagattcttgtaagaatctggagttataatttgctcacaaaatagggtttctcagcacctctgggactggttttgcaggagggggtcttatagcccacctatctctgttgcagaaaattgaaccatggaatcctggaggctcctaagggtgcatcgagggcatagggtatcaaaggagagactgtgggcaatgggggatccatcccctcacccctgctttgaccacggtagttccactgcccttaagtaagaytggtttggtatcgcagagtgaatcctgagacagtaaaatgtgcattagtggaaaagctggtaaaatccaaacaaagtctgtagtttagttaataatttgtgtcactgttaatttcttattttttgccaaggtaccctggttccatacgatgccaacaggaggaaaaactgagtgaaggatatatgggaattctctacactatttttgcaacttttctgtacatctaaaattactctcaaataaaattttattataaaaatttgggaaaaccacttcctcgggaatggaatacaacgctcctccattgttctcctctatataaataggacgatggttaaagaat

SEQ ID NO: 143929 - DNA, 621 bp, Homo sapiens
gggatgttggctccattttacagttgaagacacagaaagggcaagtaacttgccgaaggtcatacagtcaggaattataggagcagagatcaaaccaaggcagtgtgggtccaagagcttacaacttttcatctgctatggggacaccaagacatccataaaatcaaatattcttccagtaaggttggcttgttctaaatgattcccacttcmtaaggattactgttactgtctttctaggagtttctgggaaccatgacccagaatctccagcttagaatccagtgccttactacttgctgccagacctgtttatgacccacacctgtgtgtcataaacacacaggattttagcatacttaccccatcatgtcctagacactctgttctgtctcctaccagaacctgaagtgggtcatccttgactcagactatcactcgtttgcctcttctgaacattctcccaggataatgcactgcttgattagataagacttgctcctgctgcctgcagctgcattccacatcatctccaaaggctcacctcccctaagtgagcatctggttatctgtctaggtttctcttggtctggaatgacctatttcctaattctaaattcc

SEQ ID NO: 143930 - DNA, 561 bp, Homo sapiens
atggtaaaaactagccacatgtgactaacaagtagttgaaatatggctactgcaaccaaggaactagtgcgactgaatttttaaaccttattgaactttaattaatgtaaatctaaatttaagtggccataggtggacactgtactgtacagttctagaattagcctgaagaaaatcggtcccctttttgtttcaaccatctctgccacctgatgaattgtaaccttggaccttcttactcatcatcaaaaagtctctagcaggaaggtttccaggaggggtgtaagatactagcctcactttgcaagtgagaaacttaaggcacaaagggagaamgctatttgcaacatcagagaagggtggccctagaatcttggagttgtaagccacaggctgtggggcttccagactccttctggacctattccagaccctgtccattttggaatgaggaagaatagtataggatacttatcatagtatcctcaacttgttttccctacaaaccggggacaaaggcctgaatctggctgctaaggagatcatgtataagaatgaatg

SEQ ID NO: 143931 - DNA, 454 bp, Homo sapiens
cctgctgagcccagctctgtggggctgtggctgctaagatgttgtctccatcctctggggcaggagcaacatatgttccctctgtcacagcacctgtgagggtggcagagggatggcaacccccaagagggcagagttccatctctccaactgactttgaagcatctttttatcctgcttttctgggaggcttaaagtgaaggcggagggagatatcacacagtcccaaagcccccactaaatggggagytactgtctttcatctttcatgcagggtaaaagaagacaccttggctacagcaagaggaaagaaggtcaaaccacaggcagaactttcaggttgaatgttagagcagactgtgatcccaagagatcatccaagacccttggtctcagaggatgcctatgaggccctggtccctggctggggtgggaacaataatctcaacagccc

SEQ ID NO: 143932 - DNA, 454 bp, Homo sapiens
cctgctgagcccagctctgtggggctgtggctgctaagatgttgtctccatcctctggggcaggagcaacatatgttccctctgtcacagcacctgtgagggtggcagagggatggcaacccccaagagggcagagttccatctctccaactgactttgaagcatctttttatcctgcttttctgggaggcttaaagtgaaggcggagggagatatcacacagtcccaaagcccccactaaatggggagctactgtctttcatctttcatgcagggtaaaagaagacaccttggctacagcaagaggaaagaaggtcaaaccacaggcagaactttcaggttgaatgttagagcagactgtgatcccaagasatcatccaagacccttggtctcagaggatgcctatgaggccctggtccctggctggggtgggaacaataatctcaacagccc

SEQ ID NO: 143933 - DNA, 506 bp, Homo sapiens
ccctgcttctgcatgcttttagctcacacagtgctgttcagagctgcctctggtgaagctatctgaactacaggccaaaaagtgatggattttcctaagaggagagggcatcaatctccttttactgcctggctggctggcccagcagagtctgggtcacaaggctcagacatggagacactggaaggggaggcagggagggggatgaataccccaggccgtgggaagacctcccaatctccaacaaaaaaggggctgctggagaaagcaggaggctgctatgtaatgggaagggttctttggraaattaaaagagttcctgggaccttctggcctggcttttccctaattcctttttgtgagacagccaccaactgggttccaccagaggaagccacctgtagatcttcttgttcccacaggacaaccggttcatctgacacaagaacagaaacaagatttctgtgttttagtggctgctccaagaattctttctctgtagtggg

SEQ ID NO: 143934 - DNA, 518 bp, Homo sapiens
ccacaggacaaccggttcatctgacacaagaacagaaacaagatttctgtgttttagtggctgctccaagaattctttctctgtagtggggaccaagataactattccatatgtgtgggattcacttctgggaggtcttccagcctgcagcaagcgtgacctagagcagaatctctaatccattgaggtaactggtcacctctggacagaaaatctcagagccctgagaggtcagtgggcaggcaggggttatccctcatcctacctctgttccccttggctgccctgtggggcrggaggggaggtatacacagagccgctggatacactgacatcgctggacacagaggtgaccactgtcagcttcacctccctgttctgggagaatgagggcagggaggtggcaggcataaactgctcagccctgcgaccagggaggaagagggaacaaaaaatctgccccaaatggcactgctgaaagagtgaagactgggaaaaaaaaaaaaaaaaaaaaaaaa

SEQ ID NO: 143935 - DNA, 481 bp, Homo sapiens
aagatttctgtgttttagtggctgctccaagaattctttctctgtagtggggaccaagataactattccatatgtgtgggattcacttctgggaggtcttccagcctgcagcaagcgtgacctagagcagaatctctaatccattgaggtaactggtcacctctggacagaaaatctcagagccctgagaggtcagtgggcaggcaggggttatccctcatcctacctctgttccccttggctgccctgtggggcaggaggggaggtatacacagagccgctggatacactgacatcgctggacacaraggtgaccactgtcagcttcacctccctgttctgggagaatgagggcagggaggtggcaggcataaactgctcagccctgcgaccagggaggaagagggaacaaaaaatctgccccaaatggcactgctgaaagagtgaagactgggaaaaaaaaaaaaaaaaaaaaaaaaaa

SEQ ID NO: 143936 - DNA, 481 bp, Homo sapiens
aagatttctgtgttttagtggctgctccaagaattctttctctgtagtggggaccaagataactattccatatgtgtgggattcacttctgggaggtcttccagcctgcagcaagcgtgacctagagcagaatctctaatccattgaggtaactggtcacctctggacagaaaatctcagagccctgagaggtcagtgggcaggcaggggttatccctcatcctacctctgttccccttggctgccctgtggggcaggaggggaggtatacacagagccgctggatacactgacatcgctggacacagaggtgaccactgtcagcttcacctccctgttytgggagaatgagggcagggaggtggcaggcataaactgctcagccctgcgaccagggaggaagagggaacaaaaaatctgccccaaatggcactgctgaaagagtgaagactgggaaaaaaaaaaaaaaaaaaaaaaaaaa

SEQ ID NO: 143937 - DNA, 553 bp, Homo sapiens
ggtgtgggtggtttatttggaaagtgattccaagaagcaagagtcagaagtgggaagagtgagccaggcaagaaagaaaagccaaaataatggcatgctattgaggctcctgscatgcagttttttctgcaggaccttccgagaggctccggaaagttatccagaaatgcccacctgaaacatgagcctggagcatttgtccacctgtccccacatgggttgaggtcttcccctgaaggctgttaacctgcaagtgtttctgggctgtatttgtgctcaggcaaaatcgtacaataatggagattccctagggcagaaagtgtatcttgagtttgctggcagcacaagagaagccctgtgcttccatggaacttctcacggtgtttgagactgaatgaaaggtgagttgagaaaacatgacgcaggcgccattgcactaagcaatcatagccatcgatctgggcaagaggacccctgccctgaatcctgcacttgagaaggtgcctctctggccctccactgactgtaccctggcccactcagagcttcaccc

SEQ ID NO: 143938 - DNA, 553 bp, Homo sapiens
ggtgtgggtggtttatttggaaagtgattccaagaagcaagagtcagaagtgggaagagtgagccaggcaagaaagaaaagccaaaataatggcatgctattgaggctcctgccatgcagttttttctgcaggaccttccgagaggctccggaaagttatccagaaatgyccacctgaaacatgagcctggagcatttgtccacctgtccccacatgggttgaggtcttcccctgaaggctgttaacctgcaagtgtttctgggctgtatttgtgctcaggcaaaatcgtacaataatggagattccctagggcagaaagtgtatcttgagtttgctggcagcacaagagaagccctgtgcttccatggaacttctcacggtgtttgagactgaatgaaaggtgagttgagaaaacatgacgcaggcgccattgcactaagcaatcatagccatcgatctgggcaagaggacccctgccctgaatcctgcacttgagaaggtgcctctctggccctccactgactgtaccctggcccactcagagcttcaccc

SEQ ID NO: 143939 - DNA, 511 bp, Homo sapiens
gggcaggtacactgtgtactatttactagcttgtctgagttcagttaaacagaacacactcatatgcaacaaattacataargcagatgtatcatttacagacaaacagcaagagacaacaggtacctatgtgagccgatccattacgagccagtagcccaaggctcaacaaagttgcctgaagtggatggaatgcatgtgaagtgcctgaagtggatggagtgattgtgcatggcccacttgtaccacagttgagggaccccacaagccagcttgccctaggttacacacctcaggaccaatgggaaactatggcctaaagttttgaagaaccattctctgtcaagggagagagtaacaagggccaaggctgtttcaggcagttcttccctgtctcaggatattgcattctcagcatatactacagttgctcttgacaactgcaagcaagaaagaggggataattgggtcagtcccaaggacacttggaaagttgacctgcagtctcctg

SEQ ID NO: 143940 - DNA, 511 bp, Homo sapiens
gggcaggtacactgtgtactatttactagcttgtctgagttcagttaaacagaacacactcatatgcaacaaattacataaagcagatgtatcatttacagacaaacagcaagagacaacaggtacctatgtgagccgatccattacgagccagtagcccaaggctcaacaaagttgcctgaagtggatggartgcatgtgaagtgcctgaagtggatggagtgattgtgcatggcccacttgtaccacagttgagggaccccacaagccagcttgccctaggttacacacctcaggaccaatgggaaactatggcctaaagttttgaagaaccattctctgtcaagggagagagtaacaagggccaaggctgtttcaggcagttcttccctgtctcaggatattgcattctcagcatatactacagttgctcttgacaactgcaagcaagaaagaggggataattgggtcagtcccaaggacacttggaaagttgacctgcagtctcctg

SEQ ID NO: 143941 - DNA, 511 bp, Homo sapiens
gggcaggtacactgtgtactatttactagcttgtctgagttcagttaaacagaacacactcatatgcaacaaattacataaagcagatgtatcatttacagacaaacagcaagagacaacaggtacctatgtgagccgatccattacgagccagtagcccaaggctcaacaaagttgcctgaagtggatggaatgcatgtgaagtgcctgaagtggatgsagtgattgtgcatggcccacttgtaccacagttgagggaccccacaagccagcttgccctaggttacacacctcaggaccaatgggaaactatggcctaaagttttgaagaaccattctctgtcaagggagagagtaacaagggccaaggctgtttcaggcagttcttccctgtctcaggatattgcattctcagcatatactacagttgctcttgacaactgcaagcaagaaagaggggataattgggtcagtcccaaggacacttggaaagttgacctgcagtctcctg

SEQ ID NO: 143942 - DNA, 627 bp, Homo sapiens
aggattcttcaggtggccccactgtctacaaccaatgggtcagcttctggatctcctctacctatgtttctacaatacctaagatgtttatcccaatacagtaagaggtgctggcaattgtatacacttctcccagttgagctaaaagaaagtctggagggccgagtgcggtgactcatgcctgtaatcccagcactttgggaggccaagataggtggatyacctgaggtcaggagttcaagaccagccagacaaacatgcagaaaccctgtctctacaaaaaaaaaaaatacaaaattagccagcagtggtggtgcacgcctataatcccagctactctggagtctgaggcaagagaatcacttagacccgggaggcagaggttgcagtgagctgagatcataccactgcactccagcatgggcaacgagagcgaaactccatctcaaacaaaaagagtctggaacaattctgttgtttaaaataactttctaggtggatctgggagatgtttccttggcttttaagacagtggcaatggaggaggcaatatttgccatggtttgggacaagattattttcatttttttatgagcaataactcctatgaatggtaccaaagatctc

SEQ ID NO: 143943 - DNA, 627 bp, Homo sapiens
aggattcttcaggtggccccactgtctacaaccaatgggtcagcttctggatctcctctacctatgtttctacaatacctaagatgtttatcccaatacagtaagaggtgctggcaattgtatacacttctcccagttgagctaaaagaaagtctggagggccgagtgcggtgactcatgcctgtaatcccagcactttgggaggccaagataggtggattacctgaggtcaggagttcragaccagccagacaaacatgcagaaaccctgtctctacaaaaaaaaaaaatacaaaattagccagcagtggtggtgcacgcctataatcccagctactctggagtctgaggcaagagaatcacttagacccgggaggcagaggttgcagtgagctgagatcataccactgcactccagcatgggcaacgagagcgaaactccatctcaaacaaaaagagtctggaacaattctgttgtttaaaataactttctaggtggatctgggagatgtttccttggcttttaagacagtggcaatggaggaggcaatatttgccatggtttgggacaagattattttcatttttttatgagcaataactcctatgaatggtaccaaagatctc

SEQ ID NO: 143944 - DNA, 627 bp, Homo sapiens
aggattcttcaggtggccccactgtctacaaccaatgggtcagcttctggatctcctctacctatgtttctacaatacctaagatgtttatcccaatacagtaagaggtgctggcaattgtatacacttctcccagttgagctaaaagaaagtctggagggccgagtgcggtgactcatgcctgtaatcccagcactttgggaggccaagataggtggattacctgaggtcaggagttcaagaccagccagacaaacatgcagaaaccctgtctctacaaaaaaaaaaaatacaaaattagccagcagtggtggtgcacrcctataatcccagctactctggagtctgaggcaagagaatcacttagacccgggaggcagaggttgcagtgagctgagatcataccactgcactccagcatgggcaacgagagcgaaactccatctcaaacaaaaagagtctggaacaattctgttgtttaaaataactttctaggtggatctgggagatgtttccttggcttttaagacagtggcaatggaggaggcaatatttgccatggtttgggacaagattattttcatttttttatgagcaataactcctatgaatggtaccaaagatctc

SEQ ID NO: 143945 - DNA, 587 bp, Homo sapiens
aaatgctccaatgaagcacttttgttggcatcccccgttggactgttgttgccagtggactgagaatgctgtggccctgtcagtgcagcaggtacttcatcttgagggggcatataacaaagctgtgggccaggtcccaatccccccaatgttagagcacacatcccaggagagctgagctgagccttggccacctgaaatcatccagaratgaagccagtcaattaaatgcaacttatagcatagtaaacccttaacggcatcaaagtatacaagtaaaaagccccatccaaaacaaacaagcaaactaacttcaacgattaaaggaacattagctcacagagatgagaaagaaccagaaccagcataactacactggcaattcaataacccagagtgtctatttttagatgaccacactaactccccagcaacagctgttaaccagactgaaaaggctgaaataatagacagaattcacaagcttgatggcaatgaaggttactgagattcaggagacagttaaaagcccatccaaagaatctaaggaatcaattagaaagaaacaagagctaagagacgatata

SEQ ID NO: 143946 - DNA, 587 bp, Homo sapiens
aaatgctccaatgaagcacttttgttggcatcccccgttggactgttgttgccagtggactgagaatgctgtggccctgtcagtgcagcaggtacttcatcttgagggggcatataacaaagctgtgggccaggtcccaatccccccaatgttagagcacacatcccaggagagctgagctgagccttggccacctgaaatcatccagagatgaagccagtcaattaaatgcaacttatagcatagtaaaccctyaacggcatcaaagtatacaagtaaaaagccccatccaaaacaaacaagcaaactaacttcaacgattaaaggaacattagctcacagagatgagaaagaaccagaaccagcataactacactggcaattcaataacccagagtgtctatttttagatgaccacactaactccccagcaacagctgttaaccagactgaaaaggctgaaataatagacagaattcacaagcttgatggcaatgaaggttactgagattcaggagacagttaaaagcccatccaaagaatctaaggaatcaattagaaagaaacaagagctaagagacgatata

SEQ ID NO: 143947 - DNA, 587 bp, Homo sapiens
aaatgctccaatgaagcacttttgttggcatcccccgttggactgttgttgccagtggactgagaatgctgtggccctgtcagtgcagcaggtacttcatcttgagggggcatataacaaagctgtgggccaggtcccaatccccccaatgttagagcacacatcccaggagagctgagctgagccttggccacctgaaatcatccagagatgaagccagtcaattaaatgcaacttatagcatagtaaacccttaacggcatcaaagtatacaagtaaaaagccccatccaaaacaaacaarcaaactaacttcaacgattaaaggaacattagctcacagagatgagaaagaaccagaaccagcataactacactggcaattcaataacccagagtgtctatttttagatgaccacactaactccccagcaacagctgttaaccagactgaaaaggctgaaataatagacagaattcacaagcttgatggcaatgaaggttactgagattcaggagacagttaaaagcccatccaaagaatctaaggaatcaattagaaagaaacaagagctaagagacgatata

SEQ ID NO: 143948 - DNA, 587 bp, Homo sapiens
aaatgctccaatgaagcacttttgttggcatcccccgttggactgttgttgccagtggactgagaatgctgtggccctgtcagtgcagcaggtacttcatcttgagggggcatataacaaagctgtgggccaggtcccaatccccccaatgttagagcacacatcccaggagagctgagctgagccttggccacctgaaatcatccagagatgaagccagtcaattaaatgcaacttatagcatagtaaacccttaacggcatcaaagtatacaagtaaaaagccccatccaaaacaaacaagcaaactaacttcaacgattaaaggaacattagctcacagagatgagaaagaaccagaaccagcataactacactggcaattcaataacccagagtgtctatttttagatgaccacastaactccccagcaacagctgttaaccagactgaaaaggctgaaataatagacagaattcacaagcttgatggcaatgaaggttactgagattcaggagacagttaaaagcccatccaaagaatctaaggaatcaattagaaagaaacaagagctaagagacgatata

SEQ ID NO: 143949 - DNA, 598 bp, Homo sapiens
tttcagattttgatgtatgaaacaacttcttgagcaggaccaaaaagtgcaaatcttaaaggcaagaattgataaattcagcaatattaaaattcaaatcttccgcacaacagaaaatgctgtaaaatagagtgagaatacaagccacacaacaaaagaatataattgctacctatataactgacaaaagataattaccgaaaatatacaarcaactacaaatcaatatgaaatagcaaaaaattcagtaaaaaatatggacaaaatatatgagaaatgatatctagaagaggaaacccaaatggccaacaaaaatttgaaaaaagatgtttaacctccataataataagaaaatgcaaactaaaccaagagcagcatattttttttcatgctcatcagagtgtcattatagtggatatttgtcaaacttgtccacgtagcatctaaacccacttcttatgattggggaattccctcgcttggagataaaaccagccttcttctaaaaagctgaaatgccagatgctagtggttccagcttctcttgaagcttagggcatgggcatgtgacctggactgcaccagtcagaggctgctg

SEQ ID NO: 143950 - DNA, 598 bp, Homo sapiens
tttcagattttgatgtatgaaacaacttcttgagcaggaccaaaaagtgcaaatcttaaaggcaagaattgataaattcagcaatattaaaattcaaatcttccgcacaacagaaaatgctgtaaaatagagtgagaatacaagccacacaacaaaagaatataattgctacctatataactgacaaaagataattaccgaaaatatacaagcaactacaaatcaatatgaaatagcaaamaattcagtaaaaaatatggacaaaatatatgagaaatgatatctagaagaggaaacccaaatggccaacaaaaatttgaaaaaagatgtttaacctccataataataagaaaatgcaaactaaaccaagagcagcatattttttttcatgctcatcagagtgtcattatagtggatatttgtcaaacttgtccacgtagcatctaaacccacttcttatgattggggaattccctcgcttggagataaaaccagccttcttctaaaaagctgaaatgccagatgctagtggttccagcttctcttgaagcttagggcatgggcatgtgacctggactgcaccagtcagaggctgctg

SEQ ID NO: 143951 - DNA, 393 bp, Homo sapiens
attactgtttctggctagtttatgtctggctaagttttaccatgggacgtatttgtcartaattttttaccggggaaggctttgaccactacctttcccagacagggtctctccagagaatggtattggtccccttggaggaagatcagcatggatttttatgggaaataaggaaatttgaggaaattaggtttgttatgctgcacagtagcatataaagacacacacaatgaacagttactgtactttgtgtatatacttttgcacttaacgatgctcaatgggtttttacatacataatctcattttaggcaggctgttgcttcactcttattttgaagataaggaaactgaagtgcacagggtgttaagtgcttgtcaaaagtgacattt

SEQ ID NO: 143952 - DNA, 393 bp, Homo sapiens
attactgtttctggctagtttatgtctggctaagttttaccatgggacgtatttgtcaataattttttaccggggaaggctttgaccactacctttcccagacagggtctctccagagaatggtattggtcmccttggaggaagatcagcatggatttttatgggaaataaggaaatttgaggaaattaggtttgttatgctgcacagtagcatataaagacacacacaatgaacagttactgtactttgtgtatatacttttgcacttaacgatgctcaatgggtttttacatacataatctcattttaggcaggctgttgcttcactcttattttgaagataaggaaactgaagtgcacagggtgttaagtgcttgtcaaaagtgacattt

SEQ ID NO: 143953 - DNA, 393 bp, Homo sapiens
attactgtttctggctagtttatgtctggctaagttttaccatgggacgtatttgtcaataattttttaccggggaaggctttgaccactacctttcccagacagggtctctccagagaatggtattggtccccttggaggaagatcagcatggatttttatgggaaataaggaaatttgaggaaattaggtttgttatgctgcacagtagcatataaagacayacacaatgaacagttactgtactttgtgtatatacttttgcacttaacgatgctcaatgggtttttacatacataatctcattttaggcaggctgttgcttcactcttattttgaagataaggaaactgaagtgcacagggtgttaagtgcttgtcaaaagtgacattt

SEQ ID NO: 143954 - DNA, 353 bp, Homo sapiens
ctagaacttagagtataataaaaaaaagttgtaaagataaattttgtctagaattcaactaasaggcacctagaaatttttaaggataattaaaattcgaagatgaaatttgaatgttaacataaagcaaaataaaagaaatgccaaatacatacaattttaaaactataacaacttcaaaattcaaaaagaaacttttatattattatgttatataatatttttatttttaaaggcacttttttcttgtgattaaaggtatgtgttctcttaaaaacatgtatttctctacatttaaaaaaatgattttttaacttaaaaaaataaattattttcttcctttttctattcct

SEQ ID NO: 143955 - DNA, 353 bp, Homo sapiens
ctagaacttagagtataataaaaaaaagttgtaaagataaattttgtctagaattcaactaagaggcacctagaaatttttaaggataattaaaattcgaagatgaaatttgaatgttaacataaagcaaaataaaagaaatgccaaatacatacaattttaaaactataacaacttcaaaattcaaaaagaaacttttatattattatgttatataatatttttatttttaaaggcacttttttcttgtgattaaaggtatgtkttctcttaaaaacatgtatttctctacatttaaaaaaatgattttttaacttaaaaaaataaattattttcttcctttttctattcct

SEQ ID NO: 143956 - DNA, 533 bp, Homo sapiens
caaccgctattcagcagtactgcccttgctgccctccaactggggagggaacaagaccccaagtgctttactcacacctccagcacactgcagctaccctacagagaagagattaatctgtcttctcacaagccctgacaccctctgctcatcaccagtagtgtcccccagcttggttccaaaatgcacaggccccatcaaaggttgaccactccatttggcagcatctctgcatttctgtatggtggagctgcaaaagacaagtgatagacctccacacattaccactgccaaggtcctcaccccttttgtccccaagcttgtgaggaaacaaaaaccttgagctcaycccagggctgtgatgtgcagcactgcagtgacaagccaagctatgcagccagcatttcagtaggagggaagcctacacacacagaatactgacacggagcatggctgcaaatgtgagaaaatatatatttgtgtatgaacaagagcctacctatcagccattataggtaggtaggctgaacaag

SEQ ID NO: 143957 - DNA, 533 bp, Homo sapiens
caaccgctattcagcagtactgcccttgctgccctccaactggggagggaacaagaccccaagtgctttactcacacctccagcacactgcagctaccctacagagaagagattaatctgtcttctcacaagccctgacaccctctgctcatcaccagtagtgtcccccagcttggttccaaaatgcacaggccccatcaaaggttgaccactccatttggcagcatctctgcatttctgtatggtggagctgcaaaagacaagtgatagacctccacacattaccactgccaaggtcctcaccccttttgtccccaagcttgtgaggaaacaaaaaccttgagctcatcccagggctgtgatgtgcagcactgcagtgacaagccaagctatgcagccagcatttcagtaggagggaagcctacacacacagaatactgacacggagcatggctgcaaatgtgagaaaatatayatttgtgtatgaacaagagcctacctatcagccattataggtaggtaggctgaacaag

SEQ ID NO: 143958 - DNA, 602 bp, Homo sapiens
aaacaagaagacttaactatcctaaatatatatgcacctaacactggagcactcagattcacaaaacaagctcttagagatatacaaagaaacttacataactacacaatgacagtggcagacctcaacaccttactgacagtgtaagacagatcactgaggcagaaaactaacaaggatattcgggacctaaacttgacacttggccaaatacacctaacagacatctgcagaacactccacacatcaacaacagaatatatattcttatcatctgcacgtgacacatattctaaaatcaaccacatgctcagctataagtcaattctcaacaaataaaaaaaaaattttaccagccacactctcagaccagagcacaataaaaatacaaatcaataccaagaagatctgccaaaactgtaggattaagtgamaattaaacaacctgaacctgaatgacttttgtgtaaacaataaaatcaaggcagaaatcaagaaattcttagactctgatgaaaacaaaaatacaacacaccagaaactctagaacacagctgaagcatggttaaaaggaaagtttattgtgctaaacacttatgtca

SEQ ID NO: 143959 - DNA, 493 bp, Homo sapiens
tcaaatcttctgtgtatggtcagcaggttatcctggcaccatttgttgaataagatgtcctttccccattgtttgtctttgtcagctttgttaaaaatcagatgattgtttatgtatggctttatttctgtgctckcaaaactgttccattacactatgtgtctgttttagttactgtagccttgtagtatagtttgaagccagggagtgtgatgcccccagctttgttctttttgcttagaattactttggctattcaggcacttttttggttccaaatttattctagaattttttttctagttcagcgaaaaacgttgttggtagtatgataggaatagcattgaatctgtaacttgggttgggcagaatgagcgttttaataatactgcaaaccccaacctttggtagagtctatgtgatattgggcctgtgggtgtgcagaagacaagagttgagctttaggaacctcagcctgaatttcaaaggatgt

SEQ ID NO: 143960 - DNA, 493 bp, Homo sapiens
tcaaatcttctgtgtatggtcagcaggttatcctggcaccatttgttgaataagatgtcctttccccattgtttgtctttgtcagctttgttaaaaatcagatgattgtttatgtatggctttatttctgtgctctcaaaactgttccattacactatgtgtctgttttagttactgtagccttgtagtatagtttgaagccagggagtgtgatgcccccagctttgttctttttgcttagaattactttggctattcagkcacttttttggttccaaatttattctagaattttttttctagttcagcgaaaaacgttgttggtagtatgataggaatagcattgaatctgtaacttgggttgggcagaatgagcgttttaataatactgcaaaccccaacctttggtagagtctatgtgatattgggcctgtgggtgtgcagaagacaagagttgagctttaggaacctcagcctgaatttcaaaggatgt

SEQ ID NO: 143961 - DNA, 234 bp, Homo sapiens
ctgactagtggagctgtgagaagagggccgtcattctccggatcccagaatgatagatccaccaaaagctcacaccactcaccwggaaaagctgcaggcactcaacaccaacctgtgaaagcagccagaagggaggctgtaccctgccaagccataggagtggagcttcccaaagccatggtatcccatctcttgcatctgtgtgacctggatgtgagacatggagtcaaagga

SEQ ID NO: 143962 - DNA, 234 bp, Homo sapiens
ctgactagtggagctgtgagaagagggccgtcattctccggatcccagaatgatagatccaccaaaagctcacaccactcacctggaaaagctgcaggcactcaacaccaacctgtgaaagcagccagaagggaggctgtaccctgccaagccataggagtggagcttcccaaagccatgrtatcccatctcttgcatctgtgtgacctggatgtgagacatggagtcaaagga

SEQ ID NO: 143963 - DNA, 541 bp, Homo sapiens
gtagctggaactacaggtgtgtgccaccatgcctggctaagttttgtatttttagtggagatggggtttcaccatgttggccagcctggtctcgaactcctgaactcaggtaacctggctgcytcggcctcccaaattgctgggattacagatgtgaaccactgtgcctggcaagagtttgggtcttttaaaaaaatgactatatcgtctcttagctcttgtttctttctaattgattccttagattctttggatgggcttttaactgtctcctgaatctcagtaaccttcattgccatcaagcttgtgaattctgtctattatttcagccttttcagtctggttaacagctgttgctggggagttagtgtggtcatctaaaaatagacactctgggttattgaattgccagtgtagttatgctggttctggttctttctcatctctgtgagctaatgttcctttaatcgttgaagttagtttgcttgtttgttttggatggggctttttacttgtatactttgatgccgttaagggttta

SEQ ID NO: 143964 - DNA, 541 bp, Homo sapiens
gtagctggaactacaggtgtgtgccaccatgcctggctaagttttgtatttttagtggagatggggtttcaccatgttggccagcctggtctcgaactcctgaactcaggtaacctggctgcctcggcctcccaaattgctgggattacagatgtgaaccactgtgcctggcaagagtttgggtcttttaaaaaaatgactatatcgtctcttagctcttgtttctttctaattgattccttagattctttggatgggcttttaactgtctcctgaatctcagtaaccttcattgccatcaagcttgtgaattctgtctattatttcagccttttcagtctggttaacagctgttgctggggagttagtgtggtcatctaaaaatagacactctgggttattgaattgccagtgtagttatgctggttctggttctttctcatctctgtgagctaatkttcctttaatcgttgaagttagtttgcttgtttgttttggatggggctttttacttgtatactttgatgccgttaagggttta

SEQ ID NO: 143965 - DNA, 541 bp, Homo sapiens
gtagctggaactacaggtgtgtgccaccatgcctggctaagttttgtatttttagtggagatggggtttcaccatgttggccagcctggtctcgaactcctgaactcaggtaacctggctgcctcggcctcccaaattgctgggattacagatgtgaaccactgtgcctggcaagagtttgggtcttttaaaaaaatgactatatcgtctcttagctcttgtttctttctaattgattccttagattctttggatgggcttttaactgtctcctgaatctcagtaaccttcattgccatcaagcttgtgaattctgtctattatttcagccttttcagtctggttaacagctgttgctggggagttagtgtggtcatctaaaaatagacactctgggttattgaattgccagtgtagttatgctggttctggttctttctcatctctgtgagctaatgttcctttaatcgttgaagttagtttgyttgtttgttttggatggggctttttacttgtatactttgatgccgttaagggttta

SEQ ID NO: 143966 - DNA, 586 bp, Homo sapiens
gggttattgaattgccagtgtagttatgctggttctggttctttctcatctctgtgagctaatgttcctttaatcgttgaagttagtttgcttgtttgttttggatggggctttttacttgtatactttgatgccgttaagggtttactatgctataagttgcatttaattgactggcttcatctctggatgatttcaggtggccaaggctcagctcagctctcctgggatgtgtgctctaacactggggggattgggacctgrcccacagctttgttatatgccccctcaagatgaagtacctgctgcactgacagggccacagcattctcagtccactggcaacaacagtccaacgggggatgccaacaaaagtgcttcattggagcatttgctgaggggtccatgcttacgcacatgtgcaccagctgcagcaggggtgcagtgtggcatgttatactcatactcaccctggcagtggcaggttgtcagggtttatacacacacaccagtggggcccatgcagttgcagtgaggactctgcatatgtgcacactggcgaaacagtgattggagactgtgcaca

SEQ ID NO: 143967 - DNA, 561 bp, Homo sapiens
ctggcatatcccatgggcaagacagcccttctctgtgcaggtctgacaatcaataatgacctaagtcactcagaggcgtgtggtaagccttaggaaatgggtgtccctggctgtgcttcactggaaccattcttatgtcaaactatctgggctctacacatactggaatcctgtctttgctacttctccaagcaactctccttgctagctcgaatgtccatggggattgtgaagtctcctaaagctaggattctggagctctttggaaagagtaagccactccatcrtatttaactcaccccctccctcacctttcagggccaggaatgagtcctggtgctccacaaccccatgctgggttcccagctttctgatcctttagcccagtgtctccatcctctctccttccactctcaatgctttccttttgaagatctgctcagagtgtgctggttttcttgatagtcagctctttcagtggaggatcttcctggctctgtcttgatggccattttggctcttctgtcttttagggtttccttggtgagtatcaggtgttca

SEQ ID NO: 143968 - DNA, 617 bp, Homo sapiens
ttagcccagtgtctccatcctctctccttccactctcaatgctttccttttgaagatctgctcagagtgtgctggttttcttgatagtcagctctttcagtggaggatcttcctggctctgtcttgatggccattttggctcttctgtcttttagggtttccttggtgagtatcaggtgttcataaattaaggatttatatattgggtttaaaaatcaagattgtaaatcaagatatctttagtgtgatraaaggaagtaaattataaaacgtatttaggttactatgttgctcttaataagtagtacggctgccacattttaaagtgttttctttttcccctatggttgttttaaggatttctttttctctgtcactctctgtctttccagctctcattttctctctttctctcacatcagatttattgttaagtgttaattcagtggttattttttccttgaaatttactgtgtttcttgaatggacacgtgtatctttcatcattttggaaagtttaaaccattaagtattcacatatttatctgctccatttattttattctagctctctatttaaatatatcacctcacacaactcattatttgtgataacc

SEQ ID NO: 143969 - DNA, 362 bp, Homo sapiens
agatactatacaacattttatttacatattttaattgaagtctactgaaaatacaccagaaaacctaacagatacacttaacataagggaaacattatcctacactgcttcactttttcaaagatgttattcctcctagttaatgacttactctaaaaagagtgttagaagtagctraaaagaaaggctatgtttaaatatgtgaagagggcaagtttgaacatttaatatttattgcccacctcttagctttgttatgctctcaagtgactcttaagagaatttcacacttcgacaatattcagagaataagagacatgacattgttaaataccatcaacatgcctgctgctccgttttga

SEQ ID NO: 143970 - DNA, 505 bp, Homo sapiens
ctgatgtgttcaacaacaaatagaaaaaaatctggtatattcacacaagaaaataccacctacctattgaaagagaccaactatttatatatgcaacagcatttatgaatatcaaaaacattattttaactaatctgtacacaaaagtacatgttgtatggttccattcatatgaatttctggaagacaaaaactattctattgtaaatagaatagttgttgccttgggaatggagatgcagttaaatgagaaagaacatgagtggactttgtggtatgatggttactamaacataatagtaaacgttactatattttaattatatatgtatatgcatttgtcaaaacttataaatattacttaaatttgttcaccctattttatgtaaattttatataaaaataaacaaaacagaaaaaaatcctagtctttttaggagtatgatcaaagttaatcacagattgtttatacgtgaatgaacacacaaaaaatatgtatgcactt

SEQ ID NO: 143971 - DNA, 385 bp, Homo sapiens
tatataagtaaaaaaaaaatgctaattcatgatattctgtccctggaagaatatggacaacagaaatattttgtagcatcaaattttagacaaaaacagaggtttacatttaacatcaatgtcaataatagmgtcagaattgatatcaaacttgagaaatatttttaccaaaagtaggtctttcataattaatatgaattgatttctgccaaactatcatatttagccatgtggtcagtaatataatgtaaattatatgtagatatatatttttaaagttgaggacacctaaataaaacatgtaaattattttaattacttaacaatctattatatacaaagtatttaagtatattttaaacatatttaatttaactaatttttt

SEQ ID NO: 143972 - DNA, 385 bp, Homo sapiens
tatataagtaaaaaaaaaatgctaattcatgatattctgtccctggaagaatatggacaacagaaatattttgtagcatcaaattttagacaaaaacagaggtttacatttaacatcaatgtcaataatagagtcagaattgatatcaaacttgagraatatttttaccaaaagtaggtctttcataattaatatgaattgatttctgccaaactatcatatttagccatgtggtcagtaatataatgtaaattatatgtagatatatatttttaaagttgaggacacctaaataaaacatgtaaattattttaattacttaacaatctattatatacaaagtatttaagtatattttaaacatatttaatttaactaatttttt

SEQ ID NO: 143973 - DNA, 385 bp, Homo sapiens
tatataagtaaaaaaaaaatgctaattcatgatattctgtccctggaagaatatggacaacagaaatattttgtagcatcaaattttagacaaaaacagaggtttacatttaacatcaatgtcaataatagagtcagaattgatatcaaacttgagaaatatttttrccaaaagtaggtctttcataattaatatgaattgatttctgccaaactatcatatttagccatgtggtcagtaatataatgtaaattatatgtagatatatatttttaaagttgaggacacctaaataaaacatgtaaattattttaattacttaacaatctattatatacaaagtatttaagtatattttaaacatatttaatttaactaatttttt

SEQ ID NO: 143974 - DNA, 385 bp, Homo sapiens
tatataagtaaaaaaaaaatgctaattcatgatattctgtccctggaagaatatggacaacagaaatattttgtagcatcaaattttagacaaaaacagaggtttacatttaacatcaatgtcaataatagagtcagaattgatatcaaacttgagaaatatttttaccaaaagtaggtctttcataattaatatgaattgatttctgccaaackatcatatttagccatgtggtcagtaatataatgtaaattatatgtagatatatatttttaaagttgaggacacctaaataaaacatgtaaattattttaattacttaacaatctattatatacaaagtatttaagtatattttaaacatatttaatttaactaatttttt

SEQ ID NO: 143975 - DNA, 397 bp, Homo sapiens
tgccttgcctccaatactgtggtgaacacctgcagagaggcagacacccctatatccactagtactttgctgcaggtactgcagtttgctatccccagcacagtggactccaaatctcgaggagccacagtgtaagagatcgatcaggttgttgtgggaatcaggagactggagagattggtaggtgaaacagaaggatttttattgagtgcactcagaaccagcagattaatatccaaagactggaccctgaacaaagacagcacttgccttttaygcacacttctaaaagggggtggtctaacttgaaacaagcttacagtggtgcaaagtataatgattcaaaagcaaggatacagaagaagaacaaaggcagtcaatcatactacgacaagtt

SEQ ID NO: 143976 - DNA, 397 bp, Homo sapiens
tgccttgcctccaatactgtggtgaacacctgcagagaggcagacacccctatatccactagtactttgctgcaggtactgcagtttgctatccccagcacagtggactccaaatctcgaggagccacagtgtaagagatcgatcaggttgttgtgggaatcaggagactggagagattggtaggtgaaacagaaggatttttattgagtgcactcagaaccagcagattaatatccaaagactggaccctgaacaaagacagcacttgccttttacgcacacttctaaaagggggtggtctaacttgaaacaagcttacagtggtgyaaagtataatgattcaaaagcaaggatacagaagaagaacaaaggcagtcaatcatactacgacaagtt

SEQ ID NO: 143977 - DNA, 445 bp, Homo sapiens
tcattggtgatgctaagcagtgcagtcccctagctgcattctcaggcaaaataactgtgtctgaatacttttttcattggtcgctcagccagagtgtgcgggatggacccgacacaagagaacaaagctggggcctaatacaagtmccccagagttagagcacccagtccagaagttgggagctgagtgttggtgccataaaatctcccagaaatgaagccagtcagctgaatctaccttataacacaaacaaatcttcgacatcatcaaataggatgaaagaaaacaaaataccgtccaaaggtaagcaatctcaaagactgaagttagataagtgcacaaagatgagaaagaatcagtgcaagaatactgaaaactcaaaaagccagagtaacttcctacctccacataactgcatcacctctccagccagggttcagaacag

SEQ ID NO: 143978 - DNA, 445 bp, Homo sapiens
tcattggtgatgctaagcagtgcagtcccctagctgcattctcaggcaaaataactgtgtctgaatacttttttcattggtcgctcagccagagtgtgcgggatggacccgacacaagagaacaaagctggggcctaatacaagtaccccagagttagagcacmcagtccagaagttgggagctgagtgttggtgccataaaatctcccagaaatgaagccagtcagctgaatctaccttataacacaaacaaatcttcgacatcatcaaataggatgaaagaaaacaaaataccgtccaaaggtaagcaatctcaaagactgaagttagataagtgcacaaagatgagaaagaatcagtgcaagaatactgaaaactcaaaaagccagagtaacttcctacctccacataactgcatcacctctccagccagggttcagaacag

SEQ ID NO: 143979 - DNA, 445 bp, Homo sapiens
tcattggtgatgctaagcagtgcagtcccctagctgcattctcaggcaaaataactgtgtctgaatacttttttcattggtcgctcagccagagtgtgcgggatggacccgacacaagagaacaaagctggggcctaatacaagtaccccagagttagagcacccagtccagaagttgggagctgagtgttggtgccataaaatctcccagaaatgaagccagtcagctgaatctaccttataacacaaacaaatcttcgacatcatcaaataggatgaaagaaaacaaaataycgtccaaaggtaagcaatctcaaagactgaagttagataagtgcacaaagatgagaaagaatcagtgcaagaatactgaaaactcaaaaagccagagtaacttcctacctccacataactgcatcacctctccagccagggttcagaacag

SEQ ID NO: 143980 - DNA, 581 bp, Homo sapiens
ctcaacagtgggattaaaatactcagtaacccatgcrgtaaacagctctgatatcatccaagtgttgttgttccatttatagagcttgggtagtgtagatttagcataattcttaagaggtgccctaggatttatggaatagcaaatgagcattggcttgtaacaagaaagtcagcctgtcctttaaatctttttctttttcttgatataaggtctcactccattacccaggctggattgcagtggcatgatcttggcccactccatacttgacctccttggccccacaatcctcccacctcagcctcctgagtagctgggactagtagcatgcaccaccatacatggcttatttttatttatttatttatttattgttagagacagggtttcaccatgttgcccaggctggtctgaagctcctaagctcaagccattcccccacttcagcctcacagagtgctgggattacaggcgtgatccaccctgtctggcctctaaattcgtgttatggagactcattttcatggttaaaatgtcctgaattgactgtggcctgttgggaggcgggatggaggaaa

SEQ ID NO: 143981 - DNA, 584 bp, Homo sapiens
gctggattgcagtggcatgatcttggcccactccatacttgacctccttggccccacaatcctcccacctcagcctcctgagtagctgggactagtagcatgcaccaccatacatggcttatttttatttatttatttatttattgttagagacagggtttcaccatgttgcccmggctggtctgaagctcctaagctcaagccattcccccacttcagcctcacagagtgctgggattacaggcgtgatccaccctgtctggcctctaaattcgtgttatggagactcattttcatggttaaaatgtcctgaattgactgtggcctgttgggaggcgggatggaggaaactacttatggaaaatgaagaagaaagggaagcacaccagaagcaagaaagtgtcatcaatttttacatcaaggactccatgataaagagaaagtacaggtggcctgttatcaaggctgaccattggactgtggactgcacctgcatctaccaggttcttctggatagtcccagttttaaatttttgacctgacattcatgaacacagtgctactggtcagacctttgtccaggt

SEQ ID NO: 143982 - DNA, 593 bp, Homo sapiens
aggctggattgcagtggcatgatcttggcccactccatacttgacctccttggccccacaatcctcccacctcagcctcctgagtagctgggactagtagcatgcaccaccatacatggcttatttttatttatttatttatttattgttagagacagggtttcaccatgttgcccaggctggtctgaagctcctaagctcaagccattcccccacttcagcctcacagagtgctgggattacaggygtgatccaccctgtctggcctctaaattcgtgttatggagactcattttcatggttaaaatgtcctgaattgactgtggcctgttgggaggcgggatggaggaaactacttatggaaaatgaagaagaaagggaagcacaccagaagcaagaaagtgtcatcaatttttacatcaaggactccatgataaagagaaagtacaggtggcctgttatcaaggctgaccattggactgtggactgcacctgcatctaccaggttcttctggatagtcccagttttaaatttttgacctgacattcatgaacacagtgctactggtcagacctttgtccaggtttaagct

SEQ ID NO: 143983 - DNA, 584 bp, Homo sapiens
gctggattgcagtggcatgatcttggcccactccatacttgacctccttggccccacaatcctcccacctcagcctcctgagtagctgggactagtagcatgcaccaccatacatggcttatttttatttatttatttatttattgttagagacagggtttcaccatgttgcccaggctggtctgaagctcctaagctcaagccattcccccacttcagcctcacagagtgctgggattacaggcgtgatccaccctgtctggcctctaaattygtgttatggagactcattttcatggttaaaatgtcctgaattgactgtggcctgttgggaggcgggatggaggaaactacttatggaaaatgaagaagaaagggaagcacaccagaagcaagaaagtgtcatcaatttttacatcaaggactccatgataaagagaaagtacaggtggcctgttatcaaggctgaccattggactgtggactgcacctgcatctaccaggttcttctggatagtcccagttttaaatttttgacctgacattcatgaacacagtgctactggtcagacctttgtccaggt

SEQ ID NO: 143984 - DNA, 584 bp, Homo sapiens
gctggattgcagtggcatgatcttggcccactccatacttgacctccttggccccacaatcctcccacctcagcctcctgagtagctgggactagtagcatgcaccaccatacatggcttatttttatttatttatttatttattgttagagacagggtttcaccatgttgcccaggctggtctgaagctcctaagctcaagccattcccccacttcagcctcacagagtgctgggattacaggcgtgatccaccctgtctggcctctaaattcgtgttatggagactcattttcatggttaaaatgtcctgaattgactgtggcctgttgggaggcrggatggaggaaactacttatggaaaatgaagaagaaagggaagcacaccagaagcaagaaagtgtcatcaatttttacatcaaggactccatgataaagagaaagtacaggtggcctgttatcaaggctgaccattggactgtggactgcacctgcatctaccaggttcttctggatagtcccagttttaaatttttgacctgacattcatgaacacagtgctactggtcagacctttgtccaggt

SEQ ID NO: 143985 - DNA, 624 bp, Homo sapiens
aaaaatctggaaataagccaaatgttcattaataggagaatgggtaaattaataggagaatgggtaaataaattatacccttaaaaactaagtaacatgtcatttagggtaatcatatgtatgcaataaaacaatgtgttttttttaaaggaagagaatcctaaacataaattcagggtartagttactctcgggctgaagggtgaaaatcaggaaaaaggacagaggaggagcagatgttagggtcagaaccctagttctttggttgtgttgtaagttgacaagtgattaccatattgttcaaatacatttacacagaggcccaggcacagacaagggtgaaataggagccaaggtgtactatgagccaaggattatgattaatccaattttgtgcacttaagccatttgaaaaacagaaaagcaaaacaacaaaataatttttaagaaattgaatatagggtgctatgctctgaatgtgtccccctaaaattaatcacaaatgtcataggattaggaagtagggcttttaggtagtgattcagtcatgaagggagagtcttcacaaatgggtgtaggatccttacacaaggactggagggagtgggcttcccctgttttacc

SEQ ID NO: 143986 - DNA, 624 bp, Homo sapiens
aaaaatctggaaataagccaaatgttcattaataggagaatgggtaaattaataggagaatgggtaaataaattatacccttaaaaactaagtaacatgtcatttagggtaatcatatgtatgcaataaaacaatgtgttttttttaaaggaagagaatcctaaacataaattcagggtaatagttactctcgggctgaagggtgaaaatcaggaaaaaggacagaggaggagcagatgttagggtcagaaccctagttctttggttgtgttgtaagttgacaagtgattaccatattgttcaaatacatttacacagaggcccaggcacagacaagggtgaaataggagccaaggtgtactatgagccaaggattatgattaatccaattttgtgcacttaagccatttgaaaaacagaaaagcaaaacaacaaaataatttttaagaaattgaatatagggtgctatgctctgaatgtgtccccctaaaattaatcacmaatgtcataggattaggaagtagggcttttaggtagtgattcagtcatgaagggagagtcttcacaaatgggtgtaggatccttacacaaggactggagggagtgggcttcccctgttttacc

SEQ ID NO: 143987 - DNA, 518 bp, Homo sapiens
ggactttcatatgaatggcatcatataataagagacctactgtgactagcttctttcattgagcatagtgttttcaaggttcatccatgttgtggcatttatcagtacttcattccttttcaaggctgactaatattccattgtatggatatatcacactttgtttatccgttcatctattggtgaacatttgggttttttccaccttttggatattatgattctctctttcctcttattgtctagacatcttggatagtatccagtgaggsctgtgggcaagaatgggtgtttcttatatttgggaacacctaatatccatgaaagcagggtcttggcacatgtctgctttcatattaagtatatgtactagctggaattttcctccctctgttgttactgagttggggctgctccctcctttatcaattctccctttttatcatgattgctgtgttggaaacttgctgactcttcagactaggggattcagatccttctcttggggcttcagagac

SEQ ID NO: 143988 - DNA, 452 bp, Homo sapiens
atcattttctttatctacaaatcaagacacagtatgagtggctgcacccaatttggtaagtcctctattattgaggatgttttcctgtttccyttgtcattgttgttgctgttttgttttgagacagagtttcgctcttttgagtcaagtggtgtgatctcagctcactgtagcctcccgagtagctgggattataggtgcccaccaccacgcctagctaatttttgtatttttagtagagatgaggttttaccatgttggccaggctggtcttagctcctgaccacaggtgatccatctgcctcagcctcccaaaatgctgagattacaggcgtgagccaccatgcttggctgctttcgtcatttcagactgagcttggagaagaacctgaggaaaaacatgactttaaaattttgatgaatggagaaatctctttccattcaccttcctt

SEQ ID NO: 143989 - DNA, 518 bp, Homo sapiens
ggactttcatatgaatggcatcatataataagagacctactgtgactagcttctttcattgagcatagtgttttcaaggttcatccatgttgtggcatttatcagtacttcattccttttcaaggctgactaatattccattgtatggatatatcacactttgtttatccgttcatctattggtgaacatttgggttttttccaccttttggatattatgattctctctttcctcttattgtctagacatcttggatagtatccagtgaggcctgtgggcaagaatgggtgtttcttatatttgggaacacctaatatccatgaaagcagggtcttggcacatgtctgctttcatattaagtayatgtactagctggaattttcctccctctgttgttactgagttggggctgctccctcctttatcaattctccctttttatcatgattgctgtgttggaaacttgctgactcttcagactaggggattcagatccttctcttggggcttcagagac

SEQ ID NO: 143990 - DNA, 452 bp, Homo sapiens
atcattttctttatctacaaatcaagacacagtatgagtggctgcacccaatttggtaagtcctctattattgaggatgttttcctgtttcccttgtcattgttgttgytgttttgttttgagacagagtttcgctcttttgagtcaagtggtgtgatctcagctcactgtagcctcccgagtagctgggattataggtgcccaccaccacgcctagctaatttttgtatttttagtagagatgaggttttaccatgttggccaggctggtcttagctcctgaccacaggtgatccatctgcctcagcctcccaaaatgctgagattacaggcgtgagccaccatgcttggctgctttcgtcatttcagactgagcttggagaagaacctgaggaaaaacatgactttaaaattttgatgaatggagaaatctctttccattcaccttcctt

SEQ ID NO: 143991 - DNA, 353 bp, Homo sapiens
ttgaacaagccaaagagctgattatgttgacaagaaggggaccttaacaaggcagataatcaaaagttgatgactgacagcctctttcgcatcccttcaccctctrctaaatcaggtctcttacatgatcttgatgacaaataataaaaattataaacacattacagttttcacatgcatttgttcacttctcacagcaaatatgagatttatctaaggctgagcagcttattacagaaaaaagtttatgggactagaaccttaattttatgtaacaaaatttatatagagcttaccatggatcatgtactctcctaaatagttcaaaactttcatttttagagagatgggtg

SEQ ID NO: 143992 - DNA, 353 bp, Homo sapiens
ttgaacaagccaaagagctgattatgttgacaagaaggggaccttaacaaggcagataatcaaaagttgatgactgacagcctctttcgcatcccttcaccctctactaaatcaggtctcttacatgatcttgatgacaaataataaaaattataaacacattayagttttcacatgcatttgttcacttctcacagcaaatatgagatttatctaaggctgagcagcttattacagaaaaaagtttatgggactagaaccttaattttatgtaacaaaatttatatagagcttaccatggatcatgtactctcctaaatagttcaaaactttcatttttagagagatgggtg

SEQ ID NO: 143993 - DNA, 353 bp, Homo sapiens
ttgaacaagccaaagagctgattatgttgacaagaaggggaccttaacaaggcagataatcaaaagttgatgactgacagcctctttcgcatcccttcaccctctactaaatcaggtctcttacatgatcttgatgacaaataataaaaattataaacacattacagttttcacatgcatttgttcacttctcacagcaaatatgagatttatctaaggctgagcagcttattacagaaaaaagtttatgggactasaaccttaattttatgtaacaaaatttatatagagcttaccatggatcatgtactctcctaaatagttcaaaactttcatttttagagagatgggtg

SEQ ID NO: 143994 - DNA, 452 bp, Homo sapiens
atcattttctttatctacaaatcaagacacagtatgagtggctgcacccaatttggtaagtcctctattattgaggatgttttcctgtttcccttgtcattgttgttgctgttttgttttgagacagagtttcgctcttttgagtcaagtggtgtgatctcagctcactgtagcctcccgagtagctgggattataggtgcccaccaccacgcctagctaatttttgtatttttagtagagatgaggttttaccatgttggccaggctggtcttagctcctgaccacaggtgatccatctgcctcagcctcccaaaatgctgagattacaggcgtgagccaccatgcttggctgctttcrtcatttcagactgagcttggagaagaacctgaggaaaaacatgactttaaaattttgatgaatggagaaatctctttccattcaccttcctt

SEQ ID NO: 143995 - DNA, 487 bp, Homo sapiens
ctgacttgggagtcagaaggtccctgggactagaatagaaggactttggcattttccctggcctagggcccttagacagaagtgggcagctgccatcaggagcctggggcccagctgtgtccacaccttgcccgcctcccccctcctgagtgcctggctgcccctggagccccaggcttgcctgccatctgggcagctcagaggagagcccactgccaagggagtgccagcgttgatttatggcccacaaccttggcaggctcaggctgtgtgcccgaactgcctttgctcagggaagagatgctcctcttaaagggacagtgcagaggaatgcaggaaagtccaggacgaaagcttggcagggggctggcaaaaaagacctccacccatcagcactctgggtgactgtcactccctagggaaacttctccctagggaaccacccatcayacatgttatcataccctatcctttgtagacttggccc

SEQ ID NO: 143996 - DNA, 521 bp, Homo sapiens
gtaagtggagaaactgaagtccattcactcaaatcmataagtgtctactgagcacctcctatgtggcaagcactatataggccctaaggatccagagatgatcagggcatggtccctgtcaacatggtgctcacagtctagtgggaaatagagttcactcgtcattctatcattcaatcaaaaacaaaaagtattgagcacttactctgagccaggcagagttgcaggtgctggagatgcaactgtgaacaagacagacccaatccctgccccatcagagagtactacctggtgcagaagacacatacataaacaggcagctataattcagggtgatgtatgctatgaaggggaaaggacagttgccatggggtggcatatccatagatatgccatagatccataggttcccatgaggggatctatccgagtctgtgaaaggggatgtgaggatgatgtggaagaagcaacaccaaatctgatctgctcacaaggtgcgcagaagtcaagtgtgggatggc

SEQ ID NO: 143997 - DNA, 521 bp, Homo sapiens
gtaagtggagaaactgaagtccattcactcaaatccataagtgyctactgagcacctcctatgtggcaagcactatataggccctaaggatccagagatgatcagggcatggtccctgtcaacatggtgctcacagtctagtgggaaatagagttcactcgtcattctatcattcaatcaaaaacaaaaagtattgagcacttactctgagccaggcagagttgcaggtgctggagatgcaactgtgaacaagacagacccaatccctgccccatcagagagtactacctggtgcagaagacacatacataaacaggcagctataattcagggtgatgtatgctatgaaggggaaaggacagttgccatggggtggcatatccatagatatgccatagatccataggttcccatgaggggatctatccgagtctgtgaaaggggatgtgaggatgatgtggaagaagcaacaccaaatctgatctgctcacaaggtgcgcagaagtcaagtgtgggatggc

SEQ ID NO: 143998 - DNA, 521 bp, Homo sapiens
gtaagtggagaaactgaagtccattcactcaaatccataagtgtctactgagcacctcctatgtggcaagcactatataggccctaaggatccagagatgatcagggcatggtccctgtcaacatggtgctcacagtctagtgggaaatagagttcactcgtcattctatcattcaatcaaaaacaaaaagtattgagcacttactctgagccaggcagagttgcaggtgctggagatgcaactgtgaacaagacagacccaatccctgccccatcagagagtactacctggtgcagaagacacatacataaacaggcagctataattcagggtgatgtatgmtatgaaggggaaaggacagttgccatggggtggcatatccatagatatgccatagatccataggttcccatgaggggatctatccgagtctgtgaaaggggatgtgaggatgatgtggaagaagcaacaccaaatctgatctgctcacaaggtgcgcagaagtcaagtgtgggatggc

SEQ ID NO: 143999 - DNA, 521 bp, Homo sapiens
gtaagtggagaaactgaagtccattcactcaaatccataagtgtctactgagcacctcctatgtggcaagcactatataggccctaaggatccagagatgatcagggcatggtccctgtcaacatggtgctcacagtctagtgggaaatagagttcactcgtcattctatcattcaatcaaaaacaaaaagtattgagcacttactctgagccaggcagagttgcaggtgctggagatgcaactgtgaacaagacagacccaatccctgccccatcagagagtactacctggtgcagaagacacatacataaacaggcagctataattcagggtgatgtatgctatgaaggggaaaggacagttgccatggggtggcatatccatagatatgccatagatccataggttcccatgaggggatctatccgagtctgtgaaaggggatgtgaggatgatgtggaagaagcaacaccraatctgatctgctcacaaggtgcgcagaagtcaagtgtgggatggc

SEQ ID NO: 144000 - DNA, 529 bp, Homo sapiens
gcttaacctgaacaaaatgtcatagttacctcctagcctgttgctaraccaaggagagtcacttgaataatgaacaagactggagggaaaccacatggataatttatcattacactatcatcacatacatggaactcatcaatgaagcttacgaaaaaaattgagtcatttgtggaaaagtgtaaagagaatataggagatgcctcaagtgaagagaaaaaagctgcagaaaataattacaaaaaagagtgttaagatgtaaacacaaattcagagattcaggagcacaaaggattaagttaagggaaaaaagagttatcagtattttcttattcattatggagagcaggatgaattcttaaaaggtcaaataattgtgagtctgatatatctgacgataatttgtattttgtatttctaatgttgtaaatggttgttaattcacagtcattattcctattttctttagactagtgaccatgagtttgactgacaaaaacccattgggttagtattgttatctatgtgt

SEQ ID NO: 144001 - DNA, 529 bp, Homo sapiens
gcttaacctgaacaaaatgtcatagttacctcctagcctgttgctagaccaaggagagtcacttgaataatgaacaagactggagggaaaccacatggataatttatcattacactatcatcacatacatggaactcatcaatgaagcttacgaaaaaaattgagtcatttgtggaaaagtgtaaagagaatatargagatgcctcaagtgaagagaaaaaagctgcagaaaataattacaaaaaagagtgttaagatgtaaacacaaattcagagattcaggagcacaaaggattaagttaagggaaaaaagagttatcagtattttcttattcattatggagagcaggatgaattcttaaaaggtcaaataattgtgagtctgatatatctgacgataatttgtattttgtatttctaatgttgtaaatggttgttaattcacagtcattattcctattttctttagactagtgaccatgagtttgactgacaaaaacccattgggttagtattgttatctatgtgt

SEQ ID NO: 144002 - DNA, 529 bp, Homo sapiens
gcttaacctgaacaaaatgtcatagttacctcctagcctgttgctagaccaaggagagtcacttgaataatgaacaagactggagggaaaccacatggataatttatcattacactatcatcacatacatggaactcatcaatgaagcttacgaaaaaaattgagtcatttgtggaaaagtgtaaagagaatataggagatgcctcaagtgaagagaaaaaagctgcagaaaataattacaaaaaagagtgttaagatgtaaacacaaattcagagattcaggagcacaaaggrttaagttaagggaaaaaagagttatcagtattttcttattcattatggagagcaggatgaattcttaaaaggtcaaataattgtgagtctgatatatctgacgataatttgtattttgtatttctaatgttgtaaatggttgttaattcacagtcattattcctattttctttagactagtgaccatgagtttgactgacaaaaacccattgggttagtattgttatctatgtgt

SEQ ID NO: 144003 - DNA, 316 bp, Homo sapiens
aggggctggctctatctcttaagaagacatttacctagcattggtaatggagatggggccttaatagggctagggaggcacacccaactccagacccagctctctgctrttccccttcccagtgcacacaatcccaattcccactccagaaaattttttaaaaacatatcttaaaaaaaaaacctcgaaaagccaagcagaccctcagcttcaaggtatctcctcattccctctctctctctctctctctctctctctctctctctgtctctctgaatctacaaagaaggagtgagttttgtctctccaagtactc

SEQ ID NO: 144004 - DNA, 316 bp, Homo sapiens
aggggctggctctatctcttaagaagacatttacctagcattggtaatggagatggggccttaatagggctagggaggcacacccaactccagacccagctctctgctgttccccttcccagtgcacacaatcccaattcccactccagaaaatttttwaaaaacatatcttaaaaaaaaaacctcgaaaagccaagcagaccctcagcttcaaggtatctcctcattccctctctctctctctctctctctctctctctctctctgtctctctgaatctacaaagaaggagtgagttttgtctctccaagtactc

SEQ ID NO: 144005 - DNA, 245 bp, Homo sapiens
cacccaactccagacccagctctctgctgttccccttcccagtgcacacaatcccaattcccactccagaaaattttttaaaaacatatcttaaaaaaaaaacctcgaaaagccaagcagaccctcascttcaaggtatctcctcattccctctctctctctctctctctctctctctctctctctgtctctctgaatctacaaagaaggagtgagttttgtctctccaagtactcagagcctta

SEQ ID NO: 144006 - DNA, 245 bp, Homo sapiens
cacccaactccagacccagctctctgctgttccccttcccagtgcacacaatcccaattcccactccagaaaattttttaaaaacatatcttaaaaaaaaaacctcgaaaagccaagcagaccctcagcttcaaggtatctcctcattcyctctctctctctctctctctctctctctctctctctgtctctctgaatctacaaagaaggagtgagttttgtctctccaagtactcagagcctta

SEQ ID NO: 144007 - DNA, 603 bp, Homo sapiens
cacctctgctgtggcacgaccattgtcaaaatgctagaaagaagagagactggctcttagaccaagggaatttgggattygaaaggacttccaattccagttctatagatttccttcccattagcctcttcatgtgcatcaaatgtaaatggcaggctaaacctacaggatgaagagagttgaaagactgctgcctaaaaatgcccttttccaaatctgtgggtgcagaagcacattgaaaggcagctacccagcctggcggtgtggcacatgcctgcagtctcacatacttaagaggctaaggtgggaggactacttgagcccaggagtttgaggcttcagtgaactatgatggtgccacaacactccagcctgggaaacagagctggaccccatttccaaaaaaaaaaaaaaaaaaaaaaaaaaagtagttacccaggtaaggtggatgatcaagtacacccagtgagaagcacacaaaccttaccctttacccaaactctctcccttacctggcccatttccggtctctagaggaggatcagttagggggtgtgacccaagttacccagataattaactgtggaagcaagtttttttttc

SEQ ID NO: 144008 - DNA, 603 bp, Homo sapiens
cacctctgctgtggcacgaccattgtcaaaatgctagaaagaagagagactggctcttagaccaagggaatttgggatttgaaaggacttccaattccagttctatagatttccttcccattagcctcttcatgtgyatcaaatgtaaatggcaggctaaacctacaggatgaagagagttgaaagactgctgcctaaaaatgcccttttccaaatctgtgggtgcagaagcacattgaaaggcagctacccagcctggcggtgtggcacatgcctgcagtctcacatacttaagaggctaaggtgggaggactacttgagcccaggagtttgaggcttcagtgaactatgatggtgccacaacactccagcctgggaaacagagctggaccccatttccaaaaaaaaaaaaaaaaaaaaaaaaaaagtagttacccaggtaaggtggatgatcaagtacacccagtgagaagcacacaaaccttaccctttacccaaactctctcccttacctggcccatttccggtctctagaggaggatcagttagggggtgtgacccaagttacccagataattaactgtggaagcaagtttttttttc

SEQ ID NO: 144009 - DNA, 529 bp, Homo sapiens
gcttaacctgaacaaaatgtcatagttacctcctagcctgttgctagaccaaggagagtcacttgaataatgaacaagactggagggaaaccacatggataatttatcattacactatcatcacatacatggaactcatcaatgaagcttacgaaaaaaattgagtcatttgtggaaaagtgtaaagagaatataggagatgcctcaagtgaagagaaaaaagctgcagaaaataattacaaaaaagagtgttaagatgtaaacacaaattcagagattcaggagcacaaaggattaagttaagggaaaaaagagttatcagtattttcttattcattatggagagcaggatgaattcttaaaaggtcaaataattgtgagtctgatatatctgaygataatttgtattttgtatttctaatgttgtaaatggttgttaattcacagtcattattcctattttctttagactagtgaccatgagtttgactgacaaaaacccattgggttagtattgttatctatgtgt

SEQ ID NO: 144010 - DNA, 551 bp, Homo sapiens
gggaatttgggatttgaaaggacttccaattccagttctatagatttccttcccattagcctcttcatgtgcatcaaatgtaaatggcaggctaaacctacaggatgaagagagttgaaagactgctgcctaaaaatgcccttttccaaatctgtgggtgcagaagcacattgaaaggcagctacccagcctggcggtgtggcacatgcctgcagtctcacatacttaagaggctaaggtgggaggactacttgagcccaggagwttgaggcttcagtgaactatgatggtgccacaacactccagcctgggaaacagagctggaccccatttccaaaaaaaaaaaaaaaaaaaaaaaaaaagtagttacccaggtaaggtggatgatcaagtacacccagtgagaagcacacaaaccttaccctttacccaaactctctcccttacctggcccatttccggtctctagaggaggatcagttagggggtgtgacccaagttacccagataattaactgtggaagcaagtttttttttcactcctttggcct

SEQ ID NO: 144011 - DNA, 615 bp, Homo sapiens
gcacgaccattgtcaaaatgctagaaagaagagagactggctcttagaccaagggaatttgggatttgaaaggacttccaattccagttctatagatttccttcccattagcctcttcatgtgcatcaaatgtaaatggcaggctaaacctacaggatgaagagagttgaaagactgctgcctaaaaatgcccttttccaaatctgtgggtgcagaagcacattgaaaggcagctacccagcctggcggtgtggcacatgcctgcagtctcacatacttaagaggctaaggtgggaggactacttgagcccaggagtttgaggcttcagtgaactatgatggtgccacaacactccagcctgggaaacagagctggaccccatttccaaaaaaaaaaaaaaaaaaaaaaaaaaagtagttacccaggtaaggtggatgatcaagtacacccagtgagaagcacacaaaccttaccctttacccaaactctctcccttacytggcccatttccggtctctagaggaggatcagttagggggtgtgacccaagttacccagataattaactgtggaagcaagtttttttttcactcctttggcctctaaatatgaga

SEQ ID NO: 144012 - DNA, 622 bp, Homo sapiens
ctttacattttttgcctagctccctcttattctctaccctctccccaacacgcacgcaaatcctaacaacaaaaaatcctaaatataggaagacaaaccttcctgacttaccattttggcccacctgcaacccctgtcccccgccccctccccaatgtttttctctcctgagcctctgctcttcgcttctaaaataaaaaaaaaagaagaagaagaaggaattttcartagtccaacttgtcaagcgaagaccatcttttaaccttcaacagcagcgaaagccgtgtgaactcttggtgaaccaagactgaagtcataaatcactcgtacaaaggcggctgcggaggctggcgcgggctgctgcacctttaacgctttctggcgctgacaggcggcggcccagctaaagttcacagcgcccggggagggcccgcctccgcctcccctcccgcccccgcctcccctcccccaggccggccccggcccccggccccggacaggcccgccgcgcggccgcttgagctgcgagctgaggaggcccgttggctgttcccgcaaagagtggggggcgcattttctctcctgccagcccgctccatcctggtcgtttattcccggcctt

SEQ ID NO: 144013 - DNA, 620 bp, Homo sapiens
caacacgcacgcaaatcctaacaacaaaaaatcctaaatataggaagacaaaccttcctgacttaccattttggcccacctgcaacccctgtcccccgccccctccccaatgtttttctctcctgagcctctgctcttcgcttctaaaataaaaaaaaaagaagaagaagaaggaattttcaatagtccaacttgtcaagcgaagaccatcttttaaccttcaacagcagcgaaagccgtgtgaactcttggtgaaccaagactgaagtcataaatcactcgtacaaaggcggctgcggaggctggcgcgggctgctgcacctttaacgctttctggcgctgacaggcggcggcccagctaaagttcacagcgcccggggagggcccgcctccgcctcccctcccgcccccgcctcccctcccccaggccggccccggcccccggccccggacwggcccgccgcgcggccgcttgagctgcgagctgaggaggcccgttggctgttcccgcaaagagtggggggcgcattttctctcctgccagcccgctccatcctggtcgtttattcccggccttccctcaccccccacccccacagcctgctgtacgtaaataggca

SEQ ID NO: 144014 - DNA, 516 bp, Homo sapiens
gcctgcccaaatggcaaaacctcgtttctactaaaaatacaaaacaaattagctgggtctggtggcccatgcctatagggggagctaatacagaggctgagcgtgggaggaacacctgagcctgggagggtgaggctgcagtgagctgtgattttgccactgcactccagcctgggcaacagaacgagamcctgtctcaaagtgaaaaccaaaacaaaaccaaaaaaatgaaaccagagaaaaaaaaaacaagaaagaaaatggtaagggggaagtgcctatttattaagcttttgttgtaaatagtaacttgcatatcagatgtttactgtaatattcttgaagccttgccaggcctacagcttgctgtgtgcttttcaactctatttcatttatttgggaaatcatatatcaatgtatttattcattcccagctctaaccatggaatactgggaatgtccctttctatgaaggaggtttgctggccacaacaggaatattcatgaacatggagg

SEQ ID NO: 144015 - DNA, 534 bp, Homo sapiens
tgccatgggatccaagggcgtttcgggtcagctcagagcctttctcagataattgtttcrgtaactggggagctgctgtccagcgcacgcctctatgaaggcttaatgttctgtctcccgcagagtcttctttggtctgagagccacttgtttcttacatccttgtgctaatctcaccatctgctcctacataccccaggcatttgccacatgctggtcctctctttcctgacaggcgggccatctctccagcttctgtgaggacagttcaaattatggaggagggggcaggtgcagggcagcagtgctgaggggagtaccatgcagttgggggagcagggactcatttttctttgtagctcagattcctaagcctgtgactttgagtatcggtgtcttccttgcaatgtttcaatctgaggttattggggagagtgcagaattggagcccgatggaagactggtggggagaggggtgggtggagggaacatggagaatgtgtcaggtggtgtctattcctgacaccttacttt

SEQ ID NO: 144016 - DNA, 534 bp, Homo sapiens
tgccatgggatccaagggcgtttcgggtcagctcagagcctttctcagataattgtttcagtaactggggagctgctgtccagcgcacgcctctatgaaggcttaatgtkctgtctcccgcagagtcttctttggtctgagagccacttgtttcttacatccttgtgctaatctcaccatctgctcctacataccccaggcatttgccacatgctggtcctctctttcctgacaggcgggccatctctccagcttctgtgaggacagttcaaattatggaggagggggcaggtgcagggcagcagtgctgaggggagtaccatgcagttgggggagcagggactcatttttctttgtagctcagattcctaagcctgtgactttgagtatcggtgtcttccttgcaatgtttcaatctgaggttattggggagagtgcagaattggagcccgatggaagactggtggggagaggggtgggtggagggaacatggagaatgtgtcaggtggtgtctattcctgacaccttacttt

SEQ ID NO: 144017 - DNA, 534 bp, Homo sapiens
tgccatgggatccaagggcgtttcgggtcagctcagagcctttctcagataattgtttcagtaactggggagctgctgtccagcgcacgcctctatgaaggcttaatgttcygtctcccgcagagtcttctttggtctgagagccacttgtttcttacatccttgtgctaatctcaccatctgctcctacataccccaggcatttgccacatgctggtcctctctttcctgacaggcgggccatctctccagcttctgtgaggacagttcaaattatggaggagggggcaggtgcagggcagcagtgctgaggggagtaccatgcagttgggggagcagggactcatttttctttgtagctcagattcctaagcctgtgactttgagtatcggtgtcttccttgcaatgtttcaatctgaggttattggggagagtgcagaattggagcccgatggaagactggtggggagaggggtgggtggagggaacatggagaatgtgtcaggtggtgtctattcctgacaccttacttt

SEQ ID NO: 144018 - DNA, 534 bp, Homo sapiens
tgccatgggatccaagggcgtttcgggtcagctcagagcctttctcagataattgtttcagtaactggggagctgctgtccagcgcacgcctctatgaaggcttaatgttctgtctcccgcagagtcttctttggtctgagagccacttgtttcttacatccttgtgctaatctcaccatctgctcctacataycccaggcatttgccacatgctggtcctctctttcctgacaggcgggccatctctccagcttctgtgaggacagttcaaattatggaggagggggcaggtgcagggcagcagtgctgaggggagtaccatgcagttgggggagcagggactcatttttctttgtagctcagattcctaagcctgtgactttgagtatcggtgtcttccttgcaatgtttcaatctgaggttattggggagagtgcagaattggagcccgatggaagactggtggggagaggggtgggtggagggaacatggagaatgtgtcaggtggtgtctattcctgacaccttacttt

SEQ ID NO: 144019 - DNA, 559 bp, Homo sapiens
tgataagtgcttagttaagatgaaaaaggcattaaatttgtgagtggaaatcaaacagaaatgtgttctgattgaaagcaattgggtcaatgctacccaagttcaggcatccactgcgggtcttaaacacatctcctgcagataagggagggctattatataacgtttctttcttttttctttaattataaagcattctccttttttaatataaaaattggccacatatatcactttaggtataaagatattaggatacctttatagtagataaaatgctgacacattctttgtragagttaaagtatctttcattatatgagcatttaagatattaaagtacttttgccaccaaaaatagtgcttctgtaaatattcttttacttataactttgttagtttttacttctgctgaaacaaattgcatgaggaaacaagtgtatgtgtgtaaagtgtaatatatgtatatatatttaatatgggtatatacaacttaatatatacacatacatacaataacatatacaatttttttgttttgttttttgagatagagttt

SEQ ID NO: 144020 - DNA, 562 bp, Homo sapiens
acctttatagtagataaaatgctgacacattctttgtaagagttaaagtatctttcattatatgagcatttaagatattaaagtacttttgccaccaaaaatagtgcttctgtaaatattcttttacttataactttgttagtttttacttctgctgaaacaaattgcatgaggaaacaagtgtatgtgtgtaaagtgtaatatatgtatatatatttaatatgggtatatacaacttaatatatacacatacatacaataacatatacaatttttttgttttgttttttgagatagagttttgctctctcatccaggctggagtgcagtgtcatgatctcggctcactgcaacttccactgcttggttctcctgcctcagcctcctgagtagctgggaatacaggcatctgccaccatgtccagctaactttgtttttttagtggagatgggtttttaccatgttggccaggctgctctcgaactcctgacctcaagtgatccrcccaccttggcctcccaaaatgctggaattacaggtgtgagccaccgtgcccagtct

SEQ ID NO: 144021 - DNA, 431 bp, Homo sapiens
gaattccatctcagctctgcttccaggaaacctgacccaagacagaggttgttgcaagggcagaggccacaggcatccacgccagcctctgtgtgttcagtctgtgagcggcccaacgctccccatgcactcctccttaaagcctactcaaccctggggtctgcaggcaagttcctcgcgggtgccttcccttgtcctggctgcygctctgcttcctttgcaagctccttctcgcaccgttgcgctggctccctccagagggctccatcccctgcccactgtgccttcgtgggtggtgcccagatctctgtctcctctgccctggacccctctgcccctgactggcagatctatagagttcaatgcccctggagggctccacgtccatcccacagggacccggactctcatcttcctcctgagtgtgctct

SEQ ID NO: 144022 - DNA, 431 bp, Homo sapiens
gaattccatctcagctctgcttccaggaaacctgacccaagacagaggttgttgcaagggcagaggccacaggcatccacgccagcctctgtgtgttcagtctgtgagcggcccaacgctccccatgcactcctccttaaagcctactcaaccctggggtctgcaggcaagttcctcgcgggtgccttcccttgtcctggctgctgctctgcttcctttgcaagctccttctcgcaccgttgcgctggctccctccagagggctccatcccctgcccactgtgccttygtgggtggtgcccagatctctgtctcctctgccctggacccctctgcccctgactggcagatctatagagttcaatgcccctggagggctccacgtccatcccacagggacccggactctcatcttcctcctgagtgtgctct

SEQ ID NO: 144023 - DNA, 345 bp, Homo sapiens
caagggcagaggccacaggcatccacgccagcctctgtgtgttcagtctgtgagcggcccaacgctccccatgcactcctccttaaagcctactcaaccctggggtctgcaggcaagttcctcgcgggtgccttcccttgtcctggctgctgctctgcttcctttgcaagctccttctcgcaccgttgcgctggctccctccagagggctccatcccctgcccactgtgccttcgtgggtggtgcccagatctctgtctcctctgccctggacccctctgcccctgactggcagatctatagagttcaatgcccctrgagggctccacgtccatcccacagggac

SEQ ID NO: 144024 - DNA, 289 bp, Homo sapiens
tattccgtgtagggtatcttaggcttcttgaatctatacatttgtgtcttctgcaaatttgaggtttttttgaagcactatttcttcaagtattctttcagcctcattttacttyttttctggtacacgtaataaaaatgttggatcttttgttgttgcctcacacatacctacatctctgttcattttatgtatcagtctgttttatttatgttgttcaaattggttaaattctactattctgccctcacattcactgattttaccttctcgcatctcaatggcacta

SEQ ID NO: 144025 - DNA, 289 bp, Homo sapiens
tattccgtgtagggtatcttaggcttcttgaatctatacatttgtgtcttctgcaaatttgaggtttttttgaagcactatttcttcaagtattctttcagcctcattttactttttttctggtacacgtaataaaaatgttggatcttttgttgttgcctcacacatacctacatctstgttcattttatgtatcagtctgttttatttatgttgttcaaattggttaaattctactattctgccctcacattcactgattttaccttctcgcatctcaatggcacta

SEQ ID NO: 144026 - DNA, 624 bp, Homo sapiens
taggtaagaggttgccatagaggttaaagaaggattcttcaggtggccccactgtctacaaccaatgggtcagcttctggatctcctctacctatgtttctacaatacctaagatgtttatcccaayacagtaagaggtgctggcaattgtatacacttctcccagttgagctaaaagaaagtctggagggccgagtgcggtgactcatgcctgtaatcccagcactttgggaggccaagataggtggattacctgaggtcaggagttcaagaccagccagacaaacatgcagaaaccctgtctctacaaaaaaaaaaaatacaaaattagccagcagtggtggtgcacgcctataatcccagctactctggagtctgaggcaagagaatcacttagacccgggaggcagaggttgcagtgagctgagatcataccactgcactccagcatgggcaacgagagcgaaactccatctcaaacaaaaagagtctggaacaattctgttgtttaaaataactttctaggtggatctgggagatgtttccttggcttctaagacagtggcaatggaggaggcaatatttgccatggtttgggacaggattattttcatttttttatga

SEQ ID NO: 144027 - DNA, 624 bp, Homo sapiens
taggtaagaggttgccatagaggttaaagaaggattcttcaggtggccccactgtctacaaccaatgggtcagcttctggatctcctctacctatgtttctacaatacctaagatgtttatcccaatacagtaagaggtgctggcaattgtatacacttctcccagttgagctaaaagaaagtctggagggccgagtgcggtgactcatgcctgtaatcccagcactttgggaggccaagataggtggatyacctgaggtcaggagttcaagaccagccagacaaacatgcagaaaccctgtctctacaaaaaaaaaaaatacaaaattagccagcagtggtggtgcacgcctataatcccagctactctggagtctgaggcaagagaatcacttagacccgggaggcagaggttgcagtgagctgagatcataccactgcactccagcatgggcaacgagagcgaaactccatctcaaacaaaaagagtctggaacaattctgttgtttaaaataactttctaggtggatctgggagatgtttccttggcttctaagacagtggcaatggaggaggcaatatttgccatggtttgggacaggattattttcatttttttatga

SEQ ID NO: 144028 - DNA, 381 bp, Homo sapiens
gaattctaggagcatccctagcacactcaatggggcaggacctgtaagttttccaggcatgactttgcccacccygcatttcagtcaccccagattgcccacagataaagatgtagccctctggcacacacagaccccctgtgctagtattatttatgaggatgaaggtattggcactcactagctaagtctcattgatggcagtagttgcctgagttttcctcatacattttaccccatacaatcctaaagcctctatgcagagggctagcactctccgatacttgttctcttcatcatcatgagcacacatctttgtaattaaaggagcctggtgcatcaaagcacctgcccaccaaagattcattagttgtggtcatg

SEQ ID NO: 144029 - DNA, 381 bp, Homo sapiens
gaattctaggagcatccctagcacactcaatggggcaggacctgtaagttttccaggcatgactttgcccaccctgcatttsagtcaccccagattgcccacagataaagatgtagccctctggcacacacagaccccctgtgctagtattatttatgaggatgaaggtattggcactcactagctaagtctcattgatggcagtagttgcctgagttttcctcatacattttaccccatacaatcctaaagcctctatgcagagggctagcactctccgatacttgttctcttcatcatcatgagcacacatctttgtaattaaaggagcctggtgcatcaaagcacctgcccaccaaagattcattagttgtggtcatg

SEQ ID NO: 144030 - DNA, 381 bp, Homo sapiens
gaattctaggagcatccctagcacactcaatggggcaggacctgtaagttttccaggcatgactttgcccaccctgcatttcagtcaccccagattgcccacagataaagatrtagccctctggcacacacagaccccctgtgctagtattatttatgaggatgaaggtattggcactcactagctaagtctcattgatggcagtagttgcctgagttttcctcatacattttaccccatacaatcctaaagcctctatgcagagggctagcactctccgatacttgttctcttcatcatcatgagcacacatctttgtaattaaaggagcctggtgcatcaaagcacctgcccaccaaagattcattagttgtggtcatg

SEQ ID NO: 144031 - DNA, 413 bp, Homo sapiens
cctagcacactcaatggggcaggacctgtaagttttccaggcatgactttgcccaccctgcatttcagtcaccccagattgcccacagataaagatgtagccctctggcacacacagaycccctgtgctagtattatttatgaggatgaaggtattggcactcactagctaagtctcattgatggcagtagttgcctgagttttcctcatacattttaccccatacaatcctaaagcctctatgcagagggctagcactctccgatacttgttctcttcatcatcatgagcacacatctttgtaattaaaggagcctggtgcatcaaagcacctgcccaccaaagattcattagttgtggtcatgacatttttccacaaagttatttaagttaaaagatagcacctttgaatt

SEQ ID NO: 144032 - DNA, 388 bp, Homo sapiens
cctagcacactcaatggggcaggacctgtaagttttccaggcatgactttgcccaccctgcatttcagtcaccccagattgcccacagataaagatgtagccctctggcacacacagaccccctgtgctagtattatttatgaggatgaaggtattgrcactcactagctaagtctcattgatggcagtagttgcctgagttttcctcatacattttaccccatacaatcctaaagcctctatgcagagggctagcactctccgatacttgttctcttcatcatcatgagcacacatctttgtaattaaaggagcctggtgcatcaaagcacctgcccaccaaagattcattagttgtggtcatgacatttttccacaaagttattta

SEQ ID NO: 144033 - DNA, 381 bp, Homo sapiens
gaattctaggagcatccctagcacactcaatggggcaggacctgtaagttttccaggcatgactttgcccaccctgcatttcagtcaccccagattgcccacagataaagatgtagccctctggcacacacagaccccctgtgctagtattatttatgaggatgaaggtattggcactcactagctragtctcattgatggcagtagttgcctgagttttcctcatacattttaccccatacaatcctaaagcctctatgcagagggctagcactctccgatacttgttctcttcatcatcatgagcacacatctttgtaattaaaggagcctggtgcatcaaagcacctgcccaccaaagattcattagttgtggtcatg

SEQ ID NO: 144034 - DNA, 412 bp, Homo sapiens
cctagcacactcaatggggcaggacctgtaagttttccaggcatgactttgcccaccctgcatttcagtcaccccagattgcccacagataaagatgtagccctctggcacacacagaccccctgtgctagtattatttatgaggatgaaggtattggcactcactagctaagtctcattgatggyagtagttgcctgagttttcctcatacattttaccccatacaatcctaaagcctctatgcagagggctagcactctccgatacttgttctcttcatcatcatgagcacacatctttgtaattaaaggagcctggtgcatcaaagcacctgcccaccaaagattcattagttgtggtcatgacatttttccacaaagttatttaagttaaaagatagcacctttgaat

SEQ ID NO: 144035 - DNA, 413 bp, Homo sapiens
cctagcacactcaatggggcaggacctgtaagttttccaggcatgactttgcccaccctgcatttcagtcaccccagattgcccacagataaagatgtagccctctggcacacacagaccccctgtgctagtattatttatgaggatgaaggtattggcactcactagctaagtctcattgatggcagtagttgcctgagttttcctcrtacattttaccccatacaatcctaaagcctctatgcagagggctagcactctccgatacttgttctcttcatcatcatgagcacacatctttgtaattaaaggagcctggtgcatcaaagcacctgcccaccaaagattcattagttgtggtcatgacatttttccacaaagttatttaagttaaaagatagcacctttgaatt

SEQ ID NO: 144036 - DNA, 459 bp, Homo sapiens
cacatccagtcaggtctttggtaagtctggtatacagcattaggctcctgagtcaatggagcacttcattttgggggtgaattctaggagcatccctagcacactcaatggggcaggacctgtaagttttccaggcatgactttgcccaccctgcatttcagtcaccccagattgcccacagataaagatgtagccctctggcacacacagaccccctgtgctagtattatttatgaggatgaaggtattggcactcactagctaagtctcattgatggcagtagttgcctgagttttcctcatacaktttaccccatacaatcctaaagcctctatgcagagggctagcactctccgatacttgttctcttcatcatcatgagcacacatctttgtaattaaaggagcctggtgcatcaaagcacctgcccaccaaagattcattagttgtggtcatg

SEQ ID NO: 144037 - DNA, 412 bp, Homo sapiens
ccctagcacactcaatggggcaggacctgtaagttttccaggcatgactttgcccaccctgcatttcagtcaccccagattgcccacagataaagatgtagccctctggcacacacagaccccctgtgctagtattatttatgaggatgaaggtattggcactcactagctaagtctcattgatggcagtagttgcctgagttttcctcatacattttaccccatacaatcctaaagcctctaygcagagggctagcactctccgatacttgttctcttcatcatcatgagcacacatctttgtaattaaaggagcctggtgcatcaaagcacctgcccaccaaagattcattagttgtggtcatgacatttttccacaaagttatttaagttaaaagatagcacctttgaa

SEQ ID NO: 144038 - DNA, 381 bp, Homo sapiens
gaattctaggagcatccctagcacactcaatggggcaggacctgtaagttttccaggcatgactttgcccaccctgcatttcagtcaccccagattgcccacagataaagatgtagccctctggcacacacagaccccctgtgctagtattatttatgaggatgaaggtattggcactcactagctaagtctcattgatggcagtagttgcctgagttttcctcatacattttaccccatacaatcctaaagcctctatgcagagggctagcactctccgatacttgttctcttcatcatcatgarcacacatctttgtaattaaaggagcctggtgcatcaaagcacctgcccaccaaagattcattagttgtggtcatg

SEQ ID NO: 144039 - DNA, 412 bp, Homo sapiens
cctagcacactcaatggggcaggacctgtaagttttccaggcatgactttgcccaccctgcatttcagtcaccccagattgcccacagataaagatgtagccctctggcacacacagaccccctgtgctagtattatttatgaggatgaaggtattggcactcactagctaagtctcattgatggcagtagttgcctgagttttcctcatacattttaccccatacaatcctaaagcctctatgcagagggctagcactctccgatacttgttctcttcatcatcatgagcacacatcyttgtaattaaaggagcctggtgcatcaaagcacctgcccaccaaagattcattagttgtggtcatgacatttttccacaaagttatttaagttaaaagatagcacctttgaat

SEQ ID NO: 144040 - DNA, 412 bp, Homo sapiens
cctagcacactcaatggggcaggacctgtaagttttccaggcatgactttgcccaccctgcatttcagtcaccccagattgcccacagataaagatgtagccctctggcacacacagaccccctgtgctagtattatttatgaggatgaaggtattggcactcactagctaagtctcattgatggcagtagttgcctgagttttcctcatacattttaccccatacaatcctaaagcctctatgcagagggctagcactctccgatacttgttctcttcatcatcatgagcacacatctttgtaattaaaggagcctggtgcatcaaagcacctrcccaccaaagattcattagttgtggtcatgacatttttccacaaagttatttaagttaaaagatagcacctttgaat

SEQ ID NO: 144041 - DNA, 399 bp, Homo sapiens
cctagcacactcaatggggcaggacctgtaagttttccaggcatgactttgcccaccctgcatttcagtcaccccagattgcccacagataaagatgtagccctctggcacacacagaccccctgtgctagtattatttatgaggatgaaggtattggcactcactagctaagtctcattgatggcagtagttgcctgagttttcctcatacattttaccccatacaatcctaaagcctctatgcagagggctagcactctccgatacttgttctcttcatcatcatgagcacacatctttgtaattaaaggagcctggtgcatcaaagcacctgcccaccaaagattcrttagttgtggtcatgacatttttccacaaagttatttaagttaaaagat

SEQ ID NO: 144042 - DNA, 635 bp, Homo sapiens
ctcagtaagctaggacttagggtccattactgtactctgtggcattaggagtgctggagtagttaaccacaggcaagatgaaaggatcgttctagtcaatgagagaacgaggtcgtggatggagcatccagcactttgtcaggttacccatggtgtaaccatggcactttggaagaggccactaaggcattatgctcacaggcctataatgccccatccatgtggaaaagcagactgacagtttaatgcccacctctcaccctttccagggtctcagatgttctctacctattgrataagaattaggctgagttggtatagcaacccggtctgtctgttttagtcccaagctacttctgcagacatccattgcccttgttgcttgactcaaacctttctgcctcaatcatccactccagtacaaagctggcatatctcataacatcatccacccaaatggaaggatcagaggcatccagcatcattagagggattctagcagtctgtcattccttagtcctgtccccgacccctgtggaatccccttataggggaggtacccaagggaagtataaactccagattagagacagggtggcctctctggggtactatggcaccctgaactgcaattc

SEQ ID NO: 144043 - DNA, 635 bp, Homo sapiens
ctcagtaagctaggacttagggtccattactgtactctgtggcattaggagtgctggagtagttaaccacaggcaagatgaaaggatcgttctagtcaatgagagaacgaggtcgtggatggagcatccagcactttgtcaggttacccatggtgtaaccatggcactttggaagaggccactaaggcattatgctcacaggcctataatgccccatccatgtggaaaagcagactgacagtttaatgcccacctctcaccctttccagggtctcagatgttctctacctattgaataagaattaggctgagttggtatagcaacccggtctgtctgttttagtcccaagctacttctgcagacatccattgcccttgttgcttgactcaaacctttctgcctcaatcatccactccagtacaaagctggcatatctcataacatcatccacccaaatggaaggatcagaggcatccagcatcattagagggattctagcagtctgtcattccttagtcctgtccccgacccctgtggaatccccttatagrggaggtacccaagggaagtataaactccagattagagacagggtggcctctctggggtactatggcaccctgaactgcaattc

SEQ ID NO: 144044 - DNA, 438 bp, Homo sapiens
tgcttgcttcttgatcataggatctcagccawggttcatatttgaataacacagaatgttggccacagaactaaggactggacatttggtcatttgtgactgtcgttacaggaaagtaaatggttttgttacactgcttgtcaggaaaaagaataggaaggcaccttctatctcaggctcttttccttaaagaaggtaggtttaatgtaaaacctgaattgtgagtaagcctggggatatcatttttagctgttccaaattgagcaagtacttagtcaaactaccagagttttggaatatgcctgagtaagccagtctgaaatagccgatggtccagcttaagactattcaatatccatgcacctgccttttctaaagcttaaacttcaaaagagtaacagtaacaagtacatgatcctgtcaaatataattcaaata

SEQ ID NO: 144045 - DNA, 438 bp, Homo sapiens
tgcttgcttcttgatcataggatctcagccaaggttcatatttgaataacacagaatgtyggccacagaactaaggactggacatttggtcatttgtgactgtcgttacaggaaagtaaatggttttgttacactgcttgtcaggaaaaagaataggaaggcaccttctatctcaggctcttttccttaaagaaggtaggtttaatgtaaaacctgaattgtgagtaagcctggggatatcatttttagctgttccaaattgagcaagtacttagtcaaactaccagagttttggaatatgcctgagtaagccagtctgaaatagccgatggtccagcttaagactattcaatatccatgcacctgccttttctaaagcttaaacttcaaaagagtaacagtaacaagtacatgatcctgtcaaatataattcaaata

SEQ ID NO: 144046 - DNA, 438 bp, Homo sapiens
tgcttgcttcttgatcataggatctcagccaaggttcatatttgaataacacagaatgttggccacagaactaaggactggacatttggtcmtttgtgactgtcgttacaggaaagtaaatggttttgttacactgcttgtcaggaaaaagaataggaaggcaccttctatctcaggctcttttccttaaagaaggtaggtttaatgtaaaacctgaattgtgagtaagcctggggatatcatttttagctgttccaaattgagcaagtacttagtcaaactaccagagttttggaatatgcctgagtaagccagtctgaaatagccgatggtccagcttaagactattcaatatccatgcacctgccttttctaaagcttaaacttcaaaagagtaacagtaacaagtacatgatcctgtcaaatataattcaaata

SEQ ID NO: 144047 - DNA, 438 bp, Homo sapiens
tgcttgcttcttgatcataggatctcagccaaggttcatatttgaataacacagaatgttggccacagaactaaggactggacatttggtcatttgtgactgtygttacaggaaagtaaatggttttgttacactgcttgtcaggaaaaagaataggaaggcaccttctatctcaggctcttttccttaaagaaggtaggtttaatgtaaaacctgaattgtgagtaagcctggggatatcatttttagctgttccaaattgagcaagtacttagtcaaactaccagagttttggaatatgcctgagtaagccagtctgaaatagccgatggtccagcttaagactattcaatatccatgcacctgccttttctaaagcttaaacttcaaaagagtaacagtaacaagtacatgatcctgtcaaatataattcaaata

SEQ ID NO: 144048 - DNA, 540 bp, Homo sapiens
tttaccacttgacagaaaatccaaaaggcatctgaggagtccaactccaggcagaaaccctatgtgtaacctttcaggcctaaccataggccatgacaatgrctttacctggcaggcctcactagagaaagatactctccctataccagaattggcaaacagccagtgcattacaatatctaatgggagctgcagtctaggactcattccccgctagccaaccatcctcctgtgcatgtctgccattcaagtctcaggcacccccatctgagctatccttattagggaccctcaatagaaaacctttgcagagaactccttatgatagggagagagggataagggagaggagaaaggggaaacattgaaatcattattctctattctgaatctgaactcagtattttcccattcttagcccttcctcctctttctgtcccaaggacccaggtccataagatgaaaggagctttttgttcatggctccttggtcaaaagatccttgctgagaaaattcccacatctgcatttgtgctgagc

SEQ ID NO: 144049 - DNA, 577 bp, Homo sapiens
actcattccccgctagccaaccatcctcctgtgcatgtctgccattcaagtctcaggcacccccatctgagctatccttattagggaccctcaatagaaaacctttgcagagaactccttatgatagggagagagggataagggagaggagaaaggggaaacattgaaatcattattctctattctgaatcwgaactcagtattttcccattcttagcccttcctcctctttctgtcccaaggacccaggtccataagatgaaaggagctttttgttcatggctccttggtcaaaagatccttgctgagaaaattcccacatctgcatttgtgctgagctacatgaccttggcctggagctgtttcatgggacaaaatggaacattggaggagctagcgatctttcctctttagtttcttgcttaaactatctcagttagtaaagatttgactgttactgtcattttggcttattgttttaattagctatttcaactccatggcagcttagctcttgacagcattctggaaagtacataggattctagacatttttactgcttttgttatatgaatt

SEQ ID NO: 144050 - DNA, 577 bp, Homo sapiens
actcattccccgctagccaaccatcctcctgtgcatgtctgccattcaagtctcaggcacccccatctgagctatccttattagggaccctcaatagaaaacctttgcagagaactccttatgatagggagagagggataagggagaggagaaaggggaaacattgaaatcattattctctattctgaatctgaactcagtrttttcccattcttagcccttcctcctctttctgtcccaaggacccaggtccataagatgaaaggagctttttgttcatggctccttggtcaaaagatccttgctgagaaaattcccacatctgcatttgtgctgagctacatgaccttggcctggagctgtttcatgggacaaaatggaacattggaggagctagcgatctttcctctttagtttcttgcttaaactatctcagttagtaaagatttgactgttactgtcattttggcttattgttttaattagctatttcaactccatggcagcttagctcttgacagcattctggaaagtacataggattctagacatttttactgcttttgttatatgaatt

SEQ ID NO: 144051 - DNA, 577 bp, Homo sapiens
actcattccccgctagccaaccatcctcctgtgcatgtctgccattcaagtctcaggcacccccatctgagctatccttattagggaccctcaatagaaaacctttgcagagaactccttatgatagggagagagggataagggagaggagaaaggggaaacattgaaatcattattctctattctgaatctgaactcagtattttcccattcttagcccttcctcctctttctgtcccaaggacccaggtccataagatgaaaggagctttttgttcatggctccttggtcaaaakatccttgctgagaaaattcccacatctgcatttgtgctgagctacatgaccttggcctggagctgtttcatgggacaaaatggaacattggaggagctagcgatctttcctctttagtttcttgcttaaactatctcagttagtaaagatttgactgttactgtcattttggcttattgttttaattagctatttcaactccatggcagcttagctcttgacagcattctggaaagtacataggattctagacatttttactgcttttgttatatgaatt

SEQ ID NO: 144052 - DNA, 577 bp, Homo sapiens
actcattccccgctagccaaccatcctcctgtgcatgtctgccattcaagtctcaggcacccccatctgagctatccttattagggaccctcaatagaaaacctttgcagagaactccttatgatagggagagagggataagggagaggagaaaggggaaacattgaaatcattattctctattctgaatctgaactcagtattttcccattcttagcccttcctcctctttctgtcccaaggacccaggtccataagatgaaaggagctttttgttcatggctccttggtcaaaagatccttgctgagaaaattcccacatctgcatttgtgctgakctacatgaccttggcctggagctgtttcatgggacaaaatggaacattggaggagctagcgatctttcctctttagtttcttgcttaaactatctcagttagtaaagatttgactgttactgtcattttggcttattgttttaattagctatttcaactccatggcagcttagctcttgacagcattctggaaagtacataggattctagacatttttactgcttttgttatatgaatt

SEQ ID NO: 144053 - DNA, 495 bp, Homo sapiens
actgtacttataagtgaatccactgtcattactatagttcaggtcaccttaagtttcttcttggacttgccaatgaactgtggaattaagaagctctctgcctacagtcttgtttatctattgtaatctgtttcttgtagtccctattttagatctcattaatgtcttgtcacttccattagaataaattataaacactttggatgkcctgaagacatttgtaatttatcctaaactcatctctactctcatcgcttgacatctccctcttctacccacacatatatatttaagcccacgtaattactgcaattaccccaaattctgtacttctcaccagtgtcttgcaaaacccactccatctaactaataagacttttcatttaactctccagttgtagttgatattctagtttcaaactctattttctctgtgaaggctgtactgatatcacaattttgtttcttcagtgtgagcattggcagcctgtggcc

SEQ ID NO: 144054 - DNA, 495 bp, Homo sapiens
actgtacttataagtgaatccactgtcattactatagttcaggtcaccttaagtttcttcttggacttgccaatgaactgtggaattaagaagctctctgcctacagtcttgtttatctattgtaatctgtttcttgtagtccctattttagatctcattaatgtcttgtcacttccattagaataaattataaacactttggatggcctgaagacatttgtaatttatcctaaactcatctctactctcatcgcttgacatctccctcttctacccacacatatatatttaagcccacgtaattactgcaattaccccaaattctgtacttctcaccagtgtcttgcaaaacccactccatctaamtaataagacttttcatttaactctccagttgtagttgatattctagtttcaaactctattttctctgtgaaggctgtactgatatcacaattttgtttcttcagtgtgagcattggcagcctgtggcc

SEQ ID NO: 144055 - DNA, 523 bp, Homo sapiens
ctgtactgatatcacaattttgtttcttcagtgtgagcattggcagcctgtggcctatggttttggtacagcctgcaaggtaataatggtttttagagatttaaatgattgaaacaattttttaaaataacattttgtagcatataacgattgcagaaagtaaaaactgcagtgttttcataaataacaaggtttttttttggacacaagatcattcacttacatgtggtctatagatgttttcaggctattatgtcagagttgagtggttgcaacagaaactgcatgattgtcaaagcctaacatacttaaaatctgaccctttgtagaaaaagctaacatttgatctaaagttttctgtaaagatacatctacattatgtttatcgtaatttatatttatctgcctactgtttgcagttttgaaaaactataatcttccagaaaatggaaactayaatatttttaattagacctcaagcaaaattattttaaaatgtggtctcaatttttaagaaagtggg

SEQ ID NO: 144056 - DNA, 541 bp, Homo sapiens
actttgttatttcatttcatttaaatttagcataaactttacttcggcagccaattccttagttgttcttctccattaactcatgactactttagctcttgatgctaagcatgatgatgtttggtttcagaagttgccacattaacaataggatccttsaagctacaatcatgctaaccaattttgacaattttatattttatagggcctagttctaacattctattgttatttaattttataaatatttttaaaaatcttgttactaaattaaaaatagacctctggaaaataaatcgaaaggtttttttgttttttgttttttgagacagagtctcactcactctatcactcaggctagagtgcagcagcctgatcttggctcactgcaacctctgcttcctgggttcaagcgattctgctgcctcagtctcccaagtacctgagaatacaggtgcccacaaccatgcccagataatttttgtacttttagtagagatggggttttgccatgttggccaggctggtctcaactcctgac

SEQ ID NO: 144057 - DNA, 492 bp, Homo sapiens
tttattttagtttttgtgagttgttcttctagagtatgttatatgactctatgccctcagtttgaaactctcattgaaccatatctaaattaactaataaaatgaactttgaattayatatgccactgtgtgcaaattaacattcattgactgtatgtgtatgtaaatattggccagtaaacagagccatttacatcttcataaagagaataacacttccaactaaaattccttctaaaattggactcatatcaattggaagtatttcaaacaattactaaactgatttacttgaacaaatatagaaaatattatctaagctatgtgtacctatttttttatattcctagaaattagggggaacttttatttcctttgattgaatatgagtttctaacttaacaaaatatataatagtgagtcagtaaaatgaatacttttaccaaggatggaaagtgttctgaattatctaaaagacattttcattgcagt

SEQ ID NO: 144058 - DNA, 492 bp, Homo sapiens
tttattttagtttttgtgagttgttcttctagagtatgttatatgactctatgccctcagtttgaaactctcattgaaccatatctaaattaactaataaaatgaactttgaattatatatgccactgtgtgcaaattaacattcattgactgtatgtgtatgtaaatattggccagtaaacagagccatttacatcttcataaagagaataacacttccaactaaaattccttctaaaattggactcatatcaattrgaagtatttcaaacaattactaaactgatttacttgaacaaatatagaaaatattatctaagctatgtgtacctatttttttatattcctagaaattagggggaacttttatttcctttgattgaatatgagtttctaacttaacaaaatatataatagtgagtcagtaaaatgaatacttttaccaaggatggaaagtgttctgaattatctaaaagacattttcattgcagt

SEQ ID NO: 144059 - DNA, 492 bp, Homo sapiens
tttattttagtttttgtgagttgttcttctagagtatgttatatgactctatgccctcagtttgaaactctcattgaaccatatctaaattaactaataaaatgaactttgaattatatatgccactgtgtgcaaattaacattcattgactgtatgtgtatgtaaatattggccagtaaacagagccatttacatcttcataaagagaataacacttccaactaaaattccttctaaaattggactcatatcaattggaagtatttcaaacaattactaaactgatttacttgracaaatatagaaaatattatctaagctatgtgtacctatttttttatattcctagaaattagggggaacttttatttcctttgattgaatatgagtttctaacttaacaaaatatataatagtgagtcagtaaaatgaatacttttaccaaggatggaaagtgttctgaattatctaaaagacattttcattgcagt

SEQ ID NO: 144060 - DNA, 554 bp, Homo sapiens
tgttgaattctcagtaaggataatccaggtayttcacttccatttatcctttgtaacatttacttaatacacactttgtgctcttatcgaacttttctgttatatttttaaaaggtttatttgccctccaggttaactggagaaatagtgttttattcaaagttatgaagaaggacttcctcattctattatttctacacaaatatttattacaaatatatagattacttaagtagctacttatctgatgacttacaaaatgatttgagaacaatttaaagttacgtggtgtgctttctgtacacataacccacatactaagtaatttataaaaatccataaaataggaaattaacttaaaggtcactaggctctcagaagaataaatgacctttgatgctggaaataacttactatttttttcaggttttgcataatatattatgtatcactgttctcaagatatttcttataaaaattaaaagaaaactcacacagaatgaactgttataaaatatgtaaaattttagaaactctcataattatatgaatac

SEQ ID NO: 144061 - DNA, 554 bp, Homo sapiens
tgttgaattctcagtaaggataatccaggtatttcacttccatttatcctttgtaacatttacttaatacacactttgtgctcttatcgaacttttctgttatatttttaaaaggtttatttgccctccaggttaactggagaaatagtgttttattcaaagttatgaaraaggacttcctcattctattatttctacacaaatatttattacaaatatatagattacttaagtagctacttatctgatgacttacaaaatgatttgagaacaatttaaagttacgtggtgtgctttctgtacacataacccacatactaagtaatttataaaaatccataaaataggaaattaacttaaaggtcactaggctctcagaagaataaatgacctttgatgctggaaataacttactatttttttcaggttttgcataatatattatgtatcactgttctcaagatatttcttataaaaattaaaagaaaactcacacagaatgaactgttataaaatatgtaaaattttagaaactctcataattatatgaatac

SEQ ID NO: 144062 - DNA, 486 bp, Homo sapiens
atatccttatcttataacatctggctgctccgtgatggccattaaatccctgctaggaattaggaatccattcctgtttcagggtcctcttcatcaccttcaaattrtttatgtacagtgtacttttgaaggctatacactttatatttttaacatttaaaaaacgaatattgatgctatttattcacagctaagtatatacacatttaaatattaatccaatatacatgtatttggtgcacattacacgctgagtacttttctaggccctgaggctagagctgggcacaacggagacaagtccttgctttgtgaagcagaaaacagatgacttccagtaaagtgctaagttgtgcttgggaaaaataaaattagaaaagcagctagaaggtgtactggagatgacaagaaactgagaagagaggttgctgttatatagaaagggcggagaaggcttctagcaaaaagcagcattttaccagctat

SEQ ID NO: 144063 - DNA, 474 bp, Homo sapiens
tataacatctggctgctccgtgatggccattaaatccctgctaggaattaggaatccattcctgtttcagggtcctcttcatcaccttcaaattatttatgtacagtgtacttttgaaggctatacactttatatttttaacatttaaaaaacraatattgatgctatttattcacagctaagtatatacacatttaaatattaatccaatatacatgtatttggtgcacattacacgctgagtacttttctaggccctgaggctagagctgggcacaacggagacaagtccttgctttgtgaagcagaaaacagatgacttccagtaaagtgctaagttgtgcttgggaaaaataaaattagaaaagcagctagaaggtgtactggagatgacaagaaactgagaagagaggttgctgttatatagaaagggcggagaaggcttctagcaaaaagcagcattttaccagctat

SEQ ID NO: 144064 - DNA, 474 bp, Homo sapiens
tataacatctggctgctccgtgatggccattaaatccctgctaggaattaggaatccattcctgtttcagggtcctcttcatcaccttcaaattatttatgtacagtgtacttttgaaggctatacactttatatttttaacatttaaaaaacgaatattgatgctatttattcacagctaagtatatacamatttaaatattaatccaatatacatgtatttggtgcacattacacgctgagtacttttctaggccctgaggctagagctgggcacaacggagacaagtccttgctttgtgaagcagaaaacagatgacttccagtaaagtgctaagttgtgcttgggaaaaataaaattagaaaagcagctagaaggtgtactggagatgacaagaaactgagaagagaggttgctgttatatagaaagggcggagaaggcttctagcaaaaagcagcattttaccagctat

SEQ ID NO: 144065 - DNA, 486 bp, Homo sapiens
atatccttatcttataacatctggctgctccgtgatggccattaaatccctgctaggaattaggaatccattcctgtttcagggtcctcttcatcaccttcaaattatttatgtacagtgtacttttgaaggctatacactttatatttttaacatttaaaaaacgaatattgatgctatttattcacagctaagtatatacacatttaaatattaatccaatatacatgtatttggtgcacattacacgctgagtacttttctaggccctgaggctagagcygggcacaacggagacaagtccttgctttgtgaagcagaaaacagatgacttccagtaaagtgctaagttgtgcttgggaaaaataaaattagaaaagcagctagaaggtgtactggagatgacaagaaactgagaagagaggttgctgttatatagaaagggcggagaaggcttctagcaaaaagcagcattttaccagctat

SEQ ID NO: 144066 - DNA, 590 bp, Homo sapiens
actgtttccaaagtcgtcatttattcgttcgttcgttcattcattcattcattcattcacttcacaaatactgagtgagtatgtataccttctatattgcagttacatttytaggcattggggttacagctgtgaacaaaactgaaagaaccctgaactcatggaagcttactttgatgaaagagtacatttcatttttttcccatgtgaatgttctgttttcaaagcaccatttactgaaaagattatttttttttctttaggactctgcagtgccgttactgttatatatgaagtgtccatttatatgtgagtcattgcctatcttggttatgctccattgatttatttgtcaatttctgtgacaatatcatattgtctttatcattttactttataatcattgttaatatttagtacatcaagaactcccacctcattttttaaaagaatgttttggatagtcttggcctttaaattttccataaagtttaaaatcagtctgtcaaattctgtcaaaaaaaaaaaaaccctcctgggaatatttattgggattgaactgaatcattaaatcattttagagtgaactg

SEQ ID NO: 144067 - DNA, 512 bp, Homo sapiens
aaaagttatctggcatgaggtgacacaaaaaagagaggagtttcagctactaattgatatggtacccatagtgagggtgtggaggggacatccaggcttttttcctcctcctaccctcctctcttttgttagtatttttcatcagagagcaagggagtctgggtaatatggacctctgccacactgagcagagcacaggaaaaaatggaagattcaagagtaaacaggcaaatgtctacacagtccaatcactgtgccacaaagcacccatttttacccttctatccatacttaactttcataaaatgacttagtgcttccacctactagaattcaattaacttttgcacaaatggacactctcttcccaaaaagatggaacacaaagtaccatctgacayagtgtctctcaccatgtccaggaagcccacatgaagtgagttcctctccatcagaactgtacttggctcctcacagttttgtgaactctgatctaaactaataaaagaata

SEQ ID NO: 144068 - DNA, 612 bp, Homo sapiens
ttcaaaattcagtcaagatgaatgaaaggcagcctgatagagtgaaaaaagcatgaatcctgtcctccggcagacctgcatttgaccaaattaatttagttaatacctgtatgaatttgggcaagttatctaacatctttcaccttggtcttctcatttgtaaaatgggattataataccttcgtcagaaccacagatccaacaagaacagcaactttyattggatactgcttaaattccaggcacaggcacagggctaagaacttttcattatgactcttaaactttgtcaaacaatgaagtgaagactataattttacagaggaggtaactgggaattaaggtgttaagcaacttgcccaaggtcagacatttagcaaatcatggaacctgaaagtaagcccagccacacaatgaccgaagttgaactctttattactgggtaataagaacagtaatgaaaacaagaataataacaaaccacacagtattccaaactctttaaaatattagattatttaattctcagtgataccctttcagaacatgcaagtgatatagaatctcaggttcaacactctgtatatatataaccatatatgcatatatcta

SEQ ID NO: 144069 - DNA, 587 bp, Homo sapiens
tgttgaactgcgtatcgtagttgccgaggttgtggcggtgtgggacaacagtctgcagtgacatggaaaagcaaactggacrctcttctcataatcgatacatacttaagatatacttaacctctcctccgaggcagttttttttcacttgttccagagtctgagtttaggatatcacacgagcaactgttacctaccaattagtaggtaacagttagcatgtaggttgtgactccatgaagaccttgctttgtccaaccaaacatggatggattcccttacacctaaaacttaagtaatttagctttaaaaatgtatcatggctctggaaaagtctgtaggaggcttgtctccagggacatggtgatgtgtaagcacagagtatctagggccagaaagccacatcagatatccttcggaaaccagtctctgagattttggaacaaaatgtgtcccaccgtatctctgggtccaactttctttttttttttttcccctctccctcactgtctttaatttattgccttctggttctttctcacggtttctaattctgctcaggccttatcccatttctaggatatttt

SEQ ID NO: 144070 - DNA, 587 bp, Homo sapiens
tgttgaactgcgtatcgtagttgccgaggttgtggcggtgtgggacaacagtctgcagtgacatggaaaagcaaactggacactcttctcatartcgatacatacttaagatatacttaacctctcctccgaggcagttttttttcacttgttccagagtctgagtttaggatatcacacgagcaactgttacctaccaattagtaggtaacagttagcatgtaggttgtgactccatgaagaccttgctttgtccaaccaaacatggatggattcccttacacctaaaacttaagtaatttagctttaaaaatgtatcatggctctggaaaagtctgtaggaggcttgtctccagggacatggtgatgtgtaagcacagagtatctagggccagaaagccacatcagatatccttcggaaaccagtctctgagattttggaacaaaatgtgtcccaccgtatctctgggtccaactttctttttttttttttcccctctccctcactgtctttaatttattgccttctggttctttctcacggtttctaattctgctcaggccttatcccatttctaggatatttt

SEQ ID NO: 144071 - DNA, 587 bp, Homo sapiens
tgttgaactgcgtatcgtagttgccgaggttgtggcggtgtgggacaacagtctgcagtgacatggaaaagcaaactggacactcttctcataatcgatacatacttargatatacttaacctctcctccgaggcagttttttttcacttgttccagagtctgagtttaggatatcacacgagcaactgttacctaccaattagtaggtaacagttagcatgtaggttgtgactccatgaagaccttgctttgtccaaccaaacatggatggattcccttacacctaaaacttaagtaatttagctttaaaaatgtatcatggctctggaaaagtctgtaggaggcttgtctccagggacatggtgatgtgtaagcacagagtatctagggccagaaagccacatcagatatccttcggaaaccagtctctgagattttggaacaaaatgtgtcccaccgtatctctgggtccaactttctttttttttttttcccctctccctcactgtctttaatttattgccttctggttctttctcacggtttctaattctgctcaggccttatcccatttctaggatatttt

SEQ ID NO: 144072 - DNA, 587 bp, Homo sapiens
tgttgaactgcgtatcgtagttgccgaggttgtggcggtgtgggacaacagtctgcagtgacatggaaaagcaaactggacactcttctcataatcgatacatacttaagatatacttaacctctcctccgaggcagttttttttcacttgttccagagtctgagtttaggatatcacacgagcaactgttacctacyaattagtaggtaacagttagcatgtaggttgtgactccatgaagaccttgctttgtccaaccaaacatggatggattcccttacacctaaaacttaagtaatttagctttaaaaatgtatcatggctctggaaaagtctgtaggaggcttgtctccagggacatggtgatgtgtaagcacagagtatctagggccagaaagccacatcagatatccttcggaaaccagtctctgagattttggaacaaaatgtgtcccaccgtatctctgggtccaactttctttttttttttttcccctctccctcactgtctttaatttattgccttctggttctttctcacggtttctaattctgctcaggccttatcccatttctaggatatttt

SEQ ID NO: 144073 - DNA, 440 bp, Homo sapiens
tgtttctataaaaagataaacaaggaaaagacgacacggagccacggagaatggcctgcgcctgatgatactcccacacatccttctgtaactcactgccaccagacacatttcacccagcgctggtcctggtatcagctgttaagacttcatttatttggtactttctacctaaaagatcactataaatacccaagttctcgcattttctcctgctgactcattgaatcatcaagggcccttgtcacaatgtgcaccacacaccaaaatatgcccagtggtcagcaaggtcatttctcattgcaggccttaggagccgccctgttgctgtaagctggctagcacytccttggccttctggaaactctcatgtatcctgcttgcaggattcaaacccaggtcagttctctgaaagactttccatcttctccttatctttg

SEQ ID NO: 144074 - DNA, 440 bp, Homo sapiens
tgtttctataaaaagataaacaaggaaaagacgacacggagccacggagaatggcctgcgcctgatgatactcccacacatccttctgtaactcactgccaccagacacatttcacccagcgctggtcctggtatcagctgttaagacttcatttatttggtactttctacctaaaagatcactataaatacccaagttctcgcattttctcctgctgactcattgaatcatcaagggcccttgtcacaatgtgcaccacacaccaaaatatgcccagtggtcagcaaggtcatttctcattgcaggccttaggagccgccctgttgctgtaagctggctagcacctccttggcctyctggaaactctcatgtatcctgcttgcaggattcaaacccaggtcagttctctgaaagactttccatcttctccttatctttg

SEQ ID NO: 144075 - DNA, 552 bp, Homo sapiens
aaacaacgacaaaaataagcccgatttcctttttcagcgctgcatttgacatgttggtgcattttttcatctgtgacaatgcaacgttcaaaatcatatttatgctgttgtttcatattcacaggtgccaagatgcagagacagggatattaaatctttatagggatatgcttctaacaggctgatatcgcaaaaayaagccagtggattctagctggttaggattcaggaagttctaacacaatctgtgctattccaaggcttgaattatttgaggggggtagcaactatcttgaagaaccaggcagagcaggatggcgttaagccacaggcattataaaatctagaattagagctctcctcattcagatctcaagaccgccctctataacctgtggccactgtactacctcttgggatacccagggtaaataaataaataatcactaagtagcctatggaatttatatttacataatcaaaatgtattactgtcaaccaattcactaatgttctgtggtttttatttttaattgggaaaggcacttctag

SEQ ID NO: 144076 - DNA, 578 bp, Homo sapiens
agtgcatcacctttgccttgggaaagtatataatgacacctcagtttttaccgttaaaaaaaattggttaggaaaaagaagtcaaaggcatttcaataggtaaaataaaatgtagacaggagaagacaaaaaacccctacagacgtggaggtgtgaaagagaccagattcatcttacattagatgaactccaggtaagattggtggagggaccagctgggttggggatgtctgtaaatcagcgattaagttggtggaaagtagatgtaacaattaaacctaaatatttattgggcacgtattctgtgaatgwctttgaatgactttatgtgtttcatctcatttaactccttaaatgacccaaggacaggtattattcttgggtccactttaaagaagagaggaagtatatgtaacacttttcttcttctgaatatacaaggttttcttctctcagatagatattctggcttgggagatcaatttcttcaatgtctgtactgaaaaaattggaatctcatgatatgacaaggtgttaagggcagcaacaactgaacctgtttccatgaaacaaacagt

SEQ ID NO: 144077 - DNA, 565 bp, Homo sapiens
agaatggtaacagtggttaccctgggttgaaagatccaaagagatttcatttttttctttttgccttatacttagtatcaacttttactggtgaaaatgcattcttcttttaataagaaaatatccaataagaaatattcaataaggaaataccaatgtgattggtagcatctgacagacacattaagttttctacatmtctttaccatagttctgatttgtgcttgcccatgagatctgtaagcccacttaggaaatatctagcctgactaaagaagggcaaatgattcatctgggaaatgtgggaagagctgaagaaggcctttggcaactgcaataggtctcctctcccctatccagagttctgcttagaaagtcctgatgattggctgggtagtgaaggaagatgttgagtcactaattctaacctggctgaggcccaagccttgggtcacatgacttgttacatatcatccacactgggtgattttttagagtgaagggaggtgatactaatttcacattgtaaaaatagacatctactactctcctgggcaaaccagga

SEQ ID NO: 144078 - DNA, 565 bp, Homo sapiens
agaatggtaacagtggttaccctgggttgaaagatccaaagagatttcatttttttctttttgccttatacttagtatcaacttttactggtgaaaatgcattcttcttttaataagaaaatatccaataagaaatattcaataaggaaataccaatgtgattggtagcatctgacagacacattaagttttctacatatctttaccatagttctgatttgtgcttgcccatgagatctgtaagcccacttaggaaatatctagcctgactaaagaagggcaaatgattcatctgggaaatgtgggaagagctgaagaaggcctttggcaactgcaataggtctcctctcccctatccagagttctgcttagaaagtcctgatgaytggctgggtagtgaaggaagatgttgagtcactaattctaacctggctgaggcccaagccttgggtcacatgacttgttacatatcatccacactgggtgattttttagagtgaagggaggtgatactaatttcacattgtaaaaatagacatctactactctcctgggcaaaccagga

SEQ ID NO: 144079 - DNA, 565 bp, Homo sapiens
gaaaagaaagagaaatggatactagaggatgaatgctgaaatagatgtctgaacaaagggttgctagaacaaaggatggagggattaaccctsatatctataagaagtacccatgaaacactacacatccagggatcatttctatagttcaatactagagaagtttctctgaacatgtagaccactgcctgaaggcagctagagagaaaagtcaggtcacttacgaagaaaaccccatcaggctagcagaagacctttcaagagaaaccttacaagacagaagatattggaggcctatttttagtagaaaagaaactaaaaccaagaataccatatcatgccaaactaagcttcataagcaaaagagaaatacaatccttctcagacaagaactaggggaatttgttaccaccagaccagccttataagatatacttaaagaagtgctgaacatggaaacaaaagattgaaacttgctaccacaaaaacacacccaagcacatagcccacagacaatataaagcaattattcaagtctacaaaacaaacagctaacaacatgatg

SEQ ID NO: 144080 - DNA, 310 bp, Homo sapiens
aggattttatttatttatttacgtttattttcctccttttttgtcaaggtatgccagaggcagtgtcaacagccatgcttctattttgtcccatgtggacaytggagtgggagtggtgggcaacctgccctgggtccatcatgccccttggtggaattcctgtggccaagggactttgagtcaaaagacttagagccaatgaagtactctaggccagatgggaatgtaggtgggcaggcactcattaatcttaaacccccttcagcaacatgagaaccaaaaatcaaaagccaaaaggcaaggttacaaa

SEQ ID NO: 144081 - DNA, 520 bp, Homo sapiens
ccttctccgtggtgcctcgatggaggattccgcccacaggacccaggggtgaccagaggactctggcccgtggcaggggcctggtgtgcactgaggtctgaggtcagctcagtgctggtgcatacagagccatgctgtcaggaacccgggtttggagctggcactgactggggctgactccagcccttctccacctttggcaacagtgaggcgggggcagcccagcagagatgggatagggcaggcgtgggctcctgtgtcctgaggctgggctgcctggggcacagctcaagaggaagccagggcctgcrcctggtgcctgtgacagagcagccctcacatccttatggccacaccattggccttgtcaccctgcaggctcctatgcagagagagcaggcctggggccagcaggtgttagggactctgcttacccagtcctgggtgtgtgaaccaagggtgaggacagggagggagggagttggaggctgagaaatgagaaatggatggaggcggccag

SEQ ID NO: 144082 - DNA, 520 bp, Homo sapiens
ccttctccgtggtgcctcgatggaggattccgcccacaggacccaggggtgaccagaggactctggcccgtggcaggggcctggtgtgcactgaggtctgaggtcagctcagtgctggtgcatacagagccatgctgtcaggaacccgggtttggagctggcactgactggggctgactccagcccttctccacctttggcaacagtgaggcgggggcagcccagcagagatgggatagggcaggcgtgggctcctgtgtcctgaggctgggctgcctggggcacagctcaagaggaagccagggcctgcgcctggtgcctgtgacagagcagccctcacatccttatggccacaccattggccttgtcaccctgcaggctcctatgcagagagagcaggccyggggccagcaggtgttagggactctgcttacccagtcctgggtgtgtgaaccaagggtgaggacagggagggagggagttggaggctgagaaatgagaaatggatggaggcggccag

SEQ ID NO: 144083 - DNA, 575 bp, Homo sapiens
tgcttttatggaaccatcctgcctccattcacagaatatttttttaagtgggaattccatctccaaccccaacagtgggtacctaatgtgggtctaagcctattcatatatgcctgcycaggtcaaagtgcatgtgactcaatctgggcaggtgaaacagagtgaatgtaaggactcgtgagggagatttcagaaagaaaactgctctctcttgcttgtggtgttgagatactgtgagcctgcatatgcaaggcatgtgatggtccagccaacccaggggaaacagaactgagaaacactttctactattctcaactccctttcttgtttcttctcaaatatttgccctgtgtatctgctgacttggaggaaaggggtactatagcaagaataacctaaggcatgcatttaaatgtagtaagtatggctccaggaatgcctgaacatctatttcagagaatataggtttattcaatcggtcactttgtagctccactttaatcttattcacattctcatctatgtttgtttaatgcaagctgtattcaagccagtgtggacctaaactggttctg

SEQ ID NO: 144084 - DNA, 604 bp, Homo sapiens
agtaccattgaaagtaaagtgtttttttaaaaagtgtgttttgtattaatatggaacagtgcagtcagctgactgaaacattatgacattagtcatgtgacatttagttaagtatagaacaataactgctttcttgggatagtgccaattaaataacatcagagcaaattatatataacattttgtagtgcttgaaattacactaaaattatgctttctgttgatttcagtaacacagtgttagaaattaagatctataatagccttttagatatagattgtctttggtgccctttaaattcttgttagggtatttatttgctattgcaaatttggtgaatttaataggttttggatatgtagattartttcctctgaattatggaatttgtacataccagttacatggcaccatattaggtaacattttgtttgttttcattaaagatgttttcttgcagtatgtaaatatttagacattttaatttttaaaatttcatttctagaattttttttgttgtaagcataaacctgaaataaaaattggatattgatttattttaaatgagtttttaaaaatttgtgaattttaaaaagaatgatc

SEQ ID NO: 144085 - DNA, 477 bp, Homo sapiens
cttcttagaattcccccttcatccctttcccatccaatgttttcacatactgtagcagcgctttttttttttttcaacgactgtcccttccctgcaaaaaactctgcaatgggggcctctttccttcttcctttcttcttaattctccactgaaacaaaacaaaacaaaacaaaacaaaacaaaacaaaaagctggtctggcaaggcaggaccctccttggaaagcaggggaggggaagaatctgaataggccaagacagaatcttctctggtggacaggagaaggaaacattttcttggggacattatcgtgttactgctgcttggttatctaatgttacataaccatcctttccaaaacttagtgccataaaacaactactgtttttttgtttttgtttttgaratggaatctcgctctgtctcccaggctggagtgcagtgacgtaatctcgggtcgctgcaatcaccgcctcc

SEQ ID NO: 144086 - DNA, 531 bp, Homo sapiens
agcatgcatgtctggggcctaccatgggcctgacatagagcaggtactcaaaaagtggaagtggtagctctcccacacctccctttctttctttttcttttctttctgtttttcttttcttttctttttttttttttttgagacagagtcccagactggagggcagtgacgtgagcgcctgggctcaagtgattcctgtgcctcagccacccaagtagctgggattataggcatgccaccatgcctggctaatttttatatttttagtagagactgggttttgccattttggccaggctagtctcgaactcctgaccttatataatctgcccaccttggcttcccaaagtgctgggattacagtggtgagcaaccacgcctggcctgcrcctccctttcatcaccagccccagctacacatccaggcaacctctctgtgtgaagccctaagtgggcactagagacatagaactaagtctactccttgccctggagaggcatgcagcctcatgggtgaaggagacaagcagg

SEQ ID NO: 144087 - DNA, 395 bp, Homo sapiens
cccctgcctcttggactgccctcctgtttgattagtgagtggccctagcagatccccctagtgtatacttctcrggacggccttgtagttctttctctagtcatcctccttcatgcaataactcttagagagtgattataaactttgtgagaaattctgttagagcgcactgctagtgctgataatgaaagtggagagaaaaatgaaatgatgcgtcctgagtaggggggaagagccgtgtccaaatgactctcacagtgggccagtgctacttggtccatagttgtattgatgaactggggactgggggagggaattgtgctgcccagtgactgtctgtgtgctgctcccattcagcaatctgtgccaggcaaggtgctagtgctgcctggctg

SEQ ID NO: 144088 - DNA, 395 bp, Homo sapiens
cccctgcctcttggactgccctcctgtttgattagtgagtggccctagcagatccccctagtgtatacttctcaggacggccttgtagttctttctctagtcatcctccttcatgcaataactcttagagagtgattataaactttgtgagaaattctgttagagcgcactgctagtgctgataatgaaagtggagagaaaaatgaaatgatgcgtcctgagtaggggggaaragccgtgtccaaatgactctcacagtgggccagtgctacttggtccatagttgtattgatgaactggggactgggggagggaattgtgctgcccagtgactgtctgtgtgctgctcccattcagcaatctgtgccaggcaaggtgctagtgctgcctggctg

SEQ ID NO: 144089 - DNA, 478 bp, Homo sapiens
cccgcctgactccgaacctgcatcctcccactaccctaggcccccttgacacatgggcactgaaggagaagtgctgccgagctgttagctgagactggtcttagtccaaggagcctaagagctytgagacaaatccgaagtgtgttcacagacagagcacttccaggaccacagactgtgacagcccgcagaagcccagtccctggcagagtgtggtggttcccgggagctgctgtcattgcaccagcaaagtgagcatccccagagagcacgagtgagcttgatgtattttttattcctgcacagctggctaattaatatgaaaaagagctgcccactattgattagctttgtattccaccacaacagtgtcttcatgaaactcaatatctagagctcaaaagctggggtgaaaccttttaagtagatctgatgggtgacctcgtcatccctgtcagaggtccagcattgttttgtg

SEQ ID NO: 144090 - DNA, 478 bp, Homo sapiens
cccgcctgactccgaacctgcatcctcccactaccctaggcccccttgacacatgggcactgaaggagaagtgctgccgagctgttagctgagactggtcttagtccaaggagcctaagagctctgagacaaatccgaagtgtgttcacagacagagcacttccaggaccacagactgtgacagcccgcagaarcccagtccctggcagagtgtggtggttcccgggagctgctgtcattgcaccagcaaagtgagcatccccagagagcacgagtgagcttgatgtattttttattcctgcacagctggctaattaatatgaaaaagagctgcccactattgattagctttgtattccaccacaacagtgtcttcatgaaactcaatatctagagctcaaaagctggggtgaaaccttttaagtagatctgatgggtgacctcgtcatccctgtcagaggtccagcattgttttgtg

SEQ ID NO: 144091 - DNA, 481 bp, Homo sapiens
gaacctgcatcctcccactaccctaggcccccttgacacatgggcactgaaggagaagtgctgccgagctgttagctgagactggtcttagtccaaggagcctaagagctctgagacaaatccgaagtgtgttcacagacagagcacttccaggaccacagactgtgacagcccgcagaagcccagtccctggcagagtgtggtggttcccgggagctgctgtcattgcaccagcaaagtgagcatccccagagagcacgagtgagcttgatgtattttttattcctgcacagctggctaattaatatgaaaaagagctgcccactattgattagctttgtattccaccacaacagtgtcttcatgaaactcaatatctrgagctcaaaagctggggtgaaaccttttaagtagatctgatgggtgacctcgtcatccctgtcagaggtccagcattgttttgtggagggagggggaattc

SEQ ID NO: 144092 - DNA, 579 bp, Homo sapiens
attactgacatattagcaaaacagaccttggctaaggacagttcctctgcatcctttggctgaaggctctaccatcttccctacccagtcctgccgcctcctakgcgccccaccctattcccttgtcagcactgctgcacagggatccctctgacctgattagctagatttggcctgctagatgtttttattagtgccctgaccttcttgccaagcagtaatttcacaaacctgtgactttggaatgacattctttatgtttgtgtttgtttttgaaaatatgtagaattcatccaaaattcacagccctgcttttgtgtttaactgaaacgtgttgaaagatttaaggataattattgaatattttccccacatgtaaacatatatttggtctaatgaggccattctttaatctgatggggttgggagagctgttagaattagcagcctttggttcagggagctcaggaatccccatccttgggaccgagtccagatgtaaccctggaagcatgaagttcaaagtcagtgggattatggcttagtgcaaaaccggcaaaatatgtcaccagttcacct

SEQ ID NO: 144093 - DNA, 598 bp, Homo sapiens
tttgctaatatgattcatcagaataatataagctagcattagcaagcactgagtacatgtctgacactgtgttgaatgctttagatacrtttccatctcatttcattctttcacagtttataggaggtactattttgtttgtttgttgatttattttattttactttaagttctgagatacatgtgctgaacgtgcaggtttgttacataggtatacacgtgccatggtgatttgctgcacctttcaacccatcatctaggttttaagccccacatgtattaggtatttgtcctaatgctctccctccccttattatagatgtcttaagtgaaggcttgagtgtctacctctccctctgaggggttcctgcccatctgctgataaaagggttcttttctgtagaggagttctactggggaccatgtgcaggaccaacacactcagtcctatgacaacatccacatctgaggatctgcagtttataagtcaaaaggtatcttcttgcccacagagcctaaaactggcttctttctgcgtctcacagcttcctgaaagatcctgaaatgtgagccaggctgacagctgtgctgacgtaca

SEQ ID NO: 144094 - DNA, 598 bp, Homo sapiens
tttgctaatatgattcatcagaataatataagctagcattagcaagcactgagtacatgtctgacactgtgttgaatgctttagatacgtttccatctcatttcattctttcacagtttataggaggtactattttgtttgtttgttgwtttattttattttactttaagttctgagatacatgtgctgaacgtgcaggtttgttacataggtatacacgtgccatggtgatttgctgcacctttcaacccatcatctaggttttaagccccacatgtattaggtatttgtcctaatgctctccctccccttattatagatgtcttaagtgaaggcttgagtgtctacctctccctctgaggggttcctgcccatctgctgataaaagggttcttttctgtagaggagttctactggggaccatgtgcaggaccaacacactcagtcctatgacaacatccacatctgaggatctgcagtttataagtcaaaaggtatcttcttgcccacagagcctaaaactggcttctttctgcgtctcacagcttcctgaaagatcctgaaatgtgagccaggctgacagctgtgctgacgtaca

SEQ ID NO: 144095 - DNA, 593 bp, Homo sapiens
ttactatgtagctttttactgccacattaattaacagtgaagcagataattgtcattagcttataggagctgaaaaataattgatagctcttttcacactagttgtagaaagagtcatcatgattttttttttttttttgagacagagcctttctctgtcacccaggctggagtgcagtggcatgatcttggctcaccacaacctccacctcccaggttcaagcgattctcctgcctcagcctcctgagtagttgggattacaggtgcacaccactgcgcccggctaatttttgtatttttttagtagagacggggttttgycatgatggccaggctggtcttgaactcctgacctcaggtgatcctcccacctcagcctcccaaagtgctgggattacaggcatgagccaccacgccaggctgataaaccttgatttgaatataattcaccctcattttcatttatccctaatgtgagggtggtggcattttcttgacaaatggggattaggaaggtctagcaggtatcataggtatatctgagaccaagtaaacattcattcaatagatgaataaattttttaaataaatg

SEQ ID NO: 144096 - DNA, 540 bp, Homo sapiens
gctcatttaaaagtctggctaaaaaaatgtcagtgaataacatgtagatcagcatggccagagtgaatcacttccatttctccctccctgcctggctcaaatcacaatgcacatattaaacccattctgaaaataagcgtgggggagaggtctccgggaagtaagtaaacctcttctgagtaatctctctctgaccactctttcctmccgagacagagataagcacacattgtttcaatcaggcccaagttccatttctttatcttaaaactatcttctgccacattataaataatcagcttactggtgagctaggccaggcatgtggggtagggatgtgtgtggggggatgtgtgtgtgtgtgtgcatgtgtgtgagagtggaggttctggagatagtggacaggagccaggaagcaaccttgatccttaagcagcccagagaaatgagattacccctggcctatcagaccaaggagccagatgctggcaagagaacctcaaaaaagggtagccagataatatgttgttcaaaccagca

SEQ ID NO: 144097 - DNA, 541 bp, Homo sapiens
gcagtttgtcccaagggttctagcaggccacttggctgctgcccaccaacttttacataaagatgcgtggaggtgggaaataggctgggggctacatccagggaaaagggggtttcatctaaagaaaggaactgagaaggaactrtatcggtatttagtctgaatcagaatgacagagtcattggatttttgaaaagtaagaagagatgggcaggctcccctaatgaggaaatttcacactcttctttatgcttgatgactgtgctagtgattccagttgtaatattcctctaaattacattatttcaggccataagtttctcccagcaggtggggcagtggggaaaagatggcagcaggcataagccaactccatgaagctggataggggctgccaagccagcgggggtgcagacccctgttggggttccaaccagcagccagttcctggagaggaggaagagtgtaggcagaggatctggccccacatcccacactcaggaacctgggcatctaagccaagaacctcagggaggtcagt

SEQ ID NO: 144098 - DNA, 541 bp, Homo sapiens
gcagtttgtcccaagggttctagcaggccacttggctgctgcccaccaacttttacataaagatgcgtggaggtgggaaataggctgggggctacatccagggaaaagggggtttcatctaaagaaaggaactgagaaggaactgtatcggtatttagtctgaatcagaatgacrgagtcattggatttttgaaaagtaagaagagatgggcaggctcccctaatgaggaaatttcacactcttctttatgcttgatgactgtgctagtgattccagttgtaatattcctctaaattacattatttcaggccataagtttctcccagcaggtggggcagtggggaaaagatggcagcaggcataagccaactccatgaagctggataggggctgccaagccagcgggggtgcagacccctgttggggttccaaccagcagccagttcctggagaggaggaagagtgtaggcagaggatctggccccacatcccacactcaggaacctgggcatctaagccaagaacctcagggaggtcagt

SEQ ID NO: 144099 - DNA, 541 bp, Homo sapiens
gcagtttgtcccaagggttctagcaggccacttggctgctgcccaccaacttttacataaagatgcgtggaggtgggaaataggctgggggctacatccagggaaaagggggtttcatctaaagaaaggaactgagaaggaactgtatcggtatttagtctgaatcagaatgacagagtcattggatttttgaaaagtaagaagagatgggcaggctcccctaatgaggaaatttcacactcttctttatgcttgatgactgtgctagtgattccagttgtaatattcctctaaattacattatttcaggccataagtttctcccagcaggtggggcagtggggaaaagatggcagcaggcataagccaactccatgaagctggataggggctgccaagccagcgggggtrcagacccctgttggggttccaaccagcagccagttcctggagaggaggaagagtgtaggcagaggatctggccccacatcccacactcaggaacctgggcatctaagccaagaacctcagggaggtcagt

SEQ ID NO: 144100 - DNA, 499 bp, Homo sapiens
gtttctagaaatctattccaaggatctcattcgaaataggaccaaagctttatgttaccagatgttcatgatgtcattatttataatcacaaaaaaaaatcagaaaccagctccatatcccacagtatggaaaatagtactaccactttatggcataccaagctaatgtaatattataaagttacttaaaatgagtcctacaaagrggctttcatggcttcaaagtgtttatcataaaatgttaagcaaaaggtataaaactgtatcatagctatgtcaaaactatgtcaaaaatatgtgtatatataacaaaatgttaatagtgttgtgtgaatgatgtcactacagttcattttcctttttttctaaatttttattattctatgtttaaaatacatgtttctaaagaagggaagtaaaagtttgctggcagccagaacgagtaggacccatttgtctttgcaatcaccagggaccgcctgctaaggaagcccgttaa

SEQ ID NO: 144101 - DNA, 576 bp, Homo sapiens
aacaataacacctacttcacttgattttgtcaggattaaataagatgacaatttgccaaaagccagtggatgctgataaaggtgtttccttccttatgagatcagtggcaagtaaatatttactgacttcacttttagatgctttgatgcaaatgttatacctaccacttattttctactgcacctcttttgcattcaactactgaaaacaccagtgctttaggctgtgtattttagagtcagacaaaccgcagggcccagccaactcccttcttgctgagcctcctttcaaggctgtggatatcctttctttttaatatgggcctgctgttaggactcagacgtagcatgtcttttaaaaatactggctttgaggtaaagaaagagagatwgagagaaaccttgcaaggcacatggggaaatcgtggacagggcgcttctccacagcctgttttgtaattttcctcatgagaattcatagcaagctggcacctttttggctgctcaaaaagtgccctagtctacctaaaagggagagttaacaggccggggaagagttgctggcggccatcaaca

SEQ ID NO: 144102 - DNA, 416 bp, Homo sapiens
atgccctgggctgtataaattargcagaacagtgaccgctgtggttatgaatataactgtttgattaaggttccatgccggctgcattatttgtttcacaaacctgaactgggctgattggatttctctctctgtcccttttttttttttttaacataagtagattctaaaattggaaaaataaaatattccacagctgagagaaaagaattaacttggggaataagcccaggtggcacccacagaatgtacaccttttgtattgaaataaagttagcgtcgtttgtgccttgactctggggtttgtgaggggactgctctataaacagcacatgatgctgtggtaagagaaggagtaggagggcattgacgaggaccacagcacttaagaggacattcttaaatactaataatag

SEQ ID NO: 144103 - DNA, 403 bp, Homo sapiens
gttgaatccttacaattaaagagctgtcttgtagggtgttttgctgggaaacattatagtcatgttgttaacttttataattctacagctctcaagaaaatttctgcgcactttgaacaaaaagcacactgacactgtgggatttactgtccgcatgtactaagtgccttttgggaaaatgtctcttagatttcattgtcttccttctgccttttaaaatctaatatacttcaatttcactgagttaggctgttttctccatagtgtctctcaacgacatttcctcsagttaggtaaacaaattctgtcgggctgtcatattctttttcatttgggttttgggaactttaaatgatgctaggagtagcatatttatagtctctcaatataattgtaaattcca

SEQ ID NO: 144104 - DNA, 559 bp, Homo sapiens
tatccaaaagaaatgaaatcagcatctcaaagatacatctgtgttcttatgttcatggtggcattctttataaaagccaagatacggaaacaaccaaaatgtctgtcagtgtatgaatagataaagaaaatgtggtgtgtgtgtgtgtgtgtgtgtgtgtgtgtgtgtgtgtgtatgtgtatgtgtgtgtataaaatggaatgtattttaactactaaaaagaagaaaatcccaccatttgtgacaacatggatagacctagaggaaagcagccagacataaaaagacatactgcatgatctcatttacatgtggaatctaaaaaaaattaaactcatagaagcagagagtagaatggtcgttaccagagsctggggtggaggtgaggaatgggaagatgttggtcaaaggatcaacatattttactttcatttaaaagatgaataagttctggaaatgtgatgtacagcatggtgactatgattaataacaacatactgtatactagaaatttgctcagcgagtagatcttaagtgttcttaccaaaaaaaaaaaaaa

SEQ ID NO: 144105 - DNA, 476 bp, Homo sapiens
caaactccttttttatcttcctctttagcccaaacaacaaaagtttaagtcaaatattatctttgattcttaaagaaatatttaagtatgatttggaaattgtcagagattaacaggtaaattcttctaaaatgtggtaaaattgtaactaattctaatagggaaaaataaacataaatatgaaaaataaaaataattcagaatcaaccttcctgagttaatacaatgaacataatrtattgtaatatgcagaaataaaatatgcaatctgtaatatgtatatatattgtagtaatgtacatctgtctatggtatatacatattgtatacaaataaacaacattgcttacaccaatgttggcagaatctttcatcatacttgtttttgtttatctattatcaacttaatataatatttacacttaaagattaagagtatttaataaagactgtctgtctcccttcatgcctttcat

SEQ ID NO: 144106 - DNA, 591 bp, Homo sapiens
caagccattgactttcgattgaaaataaccttagacattctaatcttttattaagcactgtccccaggggttgyaaactcaaatgccttcaaggagtgacagttaacaaaacttatgatgcgcaccataaatcaaacttgatgtgtgatcatacttcacatttgcttggttagttacattgattttcaaactctctgggtagtatgttcctctcagagcaccaactagtgaccccgccctctctagttccctcttttcttcttcacctccttcttcaaccctgctttttttttcagactcatgacttttggctttatcttcttttcttgacccccacattgctcctttgactcatggcatatatggcgtcttctgttttgaagctttggctctatctttcagacagtttgcaagtgccctctggctacatcctgtcattgctgctaggtgttatactctgaagtataaagtcaaaacaaattatatctaccttaactctgggcacttctggtgggtctgccctgtgcctcaggttcctgtccactaatactcgtgagcgtgagataagatcatcattctagttaaaaatcc

SEQ ID NO: 144107 - DNA, 598 bp, Homo sapiens
gttgagggatttaggtagagaaactaaaattgaatgtgatagactatcaacagctgctagttataaagcatctactacactaaacacttgatatgtttcatataatgcttgccacaactctgtgcattgcatttcataaatttgaggaaactgagcctcagacttaaatatcttgccaaattcacacaactaataacaaacagatctaggcctcaggttgaagctcgtgtccttatgcagcaccgtycaccagctttgtggggctctgagaagagaaatatctgtacagacgaggatttgaggagtctgaggtgttaggttagcttttaattgaagaaaggccatttgcaagtattctagctgggaagcagtaagaatactacaaaagaattaggaaaagggattagaaaaaaagataagtttggagaaaggatagggagaacttggtgaaaaatcaaagaagtgcataaaatccaggaccctgaacaagaaaggctatgcagatttaaatggcaacaaacagccccctcttttctcctacttcttccagctgtcttacttctccttttcttggtcatctattacaagtttgcatcag

SEQ ID NO: 144108 - DNA, 598 bp, Homo sapiens
gttgagggatttaggtagagaaactaaaattgaatgtgatagactatcaacagctgctagttataaagcatctactacactaaacacttgatatgtttcatataatgcttgccacaactctgtgcattgcatttcataaatttgaggaaactgagcctcagacttaaatatcttgccaaattcacacaactaataacaaacagatctaggcctcaggttgaagctcgtgtccttatgcagcaccgttcaccagctttgtggggctctgagaagagaaatatctgtacagasgaggatttgaggagtctgaggtgttaggttagcttttaattgaagaaaggccatttgcaagtattctagctgggaagcagtaagaatactacaaaagaattaggaaaagggattagaaaaaaagataagtttggagaaaggatagggagaacttggtgaaaaatcaaagaagtgcataaaatccaggaccctgaacaagaaaggctatgcagatttaaatggcaacaaacagccccctcttttctcctacttcttccagctgtcttacttctccttttcttggtcatctattacaagtttgcatcag

SEQ ID NO: 144109 - DNA, 622 bp, Homo sapiens
gatcctgttcaaaaaggttattgctcttaccttcttccaacaacagtgataggaattttcagaagcaaaaaacaaggttttatgtttgccacttgtatcttagggcaacatttataataatgggatttttaatcaatcttagagcataaaataaaccctatcattttagactgacctgttggactaatttcaatgactttagctggtaggtaattgaaataggatgacagtacactggggtgaataagaggtttcaaaaatagacaaagataacaattagacatatttggagcatcaacagaagttagtataaaattacaggaattttagaaattaataaaraggtcttatttatttaatattgaaataataccatttaaataattttaacagcaaaggtcaatataaggcatgctatcaccaagcactattctaagagctttatatacctcttgttacttgcaactaccgtgttttacaaataaaaaaaactggagattacagaggttaagtgacttaagtagcttacccaagatcacaagagcagtatataatggagttggtattcaaacccttatagtctggctccagagtccatgctctcatcccctctactattacc

SEQ ID NO: 144110 - DNA, 622 bp, Homo sapiens
gatcctgttcaaaaaggttattgctcttaccttcttccaacaacagtgataggaattttcagaagcaaaaaacaaggttttatgtttgccacttgtatcttagggcaacatttataataatgggatttttaatcaatcttagagcataaaataaaccctatcattttagactgacctgttggactaatttcaatgactttagctggtaggtaattgaaataggatgacagtacactggggtgaataagaggtttcaaaaatagacaaagataacaattagacatatttggagcatcaacagaagttagtataaaattacaggaattttagaaattaataaagaggtcttatttatttaatattgaaataataccatttaaataattttaayagcaaaggtcaatataaggcatgctatcaccaagcactattctaagagctttatatacctcttgttacttgcaactaccgtgttttacaaataaaaaaaactggagattacagaggttaagtgacttaagtagcttacccaagatcacaagagcagtatataatggagttggtattcaaacccttatagtctggctccagagtccatgctctcatcccctctactattacc

SEQ ID NO: 144111 - DNA, 622 bp, Homo sapiens
gatcctgttcaaaaaggttattgctcttaccttcttccaacaacagtgataggaattttcagaagcaaaaaacaaggttttatgtttgccacttgtatcttagggcaacatttataataatgggatttttaatcaatcttagagcataaaataaaccctatcattttagactgacctgttggactaatttcaatgactttagctggtaggtaattgaaataggatgacagtacactggggtgaataagaggtttcaaaaatagacaaagataacaattagacatatttggagcatcaacagaagttagtataaaattacaggaattttagaaattaataaagaggtcttatttatttaatattgaaataataccatttaaataattttaacagcaaaggtcaatataaggcatgctatcaccaagcactattctaagagctttatatacctcttgttacttgcaactaccrtgttttacaaataaaaaaaactggagattacagaggttaagtgacttaagtagcttacccaagatcacaagagcagtatataatggagttggtattcaaacccttatagtctggctccagagtccatgctctcatcccctctactattacc

SEQ ID NO: 144112 - DNA, 563 bp, Homo sapiens
caactcatgaccataagccccaaattcaagtgggcctcgtgctgctacccaattacatatttccctgatccattctctctcccactcttttacataactttctcctctgttctcaaatctccagtactcctgcctcatacccactctgttgatgacctttctattttacyaaggaaactgaagccatcagaagagaatttccacagattttccctcagtctacccacctactagcacctgtactctgtccacttttttttttcctgctcacataccttcctaaaactaattattcacttggatgtaagatttcatttcctgtcatctgcttatgggcctcacttaagcgattctacttcacttataccctcattttttacactctctgctagaacattttcatcagcatataaatatgctgttaactctcccatctttgtttgtataaatttagggggtacaaatgcaattttattacatgggtatatggtatagggatgaagtctggggttttagtgtatccatcacccaaataatgcacattttcccattaagtaatttct

SEQ ID NO: 144113 - DNA, 563 bp, Homo sapiens
caactcatgaccataagccccaaattcaagtgggcctcgtgctgctacccaattacatatttccctgatccattctctctcccactcttttacataactttctcctctgttctcaaatctccagtactcctgcctcatacccactctgttgatgacctttctattttaccaaggaaactgaagccatcagaagagaatttccacagattttccctcagtctacccacctactagcacctgtactctgtccacttttttttttcctgctcacataccttcctaaaactaattattcacttggatgtaagatttcatttcctgtcatctgcttatgggcctcacttaagcrattctacttcacttataccctcattttttacactctctgctagaacattttcatcagcatataaatatgctgttaactctcccatctttgtttgtataaatttagggggtacaaatgcaattttattacatgggtatatggtatagggatgaagtctggggttttagtgtatccatcacccaaataatgcacattttcccattaagtaatttct

SEQ ID NO: 144114 - DNA, 560 bp, Homo sapiens
gaacaattattattcctattttcagatggcaaaattgaggtctggaaagataagtaacttgttcagttacacagaaagtagttggcaggagtagaaagtgaacacaggagatcagctaaaagatataagagcagcttatattcagctgtggttgttctataataaaaagtacaaatacagtccctttaatactgaaattccacattcagagttttatcttatagatttactcagacatttacaaaatgatgaatatacatttattgcaaccctttctgcaatagcagtagattggaaatcaaagttcattaccaagaactgattatctatactgtggtacagccatacaatgcatcctaagcaggtgaaaccaaatgaaagttttcagtttcttcatctgtaagtatattatcatttgtgtaccaaaaaagtatcattgtatacccattatttatgtggtatgtgtgtgtgtgtgtgtgtgtgtgtatgtgtgtgtrctcacgttatattaacatatctctgaaaatgatacacaagaaattggtaatagccataggttg

SEQ ID NO: 144115 - DNA, 614 bp, Homo sapiens
gccctcatgatgtgattagagtgcccttacaagaagggacaccagagagattgcttgctctctctctcagtgtcatgtgatgacacagtgagaagrtggccactggcaagccaggaagacagactttgctagagcccaacaatgctggcatcctgatgttgaacttccaccctttaatagaaataagtttctgctgtgtaagccacccagtgtatggtattttgttagagcagcccaagctgactgacatagattaagcggactgagatccgaactgttgtgtggcaagtagttttctgaaaaccttcatatcttgaaaaaaagaatatagaatcaatattgttgagatatgtttaaccttgataaagaaactacacccttcagtcacattcaaagcacttagtggttaagaataaattagtactatctattaagtgtgcctaatgggagttcaagcatttttccaattcagtcagccccgagatagtgttggtgcttattgctgttgtatcagaggaagctattttagggaacacttttttgagaagtgtgaggtttaagcgcttctacatgttgcaataagaataaaaggataactggtgatgttcatgtag

SEQ ID NO: 144116 - DNA, 614 bp, Homo sapiens
gccctcatgatgtgattagagtgcccttacaagaagggacaccagagagattgcttgctctctctctcagtgtcatgtgatgacacagtgagaagatggccactggcaagccaggaagacasactttgctagagcccaacaatgctggcatcctgatgttgaacttccaccctttaatagaaataagtttctgctgtgtaagccacccagtgtatggtattttgttagagcagcccaagctgactgacatagattaagcggactgagatccgaactgttgtgtggcaagtagttttctgaaaaccttcatatcttgaaaaaaagaatatagaatcaatattgttgagatatgtttaaccttgataaagaaactacacccttcagtcacattcaaagcacttagtggttaagaataaattagtactatctattaagtgtgcctaatgggagttcaagcatttttccaattcagtcagccccgagatagtgttggtgcttattgctgttgtatcagaggaagctattttagggaacacttttttgagaagtgtgaggtttaagcgcttctacatgttgcaataagaataaaaggataactggtgatgttcatgtag

SEQ ID NO: 144117 - DNA, 596 bp, Homo sapiens
cctaattaaactaaagatcttctgcacagcaaaagaaactatcaatagagtaaacagacartctacacaatgggagaaaatatttgcaagttatgcttccaacaaaggttctaatatcctgaattgataaagaacataaacaaattaacaagcaaaaaacaaacaaccctatttaaaatagacaaggacatgaagagacacttctcaaaagaagaaatacagatggtcaataggcatacgaaaaaaatgctcaacatcactaataattacagaaatgcaaatcaaaaccacagtgagataccatttcatactggtcagaatggctattactaaaaagtcagaaaaactacagatgctggtgaggctgcagagaaaaaaggaatgctgaaacactgttggtgggaatgtaaacagttcagccactgtggaaagcagtttggagatttctcaaaaaatctaaaacagaactaccattcaacccagctatcctgttactgggtatataccaaaaggaatataaatcattctaccataaagacacatgaatgtgtatgttcatcacaacactattcacaatagcaaaacatggaatctac

SEQ ID NO: 144118 - DNA, 596 bp, Homo sapiens
cctaattaaactaaagatcttctgcacagcaaaagaaactatcaatagagtaaacagacagtctacacaatgggagaaaatatttgcaagttatgcttccaacaaaggttctaatatcctgaattgataaagaacataaacaaattaacaagcaaaaaacaaacaaccctatttaaaatagacaaggacatgaagagacacttctcaaaagaagaaatacagatggtcaataggcatacgaaaaaaatgctcaacatcactaataattacagaaatgcaaatcaaaaccacagtgagataccatttcatactggtcagaatggctattactaaaaagtcagaaaaactacagatgctggtgaggctgcagagaaaaaaggaatgctgaaacactgttggtgggaatgtaaacagttcagccactgtggaaagcagtttggagatttctcaaaaaatctaaaacagaactaccattcaacccagcyatcctgttactgggtatataccaaaaggaatataaatcattctaccataaagacacatgaatgtgtatgttcatcacaacactattcacaatagcaaaacatggaatctac

SEQ ID NO: 144119 - DNA, 589 bp, Homo sapiens
attttggttataatatgtctggatgtagatctttttgcttttattttacttagaactcattgagcttgttggatgagtacattaatgtgtttcatcaaatttggaaagttttgagtcattatatctttgatttcctttttccatccctttctctctctcctctccttctcataaatattttaatgtacatttagtgatgttccacatttctctgaggctctttatttttattcattcttttttttctctgttttctttagattgaataatctttactgcyctatcttcaagttccatgatgctctcttctactagctcaaacctatttcagattctactaacctaattccagagaaatatagaaactttatcctactagtgaattatttttatttcatgtattataatttttcaactccagagtttctgtttggttatttttagtactttctatctatattctttattttatagacattttattgtaactttctttaatttgtaaaaccttgtttccttagttctttaaacacatttgaaataggttttttgaagactttgtctgctcattataccatctagaatccct

SEQ ID NO: 144120 - DNA, 588 bp, Homo sapiens
ggagtcaacagagtttttaaaaacagttgaatggcatttaaaaggattattctgaattccttgttggacatatcacagatctttaattccaagtccattattggagctttgttggtttctttaggcagtgtcatatttycctgagttttcataatttttgtgtctttacattgatacctgtgcatttaaggagacagccaccccttccagcttttgcaggtgttctttggtggttttagatatctactacttaaaatcagaacttaattattggtctgctgtggcttccttttctggggagggcttatggtgagcaccaggactaaaacactgcacaggaactaattgccctgtctggggaagacttaaacaaacagtggaacttaattactgacctttcagttgtttcccagtcaggggaaggctgcactcaagcagctgggttttgtgaaaatccagccaggggtctggccttcctgtttattgtgccctctgcaaccctgtggcaccagccagtctcctcagcatggtatctctgctgatcagactgtagagcagctgccaaggtatccatgccagttactgcaa

SEQ ID NO: 144121 - DNA, 627 bp, Homo sapiens
ggtggccacagggttgcttgtgtcactccaccccaaggtctaggcagctcagtgcagacagagaggctgtgtttgtgtgggggaaagtaagggaagagaacaagagtctctgtctggtaattcagggaattctcatggatcttacccaagatcactttgagtgaacagggtgcccacttttaccactgttattcaacatagtactggaagtcttagctaaagcaatcagacaagagaaagaaataaagggcacccaaatgggaaagaaagaagtcagattatccttgtttgcagacaatawaatcttaattttggaaaaagctaaagtcttcaccaaaatctatgagaacggatgaaaaatttggtaaggttgcaaaatacaaaatacaaaatcaacatacagtagcatttctatatgtcaacagtaggcaatttgaagaagaaaccaagaaagtactcccatttacaatagctacaaataaaattatctaggaattaactaaggaagtaaaagatctctacaatgagaactataagacattgatgcaggaaattaaagagaacacccaaaaatggaaagatatttcatgttcatggattagaataatcaatatcgttaaattgtcc

SEQ ID NO: 144122 - DNA, 627 bp, Homo sapiens
ggtggccacagggttgcttgtgtcactccaccccaaggtctaggcagctcagtgcagacagagaggctgtgtttgtgtgggggaaagtaagggaagagaacaagagtctctgtctggtaattcagggaattctcatggatcttacccaagatcactttgagtgaacagggtgcccacttttaccactgttattcaacatagtactggaagtcttagctaaagcaatcagacaagagaaagaaataaagggcacccaaatgggaaagaaagaagtcagattatccttgtttgcagacaataaaatcttaattttggaaaaagctaaagtcttcaccaaaatctatgagaackgatgaaaaatttggtaaggttgcaaaatacaaaatacaaaatcaacatacagtagcatttctatatgtcaacagtaggcaatttgaagaagaaaccaagaaagtactcccatttacaatagctacaaataaaattatctaggaattaactaaggaagtaaaagatctctacaatgagaactataagacattgatgcaggaaattaaagagaacacccaaaaatggaaagatatttcatgttcatggattagaataatcaatatcgttaaattgtcc

SEQ ID NO: 144123 - DNA, 354 bp, Homo sapiens
ctttatacatgcatacacacacacatacatatgcatacatacaccttggccttttctctccaaaagatccactctaccctgaaccctataatttgccctcatatgtgcctacttaaccaaatgcactatctactttctacatccagagccagggagaaacatggtaayctaagaaaatggcatggggctagcacaaacaatcttgtatctaagcatttccccaaatgctgatgattacatgccacgtgaaatgtagtccaatcaatggaatctgatatgggtggttgggttgaccttttggttgtaattgtttcttttgtctaaatctctctgaagtccagtcgatagttgcct

SEQ ID NO: 144124 - DNA, 535 bp, Homo sapiens
cagcatcaagcttatactcttaatctgttggggaaaaatgtacctggagtacattttgcatttctttaattataagaaagttgaccaccttttcataggtttatgagaaacttttcttttactgtaaattgcctattcaaatctttgcccacttattggggtgactttttctatggtttcgtatargaagaaattaggttttgactgttccatgttgtttaactttttattgagataaaaatgacatatgatatatgtcccatatttattgtatacaatttaataaattttcacatatgtatacaaccctgaaatcattaccacattcaagacaatgaacattcccttcacccccataaatttgacttattgcaaatattgtctctatttttatcgtttgggtttctttttaaatttagatttaagggtttttttactaaatttctctgcagccaaatttgtcagtcatttactctagggcttcttttttatttttaatgccgtgttcagaaatcctattccaggtttatttaca

SEQ ID NO: 144125 - DNA, 612 bp, Homo sapiens
acagttgtgggctgggttgttttcagaatctttttttttgaattattatgtatggtaaactaatgattacatttatatttttttccaggagtaaaaatacataaattaacaggagaaatattctcttaaactattctatggtacttttaaacaagatataatgtcccaaaaggagcaatgcttggagactggtattcaggtttggtaattccctttgtttgattttaagacccaggaacacaagctaagacaatggcgtttttcaattgattttgaaatgtacaagtgtcataaaaggaacaaatggaaatgcataataagcaacacactgtaggaatctgaaagagaaaagaaaataatcagtttcattaytagttagtttaaagctgtaattgttccagggaacaatggaatcctagaactgcccttttgaaaggtaactacattgtcttgcttaaaggattctgaatattttgtagccctcaatgttgatttccaagacagtactcaaattctgcctcccaatatcttatataatgctaatattattatagctaataatacctaatgttgagttatgttgagtaagtgttcatataaaaatcagagaac

SEQ ID NO: 144126 - DNA, 619 bp, Homo sapiens
tgtgtttttatttatgcacttctgatctttgtgacgttttgtcctttagcctgacaccaagtcattttttatacatgtcctgtggaaaggtggcccttgccctgcagtcarcctcacaaatccctgacacacacgcatgcattttttattgttctcacatgttgcttaacagcctgcgtgattactgctttacagcacagcagatgggttcttgaatagcggtgaaacagatgagatgctcaaatcgattgttttatcaacaatcagttgcagataaaaatcattttaatgagagaaattaatggtgtttgcaaacatgatgttaattaaagaacattgcttaggcggttttcttcgcctctctctttttttctgcacacaacttttggttacccgtgacatctttcattattgactcatgccccaaagaaaaggcgattaaaatctgcttttgtttgatgtagcttttattgaagaaagaaatagatctttctgaagcttcctggtgagatgaaagtctaattatctccacaaatgaaaggaaaagctttaattaggcctgtgctgaatctgcgcactgtgaatttgtgcattgtgatggatggagcccgcatctcct

SEQ ID NO: 144127 - DNA, 662 bp, Homo sapiens
gctaggattacaggcgtgagtcaccgtgcccagccagaaactttctttacatatctggagtctagccaaaatttcccattcaatatatattcattgaatggatgaataaaactatgtatgtaagttgaytttattttttagaatgactttctagtctttaaaaaaaattttttatcatactttaagttctggggggtacatgtgcagaacatgcagttttgttacataggtatacacatgccatggtggtttgctgcacccatcaacctgtcacctatattaggtatttgtcgtaatgctatccctcccctaactccccatccccctacaggccctggtgtgtgtgtgatgttcccttccctgtgtccatgtgttctcattgttcacctcccacttatgagtgaaaacatgtggtgtttggtttcctattcttgtggtagttctagtcttttacagtgtattagtattaactggcaaaatgtatttgtattttaaaatttttaaaattgagcccatcacaatattctatggtaatttttatacacagtatatttttatatatacagtatatattttatactgtatactttatacagtatatttatatatacagtatatattttatacacagaatatatactgtatatatatatacagtatac

SEQ ID NO: 144128 - DNA, 662 bp, Homo sapiens
gctaggattacaggcgtgagtcaccgtgcccagccagaaactttctttacatatctggagtctagccaaaatttcccattcaatatatattcattgaatggatgaataaaactatgtatgtaagttgactttattttttagaatgactttctagtctttaaaaaaaattttttatcatactttaagttctggggggtacatgtgcagaacatgcagttttgttacataggtatacacatgccatggtggtttgctgcacccatcaacctgtcacctatattaggtatttgtcgtaatgctatccctcccctaactccccatccccctacaggccctggtgtgtgtgtgatgttcccttccctgtgtccatgtgttctcattgttcacctcccacttatgagtgaaaacatgtggtgtttggtttyctattcttgtggtagttctagtcttttacagtgtattagtattaactggcaaaatgtatttgtattttaaaatttttaaaattgagcccatcacaatattctatggtaatttttatacacagtatatttttatatatacagtatatattttatactgtatactttatacagtatatttatatatacagtatatattttatacacagaatatatactgtatatatatatacagtatac

SEQ ID NO: 144129 - DNA, 513 bp, Homo sapiens
gttaggtaaagataggctgatagacaacatgtagaaaaatgtcagggcagaaacacatttatactactaaaaatattgttattgtaaagtttattcgtgtgtgtgctcagttcttkaagcctcttcttatcatttttatgtaatgttttgttttggtttttgctttggttttttgtcatgagttccccagtatatattattcccactatataagtataatgccttggaaaatttctacgacgttctaaccatcaaaacattgtacgataaactaccatccaaaacagatgaagggttatacacactagtggacaggtagagctaacaatctatttctttgctccaaaagaacagcctaaatactaagaaactttgataaagtagccaaatccaccaatcagtgtgactgttgccaagacatttcatgatttcttggggaagtccctcaagtcatgacgggagcacttggtaactttatgttgttcttaccgtcctctttgaggctcaatgacc

SEQ ID NO: 144130 - DNA, 557 bp, Homo sapiens
ctcccctcacttgtcatatcctctgacacgctaacatttcttttgttcatctctgttgccctcacagaaaggtcccaaaaagaaccagtcagggttcctccccaatgcctaggtttctgggataggtttctgttacatcttctttaatcgcctcttaaaaatgtttagaaaatctggagctcaaaaatgcattcggccatgttgataatttagtaagttaagaacatcaaacatcatgacagggctgcgttagaggttacttacttgtggtagcaggactgatttgattgaaattgctaccatgtgcattgacaccacataaataatcaaccagcctactgggttgcattgcactttctacccgtgcatgaaatttaygaggtttcttcttagctttgtatcatggccaaagaggtactattgggttgcttgatacgtgcaaaatagaggaagaaggcatttggtctggcaggtgtgtcagatgggagaatgatgggggctgaactgctgggagaggtcagaagatacccatgctaaaatgtgactatcctcatgtt

SEQ ID NO: 144131 - DNA, 500 bp, Homo sapiens
gactctcattcctggataaaaaattagaatccattagaaatattttttaaacgtttgcattcagcacygcccctccttccctaccccacccaggtcatgccttagcttttgaagggtgaaacccaggcttcagtactttcaaagcaaaaacctcaattacttttgcaccagcctaataaaagataggatctgaggatctcatgtacagcatagtgactctagttaataacactgctttgtatactgaatttgctaagagagtaaatcttaaatagcctcagatcatttggtcattgagctagagactgcctagctactaaatcagagaatgtgggaccagtaaggactggggttagggacagcaccaggaagatggtggcatcaagcatgtggtcagtccagatgagaaccacaagctcattttgaaagtcagaatcacatctgcatactcagcaatgacagattctgaaaagaaggagaaaacatcaagtcagaagggc

SEQ ID NO: 144132 - DNA, 500 bp, Homo sapiens
gactctcattcctggataaaaaattagaatccattagaaatattttttaaacgtttgcattcagcactgcccctccttccctaccccacccaggtcatgccttagcttttgaagggtgaaacccaggcttcagtactttcaaagcaaaaacckcaattacttttgcaccagcctaataaaagataggatctgaggatctcatgtacagcatagtgactctagttaataacactgctttgtatactgaatttgctaagagagtaaatcttaaatagcctcagatcatttggtcattgagctagagactgcctagctactaaatcagagaatgtgggaccagtaaggactggggttagggacagcaccaggaagatggtggcatcaagcatgtggtcagtccagatgagaaccacaagctcattttgaaagtcagaatcacatctgcatactcagcaatgacagattctgaaaagaaggagaaaacatcaagtcagaagggc

SEQ ID NO: 144133 - DNA, 500 bp, Homo sapiens
gactctcattcctggataaaaaattagaatccattagaaatattttttaaacgtttgcattcagcactgcccctccttccctaccccacccaggtcatgccttagcttttgaagggtgaaacccaggcttcagtactttcaaagcaaaaacctcaattacttttgcaccagcctaataaaagataggatctgaggatctcatgtacagcatagtgactctagttaataacactgctttgtatactgaatttgctaagagagtaaatcttaaatagcctcagatcatttggtcattgagctagagactgcytagctactaaatcagagaatgtgggaccagtaaggactggggttagggacagcaccaggaagatggtggcatcaagcatgtggtcagtccagatgagaaccacaagctcattttgaaagtcagaatcacatctgcatactcagcaatgacagattctgaaaagaaggagaaaacatcaagtcagaagggc

SEQ ID NO: 144134 - DNA, 500 bp, Homo sapiens
gactctcattcctggataaaaaattagaatccattagaaatattttttaaacgtttgcattcagcactgcccctccttccctaccccacccaggtcatgccttagcttttgaagggtgaaacccaggcttcagtactttcaaagcaaaaacctcaattacttttgcaccagcctaataaaagataggatctgaggatctcatgtacagcatagtgactctagttaataacactgctttgtatactgaatttgctaagagagtaaatcttaaatagcctcagatcatttggtcattgagctagagactgcctagctactaaatcagagaatgtgggaccagtaaggactggggttagggacagcaccaggragatggtggcatcaagcatgtggtcagtccagatgagaaccacaagctcattttgaaagtcagaatcacatctgcatactcagcaatgacagattctgaaaagaaggagaaaacatcaagtcagaagggc

SEQ ID NO: 144135 - DNA, 583 bp, Homo sapiens
tcaacgaacacattctctgcacagtaaggaggtcaccaggggtgaaacagaaatggactctggggtcacacagacctaaggtttcagagaggggctcctaaacagagacagaaaaggccatattggtaggaagagtgccttacagccaagaggcacccgcaggcaggggctccagctgaagcctgagtctgccccacccctagggactacctgtggctgctgcaaacaggactgtgaggaccactgagtgggggcatgggggtaaggagctctgccaggcccagtaaacagaccagctggggaatctaatcaagcaaggccagtggagcactgagtgtggaggggcggggaggagggctggaactcctaagggaattggcagacagccacccctgctgctggcaggcagagctactggggcacactgggtgtcagagttcctgggtccagcatccacatctgtgaargggagaaaggcagtggtggcctggggtcaggcgacccaaactgagaccgacccaggctttgcccttcagtatctctgtataaccttggacaagtgtgatgctcccagccctagctc

SEQ ID NO: 144136 - DNA, 453 bp, Homo sapiens
ggaattcccctgagtctcaggtgctctacttataggagctagtgtctggattggggttgtctcaggagggcccagcacaaacctggaggctaatgctggggtcctcaggaggccagtcctgcttcctagggctcataagaggacagtggccttgcagcccaggccaacgaggaagcaaaggaatctgttcaaatgcagttatgtatatttagagccctttcttcctcaaaatgctggacatttttcccctttatgtcacgtttataacaaatgtattagaaggttctgtcratcaacattttagaaacattcaaatctaaaaactcatgactctgggaatgtttaccccacctcttccaggaaacgaccttgtctgaaagttttgtctttggcatttttaagaactgaaggaaagagctgacatcatttcttcctcctttctctctttctcct

SEQ ID NO: 144137 - DNA, 507 bp, Homo sapiens
agcactttccacacattatacaacaagcatgtattattcttataatcagaaaaaacataaatcatataaaatgtagttttattgttttaacaatttgagatcagagccatacccagatcaagtattaaaaagaaaaactatccaatttcatatcaactctgttttaacagatgttagccatactgatggtgagagatgtcatgagaacttcccctggtgtttctgctgaagacaaaaccaagactgttggcataaatcatggaagccacagcaagtgcaaagcgaacmaagataattgaatcataaaaatagccaacctgttcctcaaaattccacagcttattctcttaaatgaaaactgtaaaacaagagtttacacctctataatcgaaaaagttttatgtactgggaagtgaaaacatcaactctaatgctcacattgtaatatcaagtatatatagtaatgcataagtgattacacaggtttatgtccccaagggacacata

SEQ ID NO: 144138 - DNA, 566 bp, Homo sapiens
acaagtcattctacatattatttttaaagtttatttgggttatttcttagtttwccacatagtaaccaagccaagattcgaagctattataaacattcttggctcaattttgccccctgcagggagtatgtacttcttacattgggatttaaaagtatgagagatggagaaaaccttaacataaagttgactattccaaatccagcgttgcctcatcagagagaggcaaaatctattctggtaacagaattttaagacattataaatctttcaaaataatctagtagtaaattatacccagagtggcttcattttaggcactattcaatgtgaaaattgaattattggataaaatattagagatattttaataaatgatttcttaagcctagctaattataaaaatgccctggggtactttgtaagggcctcatgctataccaatgtttcacaaacttcaccttatagcacaattacttcgcgggctttaaaaaatgctaatgtttggccatgggtcctatggctccagagattcttatgtaattgataggggatgaagcctgagt

SEQ ID NO: 144139 - DNA, 561 bp, Homo sapiens
cttgttgtagatcaactctgacaaaatataaaaaccatcttcttgaagacattcaagacatactaatgcagtgaagatttaatgaaaaaaaatctgtgtgaaagcgaaaaaagaacccttttcagcctcatttatccctactttttccctcaagatgtttgctgattcctcaaaggaagtcaaaatccttgattttgaagcaaaaccttcagtaatctcaagaggctatgtaggcaaaaattagagttctgagccttgcacggaggaagaaatcctagtaagcacctaatgtattcagctggaactcctgaaaggctacgtgctagccatggattaaatggaattagaccaactattataaaaccgaagtccagtccccaattacttcctttctacagggaaatactacatccagagactcaaattgtttccacagtttttcatacacaatgttcatcctaactaagaattacccaaaayaccaaacacaaggccaaatggccaaacattaaatgaaaaacaaagtagcaaaacgtttgcagtttaccgagatattagagt

SEQ ID NO: 144140 - DNA, 629 bp, Homo sapiens
aagcttttacggaagtaactaaaaaatgaaaagcaaattttgcagtgccatttggctggctaatttatctaaaatacgataactgtaaaaccaggtagaaggtcataattataatttttttctcagtgaaatctgtgatagatctctccacatttaargaattcagcacttttgtccattcttacattgttaaaaagaaaatatccaagaaacacaaactacaattgcaatttcttaataagactgtatgtaagacacatgtatgttaatgtcttataattttaaggaagagaaagaataattccttttttattctaaacatccagaagagtagtcctattaattcaaggtctcttacccttccaaaggaaatcatctaaaattttatgtggccatttaaatgattgcttcgggaaatttatatggtagtcatgggaacaagtaaagaagtcaaggcaacgttgatcattttaatggtgtgcaagtgatccatccaatttgtaaataccttagaccactctctaggtcatgaatgatcagaaaaggcatttatgcaaaattaatgaagtaaaatatatgttcattaatagctagaatcttctaaagttttttaattggtcaggttcatt

SEQ ID NO: 144141 - DNA, 427 bp, Homo sapiens
tccgaggggtcctaggacaggcagtcactaggtacttctcccagccactaagctgtgactggggaactttattcttttcacatgsctttctaattatgcctgaaagccccactcctttgttagggagagacatcctagcaaaagcaggggccattatacactagaattaggagaaagaaaaagggtaaatatatagactctaagtatgcttacctagtcctccatgcccacgcagcaatatggagagaaagggaattcctaacttccgagggaacacctatcaaacatcaggaagccattagacccccaaattctccttacctctgaatctacttcctccaatccctgcctaaagataattttacagggaagaggatttgcttgtgtctctccacgtgacaatcaggcacctatgtgggtgcccacc

SEQ ID NO: 144142 - DNA, 577 bp, Homo sapiens
tgttatgttgaaaagaggacattttaaataatacaatggggcaattctttaaatcagatcctctccccacacagtgtttgatatttttgctgctggttgtagttaccatttttgtttttagtggctttctgaaataattgtgtacaatctgtattctttgtcatgtatggccactgcagtctccagtcagttaacttagttgtcaactaatgattagagaaagcattccttatacatccagaaccaatcggtctctcagcctttgctaagagactgtgtgcatrttgggactggcttcaacacttggccagcagttgacaccaccactgtagccttcctgtcctactagtgaagagcctcaaggtcagatacaagtaagagagcatgtaggctcttctcagatctttcttgaacacgtgcgccatcttatgtatgcaatgactttctatattcccaataatattttgacacttttcaaagatccagtatatatcttattcagtaacttttcttcttaagctttcagttagtctattgtttactccagctgtgaaccacctcgtcaggtagccaaaaa

SEQ ID NO: 144143 - DNA, 610 bp, Homo sapiens
gctcaaggtaggataggagtgaaactattgagttctctcctttcacttttctaccaatattaccttaaataatttaacatctcaaagtttctccacgtaaactaaatgcaggaggacacccaaatggatcttttttattcctcagaacaagagccctatgtatgaacaaaagaagatcgacctccaagtaatatgtgctacaaatactaccttcgccttatttgtggatgaagastgcaataggttcttaataaatgcttgctacgtgactagtgctcagtaaattgctgtccttaaataatttttctgaggcatgaatttattgcacaatcataagatttattacattcatgtgtctaccacatgttcactggtagatagatgaatctccataacccccattctactgcttttcggattaacacatctgggattatgttcctaagtacaaagagatgcctattaaaccagatctgactttgcgctaaattccccaaatgtgctgacttcatttgacactactgtcttttgacaggagagtctcagctttctgaataatgttaagcagggaattacaataaatgtggacttggtaagtgaatgttgtcat

SEQ ID NO: 144144 - DNA, 610 bp, Homo sapiens
gctcaaggtaggataggagtgaaactattgagttctctcctttcacttttctaccaatattaccttaaataatttaacatctcaaagtttctccacgtaaactaaatgcaggaggacacccaaatggatcttttttattcctcagaacaagagccctatgtatgaacaaaagaagatcgacctccaagtaatatgtgctacaaatactaccttcgccttatttgtggatgaagactgcaataggttcttaataaatgcttgctacgtgactagtgctcagtaaattgctgtccttaaataatttttctgaggcatgaatttattgcacaatcataagatttattacattcatgtgtctaccacatgttcactggtagatagatgaatctccataacccccattctactgcttttcggattaacacatctgggattatgttcctaagtacaaagagatgcctattaaaccagatctgactttgcgctaaattccccaaatgtgctgacttcatttgacactactgtcttttgacaggagagtckcagctttctgaataatgttaagcagggaattacaataaatgtggacttggtaagtgaatgttgtcat

SEQ ID NO: 144145 - DNA, 593 bp, Homo sapiens
aaaacaagttattaactttcaagatactatggtggtacaggaattggataaacattccctttacaaaagggaaaagtcagccaaaagaagggacascaatcctcatgcaagtctgaaactcagcagagcagatattaaatcttaaagctccaaagtaatctttggctctatgtcccacaccctgggtgcatggtgtgaggggtaggttccaaagacttaggaagctctacacctatggctttctgagtgcagcccacatggctgctgtcatggatttgactctgatatatgcagcttttccaggctgagggtgcacattgctggtggctctaccattctggggtctggagggtggtggccccattcccacagttccattaggcagtgctctggtagggactctgggtgtgagctcccatcttggctcccctcagcactgccctagtagaagctccctttagggattctgcctgggcacctaggccctttgatacatcttctgaaatctatgtggaagctgccatgcctccttcactctcgtgttctgtgtgcctgcaggcttaccaccactgggaagccaccaagctatggct

SEQ ID NO: 144146 - DNA, 621 bp, Homo sapiens
catgactggagcaagagcaattgggatggggaagcagtctcctaaggtgggtacagcagagtctaaaaccaggacttctaaaagcatttgttcctcctagaactytgagcctgtgatgggaggggtttcctcaaagatttctaaaatgtctttgaggctaatatggtttggctgtgtacccccacaaatctaatcttgaattcacatgtattatgggagggatccagtgggaggtaactgaatcatggggactggcctttcctgtgctgttctcatgataatgagtaactctcacatgatctgatggttattatgtggtggagtttcctgcacaagttctccctttgcctgctgccatccatgtaagacacgacttgctcttccttgccttccaccatgattgtgaggctccccagccatgtggaactgtaggtccaattaaacctctttcttttgtaaattgcccagtcttgggtatatgtttatcagctatgtgaaaatggactaatacagaggcctttttcccattgtcttgtctgttaaaacttcactcctttttatttatgctattcttctcctgaaaatgctctttccttctctaccacatggtcagactgtgaa

SEQ ID NO: 144147 - DNA, 621 bp, Homo sapiens
catgactggagcaagagcaattgggatggggaagcagtctcctaaggtgggtacagcagagtctaaaaccaggacttctaaaagcatttgttcctcctagaactttgagcctgtgatgggaggggtttcctcaaagatttctaaaatgtctttgaggctaatatggtttggctgtgtacccccacaaatctaatcttgaattcacatgtattatgggagggatccagtgggaggtaaytgaatcatggggactggcctttcctgtgctgttctcatgataatgagtaactctcacatgatctgatggttattatgtggtggagtttcctgcacaagttctccctttgcctgctgccatccatgtaagacacgacttgctcttccttgccttccaccatgattgtgaggctccccagccatgtggaactgtaggtccaattaaacctctttcttttgtaaattgcccagtcttgggtatatgtttatcagctatgtgaaaatggactaatacagaggcctttttcccattgtcttgtctgttaaaacttcactcctttttatttatgctattcttctcctgaaaatgctctttccttctctaccacatggtcagactgtgaa

SEQ ID NO: 144148 - DNA, 536 bp, Homo sapiens
aagaattttagaagaaataatgatggaaaacttgctttttattttttaaaaataacatatacatttaagaatctcaaagaactccaagtagaataaactcaaagagatccacaattaaacacatcataaccaaactatcaagagccaaaaacagagagatagtcttgaaaggagcaatagagaagtgattaatcatgtacagaagatctgtaataagattaatagctaatttctcatcagaaaggatggaarccagtaagtagtgagaggataggaaaaagtgctgataggaaaaaaaaaaaaaaaaaaaaaaagtcaaccaagaattctatatccagcaaaagtattcttgaaaaataaggagaaatttttaagttcccacataaacaaaaactgagggtattcaacactataagtagatgtgtcctacaaaaacataccagaagagtcctccaagttaaaatgaaaggtcaaaaatatgaatttgaaactacatcaataaataaagaacaatgtcaaaaatatataagaaaata

SEQ ID NO: 144149 - DNA, 632 bp, Homo sapiens
tttaagttcccacataaacaaaaactgagggtattcaacactataagtagatgtgtcctacaaaaacataccagaagagtcctccaagttaaaatgaaaggtcaaaaatatgaatttgaaactacatcaataaataaagaacaatgtcaaaaatatataagaaaataaataagaaaatatgaatgtactacttgttgataataatatttctctcctatatgaaccacataaagcaataattaaaactctaagttagtgggcacacattgtgtaatatgacaacagctcaaaaagtggaaaggaaacaaactatacaggagcaaagattttgtataccacgaaattaagtttatattaattctaactagattgttataaataggatgtttattgtgatccccgtggtaattgctacraaattaagttttaaaatatagtcaaagaaatgagttaaaatggtatgttagacaatgtctatttaatacagacaaaggcagttttgaagaaataaaggaacaaaaaagacaaaaggcctgcgaatgtaaatagaaagttaggaagaattatgcccttttgaatgagattttaaactacttggaattagtaaagcagaagggtacacaaaggttaca

SEQ ID NO: 144150 - DNA, 626 bp, Homo sapiens
tcagggaagagaaaggaaagatggatagtgtaaacaattagcaatctctattacaattagaaattgttttatttcaagaaataaactagattaagttagtatttattcaaataattcaaaggaattgcacatcattcaaagacaaacatgttggtctggtcttacaaaggacaagaaccagaaatcagaaggatagcaaccgcttctacttttcctcatctttccaggaccatgtggtcatctctgctctctttgcaaggctctttaattcttctctctcagaatgccagatttctctgcagaagcaaattaaatgtctatgattttatttgaatatttttcaaactcttactctttagttctgattttayattctttttgtgatctaggccacaaatatcctgactagattcttggagtttcaaaaataaatttagaagagagagaatctcattgacatagcttgtgtcattttttgctaccagctattggattagttgtggcctggaagatagtttcgtgtggagcagcagactttccaggcagagaaataaaaatgataggcatgtgctgatcaacttctacaagctggtatctttaatagtcacgtactaaaactaaatatc

SEQ ID NO: 144151 - DNA, 626 bp, Homo sapiens
tcagggaagagaaaggaaagatggatagtgtaaacaattagcaatctctattacaattagaaattgttttatttcaagaaataaactagattaagttagtatttattcaaataattcaaaggaattgcacatcattcaaagacaaacatgttggtctggtcttacaaaggacaagaaccagaaatcagaaggatagcaaccgcttctacttttcctcatctttccaggaccatgtggtcatctctgctctctttgcaaggctctttaattcttctctctcagaatgccagatttctctgcagaagcaaattaaatgtctatgattttatttgaatatttttcaaactcttactctttagttctgattttacattctttttgtgatctaggccacaaatatcctgactagattcttggagtttcaaaaataaatttagaagagagagaatctcattgacatagcttgtgtcattttttkctaccagctattggattagttgtggcctggaagatagtttcgtgtggagcagcagactttccaggcagagaaataaaaatgataggcatgtgctgatcaacttctacaagctggtatctttaatagtcacgtactaaaactaaatatc

SEQ ID NO: 144152 - DNA, 626 bp, Homo sapiens
tcagggaagagaaaggaaagatggatagtgtaaacaattagcaatctctattacaattagaaattgttttatttcaagaaataaactagattaagttagtatttattcaaataattcaaaggaattgcacatcattcaaagacaaacatgttggtctggtcttacaaaggacaagaaccagaaatcagaaggatagcaaccgcttctacttttcctcatctttccaggaccatgtggtcatctctgctctctttgcaaggctctttaattcttctctctcagaatgccagatttctctgcagaagcaaattaaatgtctatgattttatttgaatatttttcaaactcttactctttagttctgattttacattctttttgtgatctaggccacaaatatcctgactagattcttggagtttcaaaaataaatttagaagagagagaatctcattgacatagcttgtgtcattttttgctaccagctattggattagttgtggcctggaagatagtttcgtgtggagcagcagactttccaggcagagaaataaaaatgataggcatgtgctgaycaacttctacaagctggtatctttaatagtcacgtactaaaactaaatatc

SEQ ID NO: 144153 - DNA, 543 bp, Homo sapiens
taagattaatcagatgaaatgccaaatgaaaagaggaagacagttgagtaaaacaaaaagtgtgatttagcagaggatttagtgcgtcaagttataccacatcctgttagtcttttatgccrttatccagtgttgtgtgtcccagcagcataacaaaggttaagaacaagtttattcaacatcagcaatgattgccagagggaagcaactcactttagtcaacatggctatcaaatgacaaagaaaggcacaagtgagaaatctgtttacaaccctggcatttggagacacaacagatgaattatagcattttgtagatattgaattatatttttacattcactcacaatacttggagtgaagagatcaaaaattctgttagaacaaattgtaatgcattttctctcttgtttctatttttccccacttctccaatatacttacatacttttaataggtcggtaaatctcctaaatattagctcacatccaatcatactgtttagagagcttctatgattcataaacatgcctgaatggattt

SEQ ID NO: 144154 - DNA, 465 bp, Homo sapiens
ggcaaaaactcaatttacaacaaaatagacaaaagatttgtaaatagatttcacaaaggaaaatttacaaatgataattaaacacaaggaaaagttttcaacattattagtaatcatgaaataaaaattaaaaacccaatgggatagcatgaataactgccagtagctaaaaatttaaaaacagttatgacgaggatatggagaaaccagggcactcttactttgctagtrggagtatgaaaaggtaaaactacctctggtaataatttggtaattttctataaagattaatacacacgtattatatggtccagcagttctattcctaatacttatcctgaagaagtgaaaataaataatttgattgtttctgtgtaaaaaattatctcaaaacttagtgggttaaaacaatagctatttattgtctcaggattatctgggttgataggggactggactcatctc

SEQ ID NO: 144155 - DNA, 593 bp, Homo sapiens
gggagttactctggaaggcgagccggggaggctgcaccagtgggtaaccagccaccgcccaccacccacccaccccgggggtggggccagcccttttcttcagtactcgggatagacctggagctccgagaatttccctggcccgggggttccagacttttcagccccaatcatgcataaaaagggttcaccgatcttggggagccacagagcctgggctgcaggcacctccctgccrgctctcccgctcctcgcaccgccgcccgacctgccttctgagcccggtgaactgcgccgcgccccccgctgtcccccgcgctccccggctactgcgggcggcgctgctgctcctgctcctggtagcctccggccggcgagcggcagatgggtcccggcgccctggggtctccggagcgggacacggctggggtagcaccccgcgccaacagtcccgctcacccagcgagtctcttcttccctaggagtatgggtggcccatgaactgccttgccagtgcttgcagaccctgcagggaattcaccccaagaatatccgaagtgtgaacgtgaagtcccctggaccccactgcaccc

SEQ ID NO: 144156 - DNA, 503 bp, Homo sapiens
agttataaaaccaaagagagctgtctaagggaagattctcaaagaccaggtgcccacttatctgtgaaaaagatatttgttggtggcattaaagaagacactgaagaacatcacctaagagattattttgaacagtatgagaaaattgaagtgattgaaatcatgactgactgaggcagtggcaagaaaasaggctttgcctttgtaacctttgacgaccatgactccgtggataagactgtcattcagaaataccacactgtgaatggccacagctgtgaagctaggaaagccctgtcaaagcaagaggtggctagtgcttcctctagccaaagaggcgaagtggttctggaaactttggtggtggtcatggaggtggtttcggtggaaatgacaactttggtcatggagaaaacttcaggggtcatagtagctttggtggcagccacggtggtagtggatatggtggcagtggggatgactatagtggatttggtaatgat

SEQ ID NO: 144157 - DNA, 520 bp, Homo sapiens
agaccatgggaagccacctcttgcatcagtatgacctagatgtgagacttggagtcaaggagattattttggaacttcaaggtgtaatgactgccctattggatttcaaacttgtgtggagcctgcagctcctttattatggccaatttatctcatttcttgtgatagtaaataagtctcatgagatctgatagtttcataaagggaagttcacctgcatacacactcttaccygctgccatgtaagacgtgcctttgctcctcctttgcactcaatcatgattgtgtggcctctccagccacgtggaactgtgaatccattaaacctctttttctttataaattacccagtcttgggtatgtctttattagcagcatgagaacagactaatacagcagtggtccaagagatagtttgttttgattccagttcttttgcatttgctagggagtgatttacttccaattatgtgactgattttagagtatgtgccatgtggcaataagaagaatgcatatt

SEQ ID NO: 144158 - DNA, 596 bp, Homo sapiens
gatttatacaagtatacagtccttcgatgaaggcttgagagcaactgaagggaaaatgtgaggcgagcctggaatagctttttattccagaaggtaagggagtgctcagaaactcagaaacaggagtcagcttgaaggaatgctcctcttggggaagaggagatgtgagtgaataggttaggagactgaggaagttagccaagtagatatctggtggaaggggattccaggcaaaataaatagccacaaaatagaagcacagctgctgtgggtttaaggaacagtaaagagcccatrgtggctggggtgagtgagcaagggaaacaacactgttgaaaatgctatcaaggagggaatagggagcctcgggaggtaaggcctgtgacccatctctaaggatttggatgttaactcagagtgagaggagaaccaatgggggattttgaacagagcagaatcatagtttgacttacattttgtaaagattgcactggcaagtgtgttaagaatagacatagaagagcttaaagataccagttaggagccttttgcaatgattcaggtgactgaagatggtggctcaacccaggggggta

SEQ ID NO: 144159 - DNA, 528 bp, Homo sapiens
atctaatcttgggttttgtctgatctctcgttgctaggatgatttattcctagacaaataggcccaacattgttagaaaagctcattttcagcagtttttgaagtctcacrtcctacaaataaaaaataggaggagggaggaaaaaagaaacaacaaacaaacataaaaaagaaaacaatcttggaaaactgatataggccatactactttgaaacccatacatcagtagacaggtatgaaagcaatttatgtatacaaataggttgttgatattttcttctgaggtttaagttgtctagtttcagttcacagggctttaagagaagcacagtgatttcaaatcaggaaaaatcagaaaaaaaggaaaagaaggaaaaaattgaaaacattattttggagattcacagacaggaaatattttagaattatgtccaaataacaggtgcactgtatattactctgaaacatggttttactctaattccccaattttactaaagataaaatcatagtaggaacaatgtatt

SEQ ID NO: 144160 - DNA, 558 bp, Homo sapiens
tgaaattttgatagggattgtattgaatctatatattgctttgggttgttaaggacatttaaagaatattaattattctaatccaagaacataggataacttcccatttrtgtatgttttcttcattatctttcattactgttttatttttctcagtatacagattttttaccaccttaattaaatttatacataagtaaattagtacagtcatagggcaaatgatatggagattcatgaaaaacctaaaaatagaactatcatatggcccagcaatcccacttctgggtaaaaaagtcaaaggaataaaaatcgatatgctaaagagatatctgcactcctatattcgtagcagcattattcataataattaagatatggaatcaccccatgtgcccatcaacagatgaatggataaataaatgtggtatacatacacaatggaatattcagccataaaaaggaggacatcctgtcatttgcaactacatgggtaaacttggaggacattatgctaagtgcaataagccaggcatagaaagatagatacttcatgat

SEQ ID NO: 144161 - DNA, 585 bp, Homo sapiens
tcagtgcatgttaggcagcaagcagataaactcatatagcttctctataggggtgagctgaaataagaatttcctccgatagctcaaatttctcatgttgtaggcaaagccctccagaacacatttctaatccagagttcattccaactccttccccacacaagccttctgctttagtcagaggcctctcctcagattcttctctgtgaactttgcttggaaggaatgactatttcctcctaaaccctgttcatattccggagtccttcaaagctagytcaaatttcacttcagtagaactctttcctaaaaattgtatccttcccatccctttcttaaatgtcaatagaataattatttttgccacacattttggtggtatattaggattctaggcagtcataacaaattaccaaaaacgtagtggcttaaaacaacgtaaaatgtaagaccttgcatttctgtggctcaagagtctgacacaacttcactcagttaagaccgaggagttacagggctggtttcctttctataggcgataggggtggagcctctttcttcctcattcagatgttggcagaattc

SEQ ID NO: 144162 - DNA, 552 bp, Homo sapiens
cttaagggttctcttaaaatattttagtttacattaacaaattacaaatttatggtagcaaaaacccaccaccgttgtggtacagtagaaatgcctgaaaatggcctccttgtaatgacttaccttagatatttgcaaatgctgtaatcagtagtaatgatggcatagcaaaatagtatttgattaatcacattaacatcaaaataaaattttgtgtaaataaattttgggtaagtaaaaattagacatagtaaatgctaaataattttattaggaaaaagtagtggtataatcatgaaatattaatagtaatatcatgacatatgtgttttaactttgaggagagaaatgagatgcctgaataacggccaagcatcagtcttttaataggacattgcatgcttgaaacagatatactctccatttgtcacacaaygtagctattgtaatgtgaacagtgtagcagtcattgatgatagttatgtaacattctgcagagaaattttaacaggatcaaaattctacagagcagcactatctatattgttttac

SEQ ID NO: 144163 - DNA, 514 bp, Homo sapiens
actaaacattcttctattgaaagaagatgccatctaggactttcatgcctagagagaagataataccgtgcttcaaagtttcaaaggacaggctgactctcttgttagagactgatgcagctggtgactaagttgaagccaagactcttttaccattccagaaatcctaggacccttaagaatttattaagtctactttgcctgtgctctataaatggaacaacaaagcctggatgacagcacgtctgtttacagcatggtttactgagtattctaagcctattgttgagaccttttactcaggaaaaaaaaaakatttctgtcaaaatattactgttcactgacaatgcacctacttaaccaataactctgctggagatgggtaaggggattaatgctgtgttcttgcctgctgacacaacatccatactgcagcctatagatcaaggaataatttagactttcaagtcttactatttaagaaatacattttgtaaggctatggctgtcatag

SEQ ID NO: 144164 - DNA, 560 bp, Homo sapiens
cagatctagctaagctcattcatgaaggtgactacagtaaaaacagattttcaatgtagactaaacattcttctattgaaagaagatgccatctaggactttcatgcctagagagaagataataccgtgcttcaaagtttcaaaggacaggctgactctcttgttagagactgatgcagctggtgactaagttgaagccaagactcttttaccattccagaaatcctaggacccttaagaatttattaagtctactttgcctgtgctctataaatggaacaacaaagcctggatgacagcacgtctgtttacagcatggtttactgagtattctaagcctattgttgagaccttttactcaggaaaaaaaaaagwtttctgtcaaaatattactgttcactgacaatgcacctacttaaccaataactctgctggagatgggtaaggggattaatgctgtgttcttgcctgctgacacaacatccatactgcagcctatagatcaaggaataatttagactttcaagtcttactatttaagaaatacattttgtaaggct

SEQ ID NO: 144165 - DNA, 469 bp, Homo sapiens
aagaacatttgtaatttatgggaagaagtcataacatttacattaacagggatttcawagaagttgattctggcccttatgattgactttgagaggctcaagacttgagtgaaggaagtaattcccaatgtaggggaaactgcaggagatctggagttagaaatggagcctgaagatgtgactgaattgctgtgatctcgtgataaaacttgagtggatgcggagctgcttcttaaagatgagcaaagaaagtggtttcttgacatgaaatctactcctcgtgaagatgctataaatattgttgaaattacaataaagaatttaaaatattacataaacttagctgataaagccgtgacatagtttgagagaattgcattagatttacctgtttctgaaagactttttggaattcctcttacaaacaatctgaatgtgaatatagtgctttatttggaggggcagaggg

SEQ ID NO: 144166 - DNA, 489 bp, Homo sapiens
acattaacagggatttcatagaagttgattctggcccttatgattgactttgagaggctcaagacttgagtgaaggaagtaattcccaatgtaggggaaactgcaggagatctggagttagaaatggagcctgaagatgtgactgaattgctgtgatctcgtgataaaacttgagtggatgcggagctgcttcttaaagatgagcaaagaaagtggtttcttgacatgaaatctactcctcgtgaagatgctataaatattgttgaaattacaataaagaatttaaaatattacataaacttagctgataaagccgtgacatagtttgagagaattgcattagatttacctgtttctgaaagactttttggaattcctcttacmaacaatctgaatgtgaatatagtgctttatttggaggggcagagggaggaaattattctccaacatctttattacttctttggcaattgttctaattaggtgttc

SEQ ID NO: 144167 - DNA, 561 bp, Homo sapiens
ttcttggaagacaaggataagattttatttcttctctttggatcccccaccttgggacaaacacactttccctcttactatagttcccacacacataaaactgttggttgaatcattatttagtgtttgcagtgtttatgaatacataaatattattcaaaacaaaaggmtagggattttctagccatgtaaatatacttttggtttaccttctggggaagaaattgtgatgattttctcccattggcaattctgtttttcccctgtggtaaccttgaaacattttttcccggtccctaaagtaaatatactctagagagaaaaagccagcaaaaacaaacaaacaaacaaaaatgaccaaagacccgtaggggaggaatctttaaagggggcataataggtcatttattgtataccacacagcatttatcattctctaaaagtcttcgagaaaaatctgttcccatgtctctcttctcagttgcctgatggcaaagatctctccatttccacttctgtctaataatttatgtagttccttgcacatagatcttcctgcaa

SEQ ID NO: 144168 - DNA, 561 bp, Homo sapiens
ttcttggaagacaaggataagattttatttcttctctttggatcccccaccttgggacaaacacactttccctcttactatagttcccacacacataaaactgttggttgaatcattatttagtgtttgcagtgtttatgaatacataaatattattcaaaacaaaaggctagggattttctagccatgtaaatatacttttggtttaccttctggggaagaaattrtgatgattttctcccattggcaattctgtttttcccctgtggtaaccttgaaacattttttcccggtccctaaagtaaatatactctagagagaaaaagccagcaaaaacaaacaaacaaacaaaaatgaccaaagacccgtaggggaggaatctttaaagggggcataataggtcatttattgtataccacacagcatttatcattctctaaaagtcttcgagaaaaatctgttcccatgtctctcttctcagttgcctgatggcaaagatctctccatttccacttctgtctaataatttatgtagttccttgcacatagatcttcctgcaa

SEQ ID NO: 144169 - DNA, 527 bp, Homo sapiens
taaatggtttaacttcattagggaataaagataacgatcgcttgagagaatttccagaccacagcacagggaaggagaacrtatgtgaagtttagcagacataatgagtttagatacagaattgagagtccggtaagactaaggcaaccagagttgacagaatacattactagagagtaatcagctacacagagagaaacctgaagagatctttagaggatttttcattgtggggttattaattcagcagattaccaaccagcatatatgtgtaaggaaactagtgaggctgggggaataactttccaaaaagattagaggtaacaatgtgcagtgcttacacagggccaggcatagtgtagttaactacactgtaaaatcgcaatggtcatgaggcattgggcaaagtacagagaaatgtctttcctcagtagtggagagtatttaaccatagactgaatgctacattgtttccatgtaacaaattttacaagcaagatcagaaaggagagcattgctttcaagta

SEQ ID NO: 144170 - DNA, 527 bp, Homo sapiens
taaatggtttaacttcattagggaataaagataacgatcgcttgagagaatttccagaccacagcacagggaaggagaacatatgtgaagtttagcagacataatgagtttagatacagaattgagagtccggtaagactaaggcaaccagagttracagaatacattactagagagtaatcagctacacagagagaaacctgaagagatctttagaggatttttcattgtggggttattaattcagcagattaccaaccagcatatatgtgtaaggaaactagtgaggctgggggaataactttccaaaaagattagaggtaacaatgtgcagtgcttacacagggccaggcatagtgtagttaactacactgtaaaatcgcaatggtcatgaggcattgggcaaagtacagagaaatgtctttcctcagtagtggagagtatttaaccatagactgaatgctacattgtttccatgtaacaaattttacaagcaagatcagaaaggagagcattgctttcaagta

SEQ ID NO: 144171 - DNA, 527 bp, Homo sapiens
taaatggtttaacttcattagggaataaagataacgatcgcttgagagaatttccagaccacagcacagggaaggagaacatatgtgaagtttagcagacataatgagtttagatacagaattgagagtccggtaagactaaggcaaccagagttgacagaatacattwctagagagtaatcagctacacagagagaaacctgaagagatctttagaggatttttcattgtggggttattaattcagcagattaccaaccagcatatatgtgtaaggaaactagtgaggctgggggaataactttccaaaaagattagaggtaacaatgtgcagtgcttacacagggccaggcatagtgtagttaactacactgtaaaatcgcaatggtcatgaggcattgggcaaagtacagagaaatgtctttcctcagtagtggagagtatttaaccatagactgaatgctacattgtttccatgtaacaaattttacaagcaagatcagaaaggagagcattgctttcaagta

SEQ ID NO: 144172 - DNA, 464 bp, Homo sapiens
acaagttaaaattcacatctgataatcaatctgatcttaccagctataaaaaaataacaaaaaccagaaaaatggactcatactgacaaggtaaatcaaataatcaaaaccaacccagatctgcaggtatttaaaactgtcgttataaatatattccatgtgatcaaatattaagtagcaacatggaagacataaamaaagacccagatatgacttctagagatgaaaactatcatatgtgagatgatactctgggtggggttaattgcagatagcacattgcaaaagaaaagattactgaagtgtgagaaacagcaataaaaattatccaaaatgaaacccagaagaaaaaaggagagaaaaaaaggtgaacagaccatcaatgtcttgtgggacagtttcaagcatcctaataagtatgtacttggagagtctataggacagaagaagagagaaaaatgttt

SEQ ID NO: 144173 - DNA, 444 bp, Homo sapiens
tggtgatagtttcttctaggtttattggttactgctggctacccagcccccaactcctctgcagtagaatacaagttccataagagcagaatcgcgatgtgtctggttcatctcgttattccgagtacccagaaaatttgtctcattggaggtgctcaacacatatttactgaatgaatgaatggcccacataatcaccactggaagcagcttttagtattataaagaaatccctttaaaactgcttattttacatcacatgtttttggtttgactctatataatttaacaaaacttaagcaagaagtactgtaacttgtatttcttcagtaatgagtcaaaaaaactcatggtctaaggacatcatttctagtgctaagtatgtgttsgttgcttgctggggcacaatgacttttctcactgagatgtaatctagattcactg

SEQ ID NO: 144174 - DNA, 506 bp, Homo sapiens
aggctcatgaaaagtgtccccattgtcccttttacttatggctttttcttccttgaaggactgaggcttctttctcaagcctgtccagtttctctacacacaaagctcccctcagttccccattccactaatgactgtctacaaacagacatcctcaacccccccatcatgagtagtgttaatatgacaaaccaatgccaactgcagtggtcactgataaagggttatgctaagttccatctctaactccttagggaggtcaggatgtttttgaatgggatgagatcagcaataaatatcactgaacaacacaaracaacccctgaacttgactctgctttttctcaagtgaactcatatgcatgaggatagagtgagggcttcagggctggggttgtgggaggtatgtgtggggaaaacaatctcaccttggctcagagacaggaacatcaggcaggagatcagcatgaagcatgagttggtctgagccatgctgagcagcagtg

SEQ ID NO: 144175 - DNA, 609 bp, Homo sapiens
ctaaattcacacatgtgggtatattcacatacccaagaaatcacaaccacattttcaaggctcatgcttcaattacagacaagaatgacttggagcaattcttatttgctctcaaaaattaaytagaccaacataccatgcagtaaatatctttgtataaaatgacatttaaattttacatgaggcttagagaaggtaaccaccaatcaccttctaagaattccattagtggaaagcaaagaaggtgttctaaaattaatgaatctatcaactggagtgaaacattcaaaaaacctaccaagtcaaagagcaattaattgggtcttttcagaatttaattcgttcctgctgaatgcctgaagaatgttactcaaaatgaaataatgtggagttgaatatcaagaacaaagaattcaggaatagaatacacttctcatcctgacttggtcactaatgtacattttgacataaactaagtccagtttctacatttcttccttgtaatatggaatggattaacacctgccctgcttaacatatgggataattttgaggaaaaaatgatataatggatgatatagacaatttagacattgtataagttagagg

SEQ ID NO: 144176 - DNA, 601 bp, Homo sapiens
tctgtaacaactgaataccttcttaaaaagaaaatatattgcacttaagtttatatagacaatggaaaaggcttgacaagtattgcttkcttgatgtcccccagggtagattgttgaagattaaggttaagaaacagaacaaaatgattgcaactaatagggaagctgcagaaataattcagaggagtcatttcaccgtaaccatcatctgcagatctgttgttctgttgttccactgaaaattattgtctgttatggagctaccaggcactgcatataatattattattcgctcttactatgtgatcatatgagctaggcaccatacttaatgatatccatgcactattttatttaatttccaccacaaccctgtgaaataggtctatttgatttgcgagcccatatctgtaatcactatgccttcctctggcccactgtgtaggctggcatgaggcctggtttgcatgagaatgggtatcagaaggcccagtggaacatcatgagtagagtaaagagagcagcgcaaccttaaagcattcctactctctcagataatttatgacctaggaatcttactgggaagcccaacccagcactc

SEQ ID NO: 144177 - DNA, 584 bp, Homo sapiens
gcaagagtgaggcaggagcataaagacacagcactctccaggtgacctgaggtctacctcatctctgttttcttctgtcctggccccttcactgctctgagaatcaatatcctcatcctaaaagggagatctagactagaccagtgggtagaatactttttccataaagggccagatactaatattttagaccacacgccatatcgtccctgttgcaactactcaactctgtggcagcaaaaaagcagctacagacaatacgtaataaaaggagggaggctgtgtttgcagctcgtaggttgccatgctctgagctccacattctcttggttcagaagttcagccattatagcccagggttcaaattgaggcccaacagaccttgttggtcttcagttctgtgagctcagtcctcttgatctattttctgctctgataacctgtctggacccagatttygtgccaagaatgggagcttgccatcatcctgctaggctccccagactaattggaagccaagtcactgtaacttactgatgccatcactgtattcccgatgccatcagcaagtagaattgatagca

SEQ ID NO: 144178 - DNA, 665 bp, Homo sapiens
agagttagaaagggtatttttaagaaagatactgtttttaataggaagaaaaatataaaggatctagaaatatatccgacaaaaatagtcaagaccatgtaaaactttttaaactttaaagaagactttaatatacgaagaaatatatcatgttttagagagacagattcaatatcctgaagaggttacttttccctacacagatggtctgtgatttatgatagttctacttataatttttctaccgtatcatggtgggaaagtgatatgcattccctagaaggcttatatcagattttgaatactggtcttttactgggctagcagtatgcagtacggtactctctcatgttgcctcagcataggcagcaagcactgccctggtggcaataccatcttgaaagtaaacagctgatactccacagtgtactgtgttttcagatgattttgcccaaccatgaatgcmggaggtgtgcctggaggctatcttaatagctggccatcagaattggaaactggtactttaatcgtcaagggcttggccctttctctcttcctcttggtagaccgttttgaatctccataataccatttgtacacaggagaatgaacttcactcaattttgtccagcagtcctcaaattccagataaacttgaatgtatg

SEQ ID NO: 144179 - DNA, 622 bp, Homo sapiens
attgtccctgacgttgtgacacaatcagccctaggggagtctgatattacttaaaacagaacttctcaaataattttctgtgaaggatctttttttttcattaatttgcaatctaccttgcatggtgacttttgtaaaatacagtaaaaaatgaattacttaaacttctggctacagtgttgacatagagagctttggaaactgttactcttttctttaaaacaagaaaaatctgaataaacttaaaatcaacaactttcctttgggctaatgagagaactgaggtagcagggcaagttgataccccaatatctggaaaagcacccaaatacacagagttgtttacatttctgcttacctggagcaaaagcctctagagctacaagctgttaggaacatttaaatggtgattttgaaaaattgctggatgttgagtgcagcttggcattaagagtgagaaactcayggaagttgcactcctatgaaagccctcacgccttcatggattttacgttcaggaatcccaacaggttctcttcgtggagagtcaaaaataattctctcatggctttgtcaggaagagtagaaaagaaaccatttctaaatcagtccagagcattct

SEQ ID NO: 144180 - DNA, 665 bp, Homo sapiens
agagttagaaagggtatttttaagaaagatactgtttttaataggaagaaaaatataaaggatctagaaatatatccgacaaaaatagtcaagaccatgtaaaactttttaaactttaaagaagactttaatatacgaagaaatatatcatgttttagagagacagattcaatatcctgaagaggttacttttccctacacagatggtctgtgatttatgatagttctacttataatttttctaccgtatcatggtgggaaagtgatatgcattccctagaaggcttatatcagattttgaatactggtcttttactgggctagcagtatgcagtacggtactctctcatgttgcctcagcataggcagcaagcactgccctggtggcaataccatcttgaaagtaaacagctgatactccacagtgtactgtgttttcagatgattttgcccaaccatgaatgcaggaggtgtgcctggaggctatcttaatagctggccatcagaattggaaactggtactttaatcgtcaagggcttggccctttctctcttcctcttggtagaccgttttgaatctccataataccawttgtacacaggagaatgaacttcactcaattttgtccagcagtcctcaaattccagataaacttgaatgtatg

SEQ ID NO: 144181 - DNA, 622 bp, Homo sapiens
attgtccctgacgttgtgacacaatcagccctaggggagtctgatattacttaaaacagaacttctcaaataattttctgtgaaggatctttttttttcattaatttgcaatctaccttgcatggtgacttttgtaaaatacagtaaaaaatgaattacttaaacttctggctacagtgttgacatagagagctttggaaactgttactcttttctttaaaacaagaaaaatctgaataaacttaaaatcaacaactttcctttgggctaatgagagaactgaggtagcagggcaagttgataccccaatatctggaaaagcacccaaatacacagagttgtttacatttctgcttacctggagcaaaagcctctagagctacaagctgttaggaacatttaaatggtgattttgaaaaattgctggatgttgagtgcagcttggcattaagagtgagaaactcatggaagttgcactcctatgaaagccctcacgccttcatggattttacsttcaggaatcccaacaggttctcttcgtggagagtcaaaaataattctctcatggctttgtcaggaagagtagaaaagaaaccatttctaaatcagtccagagcattct

SEQ ID NO: 144182 - DNA, 603 bp, Homo sapiens
tttgcctctgaatatgcaaggaaacactctcccctgcatttggagggtggactgaggctctctgatctcatatgcacaggcaactgcctccccacattgctcacttattgggctgcctccttccagaatgaagaaatgaaagcattctgtcaagagaaaaggtgagaagccccggggcagttttctgctactgtattgggggtgatgagccaggatctgctgagagaatgcttattctgaaaggggctcaagctggctttctacaaggaggcaagagtgttaggtctggggagaagtggcacaaaaagcagagaaaagtagactttagccttcaatgtcaagcattgcctacacaattgcgccaaaggccagtctgaactgtctgtgagtgagagtgtgatcatattaaattgcaggtaagatcacttcgcttcagagcacttcagtgactccctgtccaagggacgaaatccagatcccttatgaaaacacagctggtcttctctaatctgatctcactctgaccytgcagccattttccctggcacaatcctctcaacagccccacaggcccttcccaaaaccccagaacaaggtaatgcc

SEQ ID NO: 144183 - DNA, 464 bp, Homo sapiens
tggagcgagaggtatagatagagagttrgaacatctagcaaatattaggttacaatgatgctatagtttgaatgtgccccccagaattcatgtgttggaaacttaatctccaatgcaacagtgctgggaagtggggcccaatgggagatgttcatgtgatgaagcagtaagtgtgatgatgcagcaagaaggccctcaccagatgctagcatcttgatcttgaacttcgcagcctccagactgtgagccaatgtattctattatagtggcataaaatgactgagacaagtggtgccctttggtatttgttctaagccctcaatcccaaaacactgcattagaaaagttaacttggctgtaatataggggtatcagaagagggggcagggggcagtttccttatctggaaaataaggagttggactgggccagtgccttgcagagtacacccaaaccttcagttt

SEQ ID NO: 144184 - DNA, 464 bp, Homo sapiens
tggagcgagaggtatagatagagagttagaacatctagcaaatattaggttacaatgatgctatagtttgaatgtgccccccagaattcatgtgttggaaacttaatctccaatgcaacagtgctgggaagtggggcccaatgggagatgttcatgtgatgaagcagtaagtgtgatgatgcagcaagaaggccctcaccagatgcyagcatcttgatcttgaacttcgcagcctccagactgtgagccaatgtattctattatagtggcataaaatgactgagacaagtggtgccctttggtatttgttctaagccctcaatcccaaaacactgcattagaaaagttaacttggctgtaatataggggtatcagaagagggggcagggggcagtttccttatctggaaaataaggagttggactgggccagtgccttgcagagtacacccaaaccttcagttt

SEQ ID NO: 144185 - DNA, 464 bp, Homo sapiens
tggagcgagaggtatagatagagagttagaacatctagcaaatattaggttacaatgatgctatagtttgaatgtgccccccagaattcatgtgttggaaacttaatctccaatgcaacagtgctgggaagtggggcccaatgggagatgttcatgtgatgaagcagtaagtgtgatgatgcagcaagaaggccctcaccagatgctagcatcttgatcttgaacttygcagcctccagactgtgagccaatgtattctattatagtggcataaaatgactgagacaagtggtgccctttggtatttgttctaagccctcaatcccaaaacactgcattagaaaagttaacttggctgtaatataggggtatcagaagagggggcagggggcagtttccttatctggaaaataaggagttggactgggccagtgccttgcagagtacacccaaaccttcagttt

SEQ ID NO: 144186 - DNA, 464 bp, Homo sapiens
tggagcgagaggtatagatagagagttagaacatctagcaaatattaggttacaatgatgctatagtttgaatgtgccccccagaattcatgtgttggaaacttaatctccaatgcaacagtgctgggaagtggggcccaatgggagatgttcatgtgatgaagcagtaagtgtgatgatgcagcaagaaggccctcaccagatgctagcatcttgatcttgaacttcgcagcctccrgactgtgagccaatgtattctattatagtggcataaaatgactgagacaagtggtgccctttggtatttgttctaagccctcaatcccaaaacactgcattagaaaagttaacttggctgtaatataggggtatcagaagagggggcagggggcagtttccttatctggaaaataaggagttggactgggccagtgccttgcagagtacacccaaaccttcagttt

SEQ ID NO: 144187 - DNA, 584 bp, Homo sapiens
tagggtagctgtgactggaacattctggctcacacagtaattatcaatactcttccccatgccaaatgaggagcattccttacagaaataaagtgactatatccgttgctttagagccccaaagaagaaaatggtcttctgcataccgatagcaacctgagccctccagcagtccataaccagggcatcagcaaaaatgaaggggcctcccaggtcctgcactggaaggagattcccccaaaccacctgtgtcagaacgagcagctcagatgcactggcrcatctcagagagtgcagatgacagaagcatcacgcccaggttccagcactagttctaccactaactagctgaaaaccctgggcagtttacttaactatgcctgtgcctgaattttctcagaggattgtgaaagcattaagtaaatgtatgcatgggccgtatttacaacacagtctaagttctcaattaatatcagccactcctttagatcaggagtcaggaaactgcaaccccatctattcatataaataaagttttattggaagacagttttctcattcatttacttgttgtcgattgcagt

SEQ ID NO: 144188 - DNA, 486 bp, Homo sapiens
ctcagaacaatcctctttggctctgctctctgggccccttggaggcatcaccccatcaccctagatggtggactcacccccttgtatctgtgagggccccaccccatggctctgcaggggacctccccctagggaaatgacattctggttgtggaagctgaggaggaaacagccttacccccacacccatgatgggaggggcaccccgatgatctctgaattgtctttgaggtcattctcttttcttgaaggataaggcttgactgaagctaaagagttctactgtctcatcccagaagtcagacagccttctttcatcctatcccaccttctctgttctctttaactcaaaygaacagtgtttctgctagcacaaccccatctctgttcctggattctgctgagatggctgactaaacccatgagtaatcttgatacagagtgactgtccagccacactcattgttctcttcagaacatgttttc

SEQ ID NO: 144189 - DNA, 486 bp, Homo sapiens
ctcagaacaatcctctttggctctgctctctgggccccttggaggcatcaccccatcaccctagatggtggactcacccccttgtatctgtgagggccccaccccatggctctgcaggggacctccccctagggaaatgacattctggttgtggaagctgaggaggaaacagccttacccccacacccatgatgggaggggcaccccgatgatctctgaattgtctttgaggtcattctcttttcttgaaggataaggcttgactgaagctaaagagttctactgtctcatcccagaagtcagacagccttctttcatcctatcccaccttctctgttctctttaactcaaacgaacagtgtttctgctagcacaaccccatctctgttcctggattctgctgagatggctgactaaacccrtgagtaatcttgatacagagtgactgtccagccacactcattgttctcttcagaacatgttttc

SEQ ID NO: 144190 - DNA, 476 bp, Homo sapiens
caagctcagcacgcaggcggattcacggctcagtccctgcagagaactccagagtccctgggatgaacctgtcagtgctgcaggctctgcggctcattagcagagagagcagcaggcagggcttcctacaacttctcagcacatgcctggccctccctcctcactcggaggtctcctggataccctgggtgggcttgcaatcatcacatgttccgtttttctatgtaagcctccctgcagaagatcccaggctatggttgacatgagacaccgctagacaagctgggtcagctctggagagtgacacaaggggacctctccaatcccttaggtaccagccaaggagaagaaagggaactgacctctatctggkcttcatatatgccaggcacggtcccaaatactttgcacatgtgatctcatcaaacccaagcaacagtcctgagaatgagcgtggcattatccccactttgtgg

SEQ ID NO: 144191 - DNA, 564 bp, Homo sapiens
agaagcctgaagtctggtcattgttatcctggttagtctagttaagaccctgcctaaaatcacaggctaaggagagcatgccaagagtcattccctccttaagggctatgttccaaggggaaaaaatcactctatatagatgcatcctcagatgaatgaagatgtggcctcagatcctagagcagggagggggcccccttagtcttcacttagtctgcccccttagtctttgcttaaaatgcagtggaatatcctagttagtttaggaaacttcagagacccggtaaggccaccaacacttccacactcagggcaagagtctctatgggaaatggagtgctccaagttgccgcaggtgcagcgtgcgagctcagtgtgcgcgtgtacatacaggggagtgcaaagcaagcactcgtttgcatagagcctctccgcatgctcacagacacacagagaaacgtgcacagagccaccgcctcttcaggaaacttcyagaggcccttccaagtagaccactgggtcttcacccacagactctgcatcagggtttcaggatgtacccta

SEQ ID NO: 144192 - DNA, 416 bp, Homo sapiens
aaccctccattcagaaggaattgtgcttctattacacccagtgactggcgggacccatggattgaataaaatgaccattgataatgggataaatggcactacatgaatgtccccacatgtcaggaacagactctccccagccctgcagccacagaaatgagctggtgcaaaaggaacacaatgcgacctgggcttccctgaagttccccaaatctaaaatcagtcaggtagctggaacccgactcctcttggaagaccgcttttatcatccaaaacaacattcatatatttctatctgaccacagaattttgttctcagaaagccagtcaaacctacataatctgcytactatcagcactccctatttacaagagctcagacaaggaggaggccccaagccgcaggcagcagtgct

SEQ ID NO: 144193 - DNA, 598 bp, Homo sapiens
aagcttgttttccttatctaaggtcgcaaagaaatcacttactttactctctcaccccatatacataagtacctgctatttgtcaagtggtctgctagccctggaggtaaaatgaaaagccagacatattccctgctttcaaagattacacaatctatccagggagatggacaaataagcagaaaatcrtcctagaatataacaactctaaaacatctcaataagtgctgagatcagggaggtcttccaagtggaggtggcccttgagctatgtcttagaggatgaatttgagttttctgagcattgagggagaggtagccggtccgaagagcacagcataggcaaggcccagtggaacgaagggacagctggtcagcgtggctaagaggctgcctgggtgttgggagagagaccagggaagaagcaagccaaggcttacgcagcgccagaggactcacactcgatcccagggcagcaagaagctactgaaggatcccagcagaagagggcccacatcccatccagagacaagaaacgaatctctgccagcgtgacagaggatgctcttatgggtaggagtgaggaggtatgtccaga

SEQ ID NO: 144194 - DNA, 631 bp, Homo sapiens
ttcatgactcttaccgagcagttgtcaagggctgaaaagaaaaactccacaagcacttaattccccagtgggagccctagggacacactgcaggtggcaatgagaacaggcctgcctaggccctcctgctgccaccctaaccctttaaattagaaagacaaagcttgtaatctgagacgaaaggcgattgccccagcctctgaggctctagaatactcagacttgcaggccagcatcagcatctaggctgtcaccctcaggcagatttctgagtctccatgtgaagcaggaagccacagggaggtggctcacaggtccccactgaggccccaaatgatgacctgtgccttaatctgttttccaaattccatttgtgggagttccagtgagcaactctctttcctgtgggggtaacttatcagcctctcatcctcctgtggtagctccagggttatggagcagcctcccgctgctgacctgaactgcccacataatctcccaacaggagtgaccttatttaggtgatagaaccttataacgtaaatcactggaggatggcctatmtgaacatgacagatagcatattttctgtcaactacaccatgaaccagttttccacccattttttttt

SEQ ID NO: 144195 - DNA, 573 bp, Homo sapiens
aaaagctaaattaattaatttttttttttttgagacggagtctcgctctgtcgcccaggctggagtgcagtggctcgatctcggctcactgcaacctctgactcccgggttcaagcgattctcctacctcagcctcctgagtagctgggactacaggcacaggccactaggcctggctaatttttgtatttttagtagagatggggtttcaccatcttggccaggatggtctcgatctcctgacctcatgatccacccgccttggcctcccaaagtgcttggattacaggtgtgagccatcgcgcccggccctaactaaatttttaatcagggagctttgtttaagatcaaactggttgcagtggtaagaaatttttagcatggaaaccaggtaacaattatcatctttatcaagatgataaaggcctggatcaaggcagtggccatgtggaagccaataagagaagcaatccaacatgtaaagagatttctaaggcagcactgcagrggacttgatgcctattggatacggagaagagagagagaagattcctagaggtgttgctaaccaag

SEQ ID NO: 144196 - DNA, 343 bp, Homo sapiens
tatctgagaatatctgctcagaaggtagagcagcttctaggagaagttattgtttagtgtttgggaaaatatttgaggagttaatgtgattacatggtacatttttgcagggttagtamatatgggtctcggacctgcagaatgtttggggaggtaaggccttgcttgatagtagatgagcttactaagggccgaagagacgtgtggaaggaggcttgtgcatgaaacccaagagaaccccaacctttaaaggataggtggtggaggggagcctaaaaaggagaggagaagcaataataaaaccttacaaaataatcaaagtgccaaaactccattgcaccaa

SEQ ID NO: 144197 - DNA, 556 bp, Homo sapiens
ccacagcttgagaccctctgcctgcttgcttcccccctcccctcccaggtttttattccccctgatatgaaaacctagcaatggctctagcactaggttccttgcaaagacagaccaaatttgcaatgactgggtcgcaagagagaaatgtcatttgctttttcctaggatgggctccagatctctctccacctgttaaagacaagttgctagtggcacttaaattaccaattttaaggttttataaaatccaatacagtctaaaaaagtgcatatgagccgctcacttagcaggagtaaagtggctgttcgtgctgaggccaagatgacaggtragcacacccacaaaagaggggtgtgcacccaaggatggtgcatgccacctgagaggactctaacctttgaaaaaaaaattaaagagctgacaattgagctgaactgtttttaggatcaaaaagtgtaatcccgagtttcttgtggaatgactgatgattgatgatgatgatgatgatcagtacataaaagcaaaagcagggggggaggagccaagatggcc

SEQ ID NO: 144198 - DNA, 490 bp, Homo sapiens
ccaaataacaatttgcattggagcctcttagagatacttatttcctgcaaaccaaacgtctacatgctctgtaaagggaaggatttagagtttgaagtcaggggttctgggatttttgatccaaggtctacaaaagtgagccttggatttcttaaatataaaacagtgatagcaataataactgtgtcacaagatttttatgagaattaagtcaaatatataygggaagtcttttgaaactaattttttaaaaaccaattttgcccaaaaagtagttgctttggattttatttttaacatctttataaactccacaatacctagcatcagggtttctttttaaaattggtattgaatcattatttgtgaataaatctataagattcaacctacaaaaaaaaaagctcatttcttgtattaattcagatgtacctagatttgagaactgtttcatgacagtaaaacatgagaaagttaaattgcctgatat

SEQ ID NO: 144199 - DNA, 490 bp, Homo sapiens
ccaaataacaatttgcattggagcctcttagagatacttatttcctgcaaaccaaacgtctacatgctctgtaaagggaaggatttagagtttgaagtcaggggttctgggatttttgatccaaggtctacaaaagtgagccttggatttcttaaatataaaacagtgatagcaataataactgtgtcacaagatttttatgagaattaagtcaaatatatatgggaagtcttttgaaactaattttttaaaaaccaattttgcccaaaaagtagttgctttggattttatttttaacatctttataaactccacaatacctagcatcagggtttctttttaaaattggtattgaatcattatttgtgaataaatctataagattcaacctacaaaaaaaaaagctcatttcttrtattaattcagatgtacctagatttgagaactgtttcatgacagtaaaacatgagaaagttaaattgcctgatat

SEQ ID NO: 144200 - DNA, 564 bp, Homo sapiens
aagaaaccaaagaaggaaattcaattaggctcaccctttccatttcaaaggatcaaatcctcccctttcacagttaaaattatgaaagattatcttcttagtggaaggctacaggaaaatttggattcctgtcaaatatttagcgtaatatcccgagatcaggattaatattgcctttcagcagctcactctgaatttctgtggatgctatctctcttttggaagcttttgaataaaaggcattctatattcttgcatgactcaaagtattcagcagaaattgtaacaagatcaaacagttttaggacaagttatcatgcctgctggtcatgaaaatgcagacacctcaatttcatttccacacttctgtgttgatccaccaacttctcagagaaaaytgaaattattgaagtcaggttttaagtttatgtgaatattttggggttgatttaaaattacagacaaaagcagcagtaaaaaataacataggatagaacaaaatataatctaatcatttctgtttggtagaactatatcaaatatccctagagaataatatattaa

SEQ ID NO: 144201 - DNA, 564 bp, Homo sapiens
aagaaaccaaagaaggaaattcaattaggctcaccctttccatttcaaaggatcaaatcctcccctttcacagttaaaattatgaaagattatcttcttagtggaaggctacaggaaaatttggattcctgtcaaatatttagcgtaatatcccgagatcaggattaatattgcctttcagcagctcactctgaatttctgtggatgctatctctcttttggaagcttttgaataaaaggcattctatattcttgcatgactcaaagtattcagcagaaattgtaacaagatcaaacagttttaggacaagttatcatgcctgctggtcatgaaaatgcagacacctcaatttcatttccacacttctgtgttgatccaccaacttctcagagaaaattgaaattattgaagtcaggttttaagtttatgtgaatattttggggttgatttaaaattacaracaaaagcagcagtaaaaaataacataggatagaacaaaatataatctaatcatttctgtttggtagaactatatcaaatatccctagagaataatatattaa

SEQ ID NO: 144202 - DNA, 578 bp, Homo sapiens
taccaaatatccatttacatgcaaatacaaactctgtgctcagtcctcttctgactccccatttgaaatatttagaatttggtttcagactctttttgtatttcccacaataatatgcatcttctgttttaggaaggaaaactttttaaccttcatactattgcagttctctatatgttattgtcattcattttgatttcactttatcatctagtaatttttgcttgtcacttctttttatctttcttttgctctgccctctttttcccttttgccacagggcatctgtttccagtgttatctaggcctgaaatgctctccctataattgtaatcttttattccctcattttctgatatratccataagctgactacccccctgattactttccaaggatgtttcacgtacatactgttttctgactggctctgcctcagactcctatgttcaaataccagtttcttctccacataggtgtttattagacttctcaaatctcacagtcaaaatagtcctctcaatctgtatgttagaaattccctctatccccattcttcacctgtgcgataatgttt

SEQ ID NO: 144203 - DNA, 498 bp, Homo sapiens
ctccgtttgtcccctgatccttctcttttctcactcctagtctggttggggagtaactttttaaaacaatgctaagagagccaagcacttttgtatttgggagtagccctgaggtctgaacagtctaattactacatacttgggtacagtgtgctttttattccttttataatttgttcctccaagccatcctatgaggtagaacagagctattgtctctgtttgacagttaaggaaattgaggttctgtgcttgttggaagtctcagagttgtttarctgcagaactggaatcagaatgcccatcacccaaggtacttgtcaatcacttagccacaaagacaattcctgtctcagctaagtaaatcattaaagcaaggtcaaagaagtcctgtgtagcagcttctgatgctagcctctgagaaaatatccgttgtaaagagcagtttgcaaaggcttaaatcatatgttgcacatatttaagtgaagtgggtctcaa

SEQ ID NO: 144204 - DNA, 450 bp, Homo sapiens
cctaacacagttcttggcatgtagtatatgctcacttttcttatctaactgacaagtgaaggggtaatcagctgctagtgtttctgttgctaatatgtgacggtttcagcaccttgcgaggcaagtgtgcgactttgggagaaacagaggttaaccaaacaatcttgcaaattaatgtaaaattcctgcttcactaatcagatttttatctctgttatagggggacagccctcttagttttgtgagcagagcatagtttgtgaaasagcccatggttttcaggcccaggtggtgtttcttttgaattcttaggcatctagtttggactagcttcatggtttttgccatatactgctctgtattggagcagtctgtctggaagaaggaacagtgctctgtgtgtgtgtgtgtgtgagctagtttttagtatcccctctgctactgcccatg

SEQ ID NO: 144205 - DNA, 630 bp, Homo sapiens
ctggctgtggctccagagactgttggggcactgagcagccccattttctgcattacgacccttttgtgggcctgatacgcagctatcctaggacagccaaggaagggaattctgggcttgttgctcttgtgaatctatagaccctggaatggatatagttccaaccaatgtcttagttttagttaatttcatgggtttttcagaaccagaagttaggtactcagagtggtttccggtcattcatgctacttggtcatccaagtaattgttggactttaggcagcawggcaagtttgggtttggcagctgtcagtcccaagtgtgaacgtgacattggatcattgatgtcacaggaggacatcaaggagaacaaagagctacagctatacaggaaaaagtttgaggagaaaatattttcctgttttttatctctggaataggcagttccctaatagttttgtaggctaatggattgtttgcccagatataaaagtgaacatactggtatgaagaacaggatgaacttaccactcttggcatttaaaaatgacaaatgccaggcttttccatgtgcatacatgtgtatgctgagactaaaactctccttgagaaaaccctgggacagcatat

SEQ ID NO: 144206 - DNA, 546 bp, Homo sapiens
tgttttcattttagttgtatctcacaggatgaagcgtasgtagatgataggccacccatgccagatgtggtccatattcacaaacattcacttatgctattgtgaacgaggtatctcaagatagcagatgggtagtctgactaaatacatgtcatacatggtttgattaagagatagcggcagccgataggactgcttctcatacaccagtccactgctgttgtgaggctcagtgaaaagcctccgagaaggaaatactggcaggtacaactgctaggaaagtatatagaccctgtcgtaaaattatgtagtgaattaccgacttttcattagtagccaatggacagtgtctttattagaggaactgctagataaatggattgtcaagtccatttttttaggcacagcctaaaatatttctaaaatatataacagatatattgcattattcacctgcaagccttatggcaaacttgtgggataggcattaaaattcccattttaccaatgaagaaactgaggctcaggaaaaattttatgatcaca

SEQ ID NO: 144207 - DNA, 484 bp, Homo sapiens
  misc_feature (1)...(484): n = A,T,C or G
nnnnnnnnnnnnnnnnnnnnnnnnnnnatgagacatgaacaacacccaagtagctgctccagtgctggtctcaacacctcattcccaactcccatcttcatcccccacacccatgtccatgagatccaagtgacaatttctattcttccttgcctagagaatttgttcttaagtagaacaaaaggaagttgaaaaaaagtagaacccgtcaatgtgtyacatacaatggaagaaaaatcaactgctatttttaaaatacacatgtagctcagtttccaccaactaatatagtaaataagctatgctgcttcctatttccaaaacattacaattattactgcactacagctatttggaacagcatttaatgttttgattaatataaaatgtactaaagcttttcttctttgtgtacatttcaatgccaaatttaaaaaaactcttggcaaaactgtgaaaaatgcattttctctcaatataaaac

SEQ ID NO: 144208 - DNA, 484 bp, Homo sapiens
  misc_feature (1)...(484): n = A,T,C or G
nnnnnnnnnnnnnnnnnnnnnnnnnnnatgagacatgaacaacacccaagtagctgctccagtgctggtctcaacacctcattcccaactcccatcttcatcccccacacccatgtccatgagatccaagtgacaatttctattcttccttgcctagagaatttgttcttaagtagaacaaaaggaagttgaaaaaaagtagaacccgtcaatgtgtcacatacaatggaagaaaaatcaactgctatttttaaaatacacatgtagctcagtttccaccaactaatatagtaaataagctatgctgcttcctatttccaaaacattacaattattactgcactacagctatttggaacagcatttaatgttttgattaatakaaaatgtactaaagcttttcttctttgtgtacatttcaatgccaaatttaaaaaaactcttggcaaaactgtgaaaaatgcattttctctcaatataaaac

SEQ ID NO: 144209 - DNA, 491 bp, Homo sapiens
agaagggagagatctttggatgatgagttaagtcactgaaattatccacagaatgctcagatgcaaaccatggtcctaaggctccctggtaagacaaaagacttggcattttaattttaaactcctttgatattagaatctatattaaacctcacttataacattacattttatcttattaataatttaataatttgagattttacttgttccttagtctggctaayagcatgagaaattattcagcattttagaccaacaatttggtttgaatctcataattttagagatatatggggatttagggatcaactaggacatcatttttgttttacggttgagacaaaggcccagggagtcttgtctactagttagtgcaggagccaaaattagaatcagccacccaactcctccgataatctcttcactactttatctgtctcctctgggctacaaccagccagaactggcaggggcacttgggaggtttc

SEQ ID NO: 144210 - DNA, 613 bp, Homo sapiens
ctttgtaattagcaaagtagttgcatgagaaagaaataaatgaaagttagctaagaaaggactgaaagtttcagagagaattttaattgtaatttatgtttacctggtagtgatatgcaggttgctgataaatgggctgagctaccatcacaggggagctacatacagaacgtgactataaaaggatggaaaaagaaaaattaggcagaagcctttaaaatagctcacaataaaatttatctcaaattattacctaaacccagtaaacttctggtttatgattagaaatattatttttctacctcttattgatatgattaccaactctactaagtctattaaaatcatcacaatatttctacttctacgtggtttcatttccatagtaatgctaaaacaatcaccagaaaagttgtttttagtctgaaatgtaccatctccaaagattatgaaaatatagttataagagaatacttagaggaaaatgacagcaagacttagggtgacgctgcctgtttccattgtggggaccagcaggaaacagttaatgtttataatagtrtttagaactgaatgaatagtcgtatctaattttcccactagttacaaataa

SEQ ID NO: 144211 - DNA, 534 bp, Homo sapiens
ctttcagataatgcttgatctaatctggtatctatagctaagaatgtaaagtaaatgagaaattatgttacatacaggtttctatggctgcattcttttctgtataatttttatttttacagtttgattattgtagacatataaatactcatagtaatatcatagttaaacacctttcctatttgttctattcttatttttaaataaggggttgcaaaattagacctatatgttttacatcatcttttgcacatgcactttttagaaatgaaaaggaatataattgacctggataaattaatataattctttgaaggctgaagtaaaacccgtttgataccaatagcagtttctgaagtagctatggctagaaasttaaaataagcctaattaatgagatgattgtctttatgaaattggatgttataatatatctgtgtttttgagcactcatacattaaagcttgcatgctttaaaggatatgtttttgtttaacatcatcagcattcacttcagtcaaaatgatggaattc

SEQ ID NO: 144212 - DNA, 547 bp, Homo sapiens
cagatcgcttgagcccaggaattggagatcagcctggtcaacatggtgaaaccctatctctgcaaaaaatacaaaaattaggtgtccatgatggtacgtgcctgtagtcccagcaactcgggaggctgtggcaggagaattgcttgagcctgggaggtcaaggctgcagtgatctgtgattatgccactacactcagcttgagcaacagagtgagatcctgtctcaaaataaaataaaataaaataaaaaagatattagcatatrccttctatgaagatgtcctaacagagttctcagagtgaggggaacatattgacaatgatttccagacggttccattaaatctgctaagtgcccaggcttactcttaatgcatctggtaagtcggggagaatgcgctcctcatggagcccagtgccagtattgtgtaggaaagagtgcctgtgggggcccagggagggcttcagaaaaagctgagcttgttattctctccctgaaggaattatctgataagggcagagacatctgtagggactgtaagagtgt

SEQ ID NO: 144213 - DNA, 437 bp, Homo sapiens
tattaatgattcacattttgcagatatagaaactgaggcatcttgctccaccatggcttgatactagtgggaatatgcaaaagggaaattgagatcaacttaattaaaggtggtgatggagatgacattgtgcctgaagtcccccacaatggccttcactatgactgtgtgacagatagyactgctcccacttcaattggaaatctaaatgagaaaagccaacctacgaagtactgggtagtctctgatacatatttaaagtatgagttctattgcagaaatgcaaatgacttcaaccttggtgtccttttgtgaggaaacctttgacagtaagtgtggaaatgataacttttaataatttttaaaaaaattacttgtgcaaatgttgaaagaaaatcaccagaattgtttgcaactgaagaaagaaaagactgagc

SEQ ID NO: 144214 - DNA, 523 bp, Homo sapiens
tcggttatcatctggcatccaggaacacattaatttaggctctttacaatacaaattttgctatttaaattcccgagtttagactagttagaatgttactacggcatctttgatgtgttggtcctttcttaacacccaatggcttgtgggaagttaatatatcacccaataacaccacgtatttctctgtcaagacactttgtctttaacactgacactttggctggtctggcatccacagctccctcctcctctctttaatatgtcaatgtgtggttttagtatgtgtttgtgagttgctagaaaaagatgtgtgctccagaattccggtgttaagatgagcattttggtgtctttgrtgtcttttggggaccataatgcttcattctctaagtcaatattggaaagagaacaaagtgcttaactacttccctgttcccttctctagattagagttgcacaagtggtaagctagggaaaagaggaaaagaagaggaatgtcaggggaaaaatggtcctgtga

SEQ ID NO: 144215 - DNA, 639 bp, Homo sapiens
ctgtatccaaatgcatttttttaaaaaatattctgaactgttatttcccgaagatcaaagttttaattttcaaaagaaaagttgcsaagaagaatttttaagacaaagtaaatagagaaactagttggggtggtgggaattattccagatccctgtgccttctgtaggaaaaataaataaaatctggcagtcagtaggctttctgtatctatgtcctttaactatttcaaacagagaaaaataagaaactaaaatctactgcttccaaatgattaaatatcttccactaaatttataaaggttcctactcagacaattttttcactcattccctcaaaacaccaatatttctgtatcttcaggatgagctctatacggattccagaggaaacatcaaccagaaacagacctgagtgtgtgctagtgtaacccagcattccacatacccccaaatatgcattatgatatggtgacctacactcctccatggagaattatgagatatcagagcaggagcagatctttaaaggttcctactataattcctttgaatatgaaaaatgactccaaggaaaagttattttcccaacttacaaagataaactcaagtccagtggagtgaatagatccactcttgcc

SEQ ID NO: 144216 - DNA, 639 bp, Homo sapiens
ctgtatccaaatgcatttttttaaaaaatattctgaactgttatttcccgaagatcaaagttttaattttcaaaagaaaagttgcgaagaagaatttttaagacaaagtaaatagagaaactagttggggtggtgggaattattccagatccctgtgccttctgtaggaaaaataaataaaatstggcagtcagtaggctttctgtatctatgtcctttaactatttcaaacagagaaaaataagaaactaaaatctactgcttccaaatgattaaatatcttccactaaatttataaaggttcctactcagacaattttttcactcattccctcaaaacaccaatatttctgtatcttcaggatgagctctatacggattccagaggaaacatcaaccagaaacagacctgagtgtgtgctagtgtaacccagcattccacatacccccaaatatgcattatgatatggtgacctacactcctccatggagaattatgagatatcagagcaggagcagatctttaaaggttcctactataattcctttgaatatgaaaaatgactccaaggaaaagttattttcccaacttacaaagataaactcaagtccagtggagtgaatagatccactcttgcc

SEQ ID NO: 144217 - DNA, 639 bp, Homo sapiens
ctgtatccaaatgcatttttttaaaaaatattctgaactgttatttcccgaagatcaaagttttaattttcaaaagaaaagttgcgaagaagaatttttaagacaaagtaaatagagaaactagttggggtggtgggaattattccagatccctgtgccttctgtaggaaaaataaataaaatctggcagtcagtaggctttctgtatctatgtcctttaactatttcaaacagagaaaaataagaaactaaaatctactgcttccaaatgattaaatatcttccactaaatttataaaggttcctactcagacaattttttcactcattccctcaaaacaccaatatttctgtatcttcaggatgagctctatacggattccagaggaaacatcaaccagaaacagacctgagtgtgtgctagtgtaacccwgcattccacatacccccaaatatgcattatgatatggtgacctacactcctccatggagaattatgagatatcagagcaggagcagatctttaaaggttcctactataattcctttgaatatgaaaaatgactccaaggaaaagttattttcccaacttacaaagataaactcaagtccagtggagtgaatagatccactcttgcc

SEQ ID NO: 144218 - DNA, 559 bp, Homo sapiens
gactcttgctatttattccagttttggttgctttaattttggctcacctgtctttctctccattagactgtgagctccttgaaggcagatgctatgattttcttggctttgtagcactccctgtgtttggcatggtacctagcacatagtaggtagatactcaataaaaatgttatatgttacatgaataaatgaggraaaggaaatgtattagtctattctcatgctgctgataaagacatacccgagactgggaagaaaaagaggcttaatggactcacagttccacgtggctgaggaggcctcacactcctggcagaaggcaaggaggagcaagtcacattttacgtggatggtggcaggcaaagagagagcctgtgcagggaaactcccatttttaaaaccatcagatcttggaagactcattcactatcatgagaacaacacaggaaagatctgcccccataattcaatcacctcccaccagattccttccacaacatgtgggaattgtgggagttacaatttgaaatgagatttggctggggacacagccaaa

SEQ ID NO: 144219 - DNA, 606 bp, Homo sapiens
ctgttgtgtattgcaactccttgaacagttgcacctacattttatacctctttgttggaacagggtatttatctgttagaggaaaaacagcttctattttcagtcctgtccactgcaacatctgtattgaaaatttggataatgctaaaggtgtgctaagaaaaaaaacgggtctaaaatctgctgtcagaaattttcagatcgtttgtgggattaattctcctgggctaaatataactttgtataaaacaatatgaaattattatttaaagattttgctgaatttctactaaggttggcaacaacagcaaaacatcaagatacatcagtgttactggggaaggtagtatgattcctggacatttgggaaactattactaaagggcctattattttcagttgttgttgttttttkgtttttttttttttcacagaaactataaagcaatctagcagctcatgagcttctaagaatgaaaatgtattatttcatagtgagctgatgatgcattctgagatatttaaatttagttctaatttgtcagtctgtaacagaactgtctagtgcaataatcattaaatgatcttattagctatgtgatggta

SEQ ID NO: 144220 - DNA, 540 bp, Homo sapiens
aattttactttatcaacagtaagtgcatcctcttatcaaaaaacatgttaagaaaccagaaaaacaaaccacaggctggggaaaatacattcaatgcatttatataataaaatatttatatctaagttatctgaagaatctctgctaatttatatataatagatataaaactagtaaatgcatgacttggaaaacagttcaatatttaaaatgagcaaagtttgaacacacattttataatagaagaaatgtgaatgactattattcccatgaaaagtgcttgatatcattaagcatcagggaaattcatatcaaaatcataaagaaacccaatttcacactcactaggatggttataacttaaaagactgacagtaggaagtgtttgtgagactgtggagcaaggaaaactggtatgcatttctgggtcaaaaayttttgcaaccacttttgaaattacatataaagttaaacatgcttctacaaaatggcatggcaattgcattcttgtgtatacacctaaggtcattgaaagcatag

SEQ ID NO: 144221 - DNA, 283 bp, Homo sapiens
ttatgtatcaaagaatttcatctgccaaaataaaatgacaaacacacatcaatgtctgctttatgaattaacttgwtctatcactgcaccttaattttaactgtgtcacagatctgtttatagatgtcctggactgtagtgggacttgatgtggtctgtcacaggtttggctgataggaggatggcaatgagatggttatgatatattacattctttagagtctatggttactcctgagggaccaggaggtgaacagggtcacctttcacaactgaaagtgaa

SEQ ID NO: 144222 - DNA, 283 bp, Homo sapiens
ttatgtatcaaagaatttcatctgccaaaataaaatgacaaacacacatcaatgtctgctttatgaattaacttgttctatcactgcaccttaattttaactgtgtcacagatctgtttatagatgtcctggactgtagtgsgacttgatgtggtctgtcacaggtttggctgataggaggatggcaatgagatggttatgatatattacattctttagagtctatggttactcctgagggaccaggaggtgaacagggtcacctttcacaactgaaagtgaa

SEQ ID NO: 144223 - DNA, 619 bp, Homo sapiens
gtggttgtaggcaagatcccgttgcctgcagaatgtggagctgtgggcctcagttgcttgctggctgtttgttggaagccaaccttagttccttgtgggtctctccaacatgatagcctactcaatcaaatctattgagtgggagcatttaayagtaaggtagaaattgtaatattgtgtaacctaaccacacaagtaaccattctattatcctttccatattctatgctaaaatcaagttgcccaacacaaagagattacatgtggctatgaatactagcaggttgggaatatagaggtggtggtggtatttagaagtctactgaccacaggatattgttttctgtccattattttacttgcatgtttatcataataaacctctgtgttgattattaatgctgctgtttaaaaatgaagaggatgacatttatagattcaagtgacttttccagcattgcaacaccaataaaaagcagaattaagtgttgagcacacatataccagactccacagcctaactccctttcctctgcaagtgtgccttatttctgagggtggtagaatcagtggccatgaaatgttaactggtgaagggccttgaggaacacagacaagc

SEQ ID NO: 144224 - DNA, 470 bp, Homo sapiens
aaaagagcaaagtagaagtatggacactamccaactctacaacttactataaagctaccttgatcaagatggtgtggtattggtgaaagatagataaatagattaataaaacagaagagagatcccatgaaatagacttacattgatatgatcaattggtcattgacaaaggaacaaaaacaatacagcgaaaaaaaagtcttttagacaaatggtgttggaacaactggaaatcaatatgacacagatccattagacacagatcttacaccctttacacaagtgaactcaaattggattatattcctaaatgtaaaatgtaaaactatatgaacccatagaagacaaccaaggagaaagcttagatgacattggctatggtgttgactttataagtagaacaccaaaggcacagaccatgaataaaataattgataagccagggtttttgaaaaattaaacacgtttgt

SEQ ID NO: 144225 - DNA, 469 bp, Homo sapiens
aaagagcaaagtagaagtatggacactacccaactctacaacttactataaagctaccttgatcaagatggtgtggtattggtgaaagatagataaatagattaataaaacagaagagagatcccatgaaatagacttacattgatatgatcaattggtcattgacaaaggaacaaaaacaatacagygaaaaaaaagtcttttagacaaatggtgttggaacaactggaaatcaatatgacacagatccattagacacagatcttacaccctttacacaagtgaactcaaattggattatattcctaaatgtaaaatgtaaaactatatgaacccatagaagacaaccaaggagaaagcttagatgacattggctatggtgttgactttataagtagaacaccaaaggcacagaccatgaataaaataattgataagccagggtttttgaaaaattaaacacgtttgt

SEQ ID NO: 144226 - DNA, 558 bp, Homo sapiens
aggaagttatcaccaaccaaccatgtgctattaacatgctcagaaagaagtgaaatggtatggtggccagcaataacatgggaatgtgaaaataagaaatattcacgtaattaaaatgtacttgtggaattaaattatggtgaaataaattttgtgaaaagggcttgtgatcaatttatgaaaaccttccaataaagaaaacaacaaatgtaaaaatagaaaacaggaaaacaaatagtaagatgttcagagggttgattcaggaagtccaacttcctaataatatcaatgaaggagtgagaaaagagcaacaaaatagaaaatgtggtgagaataaatatttttttaaaactgaagaatttaakgtttgaaattttaaagagttcactgcatttccagtataataaatgtaggcaaataaaattgcactacaaaacttgccatagtaaatttcagacaactggtaataagaacaaaaatgttaaaaacttttagatataaaaaagaccactgaaatttaatatcagagtggatatgaccttctcaattgcacaggaa

SEQ ID NO: 144227 - DNA, 588 bp, Homo sapiens
gatggctaatattgagtgtcaacttgattggattgaaggatacaaagtattgttcctggatgtgtctgtgagggtgttgccaaaggagattaacatttgtgtcagtgaactgggagagggggacccaccctcaacctgggtgggcaccatctaatcagctgccagtgtggctrcaataaagcaggcagaagaacatgaaaaactagactggctaatcctcccggcctacatcttcctcccatgctgaatgcttcctgcccttgaacatcagactccaagttcttcagctttgggactcctagacctttgaccacagactgaaggctacactgtaggcttccctagttttagtaaaatggacttagactggcagcattgctcttcagcttgcagacagcctattgtgggacctcatcttgtgtgagtcaacactccttaataaactcccctttatatatacacctatcctattagttctgtccctctagagaaacctaatacataactcctcctcaaaattctcagaaagtgattataatacattatcacaatattcctcaaattatggaatctttgaacttcatacac

SEQ ID NO: 144228 - DNA, 588 bp, Homo sapiens
gatggctaatattgagtgtcaacttgattggattgaaggatacaaagtattgttcctggatgtgtctgtgagggtgttgccaaaggagattaacatttgtgtcagtgaactgggagagggggacccaccctcaacctgggtgggcaccatctaatcagctgccagtgtggctgcaataaagcaggcagaagaayatgaaaaactagactggctaatcctcccggcctacatcttcctcccatgctgaatgcttcctgcccttgaacatcagactccaagttcttcagctttgggactcctagacctttgaccacagactgaaggctacactgtaggcttccctagttttagtaaaatggacttagactggcagcattgctcttcagcttgcagacagcctattgtgggacctcatcttgtgtgagtcaacactccttaataaactcccctttatatatacacctatcctattagttctgtccctctagagaaacctaatacataactcctcctcaaaattctcagaaagtgattataatacattatcacaatattcctcaaattatggaatctttgaacttcatacac

SEQ ID NO: 144229 - DNA, 574 bp, Homo sapiens
aatttgggtatggttaatgatacatgatcttactagaggaaaaaaataaattgctcattattaagttaaaaaaactgcattaccctaaaaaataaactggcctaataataataataacaacaagaaatccttatataaacatgaaaaggcagcacaagctgtatagcccataatgcaggtgtacttctcaacacgactttagctgtggccatatgcacgacaagttgagaaaaactcactgaatgtgggaccaagagccatggagaataatatacagagaacagaactggaatctaaccaaaaaccttctccattgtcatgtcagagagatctccaaatarttgcctagaaggatttcatcattttcataagccaataacagctatgtatttcctgtttgtctttgtttaaaatgtgggttttcattgtgggtatacaggctcagctccactattgtatataggatgtatttgtggggagatgataaactgctttttgctccttggttacctgatcatgaaaaaagcagatagtgcagtgttgcttgtttttatacttcctttttaaaaaagta

SEQ ID NO: 144230 - DNA, 642 bp, Homo sapiens
gaaaaacagccctatatccactcctggcagacaaaaccccaggacagcttaggaaatgtgctgcctcttcctggccccgagaaacagccctgtgggccaactctaagaaacaagcttccaggccagccaagtagttctatacttgcatcttgggccaaagaaaaaccccatgggaggtttgttgtgggtgtgcccccaagctggataaacaaccatgagcacatgctcctgaccaatataagaaccccatggtcctaacaccacttaggagagagactcaaagctggcttatcaagtatttgcatgcacaaactcctgatatggtttggctgtgtccccacccaaatctcatcttgaattgtagctcccataattcccacatgttgtrggagggacccagtggtatataactgaatcatgagggtagtttcccccatactattctcatggtagtgagtaagtctcacaagttctgatggtttcctaaggcatttcttcttttgcttggttctcatgctctgttgcctgccaccaagaaagacgtgccttttgccttccaccatgatgaggcttcccctgccatgtggaactgtgagccaattaaaactctttcctttataaattacccagtcttaggtatat

SEQ ID NO: 144231 - DNA, 496 bp, Homo sapiens
gtctttgaaactatctctatctatctatcatctatctattatctagccagctagctagctgccaactgattttttgtttgtatcaggtgggtgagtaaatccagcctcctttactttatcttgatgaaaagtgacagctttccatctatatatttgaacccacagaatccttatgaggtggtatcrtctgctctgatttacaaacaaggaatcctaaatggcagagaaggcaaggcttttgttcccatagtcagaaagtttaaaagcaagagagcaaggacttaaaattagctctacctactgccaaattctgtgctttctttatgggaagagaagattaaagaggtttttaagggttagcacaataaacatgtgacattctccctgtggcaatgtaacaatacaatttttctttacctggcaaccttttatactttaagacgtgaatcagatagcatctcccctgaccaggctaaagacgctctcaccacctttt

SEQ ID NO: 144232 - DNA, 626 bp, Homo sapiens
gcaaatctcttgtgttaagacatattccagcccatatttttgcgtgagaaaatttctgagaaaacaggtaaatgagagtgccattattctaagaagaaattagttcgctctgtttttttaaaagtatatatttgcaaacatttttgtcatcattaaacttgtcagttaagaatttagttaatctgtaacttcatcagcctccagaatagcacattcaccaaagtcaacagaaatcccagcagtgtaaatgcggtgaagactttgcgagtagcacttagaaccaaaacatgtatagaaaatgttgatggtgtcttaaagttattctttattttaattcaagcacaattgcctaaattcttattgaagaaaacccatttctagtatttgcatctcattcctcgaacagtttagcttcatattgccactgtttacatgaaawgtactgtaatataaatggctttcataaaagttgccaacttccaaccacctgctgtgtgctgacagcagcagcaacaattctgctgcagcaaaataatactcaattgcaatacctcctgtcagatccacaaatcgttctcttaggttatgtggtttgttggaataagaccatatttactaatattcct

SEQ ID NO: 144233 - DNA, 396 bp, Homo sapiens
acatctgaaaggaaaggattcaagaacttgagcatattaaactttaaaacttctttgacataaactactgcataagacacctaaagacaccaaagaaagaaaaaagatgcttgcaatgtatatgacaaagataaattagtattaactttatrtttaaaattatatcaatcaatagaaaaaagcaatacacagagacaaaagattatttgtaatttgttcacaatgagggggtctaaatcatgataaccaataaaaaattatctacatcagcagtagtaatgtaaatcaaaatcacaatgagatatcacttgacacttttcatactggcaaaattagaaatctgacttcaccatgtgttgataaagtttcaaaacaatgaaaactcaacataaatca

SEQ ID NO: 144234 - DNA, 332 bp, Homo sapiens
tataagtttatctctaagcactgctttagctgcatcatataagtcctggtctgttatgtctttattttcatttatctcaaaacgtcatcctcagatttgcttttgtttcattgtttaaaaaatagtgtgttgtttaatttccacatatttatgagttttcaatttttttaatgtaaccatctaaatttacactrttgtaatcagaaaacatactctgtatgatttcaaacatttggcacatgttgaggcttatatgatggtcgaatttatggcctaagctggggaatgtctcatttgagctcaaaaagaatgggtattctcctgttgttggg

SEQ ID NO: 144235 - DNA, 578 bp, Homo sapiens
aggtttttattccacaaagatattgcatataatgtgacatagtgatagtgagccaaattaatcattttcataagcttgtccatttgtctcagcaccacttacagaaaagggctgtccagtgctgtgctattaaatgtttaacaactgacttgccagaggggaaaataccttattgtagtgtttgccaatttcaatggtgtaaatccacctaacaatgctgatttcaatatattaacatgacatcgatgaaacagtcgagcaatgatgaacagtgatataccattatctattatttttaccatgcaaatacaagagargtaaatgacatcaaaacatatataatagtaaaatacagccaaataagtagaaagttaggttttaagtatttattaactttggttttagtataatttattgcttatttatataatttaatttttaattagtatgtttaataattgacttacacattcctgaaaattttgtaattatctctcacaagccagagcaggccagctcttacacaccatggagtttgtccttttccagtttttctgcaataacacctctgttctatg

SEQ ID NO: 144236 - DNA, 526 bp, Homo sapiens
gggccacccaaagtgctgagatttcaagtgtgagcaaccacacccagcccattatacatttttaaagttgataaagactcagrtagggttcctggtattacaaatgcaaaatataaatgtttaagtataaaatttgtaaatgaaaaacaatttggttgcttgaaattgcaagtggtcagttttcttcctttcatgacaattacatgttcatatacataagataaaaagtatcaacttggatttggtaggaaaatacattcttcatgggtgctggtattttgttgttgttgttgttgttttcttttaaacagccccaagtaactactggcttggagaatgttgagattaaaaataattcaatctttttgtttcatcatatcatcatcatactttttaaatttaattcattttgtttttttgagatgggtctcattctgtcacccaagctaaagtgcagcagcacagtcatggctgactgcagtcttgatctcctaggctcaagagatcctcctacctcagccttcac

SEQ ID NO: 144237 - DNA, 556 bp, Homo sapiens
ttctttgcccaaagctgtgaggagccaacagtacaacaatgactaagacagacaagttcccttcctcagaatctgaatgaggtgaacattcagagctcaaaagaagacttggcccttgatggatcgtagatattcttctcattgtgtcagagagagaatggagagaatatggagaagttgcagatttcatatttggaatttgagagaccttctggtctaattctaatttctaaagtgtgaagtgaggttattagctgaagtatgggagggtatagaattttaaggcaatagaagaaattaacaaatgtagtctcttaaaagaaatgtgttcatatgtatatgtccaggttaacacataggaaaatgcatacaaagtgtgcatcarcaagctacaaatagtgataatctagggataagaaagcagaatggagtataaagtaatttttaaaaatattcattttaagttgtttcctttatctctgctaattataattatgagacgttccatgtactaaacaacatgattggcaagacaagttttttgtttgtctgtttt

SEQ ID NO: 144238 - DNA, 556 bp, Homo sapiens
ttctttgcccaaagctgtgaggagccaacagtacaacaatgactaagacagacaagttcccttcctcagaatctgaatgaggtgaacattcagagctcaaaagaagacttggcccttgatggatcgtagatattcttctcattgtgtcagagagagaatggagagaatatggagaagttgcagatttcatatttggaatttgagagaccttctggtctaattctaatttctaaagtgtgaagtgaggttattagctgaagtatgggagggtatagaattttaaggcaatagaagaaattaacaaatgtagtctcttaaaagaaatgtgttcatatgtatatgtccaggttaacacataggaaaatgcatacaaagtgtgcatcaacaagctacaaatagtgataatctmgggataagaaagcagaatggagtataaagtaatttttaaaaatattcattttaagttgtttcctttatctctgctaattataattatgagacgttccatgtactaaacaacatgattggcaagacaagttttttgtttgtctgtttt

SEQ ID NO: 144239 - DNA, 556 bp, Homo sapiens
ttctttgcccaaagctgtgaggagccaacagtacaacaatgactaagacagacaagttcccttcctcagaatctgaatgaggtgaacattcagagctcaaaagaagacttggcccttgatggatcgtagatattcttctcattgtgtcagagagagaatggagagaatatggagaagttgcagatttcatatttggaatttgagagaccttctggtctaattctaatttctaaagtgtgaagtgaggttattagctgaagtatgggagggtatagaattttaaggcaatagaagaaattaacaaatgtagtctcttaaaagaaatgtgttcatatgtatatgtccaggttaacacataggaaaatgcatacaaagtgtgcatcaacaagctacaaatagtgataatctagggataagaaagcagaatggagtataaagtaatttttaaaaatattcattttaagttgtttcctttatctctgctaattataattatgagacgttccatstactaaacaacatgattggcaagacaagttttttgtttgtctgtttt

SEQ ID NO: 144240 - DNA, 556 bp, Homo sapiens
ttctttgcccaaagctgtgaggagccaacagtacaacaatgactaagacagacaagttcccttcctcagaatctgaatgaggtgaacattcagagctcaaaagaagacttggcccttgatggatcgtagatattcttctcattgtgtcagagagagaatggagagaatatggagaagttgcagatttcatatttggaatttgagagaccttctggtctaattctaatttctaaagtgtgaagtgaggttattagctgaagtatgggagggtatagaattttaaggcaatagaagaaattaacaaatgtagtctcttaaaagaaatgtgttcatatgtatatgtccaggttaacacataggaaaatgcatacaaagtgtgcatcaacaagctacaaatagtgataatctagggataagaaagcagaatggagtataaagtaatttttaaaaatattcattttaagttgtttcctttatctctgctaattataattatgagacgttccatgtactaaacaacatgattggcaagrcaagttttttgtttgtctgtttt

SEQ ID NO: 144241 - DNA, 598 bp, Homo sapiens
ctgtaacattttttaaaaatcaatatttaatgaaatatttttacaatatgatacctacatctctgcttattaatataaggaatacttacaagtaataatatattttctataaagattcctatattttatgcatgtaaataaatatattttgatttatcataattatattgaaagaactgaatgtgtctttagaattcttttataattttctttaaagctaattcagaaacaaatatcttagttacgtatatttatgtaaatattcccctctcaaaaatagtaaggtttataaatggtgatggtggaggtactagtggtgctattgggaagcttgttattaatgacaccttaggacaattaggagtggctggagttggaggaagaaataacccttcaaggagtgataactgcccttctrtcccataaataaaaaaaaattccaaatagattgtaagatagagtactattcatatggataaatgtaattggactgttcattacttgaaatttagaacttaagtgacttttccctaccattaaacagttatttatttaaattgttcattaataaggaaggtactaggaaagttaatataca

SEQ ID NO: 144242 - DNA, 598 bp, Homo sapiens
ctgtaacattttttaaaaatcaatatttaatgaaatatttttacaatatgatacctacatctctgcttattaatataaggaatacttacaagtaataatatattttctataaagattcctatattttatgcatgtaaataaatatattttgatttatcataattatattgaaagaactgaatgtgtctttagaattcttttataattttctttaaagctaattcagaaacaaatatcttagttacgtatatttatgtaaatattcccctctcaaaaatagtaaggtttataaatggtgatggtggaggtactagtggtgctattgggaagcttgttattaatgacaccttaggacaattaggagtggctggagttggaggaagaaataacccttcaaggagtgataactgcccttctgtcccataaataaaaaaraattccaaatagattgtaagatagagtactattcatatggataaatgtaattggactgttcattacttgaaatttagaacttaagtgacttttccctaccattaaacagttatttatttaaattgttcattaataaggaaggtactaggaaagttaatataca

SEQ ID NO: 144243 - DNA, 598 bp, Homo sapiens
ctgtaacattttttaaaaatcaatatttaatgaaatatttttacaatatgatacctacatctctgcttattaatataaggaatacttacaagtaataatatattttctataaagattcctatattttatgcatgtaaataaatatattttgatttatcataattatattgaaagaactgaatgtgtctttagaattcttttataattttctttaaagctaattcagaaacaaatatcttagttacgtatatttatgtaaatattcccctctcaaaaatagtaaggtttataaatggtgatggtggaggtactagtggtgctattgggaagcttgttattaatgacaccttaggacaattaggagtggctggagttggaggaagaaataacccttcaaggagtgataactgcccttctgtcccataaataaaaaaaaattccaaatagattgtaagatagaktactattcatatggataaatgtaattggactgttcattacttgaaatttagaacttaagtgacttttccctaccattaaacagttatttatttaaattgttcattaataaggaaggtactaggaaagttaatataca

SEQ ID NO: 144244 - DNA, 551 bp, Homo sapiens
cagttgaagttgtggccatggatgaacttgtcaaatagggccaaaggcaaaactttaatgaaaactacatttaggaatttgaaggagaaaaaagtttctagtttataatttttactactctagaactttaaaagtaaaaatttattttaaaatttatcgtatacattgttagagtacaaagtaaaacctgtttatctagaggaatgtagagagaattgtgcaatatacgaatttgctttcaaaggggcagaaattatcttagtgtggaaaagaaaagcaaagaatttgccaaggaaatacayactatagagaccgatcctagctcagccttaacttacagtaatttatttctgtagaatgtaaagattttttatctcaggttgctgtgaagatgaacgtgtaatgatacatatcacaatgctctagaaaatcgtcattactgtagaaatatttgctacaattctctctaagcaagcttcttaaagttgatatattaccatgcaaacatttcccttagtgtttcattatttttatttatatttctattttta

SEQ ID NO: 144245 - DNA, 533 bp, Homo sapiens
agtgatctattaattgttttcaaaccctttgatggttgctaggtgaaatttgtatgaacagtggtttcccatgtctgaggaagcaaaaatataaaaaaagaaatgggcctcctactgtctagcatagcttagacaagctcttgccttaatactggattagatgatccttttgagatcccttccagctatactttaaaacgcttagactatagaattgatagaataaagttatgtcatttcttagcagcaatttgtatattttatataaacggaagatttttggataggttatacttttcttttgccaatatctgggaggcttggtatatatttgtaaacacacaaaatgcaattcaagaaggttgcataaaatgaaaaacatttatcaccagaagacattttttatatatggtatttgcctctacatagtataaacaaattctcttttggatgaaaagggaaagcacttaaggtaattgcatttacatagcacactcagttaagacamctggatatttcatgctattaatatt

SEQ ID NO: 144246 - DNA, 490 bp, Homo sapiens
acaaagttatctaacatagttatgtaacaaagttatggaacatagctaggtaacaaagttactaatactgtgagtgatttaatttccattttcatagtagcaaaaatgataaagagttctgtaaaaacatatgggattagcaatgaaataaatttacccactctgggtaggcagagaatgcttccctgaaaaagcaaaatttaacctgtgcctgaatgagtagaaggtaagtagatgtttggctagggggcagatagaaagataaactagttttctgactctccttatccatacccctaactgatgtrtagaatgaggcccaaatctaaaggaggccatcctttttcttttcttcctagttccagttcttcattgctcatagtgcagtgtgagaagggaaggtgcaattacataggatctaaggcagtctgcaatgaaggagtgaatgaaagccttaggatccccatttgtattggtaggtttaaattgt

SEQ ID NO: 144247 - DNA, 539 bp, Homo sapiens
tgagtttgcacaatagtggctgtaatattttgactaatcctcacaaatatttgaattgaagttgccatcagttttaagacattctaatttcccaaacaggtaaattaaaatagagggttctcttttyacaagacatacacatctgttaggcacagatttggcagcacatgtgtaggatttgttccattttgtttatatgtgtcctgaagaatccatatcaagcaaattattcattccttctatttctgttttgtaatcattacatatcagatattaaaatgtttatagttttttccttaaaatgtaatcatttagacaataatttatcaactgaggaatcatcatacatttagatctatatgtacatgtatattcatattatatatgttatgaccaaatttgtttttaaatatatatgtctgtgtgtgtgtgtgtgtatacctcactacttaccactttatagccatgtaatacattttgtttttgaattaataaatctcagctttctttcagtaatgtcctaaatttgttttaaaaaa

SEQ ID NO: 144248 - DNA, 592 bp, Homo sapiens
ccttttacttaaccatctataaatataaaactaggattaattttaacatagtatatagtgcttacaaaatcaaaaataacagattaaataaaaacaaatcaacaatgacaactaaatctaaactaactctaacttaaagtgacaaatgatgctgtttacatgaaaccatactgcccttctgacataaatatggtgctatataactctatacatgtttatgtactaaatgacccaattgccccatatgtcatttttctgaacatttcaaattattattgataaagcacattttgaaattcttttccttcatttgatatggatggaacatgataagtccacatcgattaagatgcaatgtatggtaccagaacaatcacaaatgcaaacaaaaatgtargcatcataattagctgcccatattttaatgtaatatatttagatttttgttgacataaatacaaacataaaataaaaattatcatagtgaatttttaagctcaaaatgtctagatcagttttgaaaatgctgatttaaaacaccattgtgtgtgaaaatgcattccaaatctaaaaatagatgatcgaaattgat

SEQ ID NO: 144249 - DNA, 499 bp, Homo sapiens
ttaacaaggtgtctaaaaataagcttatatttcttcaaataataaagagatatcgataatttaaaaattttatattgtcttctagtgggctttcaaaakaaaatttttatccaaggtatgaaaatacagggcaggttaatcataggtgttcttgaagcttccagagccattaataaaggcaatagatttaatgtatatctcaaaatacccagtgagatgagactgtgtggaatataaataggtataatggttgtaaaactctcctgtcaccgattaaaaaaacatcatcatttttttcttaatgctagcttatttgatccagaactgtccattactataggtttgtttttacatttgttcttctagcattgatgtgggatatgaatacatgtgcatatgtacgttttgtgtatatgtttaacatgattctgacagaagaaattgggtgaaagaaaaaaatgaagagaataagacatttttttttctgataagaaaactg

SEQ ID NO: 144250 - DNA, 499 bp, Homo sapiens
ttaacaaggtgtctaaaaataagcttatatttcttcaaataataaagagatatcgataatttaaaaattttatattgtcttctagtgggctttcaaaagaaaatttttatccaaggtatgaaaatacagggcaggttaatcataggtgttcttgaagcttccagagccattaataaaggcaatagatttaatgtatatctcaaaatacccagtgagatgagactgtgtggaatataaataggtataatggttgtaaaactctcctgtcaccgattaaaaaawcatcatcatttttttcttaatgctagcttatttgatccagaactgtccattactataggtttgtttttacatttgttcttctagcattgatgtgggatatgaatacatgtgcatatgtacgttttgtgtatatgtttaacatgattctgacagaagaaattgggtgaaagaaaaaaatgaagagaataagacatttttttttctgataagaaaactg

SEQ ID NO: 144251 - DNA, 499 bp, Homo sapiens
ttaacaaggtgtctaaaaataagcttatatttcttcaaataataaagagatatcgataatttaaaaattttatattgtcttctagtgggctttcaaaagaaaatttttatccaaggtatgaaaatacagggcaggttaatcataggtgttcttgaagcttccagagccattaataaaggcaatagatttaatgtatatctcaaaatacccagtgagatgagactgtgtggaatataaataggtataatggttgtaaaactctcctgtcaccgattaaaaaaacatcatcatttttttcttaatgctagcttatttgatccagaactgtccattactataggtttgtttttacrtttgttcttctagcattgatgtgggatatgaatacatgtgcatatgtacgttttgtgtatatgtttaacatgattctgacagaagaaattgggtgaaagaaaaaaatgaagagaataagacatttttttttctgataagaaaactg

SEQ ID NO: 144252 - DNA, 499 bp, Homo sapiens
ttaacaaggtgtctaaaaataagcttatatttcttcaaataataaagagatatcgataatttaaaaattttatattgtcttctagtgggctttcaaaagaaaatttttatccaaggtatgaaaatacagggcaggttaatcataggtgttcttgaagcttccagagccattaataaaggcaatagatttaatgtatatctcaaaatacccagtgagatgagactgtgtggaatataaataggtataatggttgtaaaactctcctgtcaccgattaaaaaaacatcatcatttttttcttaatgctagcttatttgatccagaactgtccattactataggtttgtttttacatttgttcttctagcattgatgtgggatatgaatacatgtgcatatgtaygttttgtgtatatgtttaacatgattctgacagaagaaattgggtgaaagaaaaaaatgaagagaataagacatttttttttctgataagaaaactg

SEQ ID NO: 144253 - DNA, 639 bp, Homo sapiens
attatctgttttctaccactgtcatataatgagtaatttagaaatggtaatgatttgcatgaaagacacttgtttaaagttttttctagaaaagcaataactgtatgttattctcattttaataagctccatgatttcttcctctgatgactttaaaaattagtcataattcaatatcagagaaaaaaagaaagtcaagggtcatcattcacaagaaaacaaagaaaaacmaaaaaataaaatattgaaatcactaagatacagatctggaagaaagtttatttttaatattacatttttatatatatgtcagtttttctattttatattcttttaagctatttgatctttggtatggtttggcactgtttggtatggtttggtatggttggccacccaaatcacaccttgaattctaataatcaccctgtgtgagagtgggaccaggtagagaaaactgaatcatgggcgtggtttcctccattctgttcttgtggtagtgagttctcacgagatctgatggttttataatggcttcccctttcactcagcactttctctcttgctgccctgtgaagaggtgactttgctaggattttaagtttcctgaggcctccccagccatggggaagtgtaagt

SEQ ID NO: 144254 - DNA, 607 bp, Homo sapiens
tcctgaattctttagattcttttccatacctttttcttaatatttaaggattaataattaagtattcttatgacattattttggatgctagctgacttagattttctttggaaaggtttatggcctttaagaccacattatcattctgaaatgaatgaatataatgtaaaagaaaaatgtgtatatttcactactctgaaacccttaagtgtgaaatttccttattttcctgtaattactaggtttggaaaattaaagtagagttattctttatgatgccaagatttttgaatggaatatttgctttctattgaattatataatgttttaaagaataggaaatatttatttggtcaaktaaaacaaattattttatttataattgatgagaagcattagggtaaaagatgtttaaaaatttaaagcatacttctaagacatagtggtgattctctatactagcatgaacttatatttataaaaataattcattgctagaatatgtgaaatggaagtgaggaatcaaagtacattaatacaggggatcaaagtagaacattccatagagattgtctttttcattatgtgaatatatacacacacaaac

SEQ ID NO: 144255 - DNA, 607 bp, Homo sapiens
tcctgaattctttagattcttttccatacctttttcttaatatttaaggattaataattaagtattcttatgacattattttggatgctagctgacttagattttctttggaaaggtttatggcctttaagaccacattatcattctgaaatgaatgaatataatgtaaaagaaaaatgtgtatatttcactactctgaaacccttaagtgtgaaatttccttattttcctgtaattactaggtttggaaaattaaagtagagttattctttatgatgccaagatttttgaatggaatatttgctttctattgaattatataatgttttaaagaataggaaatatttatttggtcaagtaaaacaaattattttatttataattgatgagaagcattagggtaaaagatgtttaaaaatttaaagcatacttctaagayatagtggtgattctctatactagcatgaacttatatttataaaaataattcattgctagaatatgtgaaatggaagtgaggaatcaaagtacattaatacaggggatcaaagtagaacattccatagagattgtctttttcattatgtgaatatatacacacacaaac

SEQ ID NO: 144256 - DNA, 543 bp, Homo sapiens
atcaccatcctggcaatgtgtgactcaaatgctgcaaatgcagaggtttttgatagataattttaatagactgagttcggaagagcaattgaaagsatgagcaatttgtaatatggactgtgcattggtactgaggaaacacataaggtactggcaagaacaaaggtcgatattagctataatttgaacctttgaaaaggttacatgttccagaaagaaagattgcttaaggctcttgaaatgcttgtttctgacagatgctatgataccagttagagattagtgagattagaagagagggagataaagagaaaaattctgcatttttcctttgacatttctctattgaacttttttgtgaactagttatatttctaagatctatttcataatcaaagttcacatagaataaacaagtgtcatatccttacagtaaaatgagatagaaatgaaatcacttcataaggtgtcaaaaggtattcaaatgttacgtattgttctaactcaaagatgtgtcacctcttttgaatctatacatggcta

SEQ ID NO: 144257 - DNA, 543 bp, Homo sapiens
atcaccatcctggcaatgtgtgactcaaatgctgcaaatgcagaggtttttgatagataattttaatagactgagttcggaagagcaattgaaagcatgagcaatttgtaatatggactgtgcattggtactgagraaacacataaggtactggcaagaacaaaggtcgatattagctataatttgaacctttgaaaaggttacatgttccagaaagaaagattgcttaaggctcttgaaatgcttgtttctgacagatgctatgataccagttagagattagtgagattagaagagagggagataaagagaaaaattctgcatttttcctttgacatttctctattgaacttttttgtgaactagttatatttctaagatctatttcataatcaaagttcacatagaataaacaagtgtcatatccttacagtaaaatgagatagaaatgaaatcacttcataaggtgtcaaaaggtattcaaatgttacgtattgttctaactcaaagatgtgtcacctcttttgaatctatacatggcta

SEQ ID NO: 144258 - DNA, 398 bp, Homo sapiens
cgggatggggtttcagcacccactctcactaccggggctcgggagggagggctggagagcctccatctggtgccgtcggtggccactcctcagacagcgcgggcgggttcgcaggccctgggcaaatgtggtgttgccacagccccgccctacagggacagcggtcagcagctgcccctggccccgccgtccctaatgaagttatagatggcagctcttaaatgtctccagaaatggcagagaggctcccagagctgacgtgcaaatraattgcttctcaggctcggaccacacaattctgctgggaccaagcacaggcctgggccctccggctgcccctcagggcctggctctgctgagaggaggaagcctggctcttgggagggggtctcaggtgc

SEQ ID NO: 144259 - DNA, 389 bp, Homo sapiens
tggaaccagctggttttttgcctgccagtcctgtggctgcatcaagggagcagagtgctcacgcgtgtgggagcgagtagacgtgaggaagcgtgtgcggcggcctgagtccccaggcctcccctagagtgctcacgcgtgtgggagcgagtagacgtgaggaagcgtgtgtggtgacctgagtccctgggcctcccccgsagtgcgccaggatacattcagtatcaaaatgcccacagagaaaactacattcttcaacatttagataaacaaatcttttcttagtaaattttatttatttaaaattacaacagggtgggtgcagtggcttatgcctataatcttagcagtttgggggctgaagcaggacctcttgagcccaggaattc

SEQ ID NO: 144260 - DNA, 421 bp, Homo sapiens
ggttctgtgcaggtggagtcattgctaactggggggccctgagtgcatgacatgggacacctgcctgctcagcttgagtacatcattaggactgtggttaatgctaatgactgtgaccttgagttatcaagacatggtagaagtatgtgtcaagctcatttctctaaaagatgcagcacccactaggatggctgaagttcagagggaagacatccagtcctggtgaggacatgggcaagcggggcctcatcctcctgatagaagcttgtattgctattgcacaaccactccaaagatggtttgtggtcccaccaagagctggcatgccagtgacctatgacccagcaattctgctgcyggaagtccacccgtgtgaaatgcacgcttgtgttcaccaggagagaaggttctttgtagatct

SEQ ID NO: 144261 - DNA, 456 bp, Homo sapiens
cttgaattcccgctgatgtatattcagatgcatgagagtccacatcttttccacaatcatgttggatatctatatgtaggccttctatatttatatttatttgttttgttatacagtacttctgcaacatgaatgttcttttkttttagttgactacctagtttaaagagaatgttgtgacttcatctttttttgtttgtttgtttgagacggagtctcgctctgtggcctagggtggagtgcagtggctgcatctcagctcaccgcaagctccacctcctgggttcacaccattctcctgcctcagcctcctgagtagctgggattacaggtgcccgccaccacacccggctaattttttgtatttttagtagagacaggagtctcgctcctctgtctctgtgtctgtcaccatgagacagggacaccatgagacaccatggtgacagagtctct

SEQ ID NO: 144262 - DNA, 551 bp, Homo sapiens
ttttacaatgaagggctcaggcagaagaaaagtagctagtagtgagtttatcctaagaaaaaaaggaatgtttaacattttctggaacggaaagcatttttgttttcccttgagatgctattctttctaacatcaaatgcaaactgccattatatactatacatcttctaaaaattgaaaatcataatatccatacttaaattttcaactttccagttttccaattacaagcaaagtaccaaattcatacctgctcagtgttgcaaaatgattttaaaatgtaatgatgtttttgtttgattttgtttcatagtattttcctctaccaatgtacaaaacactcccttgtaacaaataaactaagaaaatcgcattcccagggccttgggaaataactttaagggtgtctctgytcacttacatcatgaacccagctcttatgctcctaaagttacaaatgggcactcttcgttttaatagcagatttaaagaaacctaatgttagttcaacacgggtaaacagtctctcacacagtataaataaagaattc

SEQ ID NO: 144263 - DNA, 500 bp, Homo sapiens
agctacctacccatcagctttggcacyaaggccagggagcctccaccagacaccatggaaagccatacctgcctcatgagctcctcttggcgcattcgaatcctttctctctccatctggattctctgaagccgcagtttctgctgctgctgctgctgagtggtcagcgcattgggcatactcatgagccctgcgggtgggttctgagtggggtggttctgctggctcagggtactgggggccatctgctgctggtgttggtgattcatcactgcaagagggaagaacatacagattaatgaccagggcccacaataccttatcaaaaatagaccatcagaatgttttctgctttggagtatagattcctgagattccttccaaagtactttcctgttaaccattactgtttaagtaattattaccttaattcaattcacggaggctcgaatactggccccaatcctgactcatctagcctcggcttttgtttctgttaa

SEQ ID NO: 144264 - DNA, 576 bp, Homo sapiens
ataacacttctaacatcatcctttaagagtagaacaggtaaagccggcacggtggctcaggcagtaatcccagcactttgggaggctgaggcgggcaaatcacctgaggtcgggagtttgagaccagcctgaccracatggagaaaccccatctctattaaaaatacaaaattagctgggcatagtggtgcatgcctttaatcccagctactcgggagtctgcggcaggagaatcgtttgaacccaggaggcaggaggttgcggtgagccaagaccacgccattgctctccagcctgggcagcaagagtgaaacttcgtctccaaaaaaaaaagagtagaacaggtagaggctgacattgtttttaaaacttgaatgcagtctcttcaaaataggtaaatatgcaacattcaaaggcatacactgggtaatacacttgatatggcatctgggaaacttcctccttggaacaagtgtttaattcagtttgatatttgggccagtaagttcatataaacttcatcagaaacactttccaggaacctaaacccaacatgagaggggagcataaaagctt

SEQ ID NO: 144265 - DNA, 436 bp, Homo sapiens
aagtggaatgtattcatccattttttcattagacaagtatttacagtggggtacatcttccatagggattcagttccaaactcagttttcttttgtttgaaagagatgctgcccaggctggactccaacagttgggcttaagtgatcctcctgcctcagcctcccgaggctgggtytacacatgcgtgccaccttgctctgctccccaaaatcagttttggcaaatgtggagtgtggtaaaaattaccactgaaaaacttttgaatatacagtccactaggctttgtgtacattatattatctttcagtaagcccaatgcagccagtttcttccagggttagaatatggtgctatttctacacccaagatccagatgaagtgatgctgtacccaaatatgtatgtcgggatttgctaggcactcagtgatgaattc

SEQ ID NO: 144266 - DNA, 533 bp, Homo sapiens
atagaataatgactgaaacacagtaggtgcaaaataaatggctaaaggtattattcttatgacttcattttcactatttttttttttttggcttttgtgcaaacttccatttccttgaacttccaagcgcagcctccctccccagtccatccaccagtcctctcttggtctctctccctctccctgacttctagctgcctcatactcccacgctgctcacaaccaggttcagactccgcattgagtatctaaactcttaccagcacatttcattttcatatatccttatatttacactgcatcatcacaaaacaccaaccttaaagtgaacttctggaacaattttctaagccacctgaattttgtgcatcaatacaaattcatagttactaacttcattctcagggctatcagtccctatattcctctggcttcagcttcctctcttattctcctttaccactattaygaactttcctcagtctacttctggtcctaattagagttgttcatagcatacccttattatcctt

SEQ ID NO: 144267 - DNA, 579 bp, Homo sapiens
atctagtttttttttttaatccttatatttttattgggattgcattcaatttagagaactgaaatgtgtatgttgtcttcctatccaagaatatgatatgcatctccatgtgtttgaatttattttcatgtgaaatacaaagttttggttttgtggtcacgcatataacttgtttattcctaggtatcttctctcctttggtcttactttaaatggggccttttcttctattatatcttctaactggctgttgtttttataaatgaaagctttttatttctgtgatgaattttatacccagtgactgtattcgttttaagagactttcagttgacccttttaagctttgcactatcatctacaaatactaactttaccttttcctccatttttaatgggtccaaattctcttacctctgttaaataaatcttccaataggtttttaagttccttgaggacattaattatagtagtacattttgtatacctttcagagcccctgtaaaatgctccacatagaatggtttatgactaacccccrttatgaaaatggaaacacgaagtgtctattaaattct

SEQ ID NO: 144268 - DNA, 489 bp, Homo sapiens
gcccataatggttgaagttggtatattatattaatctgtttgtatatgtttaaacattccaaatgaaaagyaaaaaaaaacccaaaacaaaacccaaactgttttgtgtaataagcttcttattcctttgtgtaagagtgtatcttcccttttgttttaccatgctaattaaaagagcatttatatcttgtgaaggctgcattattaattacacaccaacagggtcaagtcaccttaacaatcttaattataattgagaagccaaaagtggcttcttaacccacttctgataggtgggtagtgaaaaaatcctccgacagcccaactctccaaaatgtcatattacttacgtaaaaactggtgaaatccattcagctcttagggaaaaatgggacagcaatcatggcacaaagatggctcagagaccatgtgtcctctcaagtcagttgacttttccccctttctaccagagggaagctgagcaggcaa

SEQ ID NO: 144269 - DNA, 404 bp, Homo sapiens
aaatgcatttgttctggggcacacgtttaaccttgtgtcatagcacacatatgctaagctatagtcttgacagtgcagagaagctcctataaattgttggacactgtaatgctctccaagtaggaaaatacaccaacaggatgagcccaacccagagttttatgtgtattaaggagcttggacttgtacattgctctttcccaaccctatttccacagaggatagcattcaagagtttgacttgactttcccagaacgctacaagtttttaagcttgatgtatgrtaaacttacatctcaaaagtccagtaagtagttaacttctagttccagaactattactgctgatttaacttgctttaaaagagtatgattctagggtgggcatggtggctcatgactgt

SEQ ID NO: 144270 - DNA, 525 bp, Homo sapiens
ataataacaaacaaaaaacccaaaaggcaaatgctactgctcaatcatcagatgaactcacagaggcaaaaatatgtgacaacagcaataattcaagtaaagtatgtatgaaaatttaaacacgccatgttcaagttaagacagaagtgaaggggagctatgatctttatattagtcaaaaaagctaggcataatcaccaaatgttaattcactttacagtcatcaatgagactattgtatatatttttgcaccttgcgcttgtaaaagcagataaaatatttaatatgtaatttacaatgtattttaccagctcagcatacaggatgtatacagattatatcaaagtagtagacagttacgggcctgtgcaaaccctgcaaaaatagtacttcagatatctgctaattaaaaacaaaaacagtttgctgtttagaagtgatacaatttmaactaccacaaaatacaaagggctgcaaaaatgtaaccattccaacaacatatataagttattaaataaagattt

SEQ ID NO: 144271 - DNA, 543 bp, Homo sapiens
ctaacttttctggaacccatcagagaggttaggttacagggtaaccaggtaaataaattgcaaaagtcaaaaagccccctctgaagacagatgggacgcatgaactgattcaccwtgggtagagcatgagaggaaggaagataaggtaattcaatattaaaggacaagcaaaaccaagaaagggccattatattagtacattttcatgctgctgataaaaacatacctgatactgggcaatttacaaaagaaagaggtttaattgaacttatagtttcacgtggctgtggaagcctcacgatcatggtggaaggcaaggaggagcaagtcacatcttatgtggatggtggcagggaaaaagagcttgtgcagagaaattctcatttttaaaaccaatagcccttgtgagactgtttcactatcaggagaacagcatgggatagacccacccccatgattcaatcatctcccaccgggtccctaccacaatatgtgggaggctacaagatgagatttgggtggggacacagagccaaaccatat

SEQ ID NO: 144272 - DNA, 543 bp, Homo sapiens
ctaacttttctggaacccatcagagaggttaggttacagggtaaccaggtaaataaattgcaaaagtcaaaaagccccctctgaagacagatgggacgcatgaactgattcaccttgggtagagcatgagaggaaggaagataaggtaattcaatattaaaggacaagcaaaaccaagaaagggccattatattagtacattttcatgctgctgataaaaacatacctgatactgggcaatttacaaaagaaagaggtttaattgaacttatagtttcacgtggctgtggaagcctcacgatcatggtggaaggcaaggaggagcaagtcacatcttatgtggatggtggcagggaaaaagagcttgtgcagagaaattctcatttttaaaaccaatagcccttgtgagactgtttcactatcaggagaacagcatgggatagacccacccccatgattcaatcatctcccaccgggtccctaccacaataygtgggaggctacaagatgagatttgggtggggacacagagccaaaccatat

SEQ ID NO: 144273 - DNA, 487 bp, Homo sapiens
catctttccttccaacctcagcgttcactatcatgatgagcctgttatcaacaattgtgctgcaagtttttgtgtctgcctgtttttatttctcttgggtaaatagcaaagagttgaattgataagtaatatggtaggtgttacatttgactttctaagcaactgagaaatggttttcttcagtagttgtaccattttgctttcccatcagygatatatgagaattgcagttgctccacatcctctccaaagcttgctgtagtgggtctttatggcatcagtcattttggtgggtgtgaagtagattcttaatgtaattttaattttaatttccctgatgactaatgatgttaagtatctttcatttgtttatttgccattcatatgccttctttgatgaaagatatgttcaaatattttgccttttaaaaaactcaataaaaatattttttattgagttgtaagaattcctcgtatattctgatac

SEQ ID NO: 144274 - DNA, 610 bp, Homo sapiens
gtttcccaaaatgctggctatggagcaaatatccacttaaccttgactttttgtggatttcaatgtggtagctggacactgcatttacastgatggggtgagtgagagctgggtatgtgtttgacactgtgtaaagctaaaagaatcctgatagaatccaagtcagaaaagcttttgtgaattctcacctgacttctctgccaacaagctctgtctacatatgtacccagggcgacgcaggtgctgttctttctgctggctggaatcttccagtgtttgcatgttccttgtcctcttccttgcacctagctttgggccaagtgttgctgctattaagtgactacacctctcatcgaaacatacatgaaccaaacttgactgcccaaggggcactgcaggaaaagtggtgacagatctaacacttctttcaaaaacaaattaaatgactatgtttatttaaaagaaaacaggaaaaaaatccatgcatgtgaatcttgttctcattgactagagaattgacaccttggaatgttctatctactactgactttttgcaaacactctaaaacattttacatatatgataagtttatattgtaatatgacaagt

SEQ ID NO: 144275 - DNA, 606 bp, Homo sapiens
cagaaaaatgtacgccccacccaccttttataatgcttctatcgggaagacaggaagtaaccaaatgtataagtaaatatacaatgtgtcatatttgatkaatgctagggagaaaaaaaagtgaagtgaaggtatagggtgaagtggggacactctaattcatttgttcatttattacaaatatacatattaaacacaatgaacttatgtgttaggcactgtgccaggctagaatgaagtagaaggaaagatatacccaagccctggcttattatacctgataacaaaagaagaaacttcatttttaaccagtgtattaagcattccaaaccctgatgaggttgtactatcctgaagcagcacaaccattactttcaagtgtttcctttcctatccatgtttcctttcctatcccttaatgatacaatgaggctcatgtctgagttctccagaaagccctgcaggcttcctcttcactcagaattttccagtgtggcttaagctcttctgataccccagtctccctccagatgccattcccagtctccaacccaagtctcttggcaggccgccctttagagtggagagctggcaatacagtacaag

SEQ ID NO: 144276 - DNA, 568 bp, Homo sapiens
gagaaactaaatcatgagctagagctagagatggtaaatggaatttacatctatgtatcggtttcattagtttacaacttgtaaaataccaaaccttctttaaaaaaaaaaaaagtttgactttgcgagtggagaggcatagtgctaaagaattattgatagaaaaaagccatggaagtcaccttcccgtgtgctgggatgcttttttctatgctcagaaaaaaccctcaccagaccacaactgactgtagcagttcatggaggtctattcgcactttttgcttctccctgcaaaaaagcaagagcagagctccaaggctctgatgtgtgttgaatcactttccatcaaaaaacgttacttctatctgacattgactctacccttctctattctcactgcccacaattataatggtaattacaattccattataattaccggtgaaaccttaattcaatgttctgttttgcagttttattttagtgaatwtaaaactatttacaagggcgcttacggctccatttaagacatctgcatttttctcaggccattgtttcaacacagaat

SEQ ID NO: 144277 - DNA, 593 bp, Homo sapiens
gaacgcctaccactgtaaatttctgcargatttggcttccaattctaagagacttagatctaatatagcaattctgtggtccctccaggttcattcaaatggaattctacctgctgattaaaggaggcctctcttctccctctcaggttttggctctcactgtgactagagaggcccaggggttcaagactattgcaatgattccatccttagcacaatgactcttccagaaatgtttcctgctgtgaatcactcaaggcaacgcttatacagtttatttatgttaaaccaaaatccaatggcttggagttgaaatttaaagtttaaggttctttttacaactgcactctaagtcagacactaaatgaataggtaagtattaaaaaaagcagttcagtaagtcaaaggtttgagataattagaaaaacatactgtaatacttccaaggccttttaaaaataatctctttatctaaatttcttgtaatgaatctgaagatttacataattattaatactagagacattttggtggaatgaaggggatacctacccaactatcttttaaaacaacaaagtaagaaacatttaatt

SEQ ID NO: 144278 - DNA, 590 bp, Homo sapiens
gccttcaatctttaccattttacatatttcatgtaaatgttcgcttctttttaacaactcttaaattactcccttctgcccttyatcccatactctccaacagtcctctctccctatttcttaatacaaactgaaaccttcagaggagaatcctgaagcttccaatactccttccctataaacctacctgtaaccccaactatccacaccttttttttttttttgcttccttttctgaaatgaatcccatcacctgaaagctagtttccatttctgcctccatacccatcagtctcctcaacgactttccttagttgattatcagcctcccacatcccccattccatttacaaggtgttgtttttgtgtgtgtctttaaaaattgcttgaatatttgccaacttaaaaaaaatccctcatactttctctctccctagcatcccaaattaacaatctataagcatttcctcacttccaattcactccttaaatctgttacgtggcctccacccattcacccctacttcttcattactacagctcttgccaaagtcaccaccaatcccttgtgaaaaatcaaatatgcatgg

SEQ ID NO: 144279 - DNA, 428 bp, Homo sapiens
atgctttaaaaaacactgcctctagactgctggggcggccccataaatacgtacttttaaataggcatttacttccttaaaatggcaacttgtaattaaaaataatatattctttaagagaaaacatttttatttaaacaagccaaattactactagacttagacgatggaaaaaaattttatttaatcatatgtaccctkatttaaaaaaaaaaacaactcattttgaacaaagaggaatcattcaaccactgaaaagacagttcacaacaccatcattatttatttaaagttttatttgctagctaataaataccactgaaactatgcacttttaaacaaagtataattgtacatgagtgggggcagagtggaatgcaacatagtaattcatttcacatcttgcataccattaaggtgccttccag

SEQ ID NO: 144280 - DNA, 556 bp, Homo sapiens
tggctcaataataggagtttacataataatttgcataatctggttgattagtttcatgttgcgccagctccagccttcaagtcatcttcataagttctttcgtgtatcagaatccagaagctgtcaggaggaatctgcacatgggcttgtgggggtaagaggatgggatctggtgtcagacctgggcaagttattaacctccctctgcctccactttccctgatataaaataaggatactgagagcatctctgtcatgktgccttttttcaggattacatgaaaaaaaagtaggcttaatattcataacaactcaataaatatttattattcttgctaccaatgaggacatactatttgataggggtttaataaaagtttataaggaaatataaaaccgtaattagtgcaactgcaacagttgtggtgtggtgcagtagaaatcattctgggctatgaattgggatatctgagccccagattcaacttcaccatgaatgagctatgtggccagcaaggagctgtctctcctctctcggtcagtttcttaaccaaca

SEQ ID NO: 144281 - DNA, 583 bp, Homo sapiens
actctgtttataatcatttcagggtcctccattgtctacaaaatgaagcccaaacacaggaatcaggtcctgcatgctctgaccctgcctcccttgactgtctcatcaaccatcatgtaatgctttgcattttgtgctctgattataccaagtcactgatttttcccagaaaaactcttccaaaccttcaaacctttgcaccttcgatcccctctgtctagaactttgctactgaaaatgtgacccatgggccagcagcatcagtgtcacctgggggcttgttggaaatgcagactgtcaggcctcaccccagaaccactgaagcagtagccacatttgaacaaaatcctctggtaattcacgtacatgttaaagttttaaagtgctgcctaaaatgttcttccttcctactttgcccrtctcactggttctcatccttatagacccattgctccacttggcatatattaaataacattaacctgctctttacaatcttggaataaatgttatggataacttatactatctatactcataacttaaaaaattcaatataatgcttccactataatatttaaaa

SEQ ID NO: 144282 - DNA, 567 bp, Homo sapiens
tgacagcttgcactgtgtgcctggaaaggatgaagacactcaatgccagcctgtgaaagcagctgggaggggtgttgtaccctgcaaagccacaggagtggagccacccaagaccataggagctcacctcttgcatcagcatgacctggatctgagacatagaatcaaaggagattatattggagctttaagatttaatgagtgccctgttggattttggacttgcatggagcctgtayctcctttgttttggccgatgtctcctttttggaatgggagcatttatccaatgcctgtacccccattggatctttgaagtaacgaacttgcttttgattttacaggctcctaggcagaagggacttccctcgtctcagatgagactttggacttggacttttgggttaagcctggaaagagttaagactttgggggactgttggaaagacatgactgtgttttgaaatgtgaggacatgagatgtgggagcagccaggagcagaatgatatggtttggctgtgttcccacccaaatatcatcttgaatcataatcctcataataccca

SEQ ID NO: 144283 - DNA, 567 bp, Homo sapiens
tgacagcttgcactgtgtgcctggaaaggatgaagacactcaatgccagcctgtgaaagcagctgggaggggtgttgtaccctgcaaagccacaggagtggagccacccaagaccataggagctcacctcttgcatcagcatgacctggatctgagacatagaatcaaaggagattatattggagctttaagatttaatgagtgccctgttggattttggacttgcatggagcctgtatctcctttgttttggccgatgtctcctttttggaatgggagcatttatccaatgcctgtacccccattgkatctttgaagtaacgaacttgcttttgattttacaggctcctaggcagaagggacttccctcgtctcagatgagactttggacttggacttttgggttaagcctggaaagagttaagactttgggggactgttggaaagacatgactgtgttttgaaatgtgaggacatgagatgtgggagcagccaggagcagaatgatatggtttggctgtgttcccacccaaatatcatcttgaatcataatcctcataataccca

SEQ ID NO: 144284 - DNA, 567 bp, Homo sapiens
tgacagcttgcactgtgtgcctggaaaggatgaagacactcaatgccagcctgtgaaagcagctgggaggggtgttgtaccctgcaaagccacaggagtggagccacccaagaccataggagctcacctcttgcatcagcatgacctggatctgagacatagaatcaaaggagattatattggagctttaagatttaatgagtgccctgttggattttggacttgcatggagcctgtatctcctttgttttggccgatgtctcctttttggaatgggagcatttatccaatgcctgtacccccattggatctttgaagtaacgaacttgcttttgattttacaggctcctaggcagaagggacttccctcgtctcagatgagactttggacttggacttttgggttaagcctggaaagagttaagactttgggggactgttggaaagacatgaytgtgttttgaaatgtgaggacatgagatgtgggagcagccaggagcagaatgatatggtttggctgtgttcccacccaaatatcatcttgaatcataatcctcataataccca

SEQ ID NO: 144285 - DNA, 573 bp, Homo sapiens
gttttataacaggctcttctcccttcactgttcacccttctctctcctgccaccttgtgaagaaggtgcctgcttcctytttgccctctgccatgattgtaagtttcatgaggcttcctagacatgcttcctgttaagcctgtgaaactgtgagtcaattaaacctctttttataatttctctgtgtcaggtatttctttatagcagtatgacaacagactaataaaatgagagaaggatttggccttaccaagagctgaaacaaatttagagagctgagcaaaatataaaggtagaagaaacagcaggaagagccctgtgggcacacccagtacccagggaaaccacttctgactgtctcacaggggcctttggggaggctaccagtagaactggggaaagaatacagggagaaggaaactttgagatgaactttgtaataattacaaccaagcgtaaacatttatgggcagaatctgggggcagtgacgggagcaaacaggaagtgcagataggagcacagaggccatggcaggtggggagaggtggggcctgaaaggccagcttgctttc

SEQ ID NO: 144286 - DNA, 551 bp, Homo sapiens
taaattagctgggcaaagaatcttctctcatttcacatgctcaattagtacattgcataattaaaatctagaggagctttcattgtataaagcatgtgggactatttactcttacatggcactctgacagtgcttggttttattatgtgggaagatatattcttccaaaggtgggagtattggctgtggtggctgctacttgcaagcatttcattctcatctgattatttctcacaagagaaaagactggtttcagctgtcagggacacatcttcataagagccatctttcccacaaatagactagaacttgcacaagactataatcattataaattgtgattggtcaaaaattgagacaaagattttttcagataacatttttgttgaatgtatgaaaccaaatttcctttaatactctttatatttatctctgtaacaacattaaacctttcaaggataaagctgctataaaaattagtttgctgcaaaaaactccmccttcgtgtcaaaccacttattactattgttaagtaaatgtgactattatcc

SEQ ID NO: 144287 - DNA, 600 bp, Homo sapiens
aaaaaaaaaaaagattttgaactattaacttcttaagatatagatacggtgatgactgacttgaattaatcttttatttcctctcatggttaattctttactagttttcatctttaataaaaagtcctacatggattagaagcagttaggctaaattctataatgactggattccctgaaccaggggacttattatgcaaggaaaagcagacagcttaagtccaagtcttttgtgatctgttcttttgtgatgtcagaagcaaatggatacctaacataattgtatttgaacattagtcagtatawagttatgagttctaatgtctcttcttgtaagcatattatgtttcggctcataagcttagagaaaatagtctatggccccatgtgccttaatttctctgaacagagccaataaaaacactggggttcagaaataggaaattaatttagttaacatgtatttatgccaggtgctaggctaggtgttggagatttctggttgagatttccagttgctctctcagagttcattggcaaatcaaactaattcttatttagaacttttatctgcaagcagttaagatctgactatacagt

SEQ ID NO: 144288 - DNA, 584 bp, Homo sapiens
cttcttgtaagcatattatgtttcggctcataagcttagagaaaatagtctatggccccatgtgccttaatttctctgaacagagccaataaaaacactggggttcagaaataggaaattaatttagttaacatgtatttatgccaggtgctaggctaggtgttggagatttctggttgagatttccagttgctctctcagagttcattggcaaatcaaactaattcttatttagaacttttatctgcaagcagttaagatctgactatacagtgggtaggaacagggatttgttgtgtttgcaagtgccttagcatgtttcacttgatcctawtttttggtaatacgtaatatactcatttctaagtttaagatatactattagagctagattttggatatgaaaccaagtcttagtacttcaaacatcctctacgcttcccattgcactaggctgctctgtagcctttcaatctttgataaccttacatgattaatagttatgattttacgtgcttattttatcaattttatgtacaactttgatcctttaaacagaggtggggtagggaggatggtagaag

SEQ ID NO: 144289 - DNA, 632 bp, Homo sapiens
tataagccacattaactgggaaaactatgataaaattatcagtttcagttaatatcaaaatagggcagcaaaagacaattattgaaaagcaaaagttttatagagtttaatgtactgacctcataaatatcagaataataaatgacatctctactccctccacaaattattagagaagtttgtcttcaactgctaaaattacacttggtgaatctgttctatcacattagtgttcaacaccactgttaatctttgtccttttaagttatcatagcaatgcatttagtagctgcacaatcttcccaatctcagcagtacgtgtataatatgaacactaatcaagatcattcagcaggtcagcagattaagattagcrtcagtttccatctcttgggctccaaagcacaaatttctctccattcacctacagatctatcacatatgttctcaacatagtcccatatccaagtaaatacattatgaagtgtaatgtctactttatctaaattaaatagataaaaatgacagctctaccttatttgataattcattcttaatttgcttttaaaaatttaactactactaaatggaataactatatctataaatatacaaataaaataatgatactt

SEQ ID NO: 144290 - DNA, 587 bp, Homo sapiens
acatcaaatggtatgaaatcctttaacctcatgcagttacatttattatgaaatatttcaaacatactgcaaaggtataacgaatactttggaataatctggtttttgaggtaggagttagaaaatgttccatgggtaactcatttgtgcattttagaactacttgaaactctgtaccttcaaataaaaagtagagtggggtggaagtagggagagcattaggaaaaatggctaatgcatactggacttaatacctargtgatgggttgatacgtgtagcaaaccaccatggcacatgttcacctatgtaacaaacctgcacatcctgcacatgtaccccggaacttaaaaaaaaaaaagaaagattttgtgaggtggaaaaaaaaagtagagtgatacgtatgccaaattttgaattactaattttaaagtaattttgttcttcataatctgattttggaaaacaaaaaacgactccctttctgccttctagtgtgctaaaacatgagctgctccgtgtgtactattgatctgtacacactgagattttaaattaaaattaatttataaattgtcacaacttcttt

SEQ ID NO: 144291 - DNA, 587 bp, Homo sapiens
acatcaaatggtatgaaatcctttaacctcatgcagttacatttattatgaaatatttcaaacatactgcaaaggtataacgaatactttggaataatctggtttttgaggtaggagttagaaaatgttccatgggtaactcatttgtgcattttagaactacttgaaactctgtaccttcaaataaaaagtagagtggggtggaagtagggagagcattaggaaaaatggctaatgcatactggacttaatacctaggtgatgggttgatasgtgtagcaaaccaccatggcacatgttcacctatgtaacaaacctgcacatcctgcacatgtaccccggaacttaaaaaaaaaaaagaaagattttgtgaggtggaaaaaaaaagtagagtgatacgtatgccaaattttgaattactaattttaaagtaattttgttcttcataatctgattttggaaaacaaaaaacgactccctttctgccttctagtgtgctaaaacatgagctgctccgtgtgtactattgatctgtacacactgagattttaaattaaaattaatttataaattgtcacaacttcttt

SEQ ID NO: 144292 - DNA, 558 bp, Homo sapiens
gagcggtgaaactattctgtatgatactctaatgatggatacatgtcattatacatttgtcctaacccatagaatgtacactgagaatgacccctaatgtaaacgatggactttgagtgataactgatgtatcaatgtggcttcatcccttgtaacaaatgcaccactctggtggggggatgttggtagtgggagaggcggctgtgagtgtgcaggggaaaggagtgcatcccatttaattttgctgtgacyttaaaactgctctaaacataacatattttaaaaatgcacaaaagaagaaacaaatcaccccaaatttcaccatacagtgataattaccacttactttagtatacatctttatcattcattccacaattattcatgaaacacctactatatattgcgggttgttctaggcactggggatatagcagcgactcaaacacagaaaaatccttactctgtggagcttatgttgacctctctcaaatagagggagggctcagaaaataagcaaattatacagtatagatgttagtaaatgctacgaaagat

SEQ ID NO: 144293 - DNA, 577 bp, Homo sapiens
aggtattagatctgccatatctaagagcttaatcagtgttccccacagcctcaaagtctaccaccagaccccacctaagaaggaagacaaccactgcagttgtctgaaccactgcagttgggcaaataggcactgttttcccatgcccagaagtttaatgtgctcccccagagcctacacagggaaggaggcaaatctgagtcttggatttttactgagcatagtagttggttcatccattctgattcacttaaccctggagcctctcctgcaaccctgtccaactgctgaactcaaatatcagtacctctagccaaggaatatggcctgtggctcacccaaatcagaagtaratgcagtgcctatatagcagcccagcctgatagcagagttcagcctgtggtcttgccaaatagcagagactagccaggtgcctcacctgacttcatagcaaaggcagcagcctagccatctagaggatctgaaaggaagctgtgctttccagggttatgacccactggcctatttagaatcattatctagactaattagtgaaggtttttacctgccaagaact

SEQ ID NO: 144294 - DNA, 577 bp, Homo sapiens
aggtattagatctgccatatctaagagcttaatcagtgttccccacagcctcaaagtctaccaccagaccccacctaagaaggaagacaaccactgcagttgtctgaaccactgcagttgggcaaataggcactgttttcccatgcccagaagtttaatgtgctcccccagagcctacacagggaaggaggcaaatctgagtcttggatttttactgagcatagtagttggttcatccattctgattcacttaaccctggagcctctcctgcaaccctgtccaactgctgaactcaaatatcagtacctctagccaaggaatatggcctgtggctcacccaaatcagaagtagatgcagtgyctatatagcagcccagcctgatagcagagttcagcctgtggtcttgccaaatagcagagactagccaggtgcctcacctgacttcatagcaaaggcagcagcctagccatctagaggatctgaaaggaagctgtgctttccagggttatgacccactggcctatttagaatcattatctagactaattagtgaaggtttttacctgccaagaact

SEQ ID NO: 144295 - DNA, 577 bp, Homo sapiens
aggtattagatctgccatatctaagagcttaatcagtgttccccacagcctcaaagtctaccaccagaccccacctaagaaggaagacaaccactgcagttgtctgaaccactgcagttgggcaaataggcactgttttcccatgcccagaagtttaatgtgctcccccagagcctacacagggaaggaggcaaatctgagtcttggatttttactgagcatagtagttggttcatccattctgattcacttaaccctggagcctctcctgcaaccctgtccaactgctgaactcaaatatcagtacctctagccaaggaatatggcctgtggctcacccaaatcagaagtagatgcagtgcctatatagcagcccagcctgatagcagagttcagcytgtggtcttgccaaatagcagagactagccaggtgcctcacctgacttcatagcaaaggcagcagcctagccatctagaggatctgaaaggaagctgtgctttccagggttatgacccactggcctatttagaatcattatctagactaattagtgaaggtttttacctgccaagaact

SEQ ID NO: 144296 - DNA, 655 bp, Homo sapiens
tagcactcttattgttagtatcattcacctggatcatttttgtgctgatacaataacaccatccccactcaaagtggaaaaaaataaattattgatggctttgcatactcaagctgggttccagaaatggcttgtgaatagcaaggacttgagctgaactctccaaaggaacaatgagggtggttggagtacagtggaaatgcgacctcgggggatcagttttcagctgcattgtggccgaattaataattcaagattattgttttgggctaggtatccttttcagcatctttaaaaacctctctttctaccatggtgggattgcttcactattcaatgtcatgccaaggatttttttcttgaatrcaatgctgtatagtagcaacgtgaaatatgtgagtgttccttgtagattacaatatactcattagatcaaaatgtttattacaatctcaatctctaaaaaattgagacatgtgttttggattcagaatgtctagtattttattcaatcgatttcccatcttagattgtaggcattaggataagggtaggaaagtgagattcatatatgacacagctgcttaccagataagctgcagatgttttagtcacctccatattttctaatatcaaacattttatttttgtagct

SEQ ID NO: 144297 - DNA, 540 bp, Homo sapiens
gactcccctgaaggcttgtgttgcacccaggtatggtccatgggactagggtcatcaccctttaggccggttggttgcattcactctaggttgtcttgctgagcttgcaaggattggctgggcrgctgccataatgtccaatgactgcctgctgctgaacatagttatctttttccttctagggagatgtggagcaccagggaacaggttcactgagccaccttgtgtccatctctggggactgcatcttcccccacattctagcacctaaagatataggggactccatcttcctttgctaccaccattcttacattctaacctgaaagagactttgcctacatgcctttggttttcatcaacctcccagtaccagcttatacctttggtggacagactacctgctgtcttaggacttggggtaatttatgtagattaccaaagaatattttaaatagttggtcgtcacaaactctaaattctaggagaaattcaggctctgtcctctcaactcccgtcacagtcttgcaaggagaagga

SEQ ID NO: 144298 - DNA, 543 bp, Homo sapiens
tagaggaagataacaaaatatgttatgtcttttagaatttgacctcacaaagtaatgtttatttggcagacagtctagggagataagctgcttcatatagaaaaagcaaggtctatttactatgaaactgatcttcatccaatcctgcattgtaggtatcagtgagaatgccttcagttgcctggctagttaaaaatgsacttcccccaatctttcctatgtgccaactaatcttgctaatatggaaaatatgctgtcaatgctatttaactaaacgataactgttcaaccttgaggagcataaaatttttgaagaaagataaattttcaacacatcaagtacttctaagcagagtcagtactacaattacttgagaacaaatctctgtcaaacacttagaactacgatgctaagcactttacacagattacattatttatttaatcaaaaccatgtagggaaggtgttattattgatcccattttatagagataaaactcagacttggagaagttaaattatctaaggtcacacaatcaagt

SEQ ID NO: 144299 - DNA, 413 bp, Homo sapiens
aaacccttgcaacctatctcacaaacacatggaccaggaaaacgtgtggaagctcaggttaaatccatcaccatccttacaaatacaactggaagtactaaccttcctaatggtgcttccacattttggtatttgaaagatactataaagaggtacaaggctcagctctgcgaatggaatgcaaaatagaatgcctaactagaaaagtgaggccagataagtgtgagggttatttcttgtgttcatcccagaggatgagaacacctctcctccaggaaatgrgtgaggacaaactgcctctcacacgacacccacatatattctaggtttagggacactgggaacaaatggtggacattgagaactatgaggtggtatgaatcagggcttcaagctcaggagtaaggactaaa

SEQ ID NO: 144300 - DNA, 503 bp, Homo sapiens
tgcatttgaccttctaaatgataaaaggtttgcttaatttcaactgtgctatattattaataacattgggaaagtcacttaacctctgtwtatctcaactaccaccttataaaaatggaatataattcctacttcacaggttattagaattgaatcaggtaatatgtatgaaaatgcccattacagtgcctacctgataatcagcctggcaagtctgattagctgctgttattattaccattattagtagaattggttttatttgaaagtttgccatcatggggaggaaagatccattgacttggtatttccacccaaatatttcactgcattgtattttgcagccataagaaaatatttgaatttaatttaatgtggacaatcaagatatctccccagaataaactggaaatacctctgtatagatctttgaaatgagagactgcaaaacattaacacttccacaaatgcctttgcctcacaaccaaccccactctgtcctt

SEQ ID NO: 144301 - DNA, 554 bp, Homo sapiens
aggaaccaagagagagaaggaaagaggccaggaagtcaaatgtgagtgtcttcacttgctctgtaatatgtagtagtgcaaggaggcactgctgcattttagcaaatgagctgtggaagagtgatgattgggaaaatgtcttgatgagkaggccaaaagatggtctcatggagttgcacatgttccattatagtggtccagaaagtgcagagtagcgttaggtccttggttgaaaggaggaaggggactctgagatgccaagaaaactggtgtgcaagaggaaccctgagttggaataaaatgaccacagatcagagactacaacaaagtcagaaagaagttctcctacattttactctaaaagcttttttgttttactttttcacatttatatctgcagtccatatggatttaatttttataaatggtatgaggtaggaatagccaaaatattgactgtaactaagcatcatttgtttaaaaaggctttttaaaacaactgcagcatagcctttgtcataaattagatggctgagtatgtgtagggggttttc

SEQ ID NO: 144302 - DNA, 372 bp, Homo sapiens
gactacaggaacaagccaccatgcccagctattttaatgcatttttagtagcaatagggttttgccatgttacccaaggctcaagtaatcctcccgcctcggcctcccagagtgctgggattacaagcatgggccactgcacctggtaagactatttctatgtagtagtttattcccacctcctttcctatccctcctgggaataactgacctaattgatctatagaacaaacactcttaccacaaagatcacacacacacacacacacacacacacacacaaacacacacacacacacayagagtcatgtaccacataatgatgtttcagataacagacctcatatatgatagtggtcctataagatataa

SEQ ID NO: 144303 - DNA, 613 bp, Homo sapiens
agggggcaagatggacaactagatacagccaggaagtgctgctcctacagagaaagacaaggattttgtctaaaccaatgtaatttgaacagatctttggagagaacacaccaaatgtggaaggtgaaaaggcacagacactgaggctgaaggcaaggaagctgggaagctgggaatctcgtgtggggtgcctaaatgctagggctggtttcctgcctccaactgcacttagggaaagggtgagtgaagaggatggaggacatcccacttgcaccatagacctctgggatcctagctgcaggagaccccacatcccccayagatgcttgagctagcaggggcatttccccagagattagacagaaatggatctgcagcaagcatgtgtggggtagttccagtggagcccagccataagcacccacccccactgcaggctgcccatctccctctaatctcccagctaatcaccaggaagaaagcaaggctttcttctacatgggactggggcacatctgccctgcagtcttgcctgccagccaacccttccagggctcctgtctggctgccctgcagaagcgtgcatacagtgcaggctctactgcccaacctg

SEQ ID NO: 144304 - DNA, 613 bp, Homo sapiens
agggggcaagatggacaactagatacagccaggaagtgctgctcctacagagaaagacaaggattttgtctaaaccaatgtaatttgaacagatctttggagagaacacaccaaatgtggaaggtgaaaaggcacagacactgaggctgaaggcaaggaagctgggaagctgggaatctcgtgtggggtgcctaaatgctagggctggtttcctgcctccaactgcacttagggaaagggtgagtgaagaggatggaggacatcccacttgcaccatagacctctgggatcctagctgcaggagaccccacatcccccatagatgcttgagctagcaggggcatttccccagagattagacagaaatggayctgcagcaagcatgtgtggggtagttccagtggagcccagccataagcacccacccccactgcaggctgcccatctccctctaatctcccagctaatcaccaggaagaaagcaaggctttcttctacatgggactggggcacatctgccctgcagtcttgcctgccagccaacccttccagggctcctgtctggctgccctgcagaagcgtgcatacagtgcaggctctactgcccaacctg

SEQ ID NO: 144305 - DNA, 520 bp, Homo sapiens
cacagacactgaggctgaaggcaaggaagctgggaagctgggaatctcgtgtggggtgcctaaatgctagggctggtttcctgcctccaactgcacttagggaaagggtgagtgaagaggatggaggacatcccacttgcaccatagacctctgggatcctagctgcaggagaccccacatcccccatagatgcttgagctagcaggggcatttccccagagattagacagaaatggatctgcagcaagcatgtgtggggtagttccagtggagcccagccataagcacccacccccactgcaggctgyccatctccctctaatctcccagctaatcaccaggaagaaagcaaggctttcttctacatgggactggggcacatctgccctgcagtcttgcctgccagccaacccttccagggctcctgtctggctgccctgcagaagcgtgcatacagtgcaggctctactgcccaacctgggtctcttgcttcatctgagtgcattctggcagtttgta

SEQ ID NO: 144306 - DNA, 578 bp, Homo sapiens
atgcactatggagaggatatttcctgttacagctgaagtgtgaatcggccttatgttccctgcctctggaccctattttcctgcctcagttcttcaaatcaactcagtcggacaaaaataaagaactttaaaaacatgaacaacatctctgagaaacaagggattatgtaaagagaccaaatatatgactcactgacattcttaagagagaaggagagaaaataagtaacttggaaaacatatttgaggattcaatccatggaaatttctctaatcttgctaggcaggttgacatgcaaatacaagaaatacagaaaaacgtggccagacactacacaagtcaccatccccaaggaacagtgtcatcagattcagcaaggtcaacacaaaagaaaaagtccaagttggagggggaggaaaaaaaaaaatcttaaaggtagctaaagagaaaggtcaggacacctacaasgggaaccccatcagattagcagcagacctctcagcaggaacttataagccagaagagatgggggcctattttcagcactcttaaagaaaacaaattccatccaagaatt

SEQ ID NO: 144307 - DNA, 608 bp, Homo sapiens
tatctgttgaacaatgaacactgtttttgaaagtggaaaatgcctctacataacaggttattgccaaaactgagaagtccttggaagtctttaaaaacatttttctatggcttgggaatagttttgctgaaraaaaaagaacaaatcagatgaccttgcaaggctgagtctgcgaattgtatcaactcttttaaagtactgcctaataattcaaaaacaaactatacacaaatgctatttacaaaaagaggagcatttattataatatacaactttaataatagaatgttctaccaaaaatttgagctgttcttgtaatattggtaatatttagagctgtgtccaaggattgcataaaaagccgatttactctcttatttcacacttaaaagtagtaggacagagagaaaaactggccatctcaaactagtaacagtacaagatacttggaagcacaagttcataacatggacatattgatgttattgtgtgcacatcatcactaaaaatatacctactgaactctagaaaagttaattttgatgataacagcttcattagtttctacggagaagacatacaaaaagttttcgtattctcttctcccc

SEQ ID NO: 144308 - DNA, 601 bp, Homo sapiens
aatagcaaatttaaaataataccactaggtttttttaggacttgaaaaaggcaatagcataagtagcattttgtatgtcacctgaaaaatttttgtattttcatttttataaggaatataattttcaaatattctgccaagtttctttaccagttttcattaaaggtaatatgcttcagattaattcacttgattttatattggggtataggaagttacctcagtattttccaattctgaggtgttttccatagaagtttaatttaaagtgcagttcagactttcacttccagcaacaaaacaggttagagaccttgatttattaaaaatgtgagattatatatttttataatcttaaatgaatccattgtaatcttgaatgaataaaacatggaaaactaaagccaaaggctgcacaaaggaaggaatccatctacagtcyattctcaacacagcatccatggtgatccgatgaagtcagatcaggtctgtccaagaccttccaatggcttcctgtatcactcaggatgagtccttactgtaaatgacagggcccgtgttagttgtctattgctgctataacaaattacgacaaacttgg

SEQ ID NO: 144309 - DNA, 555 bp, Homo sapiens
gaattccaaaatctccaaaccaaataataaagttccactgtggaagcttttcaggaaagtcaattttttctctactcctctatctgccatgcactatagtacacrgtctaaatctggatattaaaagatcctgtacagaaacctagggagtattcagagaggtagaaagagaatcagggaaacaaggaggaggaagtttttaggaggaggaagcaatcaacagtgctaaaagctaatttttcacatcttctcccctatacacctccacaacatttttggtgattctgaataagtccacagagtgttcctgaattagggtataatctcttctacaaagaaacatgcccatcacctatgagggttaatgtgccaacttgactgggctatgaggtacccagatatttggtcaaacattattctgggcatttctgtgagggtgttttttaatgagattaacatttaagtcattggactgagtacagcagattgtcttccatgtgcaggtgggccccatccaatcaggtgaaagcctgaaaagaatgaaagactgacctc

SEQ ID NO: 144310 - DNA, 556 bp, Homo sapiens
tgaattccaaaatctccaaaccaaataataaagttccactgtggaagcttttcaggaaagtcaattttttctctactcctctatctgccatgcactatagtacacagtctaaatctggatwttaaaagatcctgtacagaaacctagggagtattcagagaggtagaaagagaatcagggaaacaaggaggaggaagtttttaggaggaggaagcaatcaacagtgctaaaagctaatttttcacatcttctcccctatacacctccacaacatttttggtgattctgaataagtccacagagtgttcctgaattagggtataatctcttctacaaagaaacatgcccatcacctatgagggttaatgtgccaacttgactgggctatgaggtacccagatatttggtcaaacattattctgggcatttctgtgagggtgttttttaatgagattaacatttaagtcattggactgagtacagcagattgtcttccatgtgcaggtgggccccatccaatcaggtgaaagcctgaaaagaatgaaagactgacctc

SEQ ID NO: 144311 - DNA, 555 bp, Homo sapiens
gaattccaaaatctccaaaccaaataataaagttccactgtggaagcttttcaggaaagtcaattttttctctactcctctatctgccatgcactatagtacacagtctaaatctggatattaaaagatcctgtacagaaacctagggagtattcagagaggtagaaagagaatcagggaaacaaggaggaggaagtttttaggaggaggaagcaatcaacagtgctaaaagctaatttttcacatcttctcccctatacacctccacaacatttttggtgattctgaataagtccacagagtgttcctgaattagggtataatctcttctacaaagaaacatgcccatcacctatgagggttaatgtgccaacttgactgggctatgaggtacccagatatttggtcaaacattattctgggcatttctgtgagggtgttttttaatgagattaacatttaagtcattggactgagtacagcagattgtcttccatgtgcaggtgggccccatccaatcagrtgaaagcctgaaaagaatgaaagactgacctc

SEQ ID NO: 144312 - DNA, 570 bp, Homo sapiens
atcctattggcctccttctggggcgctgtgaagtgtcaatttgttttcctttccgtcagactcctattgcagagctgagaagattccctgcaggaaccacagagtatacccatggaacaggactccttctggcaaagcagtgtacatgaggttactgaaattcagctggkattccccagcaaccttctcactccactgtcttgtttaaaaggaataaaaaatagaaataccacaagaaggagaaaagtaggaaaagatgagagcgacggttaattgtatgtgtcaacttaactagagtaagggatatccggaaagtgggtaaacattatttctgggtgtatctctgagggtgtttctggaagagattagcattttaattggtaagctgagtaaagaagatggctcttccttatgtgagtgggccatttagggccgaaataaaaacaaaaggcagaggaagggtgaattaaactctcttctgtagctgggacttccctctttcttgccctcagacataaactcccaattctcaatcctccaggcccactggactggagctacactactcac

SEQ ID NO: 144313 - DNA, 622 bp, Homo sapiens
atgatcagtgtgtagatcagaaccagtgatgggtgtacatttcacacttaaatttaatccatatttatggcatacttatatggaccaggcactgtaactatactatacactttaacacaatcatcttatttaaatcctcacaacaatgctgtgatacaagtaattttacttcatttttccagataaagaaaactgagattcaaagaagctttaaactgcatagtcaagatgayacagctcatcaatagtaaagcttagaaagtaaaactcaagttttctgtctctatggccagtgttctttccactatatgcagatacctccatttgaattagcaccctgatcaacaattggaaactgataacctttctgctactttttaatactaaaatatcttttgttcagattttagcctgtcttttgtatctgttaatgaacactcttccttaagagatacagacatataaaattaaatagataacccactctttaaaaattaatcagaagttttatattttgtaaacatgaaagactaagtaaataatgcctggatttgaaatgtttttaataataaaatcaggaataacccataaaaattggaactcaaaaacagtgagctatgct

SEQ ID NO: 144314 - DNA, 622 bp, Homo sapiens
atgatcagtgtgtagatcagaaccagtgatgggtgtacatttcacacttaaatttaatccatatttatggcatacttatatggaccaggcactgtaactatactatacactttaacacaatcatcttatttaaatcctcacaacaatgctgtgatacaagtaattttacttcatttttccagataaagaaaactgagattcaaagaagctttaaactgcatagtcaagatgatacagctcatcaatagtaaagcttagaaagtaaaactcaagttttctgtctctatggccagtgytctttccactatatgcagatacctccatttgaattagcaccctgatcaacaattggaaactgataacctttctgctactttttaatactaaaatatcttttgttcagattttagcctgtcttttgtatctgttaatgaacactcttccttaagagatacagacatataaaattaaatagataacccactctttaaaaattaatcagaagttttatattttgtaaacatgaaagactaagtaaataatgcctggatttgaaatgtttttaataataaaatcaggaataacccataaaaattggaactcaaaaacagtgagctatgct

SEQ ID NO: 144315 - DNA, 622 bp, Homo sapiens
atgatcagtgtgtagatcagaaccagtgatgggtgtacatttcacacttaaatttaatccatatttatggcatacttatatggaccaggcactgtaactatactatacactttaacacaatcatcttatttaaatcctcacaacaatgctgtgatacaagtaattttacttcatttttccagataaagaaaactgagattcaaagaagctttaaactgcatagtcaagatgatacagctcatcaatagtaaagcttagaaagtaaaactcaagttttctgtctctatggccagtgttctttccactatatgcagatacctccatttgaattagcaccctgatcaacaattggaaactgataacctttctgctactttttaatactaaaatatcttttgttcagattttagcctgtcttttgtatctgttaatgaacactcttccttaagagatacagacatatamaattaaatagataacccactctttaaaaattaatcagaagttttatattttgtaaacatgaaagactaagtaaataatgcctggatttgaaatgtttttaataataaaatcaggaataacccataaaaattggaactcaaaaacagtgagctatgct

SEQ ID NO: 144316 - DNA, 555 bp, Homo sapiens
aaaaattaccaacatctaccaagcatctatggtgtgtatgagctaccagagtgcttgtccccaagaacctagctgaggagaaaaggtacacagatatacccacgcctcagcatggtgcaaaggcccctgctctgctcacatgtcccaatatcatctcctycctggtcccaacaaactcttttcactccagttgtatcaccctaattttggtgcccccattttatccttctgttatgctcatcatgtggtctctcctcaagaagtccttctttgcctagttaacttgtcctacaggactcagattgagggccactttctcttggcaacatttcctaacctcttccaacctaggctgagttggggtctcctcttctgaacttgcccatataaatgtttgtacttgttccagctatactctcatggccagttctgtctcctgatcaaaaacatctcaaaggttcttctgcttaggcccaggacaactctcttcttcagggcacacccttgggatgcaaacccttttcctcccttcttagcttccaactcccactatag

SEQ ID NO: 144317 - DNA, 555 bp, Homo sapiens
agcatctatggtgtgtatgagctaccagagtgcttgtccccaagaacctagctgaggagaaaaggtacacagatatacccacgcctcagcatggtgcaaaggcccctgctctgctcacatgtcccaatatcatctccttcctggtcccaacaaactcttttcactccagttgtatcaccctaattttggtgcccccattttatccttctgttatgctcatcatgtggtctctcctcaagaagtccttctttgcctagttaacttgtcctacaggactcagattgagggccactttctcttggmaacatttcctaacctcttccaacctaggctgagttggggtctcctcttctgaacttgcccatataaatgtttgtacttgttccagctatactctcatggccagttctgtctcctgatcaaaaacatctcaaaggttcttctgcttaggcccaggacaactctcttcttcagggcacacccttgggatgcaaacccttttcctcccttcttagcttccaactcccactatagcctctggggtcccttgcattt

SEQ ID NO: 144318 - DNA, 515 bp, Homo sapiens
aggggatgattcttggaatgatgagtattagtttccacatgcctgagtttaggttctggatttaaaaccttattgtaagatcatctctttgaaccttctctctaattgtggggttttatggtttgggggaaattttacttatttttgttgttggttttttggtttttggttttttgagacagggtctccctctattgaccaggctggagtgcagaggctggagtgctgtggggcgatcagggctcactgargcctgcacctccctggctgaagagatcctcccacttcagcctccccactaggtgggaatacaagcgagtgccaccatatccagctagttttaaaaattttttgtagtgatggggtcttactatgttgccaggcttgtctcaagctcctgggctcaagtgatcctcccgtctcagcctcccaaagtgttaggattataggtatgagccaccatgcccggccgatttgtttttttaacagatagaaaatcatttgagggggaaact

SEQ ID NO: 144319 - DNA, 441 bp, Homo sapiens
tttatgtaaattatacctcaataaaaatagatatatactatttcaaatagcatccagacactaagaaactagtaataaatttaacaaaagatgtgcaaaatatatgaagaaagttataaaactttactgagcaatattaamaagacctaaaaatggagaaatatataaattgaaggatggaaatactaaatttgggtcaattctcctcaaactgttttataaattcaatgtaatatgaattaaatcccaaaaggatttttaaagtacttgacagctaattctgaaatatgtatggaaatataaagtaataagagtagctaagatgttgttgaagaaggaaaacaaggtagcagctctgaaattctagataccagacttaaagctattctaaccaagacagcgtgaattgacatagagatagaaaaagagaggcgaaatgaa

SEQ ID NO: 144320 - DNA, 609 bp, Homo sapiens
ccgtttacttattaaaagattaaattaaattaaaaatcctttttaattgagtgacaaggaagcaatatgtagttttctttagctacgttgccatatcctactggagtatgttaattcatttcacaatacatggacacattgaggacagagccaatggtaaagcctgcctgcagagagcttgccctagtagtgaggtcgactggaggtaaacacctgttctcttcgtctgatatggaatccttgccagcagattgtacctgatagattatttaaactgctcattatttattttattctttcagaggatgacagaaaggtctaaagaagtcattagagaaatttaggctcatgtgtgatttattttctcataaccacttcagtgaacccaactcatcacccctattttattgaattttggtgaaacctaaaatgtattttggcagtggcactttttattcttttacttctcaattaataygcaatttaaagagaacacagtccatatatgttatcttcatttattcgaaactcccctatgtagtattttgtaaagtaagttaatgttcagaaatttgttggatatgtcatttttaaatatagaagaaatat

SEQ ID NO: 144321 - DNA, 577 bp, Homo sapiens
acatggacacattgaggacagagccaatggtaaagcctgcctgcagagagcttgccctagtagtgaggtcgactggaggtaaacacctgttctcttcgtctgatatggaatccttgccagcagattgtacctgatagattatttaaactgctcattatttattttattctttcagaggatgacagaaaggtctaaagaagtcattagagaaatttaggctcatgtgtgatttattttctcataaccacttcagtgaacccaactcatcacccctattttattgaattttggtgaaacctaaaatgtattttggcagtggcactttttattcttttacttctcaattaatatgcaatttaaagagaacacagtccatatatgttatcttcatttattcsaaactcccctatgtagtattttgtaaagtaagttaatgttcagaaatttgttggatatgtcatttttaaatatagaagaaatatcgtcagaaataaattaatattcctaggaagtttaacttttactctaaattataaaataataatcattacagattccaaatatgaaagggttttat

SEQ ID NO: 144322 - DNA, 457 bp, Homo sapiens
acatatgaagcaaagccttttgggtttttgcttagttttcaattgcattggttgcagatgactgttaaaaacaaacaagaaaccaattcagtgctctctgggaaaagaccaaatatgaatgttctgttttcattcacatatgttttccatttattggaaactgtagaaattcatctatgctattgattctgacaatgaatattaggagatcttaaaaggcctttggagattgaagcagaaataaaattgacacatttttaaaggagttcttcatccctgttcccttctcaaatactttcccttattttattaatgttttcatgatcagaaatggaggaaaaatcacgaatgtattagacttttatacacatttccatgtctttcatctcaattatctctaatatatgtgggtgattttattcatctggayttgctatatgcctttttgttatgcttt

SEQ ID NO: 144323 - DNA, 563 bp, Homo sapiens
  misc_feature (1)...(563): n = A,T,C or G
aaaaattcaatgtgagttcccactagttcatttcaaccagyattaatagagggcctactatgtgctaggctctgcattgttcaaggcatagaggtatatgaagatgaaagaaaatgcctttgtttttgagggaaaatagtagaaaaatcatttcaatggatacatacgataataaacatttttataaatattaatatagttccaaggtaggcaaaataaagaagaattcacagagaaaacaaagctggggaaggcttaaaccaggagatactctgtgatgattctctttgtcnttccactatggaaataaagatacggtgatagaaattaaactgctgccaagtaccaacaggctttagttgtttatttgtttatctagtgttgtgtgctttgtgtaaaggttttaggtattcatggtttattaaagttcttttagttcatatgtagctttaaccccaaaattcatgtgatattatgacatcataaatttatccatgagctgcctgtgagctctccataaccctgaacttgaaaaattaaaatagtaaatgacaagagaaagt

SEQ ID NO: 144324 - DNA, 493 bp, Homo sapiens
gaagcttctgggaatcatgagctgaggttagactgttctcacaacttratcacactcagttgtttactgtggccaagctagaacaaaaggttttgttttattttatgcataaaatttttctggaacagagaagttaaatgagtagaaatatgtaatggacattaatgatgtgatttttttttcttgtcctgtattgttttccaattgtttcactatttgtgtctttttcaattagtaagttggaagatgaaagaaagataggggctttgtatttattatccttcattcacaacactttaacataagctattttaatttctaatttcttacatatcgatagaggctcttataacatattgtaactgttgttcttacaaaatgctatgcctgcttcataaataaatggttgccttgaatttttaggcttcgcaaatttatatctacagatgacatttgatatcctattttattggataattgatagtgggacaat

SEQ ID NO: 144325 - DNA, 625 bp, Homo sapiens
tttggttctcaactcccctcacccttaaacatttgatctaggaattactttttcctgaaagagttttctgtcacgtttttctttgaatatagkttgtactatccctataattgtgatctctttcaaggagccactcgaaaacaattgctctaacatgttatatataccaagatatatatttttttcataaaggattgcttaatttttaagatgaggtttctttttttaagtcacttatctttgattttatttattctaaaaacctggcaacttattttgggaaataccagcaaagctggattttggaatcatattccttcacatatggtactaatatatctctgtctttgccttcatgcaacacagcaacagatgtctaacatttctggtttttaataggcctctgatctcaggaaggtccttttttggaataggcaatggtatgtttttaaagctacagctcatttgcaagattgtgttttacaagatttgtttttactaatgatgtaaatttcacccttattctgagattttcttaacacataagctagcagtaaatttgcctggtgtagagataggcacttgcatcattaaaaggaaagccttttaacattaatagacttaa

SEQ ID NO: 144326 - DNA, 568 bp, Homo sapiens
actgcttctcctcccaaaagaaaataagtgcactaataagcaagaaagggaracgaatgccaaaaaataattgtccacacatgctgcagaccagtcctcacaaaactgacatccttagtgatgagaggacatggatgttgatgcagagtattcgtgcatgtagatacaaagtattcaagcatggccacacaggcatgcagacctacacccaaggagggggctatcatggcctcgcctcatcatcatgctttgctagcaggggcattccttagtcctattcttggtccctaaatcagcatctgaaaaaccatcttttttaaaaaaaaacccaagcctctgacttaatatccccaaacattttttctcaaaagaatgaattttcttcttactgctttattgaagcatttcccaaagtatgttccatagaatccaagtgcttgggatgctactgggtattatacattctcttaaatccattactaaataagtctgggaacagttcacttaagcgtgatgttttaagactgctgtattactagaccctagaagctttactatgacaagtggg

SEQ ID NO: 144327 - DNA, 568 bp, Homo sapiens
actgcttctcctcccaaaagaaaataagtgcactaataagcaagaaagggaaacgaatgccaaaaaataattgtccacacatgctgcagaccagtcctcacaaaactgacatccttagtgatgagaggacatggatgttgatgcagagtattcgtgcatgtagatacaaagtattcaagcatggccacacaggcatgcagacctacacccaaggagggggctatcatggcctcgcctcatcatcatgctttgctagcaggggcattccttagtcctattcttggtccctaaatcagcatctgaaaaaccatcttttttwaaaaaaaacccaagcctctgacttaatatccccaaacattttttctcaaaagaatgaattttcttcttactgctttattgaagcatttcccaaagtatgttccatagaatccaagtgcttgggatgctactgggtattatacattctcttaaatccattactaaataagtctgggaacagttcacttaagcgtgatgttttaagactgctgtattactagaccctagaagctttactatgacaagtggg

SEQ ID NO: 144328 - DNA, 568 bp, Homo sapiens
actgcttctcctcccaaaagaaaataagtgcactaataagcaagaaagggaaacgaatgccaaaaaataattgtccacacatgctgcagaccagtcctcacaaaactgacatccttagtgatgagaggacatggatgttgatgcagagtattcgtgcatgtagatacaaagtattcaagcatggccacacaggcatgcagacctacacccaaggagggggctatcatggcctcgcctcatcatcatgctttgctagcaggggcattccttagtcctattcttggtccctaaatcagcatctgaaaaaccatcttttttaaaaaaaaacccaagcctctgacttaatatccccaaacattttttctcaaaagaatgaattttcttcttactgctttattgaagcatttcccaaagtatgttccatagaatccaagtgcttgggatgctactgggtattatacattctcttaaatccattactaaataagtctgggaacagttcayttaagcgtgatgttttaagactgctgtattactagaccctagaagctttactatgacaagtggg

SEQ ID NO: 144329 - DNA, 583 bp, Homo sapiens
aataaaaattaaaaagtgtaacaacacattccattagacaggctatggggaaaacagacactcttaaaattttctggtggggatattaatatccattatgaagaggaatatggcaatagctatcaaaacttactatatctgatccagcaatgccacttctagaaatttagccaaaagatatacctctacatatatataaacacatatacacagactacttattgaatattgtttgtagtttgaaaatatttataaacaatgtgaatgctatacataggatagtagctgaataaataattgcagcatttccatggaatactctatgtaactgtatcaaagaatgagtaatagcyatattattttatcttattatattatgataagcaaatttaaaaaccaaccaaaaaggaatgcaagaaaaaaagtgaaataaaataatacgcaaaagtaacagcaagttaaaaattaatgatatggtgtacttctatgggcagatggaaatgagcagtattggcatggaaaaaaatgagaaagttgacaggcccctctctgaatatgcttaatgaaatagttctaacttgtg

SEQ ID NO: 144330 - DNA, 594 bp, Homo sapiens
tataataaattttttatttttattttttattattttgcctatgaggttttttttaaaatctaaaaggaagccagaatcctaaataacaagggaagatactagatacaatatttatcttttccttttcttgaaaatgattagaggaaatgaagaaaatacagttaaattcttcttagcaaggttctccacattatgattttactcaaaattccttttccctttctacatcatgcattcacacatagtaaaacttactttgcagaatcttgttgcaatatttgtatctgtttgctgaatacctctttgaaacaggaattttactgggtttttttttttgcatagattattttgtgtaatcctcacagatatcccaattttagacatgagaaaactataatttgcggccattttcggcctcttascttcaatcaaaattctccctggttctatgttatttctaggaaagcaaaataatgccattggaagattaataacaataatagtaattccttgagtacctactacatgccatctgtaggtataatgctgacctggctacatccgctattttacttaattcctacggcaaacttg

SEQ ID NO: 144331 - DNA, 529 bp, Homo sapiens
ggagaagattacccgggacatttttgcttcttaaagagcaacatcatatcttaggtaaaaatccgaataacagattaacaggtccaggattagcatgacacacgagcggtactcatctcagtaaccacatttaaagaaatgacaaaaagctcagtagtcaaaataaaaatactgtattgcaacatttttttaaaaccaaaatttatgtatgaaaatccatgatgaacaaaatatcaaaattttaaataaaggctaatttaaaatcagtcaaatgttatttcattggtttgtcttatgatcctgcattagtaygcaatgaaaacagttatttctgatcagtcctgattccttgtccacatcgtgatcacattcccctccagtcaggttaatttaacaatagtgtgcaaagagattggcaatacagtgttttacatatattcacttttagaaatgtagtttctattaacttttgcacttggttcaagttatgaaaaaaatattttggtaagtggatagaagcgcgtagttt

SEQ ID NO: 144332 - DNA, 474 bp, Homo sapiens
atccacacaatcacagccaactcatctttgacaaaggttccaagaatatacactggggaaaggacagtctcttccataaatggtgctyggaaaactaaataactaaatgcagaagaatgacactagacctctatctatcactatacacaaaagccaaatcaaaatggattaaagacttaaatctaagacctccaactatgatgcaactagaataaaacattggggaaataccctagaacattggactaggggaagattttctgcataagacctcaacagcacagccaatcaaagcgaaaatagacaaatgggactacatcagtctaaaaagtttctgcacagcaaaggaaacaatcaacaaagagacaacccacagaatgagagaaaatacgtacaacctattcatctgacaaaggattaacaaccaaaatatataaggagctcacacaactcaaatagcaaaaaagcccaaat

SEQ ID NO: 144333 - DNA, 408 bp, Homo sapiens
catacttaaacacttagcaaggccccacatctgtttactctaagcaaagcaggcagacaggggatctgccataggcctgagcggcttgggtacccggtaagctgcaccccaccctgaggggcctttgcctgtgtccacaggtggggtcttccacactgtgggggatttttatctttccaaaacaaactgaacagttgtcatggaagtgacagcataagcttattttaaaaggtggatttaggggcctggcatggtggttcacgcctgtaatcccakgactttgggaggctgaggatctcttgaggccaggagttcgagaccagccggagcaacatagtgaaaccctatctcaacgaaaaataaaatgaatgaatgaatgaatgaatgaatgatggacttaagtatgac

SEQ ID NO: 144334 - DNA, 395 bp, Homo sapiens
catacttaaacacttagcaaggccccacatctgtttactctaagcaaagcaggcagacaggggatctgccataggcctgagcggcttgggtacccggtaagctgcaccccaccctgaggggcctttgcctgtgtccacaggtggggtcttccacactgtgggggatttttatctttccaaaacaaactgaacagttgtcatggaagtgacagcataagcttattttaaaaggtggatttaggggcctggcatggtggttcacgcctgtaatcccaggactttgggaggctgaggatctcttgaggccaggagttcgagaccagccggagcaacatagtgaaaccctatctcaacgaaaaataaaatgmatgaatgaatgaatgaatgaatgatgg

SEQ ID NO: 144335 - DNA, 395 bp, Homo sapiens
taatttcattcacattaaagctttctaagaatgaaaattaccaatacagcaacatcacagtctttggcagatggaagatggctttacttcttcctgtttttcagtgtaattccactcaagtatttattgggcgcacactctgccacgctgtgccaggctctgcgatgggttcaaartaaaaacaaggcccctgatttcaaaccatttataacctggcttgtgagacagactaaaagggagccaacgatcaccaaaatgagtacttgaaggcatgaagtgccaccaaagagttgtgatgaaagctttttataaagatgaaaacagtattactgttttttgaagaggtgtttttgtgaacttccaactgtgcatttcctctcaagggaaaacaaaaa

SEQ ID NO: 144336 - DNA, 395 bp, Homo sapiens
taatttcattcacattaaagctttctaagaatgaaaattaccaatacagcaacatcacagtctttggcagatggaagatggctttacttcttcctgtttttcagtgtaattccactcaagtatttattgggcgcacactctgccacgctgtgccaggctctgcgatgggttcaaagtaaaaacarggcccctgatttcaaaccatttataacctggcttgtgagacagactaaaagggagccaacgatcaccaaaatgagtacttgaaggcatgaagtgccaccaaagagttgtgatgaaagctttttataaagatgaaaacagtattactgttttttgaagaggtgtttttgtgaacttccaactgtgcatttcctctcaagggaaaacaaaaa

SEQ ID NO: 144337 - DNA, 491 bp, Homo sapiens
cagtagtacagtggctgagaaaaagtgccataatccgctgagaaaggctgatggaagaaagaaaaaggatagagaggagtttgggtgactggattatagcacaagtaaatgtgaaagcgagagaaaggggacaaatgcgtatacacagaatatatgggggaggaaaaacttgaacatttttaaacttagcaatagaatrtgtatgttttcagtttggggaaaaatcatttttgtaggtggttttatggttactttaagagccctttttttaaggcctatttttgtctttcaatattattcctaaatacttttgttgtgagaattgaatttattggcttgcagtcaccaaagaaatatttacagaaatgtgcttaatagtcttagttctgtttaatggtttttaggggtagtctgtgttcacacacatgcattatggttatatattatggttattttaagtattgtagatgttatataagttaaaataccag

SEQ ID NO: 144338 - DNA, 330 bp, Homo sapiens
ctggggattctgaatcaggaacttctgtctgatcttccaagagttaagagatttgaacacgtgaacttaaagtgaaatacaagcccaagaaaacattaggtcttattgatatcatgagcccatttttacctttcccattctgcctcctctcccactttgcaccatatgagtgatagcatgttacccctttcatgacatgacatcccaatgctgttttttccatggtggatgtaaacagatkaagcttgtaaataggtcctaacagagatttactttctctcaaaactacacacacacacacacacacacacatttcatcaaatcgatcat

SEQ ID NO: 144339 - DNA, 500 bp, Homo sapiens
tttccccaatgttgtcagaagcattatttctttgcatatatggaattgagggatgtcctcccaggggaatggttctctgcccttgtttgtacttgatttctcatctaatgggggtaagaatcacattcttataaatagaaagactttttcaaacacagggtgtgatcattgtctcaaggaastgtgggtaagttttttggcaaagcgaatgatatgaattatcacctccaggtagtttgattttggcagctgtcatacgaggaaaacaagggagatacggaaattcctttttaaagactcacgaattcaagatttatagaagtaaaatgatttggcaacatcaatggctaattaggggttgtgctggaaatagaacctggctgtactgtttctaaggggagtgcccttattaccatagcatgctattctttggagaggggtttttcaccagctgaactgaataaactacaaattaggattgtctgaaagtgagggacaat

SEQ ID NO: 144340 - DNA, 548 bp, Homo sapiens
aaagtagagaccatgatgtaacagcccccattcactcaacactctgcttcaatggtcaactcatggccaaacttattttcttcctactcccacacctcccaagattattttgtagtaaaccctagacattgaatatttacacccatttcaaaattctttctttcattacctttatcatacccttggttcattttagacgggtgcagtattatctcctccaggtagattttagtaggcagaaaggtgaagagtgagaactgaccttctaagaacttgagagaggaaaccagactaagagatttggggtgcccacttgatctagatatatgcaaagcagggccagctatcttggaaatatctggaatgcaggcagagaggtcaagttgccctagcaagccactggcacgagaatgttccccccgccccttaccaagtcccttccaattaacaaccaaagcacagtcagcaagaattggccgccctcccccaaccccagccattttcattatcytgagaacatatggtttaactgtgcatgcatttaaggt

SEQ ID NO: 144341 - DNA, 437 bp, Homo sapiens
agcagggccagctatcttggaaatatctggaatgcaggcagagaggtcaagttgccctagcaagccactggcacgagaatgttccccccgccccttaccaagtcccttccaattaacaaccaaagcacagtcagcaagaattggccgccctcccccaaccccagccattttcattatcctgagaacatatggtttaactgtgcatgcatttaaggttgtctagatcttaagctggaaaggaacactggactctaaaataatatttttctcattaatttcaccaggctgactttcccttgcccagcctgtttgcccacttaccctataatcttttgaccaaattcaggaaattgcacaatggttggtcagctccaggaactgccatttttaatcacacagwctgtttttgctaccatgtaccttgactacagaggggc

SEQ ID NO: 144342 - DNA, 606 bp, Homo sapiens
gtcttcccttttctatccccacttcccacccatgagggaaactccatcctcaccataaactcattaaatatagtctcctctgaaccactttctactttgcatatgttatttgtagatatgccctaaattccctataaaccaaacaaggccagagctgtgtttgtccatagcgtctggcacagtacctggtgcatgagagtttcatttctgttttattcctttaattggcatttaccrgatactgtcctatgcattgggaatgcagtggtgagtgaaacacagttcttgcttttataaggttaatattgtaaatttaagagaaatgtttatacataaaaatttttgagaaaatatttagttcgtctaattgtcaatattttgtggaatgggtgttttttttctatgtaaatccaaagtattatcctatcacagaaggcgtaagtcagttttcctcaggaagtagagaagaaaggctttggtgtggcttctctagcagccagcccgggaattttctctcccgtccttctccacatggacaaccttcatttgttcatatccgtccttctccacatggacaaccttcatttgttcatgtccgtccttctc

SEQ ID NO: 144343 - DNA, 406 bp, Homo sapiens
ataatcctataatattttttctttgctgaaagcctttccaggtccctagatgaagaggagactttttgtcctgggccatttcccactagagccactgactgctccttctgaacgtttcactacactttttcaggtaaggttctcagagaaaggccctatgctgggttcacactacaaattcaagcacgtcaaggggcccaggggtgttggctctattttcagggaggttgcagaaccctcatgggaaggaactggaggttattaccgggatgatttattttttttttttctatcactaagagaaacaggaagagatggtyaagaaagggtaggttcaagagaaacagaatgaaacctttaaatggctacagagtaaaagagaccttcccagcaagaatggcctagt

SEQ ID NO: 144344 - DNA, 440 bp, Homo sapiens
gccatattctagactcaccattcagtcatggagaatgtaaaataaatgtagataaattattaaaattggtgaagttgtaaatatcatgtgaaatggtctactctgggtccccatttaaattgctttgtaaaaaaataaaagcctcttgcttggcacactttcacagtgaaaggttattattatctttttaataagaaggaggaccattttatacatatacatgtattcttgtagaakaaattaacttaaactgtagaaagatgagtttattaaaatgcattggaattctcatgctattacattttttaataaccatcttgctttacgccgtatacccctgttggtgtacagacacatctgggcctcaccccaggtcaatagtgatgcttcagtgcctccttgggaattagctctatattccaacacaattcatttttagt

SEQ ID NO: 144345 - DNA, 591 bp, Homo sapiens
actcttcccacatactgctttgtgccaatatatttcaatatctatgatgccataataaattaatacatctgtatcatattaatactacattagagccacgcaacagtaacatgacacagtagaaacattgctaagcccctaaagctttcacatggctctgttagacgaaaaccattacagtcaattccagctcacagaccttacgtctgtgaaaaggcaaaacagacagagtgttgggtgcttttgagtagtataaacgatcttgttatcaacaccaacactgctgtccagagataaagaaagcagacagtcagaygagctactctgtgggccctgtgttttttataacccccgataccctcctcctttgcattattggtttgtcatcctttggataattgttcataaatcattgctgaaattgctcaggactccataacgtttcttgccaaaaagtatttcaccaaatatttgatagattttccaaaataatttactcataagagacttggatttcacatttacaaatagaaaaaaagtaaggctttttctaaaagccaagttggctggatataattttatttccaaagt

SEQ ID NO: 144346 - DNA, 574 bp, Homo sapiens
aatgttcttcctataatgtttccctgatgtaatgtttatcctttggagagccattctcatgcatacacttagcacttccttctattgtcatgcttwaaatatttgattctctgtcttatctggaaaacataatgggaaggtttcaccttagtataattcttttgttcaacagaaataaaaatttcctaatatcttgtgttcatgagatgagtacagagagcaacattcttgaacttagaatatttattactaatgttttatttgaagttcctgttattaatacataaaacatgtagatatttggttactttcaactatgataagagtattttaatacaataatctataataatctaaatagataatctatttagagagaagaatcaggtcaattgactttgtgtttagtttcaagttttccccattcaagtttgtagaagtagtttaagataatattagtgtcttggtgtgatttgaagtcattctgcatacaaattatctgcggttcttgttaaacatgcagatcctgggatgcaacactcaactgaaatagctctcatccagttccatggtg

SEQ ID NO: 144347 - DNA, 578 bp, Homo sapiens
gggtcaatttgtcctcttaacactttcttctcaggcatttgtgaaggggactctcttctaccttacagcaatgctcagtctcctaatttagtttttccttttctgagaatcagctgttgttaataagcattccacataatttctccctcattcatgatctggcataatgaaccctgtgattcctttgttatctcaatcacttattatgaagatattttgccctgtagttgagatgatttatcattaatacatttcattcttccattgaaaatctattatgttcaaacattcaaagaagcataatgcacagtcactgatcttcaagagaaagacccatatgaaaagttaaatgataaaagggataatgaaagtaaaagctatgaatttatagaaaaaaatgagtttttgtaaatttcttggaaaaagtagggattaaattaggcastgatagatggccatgctttaataaggtgagctatagatctagtttctgttttacaactacgaggtcataatggcaaattaaatctcagctgtcagatttagtctagaagtcaaagctgtattatattttaatt

SEQ ID NO: 144348 - DNA, 464 bp, Homo sapiens
tggttttataaagggcggttcccttgcacacgttgtctttcctgctgccgtgtaagatgtgactttgctcctccttcaccttccaccatgattgtgcggcctgccagcaatgtggaactgtgagtccattaaagcttttttttctttataaattacccattctcaggtatgtctttattagcagcatgagaaaggactaatatagtaaataggtaccagtagagtggggtactgctattaagatacctgaaaacatggaagcaattttggaactgggtaacaggcagaagttggaactgtttggaggkctcagaagaagatgggaagatgtggaaaggtttggagcttcctagagactagttgaatggtttcaacaaaaagtgcaggctgagcagggtgtcagatagagatgaggaacttattggtaactggagcaaaggtgattcttgctatgctttagcaaa

SEQ ID NO: 144349 - DNA, 403 bp, Homo sapiens
cagcctctggtgtcaaatgtgcctttactcattttgaaattcaccctcaatggtctcatcatcattccctgtaatccagcctccacctaccaggtacgtttactatgtcagaaatygagtcatagacagggttcaagttattttccctgtaagagactagtgagtgtgcctgtctcaaaaagtctgaaaatgttcatacatagtttctctccatccttaaggaagcataattttctccaaattcaagatgatacaaaattgattttttatgcctgggaatgtcaaattgctgatgctgctagaggtaaatgattgattcaaatattcacaggtgacaagattgccagcaaacagtaagattccatatttctagagaaacaaaacaatgactagaacaaaacca

SEQ ID NO: 144350 - DNA, 387 bp, Homo sapiens
gtaagcagttaaatttttactaatacccaataccctattcagtttacttcaagcttaagtcagtgggatataaggaaaagagccaagattttaattctgatctaggttaaaaatcccaaatatgacattatttgtactcattcaactatcaataattttttgttgaatgcttacatactgagtattttaattaagtgaaagatatatgcttactatatgcgtagctttgagcaaatatttcacttagaacttcaayttttgaatctgtaaaacagggaaaatcatagggttagggaaatactgaataggacagtgcaatgcagagcctggcatagtgtgcccatacatgtgctgacagattctccatttattgagcttggctgattt

SEQ ID NO: 144351 - DNA, 533 bp, Homo sapiens
tgggctccatccaaagagctttgggggyagtagttaaagatgggaatcatctgcatgtatttggcagtttaagcttctggtccattgaggatcggagttggggaactgaattatgcccaattccaaggcattttgttaaatttgtcaagttcctttcagtagctcccagttgtgcttaatgtccctcctaaagtcacaatacagatactcaataaaatactttcccaaaacaccaacaatatttcctgaaggtttcagatggcattcaggaacaatgaactcaaaaaattctccttaagtaccccttatctgccaagcattgtgctaggttctagggctacaaaaatgaatataactcaggccctggcttcccagtgcacacaatgcagcagagtccaatggcaattaataaataattagagcaatataattaggataaacaagatgctaagaaagcaagggggaaagcctgaaacaatcaggaaaggactcatgcaagtggaaaactttgagctgagtctgaggattgagtt

SEQ ID NO: 144352 - DNA, 533 bp, Homo sapiens
tgggctccatccaaagagctttgggggtagtagttaaagatgggaatcatctgcatgtatttggcagtttaagcttctggtccattgaggatcggagttggggaactgaattatgcccaattccaaggcattttgttaaatttgtcaagttcctttcagtagctcccagttgtgcttaatgtccctcctaaagtcacaatacagatactcaataaaatactttcccaaaacaccaacaatatttcctgaaggtttcagatggcattyaggaacaatgaactcaaaaaattctccttaagtaccccttatctgccaagcattgtgctaggttctagggctacaaaaatgaatataactcaggccctggcttcccagtgcacacaatgcagcagagtccaatggcaattaataaataattagagcaatataattaggataaacaagatgctaagaaagcaagggggaaagcctgaaacaatcaggaaaggactcatgcaagtggaaaactttgagctgagtctgaggattgagtt

SEQ ID NO: 144353 - DNA, 533 bp, Homo sapiens
tgggctccatccaaagagctttgggggtagtagttaaagatgggaatcatctgcatgtatttggcagtttaagcttctggtccattgaggatcggagttggggaactgaattatgcccaattccaaggcattttgttaaatttgtcaagttcctttcagtagctcccagttgtgcttaatgtccctcctaaagtcacaatacagatactcaataaaatactttcccaaaacaccaacaatatttcctgaaggtttcagatggcattcaggaacaatgaactcaaaaaattctccttaagtaccccttatctgccaagcattgtgctaggttctrgggctacaaaaatgaatataactcaggccctggcttcccagtgcacacaatgcagcagagtccaatggcaattaataaataattagagcaatataattaggataaacaagatgctaagaaagcaagggggaaagcctgaaacaatcaggaaaggactcatgcaagtggaaaactttgagctgagtctgaggattgagtt

SEQ ID NO: 144354 - DNA, 359 bp, Homo sapiens
ctttgttgcaaattcatatagacactttctaataaatcaagctgtcaatatttcctaagtgtcagttttgtgctgaaaactataccagctatattgggaagtacctagaagtgtttacaatcaaatgggaggctcatgttatataatatgcttaagagaatcataaagtgaaagaaaggtaaacccttaggatacaaggactaatgatatgaacacatggttccctcaccaactaattgaaacaaaagacctagccagatctatcacttagatcaaatttatagataaccttctgtgaacttaaayatattactcaccgttatctccaagttcctccaccttattgctgaacttaccta

SEQ ID NO: 144355 - DNA, 359 bp, Homo sapiens
ctttgttgcaaattcatatagacactttctaataaatcaagctgtcaatatttcctaagtgtcagttttgtgctgaaaactataccagctatattgggaagtacctagaagtgtttacaatcaaatgggaggctcatgttatataatatgcttaagagaatcataaagtgaaagaaaggtaaacccttaggatacaaggactaatgatatgaacacatggttccctcaccaactaattgaaacaaaagacctagccagatctatcacttagatcaaatttatagataaccttctgtgaacttaaatatattactcaccrttatctccaagttcctccaccttattgctgaacttaccta

SEQ ID NO: 144356 - DNA, 396 bp, Homo sapiens
tattcatttatagcaacacaaaatggactaagacggaggttttgctggtatatgtattaaaaaatatcttctccctttctgtggcttgtcttttcactttcctaatggtaaaacactactaatttgccaygtggaatgacattggcatcctcaccacatatgcatgtcagtcaccacatcctaaaagtgtgtggtgagaaaccaggagctggatggtgtgcttaaatgtgatgcaatcatttgaatttttgtttttgagatattgctgtgcattatagttttatatatgcatgattaaatgaacagaattatttattgtccagattttactaaactagtcttcacaaaatgggcaagtgacttcaaaatatttttgcaaagtaaacctaaatttaa

SEQ ID NO: 144357 - DNA, 588 bp, Homo sapiens
agtaacataccaccaacatgctaatgactgctgaactaatttaacaaaatataatattgaaatatacatatagcatgtaaattccatatttataatcctaataaacttataataaaatcccagtgcatgcttgtaatattattattaagtttcatttccatcttcaactgcctacttttagmaatacgtaatactatcttaagccatttgggttttatgtggcaattgcatttaccttaactcttccctggaggtagattgactcatttatttcattctgaagaaaatggatttctgcatcagaatgaaataaaaatgattaaatatgaattgaatcattcaatctttttttctgggtcaaagggcataattatctcccctgctaagtgctacatgtgtgatcatgtaccagcacttagacttataagcagctctaaaatggtgagttgtgagaaaaaggcagcaagaccccaagtatataaccagaggcaaaggcttcagggggcgtgtgggaggtataggatcagcaagcctgggttactttactaggcatgtgtgcccaatccacccaggtttttttcaaaaaac

SEQ ID NO: 144358 - DNA, 566 bp, Homo sapiens
aaatagcttaacccaatgaagcgaaaagacattaaacctagatagtatccaacctagactttcctctgagatataagtacatttttccagagwctgtggggaactgactggtgcttttattattgctacttttctgtgatcgataaaatcaacgtatgatgggaaagggcagtgggtgtagcgtgagtgatgaagaacttgggtggagtgggcagtgttcagctcccagctccaccacccatcactgtaaggtagtagtagtaatggtccccaggtgctggctgtgagggacacttgtgcagagcttccagcggtgggcttcgaataggaaatgtgctggtgcacccagccagtggggagctgtcgttgacactaggggaaaagaacaggtggttatgtaaaaagtactttacaattttcccttcatccaatctcaaatgaaacagtgtccacactctagtctgtggatcatattgctggaaaagtcaaggactaggaggcaaaatctgcaggtgtttcctttcagatttttgccttcaggaaggaatgaaaggtaaatgaaaatt

SEQ ID NO: 144359 - DNA, 566 bp, Homo sapiens
aaatagcttaacccaatgaagcgaaaagacattaaacctagatagtatccaacctagactttcctctgagatataagtacatttttccagagactgtggggaactgactggtgcttttattattgctacttttctgtgatckataaaatcaacgtatgatgggaaagggcagtgggtgtagcgtgagtgatgaagaacttgggtggagtgggcagtgttcagctcccagctccaccacccatcactgtaaggtagtagtagtaatggtccccaggtgctggctgtgagggacacttgtgcagagcttccagcggtgggcttcgaataggaaatgtgctggtgcacccagccagtggggagctgtcgttgacactaggggaaaagaacaggtggttatgtaaaaagtactttacaattttcccttcatccaatctcaaatgaaacagtgtccacactctagtctgtggatcatattgctggaaaagtcaaggactaggaggcaaaatctgcaggtgtttcctttcagatttttgccttcaggaaggaatgaaaggtaaatgaaaatt

SEQ ID NO: 144360 - DNA, 567 bp, Homo sapiens
gttaaaagaatccaaaggacaaagatacatgaactctaggcttcaggtgcaartttgcattaattttcccttaaaagggagcatatgtacactctgctgtcaatttcctatctgtgggcttggttgctatctcacaggttgactccaggtcaaatgtgtgaacgtctagaaaaatattaaagccagtcaaaagttaactttatactaccattatttaaatatttagtttataggcatgcatttgaaatctgtacaaaaaattaaacactttgggaaaaaatgagttctataaatctaaggcacagctgttccccaatcatcccatttctcaggaaggaatgagatgtgggatttttgtgctatggattaggcccaaagtttctttctggctctttctggaaagtctcaggtggggtatcacttgagcttctttagcaggtcagtttttcctgtgtatcctgccttcttcccaaccttacaaagtcctgtgagtgcaagaagaatataacaagcaatacatagttgcataattatattttattttaaaaatttgtgcccttctcaaag

SEQ ID NO: 144361 - DNA, 567 bp, Homo sapiens
gttaaaagaatccaaaggacaaagatacatgaactctaggcttcaggtgcaaatttgcattaattttcccttaaaagggagcatatgtacactctgctgtcaatttcctatctgtgggcttggttgctatctcacaggttgactccaggtcaaatgtgtgaacgtctagaaaaatattaaagccagtcaaaagttaactttatactaccattatttaaatatttagtttataggcatgcatttgaaatctgtacaaaaaattaaacactttgggaaaaaatgagytctataaatctaaggcacagctgttccccaatcatcccatttctcaggaaggaatgagatgtgggatttttgtgctatggattaggcccaaagtttctttctggctctttctggaaagtctcaggtggggtatcacttgagcttctttagcaggtcagtttttcctgtgtatcctgccttcttcccaaccttacaaagtcctgtgagtgcaagaagaatataacaagcaatacatagttgcataattatattttattttaaaaatttgtgcccttctcaaag

SEQ ID NO: 144362 - DNA, 546 bp, Homo sapiens
tatggtacatattctaatgtgccccctcgatagtctcaaaccagaaagtgttgcatcaagaacattggtgagagtacctttcccttaagagcaatgttggtatgttactttgcagagtgcatattttttttgggggkgggggtggggagggtggttcaaatattattaaactgagtaacaaaagtcatagatattttcaagaacctttatgatataaaattgtcaactgaacaagcaccttgtgatgaaagtttgtatacggaagagctgacaggagacaaagctgtgaaagcagagcgaggacatacaatttcacaagtattatggtcaagtgtgtgggacataaagagaaaaaaatgaagtcggctttcagaggaactaataatcagagggcaatgaaggttatcattgaggaggggacaaatggagatttatatagaggaagtcgtatcttgccaggaagaaaaaggaggaggagtcttgaccacttcaatttcaggggctgtgtgcagaggaagaagctcggagaggcaagacagccagggg

SEQ ID NO: 144363 - DNA, 546 bp, Homo sapiens
tatggtacatattctaatgtgccccctcgatagtctcaaaccagaaagtgttgcatcaagaacattggtgagagtacctttcccttaagagcaatgttggtatgttactttgcagagtgcatattttttttgggggtgggggtggggagggtggttcaaatattattaaactgagtaacaaaagtcatagatattttcaagaacctttatgatataaaattgtcaactgaacaagcaccttgtgatgaaagtttgtatacggaagagctgacrggagacaaagctgtgaaagcagagcgaggacatacaatttcacaagtattatggtcaagtgtgtgggacataaagagaaaaaaatgaagtcggctttcagaggaactaataatcagagggcaatgaaggttatcattgaggaggggacaaatggagatttatatagaggaagtcgtatcttgccaggaagaaaaaggaggaggagtcttgaccacttcaatttcaggggctgtgtgcagaggaagaagctcggagaggcaagacagccagggg

SEQ ID NO: 144364 - DNA, 386 bp, Homo sapiens
gcaatcttgtaaactcttgggctgtgtctcttgtccatccactaaaatagtgttcagagattgattatttcaatgaacaccttcataccacagattgatagaagctrttgttttgtatcatttgactcttcctgtgatagtgagggctttacttacatgattttttcaaaggcaacctggaccatcccaagcagatgcatgatcgataatccatttttttcctggggaaaaatggaacattttatagcttagacatatgttggattagacatagtgaatgcgaattaaaagcctgtaaactactctgtaagccaagtcaacctaatagaacatattcagtgtaaccataagggatttctcccaaactcgactcacaagaaggaaaa

SEQ ID NO: 144365 - DNA, 411 bp, Homo sapiens
aggagagagagtgagaactctgkatatagacagaaggtcccagactagtctccaacttagtactgattgcacatgcacatgacaaaactaccccaagccaggaaaagaactatttgaaaaggttggagggaataatcctcaaagtgagaacaggctgaaaatggttcctttttccaccaccaagagtgaagaacgtcaaaagtcatggaatattggcaggttattccaaaaggtttgtctcagtagtgaaaaatattaaccttagacaaaatgtcattctggatcaacttgtctctaagcaagttaaagactttccaggacaaaggtaaaaaatatttgtaagaatttaaaaaatccagtatttgttcttgtgaagagtattttaagcaaccatcacttatttgttctgaa

SEQ ID NO: 144366 - DNA, 416 bp, Homo sapiens
tttttattaagctacttcatatgtgggcagctctatgcagtgagttccagggtgagaggagtataactcactattaatactgcaggtgtcagtctgtggatgtctctattttttgcttcctcccttgtatattcactcatcatcattgtcctcagacgccattgcaaaattgttcttttttgttgttctgcagatgtcaccagtttggcaatatgaatatgtttaggatcatctcttcatgtcaatactctgaaaactaaattaccatttcttatttttgtctttcaccctttttcccagtaataagatacgtaagttctgaatattttcttttttttttttttttttttwaaaaagagtgacctcctatgctatgaatcaaagcaatatgatgccaaacttgaacagacagaatg

SEQ ID NO: 144367 - DNA, 622 bp, Homo sapiens
caactcaattatgtccaagcttaaagcattaaaaatattgtctaagcataattttggcaaatagacttaatcctcttagaacttttggaggagtaaagcttttttgaaaggtcaagagttattcttgtgggatggtgatctgtgtgacttmccctttgaatagctgactggtcctatataaaatcctggagatgttagtaaagtgaacatccaaagattatctcaaaacttaacaatcataaaaacctaaagtcattactgttcctaaagtcattcttgtctgggtaaccccaactctcctcagtctccttagctttaagtggaagaagaagagttacaaggactttgtagtcacttgcaattagatctgtgctgggaagaagcatagagactccagcctgtggagtctaagagatctgtgcacatcttgggtgtgccactcactggtcggatgtccttgctgacatttttagctttagcgtcttagtaaaacatgtacaaaacggagactgtatttgagctctccagagaagcagaaccaataggatgtatttttgtagagagagagatatttattttattttttttctgcaagagatattaaccttattctttcataccc

SEQ ID NO: 144368 - DNA, 622 bp, Homo sapiens
caactcaattatgtccaagcttaaagcattaaaaatattgtctaagcataattttggcaaatagacttaatcctcttagaacttttggaggagtaaagcttttttgaaaggtcaagagttattcttgtgggatggtgatctgtgtgacttcccctttgaatagctgactggtcctatataaaatcctggagatgttagtaaagtgaacatccaaagattatctcaaaacttaacaatcataaaaacctaaagtcattactkttcctaaagtcattcttgtctgggtaaccccaactctcctcagtctccttagctttaagtggaagaagaagagttacaaggactttgtagtcacttgcaattagatctgtgctgggaagaagcatagagactccagcctgtggagtctaagagatctgtgcacatcttgggtgtgccactcactggtcggatgtccttgctgacatttttagctttagcgtcttagtaaaacatgtacaaaacggagactgtatttgagctctccagagaagcagaaccaataggatgtatttttgtagagagagagatatttattttattttttttctgcaagagatattaaccttattctttcataccc

SEQ ID NO: 144369 - DNA, 622 bp, Homo sapiens
caactcaattatgtccaagcttaaagcattaaaaatattgtctaagcataattttggcaaatagacttaatcctcttagaacttttggaggagtaaagcttttttgaaaggtcaagagttattcttgtgggatggtgatctgtgtgacttcccctttgaatagctgactggtcctatataaaatcctggagatgttagtaaagtgaacatccaaagattatctcaaaacttaacaatcataaaaacctaaagtcattactgtwcctaaagtcattcttgtctgggtaaccccaactctcctcagtctccttagctttaagtggaagaagaagagttacaaggactttgtagtcacttgcaattagatctgtgctgggaagaagcatagagactccagcctgtggagtctaagagatctgtgcacatcttgggtgtgccactcactggtcggatgtccttgctgacatttttagctttagcgtcttagtaaaacatgtacaaaacggagactgtatttgagctctccagagaagcagaaccaataggatgtatttttgtagagagagagatatttattttattttttttctgcaagagatattaaccttattctttcataccc

SEQ ID NO: 144370 - DNA, 518 bp, Homo sapiens
atacttggtgtctcagtcattggcattctgtgcggtgagccccaggacctataccaaacccctggtgtttcrgtaacagaattttaccctttctctttctctttctttctgtaattctggaactaaatggaagttttatcagctttttggcatgtttgtatagaagaggatacttgttaattcattttattcatgtagacattgccccactgaacaggtccttaaacacagaaatacatctatccaaattatttccattattttttaaattaattatcagagtgattcgtgtttatactaatatttataaatgtagaaacagttttactgagtttaaaatcttaacgtttaggtttctgcagatgtcaatcacatgccccaagcataaatacaaatatttttgagggaatgtgtgtatagttcagaatagttctgtagccaggagcaagcagttggacacatatgtgtttagctacatatgtgtagctaacagtgaatgctgttgtaaacatgaaatc

SEQ ID NO: 144371 - DNA, 579 bp, Homo sapiens
cacacattcctatttatgggtgatgatgayaatacacaaatactttggccatgataaaactgacatgccaataaataattaaaatcaggaatctatattatattatgaaaatcagagaggacatttaattggtggagatattgcatttgttcatctaaaatgagttagagatatttggcatggattttttttagtgaacttgtaggatttggtcttgaaatctaactacaaaacaactagaaaaaaatgagttgtaaatagttttttaacagctatattaggtataattgatatacaaagaattgcacatatttagtgtttacaatttgatgaatttagacatatgcaaatacctatgataccatcaccacaatcaagacaatcgacatattcaacactctctgaagtgtttttgtgtacctttgttgttttttgtttgttttatactttaagacaagaacacttaacagaagtttaactttatgcttattgaaaaaaaatttctcatttctcctactcccagcccctggtaaccacaatgatattctctgactttataagtttaactattttagatac

SEQ ID NO: 144372 - DNA, 518 bp, Homo sapiens
taacttatgacaattctaacaacatgctttctttcctccctacctgatctattaaataatatttattcattagtgaaaattagctacagtgtatcatgaaagagatgcagattgtccatttccttgaagaaatgcataattaagttcaaaagataaggtaccatctgatttaaagacttttttgacaaaacatcaaggaatattctcttttgtttgaccaataatatatcctttaggtgactcgttgggtggtattaggaatactcaaacattcagaaaggcttttcagcaaacgtttggcaaatcactcaatgatcagacattatccttgttttggtgatgttgcactgtctctctattcytaagatgtttacatatacaatacaaagttggaatccttccctctctcatccttggtaaagacaaaaacaaaaacaaaaaatagtatatgaacctaattttgtttttatatatgcaatatataaaatataaattttcctaagtcatattaataatat

SEQ ID NO: 144373 - DNA, 583 bp, Homo sapiens
ggaattgaagcttggatgttttcacactgcattttactgaagtgtctgcagacatctctggaaagaaaacctcctctttgcatccgtggttcttgcctttatttttgtgtcttagtttttttattgtcattagttgagttagcatctggaaaatcagaataacgaaagaatgagtggaaatgggccttatgctatagaaaggatattatacttggagtcatgaagtctagattcttgtcttgacacccccaatgataccagctaatgcttactgagtacacaccaggggccaggtaagccctatttattcattatctcatttaactaaaccagttcaactctaaagtgattctcaggcaacatggctatggctagccttgtgccagtggatgagcaacctaattgctctttgtttataaaataaaatcagataaaacaatgtcaaatratttttttaataactgagatcatgtatattaaacttctttaaaatctcagtaataattgttagcatttagatatttcttttgtgcaagacacaatgttattcttcatctcacttaatcctccccaaaacccaatg

SEQ ID NO: 144374 - DNA, 508 bp, Homo sapiens
gaattctgcatacgtgctttcccagcctggcttgcagctaggttgcagagagttttgacatgagatgtggaaagccaaaaagaaaatgataagaaaacatctctcctccccacctttctcctccacctcctacctgccactcttcctcctccacctcctgtcctttctccttcttctcttcctgaccctcccacctgctatttttgtagtaacaacaattttctcagcagatatgatctggtataaaatctagggtgatttttctagctgtttattgtaygcatagttgtctagccttcctaatatgtctgtgagttagccaatgtctttttaataagttgctgttttcattatttcagggtgagccagcttcgggattgcaactgagaagtgggactattaaaaggtactaaagcagagaatacgaccagtaaacaaacaaaaaaaaagcactttaaataggaataaaatatattaataaatgtgaccacatggagattagtgacca

SEQ ID NO: 144375 - DNA, 540 bp, Homo sapiens
tgtaatgcatgttggactttatttcataaagaaccatgcaaatcaaaacyagtattcttttattatagaattatacaagttggaagacatcacgtcaattgcctaggtggtggtctcataatttctagggaattaaaaataaggcttcaaatgcttttctaccaattggaataatcaaatcagtaatatttcgatgacatgtacaaacttcatcaaaaagtagtcccattccaagggaatgagcatatttatatagtgtattcccaagaagctctcccttttcacatttcagggagcattgtggaaaaccagaatgttgggattcacacacatatcactgtctattttctttaaacatttattttaggctcaggagtacatatgaaggtttgttacataggtaaatgtgtgtcacaggggtttgcttaccaattatttcatcacccaggtattaagcccagtatccaatagtcttatttactgctcatctacttcctcccaccctcccacctcaagtagatcccagtgtatgttgatccc

SEQ ID NO: 144376 - DNA, 575 bp, Homo sapiens
aaacaatcttgcataatgagaattgcctaccatttggattgtagaagaaaattcttagtaacttaaattctattactatgtagatttttcaattttctcaattattacaaaagtattaaaattttytgtttctaaactactctagtgagaaaactaacaatctctgagtaaaaactactatatcattaacatgtcactaatgtctaagaacacacactattttaatatgtaacataaaccaactatcaatgatttttggaaggaaaacaaatattgtgatgctttctatgcaaaggaagcatttcaaaatggcagttagctcaacctcattatgatgcactttatagcctgaattttcaactttttgtaactttttcatataaataagaaacttattttctcatatatatattggacctttaaagctagaaatcataaaatattgacgtgctttattttatatagaattagagttagaaaaatgtttataactcatatttttgaaaaatctactcagtgtctaaggtctcataatttctatgttactttatactacatatgtgtattaacccacc

SEQ ID NO: 144377 - DNA, 546 bp, Homo sapiens
aagaactgtaaagctatatatgactgaatattataaaaagagagaattaagtttgacaaaaggcagatttcgaaggtatgaggtaaaggagcagatattcctattcaaagccataaatccaaaaaccacagatcataagtagagttgccagataaaataaaagacactcagcaaaatgtgaatttcagataaacaatgaacaatttgggacacacactaagaaaattatttgttgtttatctgaaatttacatttaagtaggcttcttttatttgtgtytgctaaatgtggcaaccctaatcctgggacaattacaaaggatcttgtgtgtgtgtgtgtttcctcatgaattgagcaggagcctatttcaacaataaaactcagagctaattgtaatattttatggcacttattaaaataaagcaccctcataattttggataagaaatattattgtagaagtctcaataacagaaacaaaaaaaaatgctttctggcagcgagggagcataactggaaatgtacaagtaaactgaagaaaaaaga

SEQ ID NO: 144378 - DNA, 527 bp, Homo sapiens
cccaaattctgcagagaccaagatattaacattaataggaggacaactgccaatccccaggagattactatgaattattttgacatgagacttttacattctcttcctgacttcacctccacttacagagagaagtgtgactgccaactgccaaagaatgggttctacctgaggctccaaaaagcaggatttcatgtgtctgaagcatgaaattaacctcagaacaagtttgaaaacagaagaacctaaggattgtggaggtgtgatactaataagcaygaaaacaaaaagcattcatcccattgttggaaaggattctgagatgttttaattgagaaaatatttcttttccttactacaggccttgactagatattagcaaatagtagtccatatgctggatttggtctcatactaattgaaaataaattgaaatttttgccagtagttaaaatttgagatattagctacaaatatcaaatctgaccactcttgatcatatttaataggattcagcaaccctaaac

SEQ ID NO: 144379 - DNA, 589 bp, Homo sapiens
ttcatcttggcacccatagaatcgttgattgcagtgaagagaataaaactgctgtaaaatattgcttctctgcacaaagtaaaacttacctaaaatattttgacgtctggtaggtagaaatgatgttaaaataatcttcctaccttaatttggtattaaatcttaatcatttcaaaattcattggtaatatttatttctaaagtgtgacatgattgaacagatgtcacatttataagttttgtttaaatatctttgagagaaacaaccttaaaaattaaaaggtaagaaayccccacaaattctaaaatgtcagatactgctacattagaggaattagttataaagccaaggagtgtgaaaacacgtgggcaaaaactgcatgacccagaggatgggaaataaaatgctgctaagccacagatgcctaaagcctatttttcattttcaataaattgaaagtccctttgaaacacacttctgtgcaagaaaatcaccttaacacaggttaatagaattattctcttaaatgatagatgaaatcctgtcagagtaataaatctatgatcatacaatataatatactcaagt

SEQ ID NO: 144380 - DNA, 589 bp, Homo sapiens
ttcatcttggcacccatagaatcgttgattgcagtgaagagaataaaactgctgtaaaatattgcttctctgcacaaagtaaaacttacctaaaatattttgacgtctggtaggtagaaatgatgttaaaataatcttcctaccttaatttggtattaaatcttaatcatttcaaaattcattggtaatatttatttctaaagtgtgacatgattgaacagatgtcacatttataagttttgtttaaatatctttgagagaaacaaccttaaaaattaaaaggtaagaaatccccacaaattctaaaatgtcagatactgctacattagaggaattagttataaagccaaggagtgtgaaaacacgtgggcaaaaactgcatgacccagaggatgggaaataaaatgctgctaagccacagatgcctaaagcctatttttcattttcaataaattgaaagtccctttgaaacacacttctgtgcaagaaaatcaccttaacacaggttaatagaawtattctcttaaatgatagatgaaatcctgtcagagtaataaatctatgatcatacaatataatatactcaagt

SEQ ID NO: 144381 - DNA, 498 bp, Homo sapiens
ccatgtgatgtgactgtttcccctttgccttccatcatgattgaaagcttcctgagacctccccagaagcagacgccaccatgcttcctctacagcttgcagaacygtgagccagttaaatcaattttcatgtaagtcactcagttgcaggtatttctttataacagtgcaagaacagcctaagacaacctccttcttgctgtgtcctcccaaggcagggagaaagagccagcaagctctttgttgtgtcttcttataagggccctaatctcctcagaagagccctatcttcatgacctcatctaaatcaaattatcttccaaagtctccatttccaaattccatcacattggagattagagcttcaatataagaatttagggaggacacaattcaggccatcccagcctggcatcatttttatatctctgtggtagcataatatgtgttcatttgtaaagagacaggtttctgaccagggaagactttactaagaat

SEQ ID NO: 144382 - DNA, 577 bp, Homo sapiens
ttatctttttgaggatgtgaagatggtatgcaagatttctatttctttttttttttttttttttaacaaaaaatagtgtctaaagcgaaatttgaatttatgaccaaggtcattttcctttaatacataaaaagtaacatgacattgcaactataacactagaatggatttaggagagtcagcaccagtccttattttgcaactgaaagcaagttatttaacctttctggacctcaattaacctgtaaacatgcataagtctagtctccttaggaaaaaaagaagcaaatcatctaaaatgttttgtttctatgggctgtgccaataggcaaaagtgtcattactgagtttaacatcccagatattttaggatcaatttatcatatagaacattaaaaaaaaaaagttcacggacacattaattatctaattaggtccttcaaataacttggtatattttgccatacaactttcagattttagtttagaaactgaagttataatcaatatctaaaacaaaaatgttttargcatgagtctcacaaaactgcagagcggtcttatctgttatctattt

SEQ ID NO: 144383 - DNA, 484 bp, Homo sapiens
ggaatgtcaaattttagttactgcaattatttgaattatataccattcactctctcaacaaacatttattggttacttattgtatccacggtatttgctacaatggaatctaagtaaaayataaagaagtgtaataataggcttcctttgttttgacgggcaatgagaaattttatgtgagtggcatgaaggcatacaacaaaacgaatgtaatgtaatttactggctgaagtggaataatgattattgggaaggtagacataaaattagtggagaatgagaataatactgaatgccataggaagcacttgggttttattttggaggtatctggatttatgggaattcgcatgtctggagagacatcaaaaagcatcattttagatatattcattttagtaaatcaattagaaaggagggcagttctctccacagtgaggtatatggctcaggttatggacttggcaattcgaatgaacatgaa

SEQ ID NO: 144384 - DNA, 590 bp, Homo sapiens
tttatttgaagaatctttctgtatgtgcccaatgggacttctcatttaggcacatacaaaaattgccgaaaacttatgatacaaacaaattttggagagaaggtatttcaccactagccactctttcctgaaaacaaaaagaagtcagaacacactttttttttttttccaacacaatccattctccaaacaggagccaataataagcttttgaagacagagattgacatgaatcagcttgctytgttaatttctgtattaggcaagtcctgaagacattaaaagtgttaggcaactaggtgtccctattactctgtttggagaacagttggagggttgttggaatgttgcaaagtatccataaatctgtatgtccactaagcgttgtctataaacacatgtttaatgtgacaacaaacaagttaatgtacatcttactaggaataataaaagaaattcatcaaaagcttcacggatttgtgccattatgcttttcactccatcaatttttgttagattttctattaccatcgtgagtagagtgcttggaagttcctgaaagttgttgccacaaaaagaatgctaatatt

SEQ ID NO: 144385 - DNA, 590 bp, Homo sapiens
tttatttgaagaatctttctgtatgtgcccaatgggacttctcatttaggcacatacaaaaattgccgaaaacttatgatacaaacaaattttggagagaaggtatttcaccactagccactctttcctgaaaacaaaaagaagtcagaacacactttttttttttttccaacacaatccattctccaaacaggagccaataataagcttttgaagacagagattgacatgaatcagcttgctttgttaatttctgtattaggcaagtcctgaagacattaaaagtgttaggcaactaggtgtccctattactctgtttggagaacwgttggagggttgttggaatgttgcaaagtatccataaatctgtatgtccactaagcgttgtctataaacacatgtttaatgtgacaacaaacaagttaatgtacatcttactaggaataataaaagaaattcatcaaaagcttcacggatttgtgccattatgcttttcactccatcaatttttgttagattttctattaccatcgtgagtagagtgcttggaagttcctgaaagttgttgccacaaaaagaatgctaatatt

SEQ ID NO: 144386 - DNA, 561 bp, Homo sapiens
ttttaacatttagatttaatttgatgctgaaggctagatataatatttatccttgtttatagggtctttctaacagtaacttttggaaacaacctcatgtcatagatgatggtttaagtacattatggtatatgaatgtggatggagtattatatttcaaatattttaatgtcattggaaaacgtttgctttacactattgagtaaacaatgctagacataaacattggttgatttttgacagagaaagtagagaaaatttctgttgyacagtgtatatttctgtattcctttagtttccaaatttcttctataagatattatctgcaaaatgttgcatttgtaagcaaagaaaaattttgaaagttttgccaaactgtttgttttaaatctatcatttctatttatatattaagatctatggaattatactcctgtcactcaatgcattagaatgaggaaaacttcaagcatgataagaataacgtagtgccttcactaaaatgtttaatatggcagagtcaaaactagaatagaatatagtttgacctatattcaacaa

SEQ ID NO: 144387 - DNA, 506 bp, Homo sapiens
atacaattgcaatgagatcttgacatgggctggaattaacttgtcttagtccattcctggtgctataacaaaatcccttaggccaggtaatccataagcaatagaaatttatttctcacagttgtagatgtagggaagttcaaggtcaaggtaccaacaggtgcaggtgaggactttctccctgcttcataaatggcactttgttgctgcatcctcatgaggtgggaggaaagcaagggcaaaagcaactaacagactccctcttrttcttttattatatcagggcactaaccccattcatgacatggagctctcataacctacacacctcctgaagtccccacctcttaatattgttggattggggattcagttccaacattaaatttggaggaacacaaacatgcaacccagtagcacaactgaaggctctatggggctgtatgtccagaggcttctccacatgacaggtgcttcatctaggatgataagaactgctggggcct

SEQ ID NO: 144388 - DNA, 606 bp, Homo sapiens
aagtgttccaggagacccaggtggaaggaacaagacttctattgacctaagctcaaaagttacacagtgagagaggggctatgagaggataggctccagaatttaattagcaggttaagcctgagactgtaggaaaaacacctgtttcattgtatcaggagagaagcagattaggatggatagagacacagcaaatgtgtggatggagaatgacatatgggagtgagtacagcagcttcaggatgttgagagaattttcatatactggcatctagtgtctctgtgtctgaagaagcaaagttatgtgctgacactggtaagaaagaagtgtggtaggagagagagcttggggagaatgacatttggaaagagccacagtgaagaatgggaaagwgagctaactacggtcacatacaccacaagaccccagcatctgtcattgttaaatgataaattttggaaaggggaatgagagtgaaatcctgggggagcagttgtttcctgctgtcagtggcattcttattgacatttcctgagttttccagccctaatctaggtctccagcagtcagcgaactagatgttatttctaaaatcaaggtaatgg

SEQ ID NO: 144389 - DNA, 528 bp, Homo sapiens
cctgggggagcagttgtttcctgctgtcagtggcattcttattgacatttcctgagttttccagccctaatctaggtctccagcagtcagcgaactagatgttatttctaaaatcaaggtaatggaagctgggaaaatatratcactgtttcataagtacatttcattaaaaatcaatatcttcatacttcgtaggccacaagagaagggaagaaaaatgtgaaaaataattcaaacatctcatctaaacatacttagagaatgccttactctgactttgtgaaccagtccttccatgtttcccttcgtggcatactactgtatttaaagtggggaaacagtacctaacatatgaatttttcagactcagactgcacagattaattgtatctcatcctagaaagcagccatatttagttcattttgctgtgattgattggctgggtgtgggtgagaggcagacccattttcctcaatgttaatttcagttgtgttgagtgtggccatttttgtcaatgatcatggcgt

SEQ ID NO: 144390 - DNA, 586 bp, Homo sapiens
ctcatcctagaaagcagccatatttagttcattttgctgtgattgattggctgggtgtgggtgagaggcagacccattttcctcaatgttaatttcagttgtgttgagtgtggccatttttgtcaatgatcatggcgtgagtttctgtgattagtcatttaactgtatggtaattgcaagctaaatagagtgtttacaacaaaccccttggtttagagacagagaccatgtcaaattgcatcctatgaaaattgcataaataaaaatttgcatctagaagggcccttcatgaaaatcatgaaaagattgtagaatttttatttgcattgtatagtagctctgtaattgacaaatgaattctaactgtagtccataatacattgcatccaatgattattcatcgtaactgcatatatattgctttgctcattatgaaaagtaacaatgttggcaatcaccttaattgtttttcttatcagattagtgataaagtgccataatgaacataaccttcgagaacgtattcactaatgkaataaacaaagctaggtcttggcacagtacagatcatacaaagatagatttg

SEQ ID NO: 144391 - DNA, 569 bp, Homo sapiens
atgacaatcattatatcattgagagaatttgcaggagacgttcaattatttatgctttaaaacagccattattgggtacccatcacatactgacactcaccgttccaggacctatactttgggatatgaacttctcagaacagagtaggcattgaatgtttattaagtaagtggcagtacctgcttccaataagctcccagtctaatgagggaggtggacctttacacagaaaagtataatttatagtttgatgagtattctagaatarttagaaatagccaaaatgggagcacagggaaggaagtaacccagtttaggaagattgagaaaggctccatagaaatagtgtttggggtagattttgaaggaggagcagatgtttgtcaggtgaaaaggttggaagaatggtgtctgagggcatgtgtgtatctgtgtgtagaggagtgtgaacacaggcattccaagcaagggtaatggcacatgttaaggcatggaggctgaagtggtgtagtgaatcctggaaacagtgttcacttttgctggaatctgggagatatccaggtgaggg

SEQ ID NO: 144392 - DNA, 569 bp, Homo sapiens
atgacaatcattatatcattgagagaatttgcaggagacgttcaattatttatgctttaaaacagccattattgggtacccatcacatactgacactcaccgttccaggacctatactttgggatatgaacttctcagaacagagtaggcattgaatgtttattaagtaagtggcagtacctgcttccaataagctcccagtctaatgagggaggtggacctttacacagaaaagtataatttatagtttgatgagtattctagaataattagaaatagccaaaatgggagcacagggaaggaagtaaccmagtttaggaagattgagaaaggctccatagaaatagtgtttggggtagattttgaaggaggagcagatgtttgtcaggtgaaaaggttggaagaatggtgtctgagggcatgtgtgtatctgtgtgtagaggagtgtgaacacaggcattccaagcaagggtaatggcacatgttaaggcatggaggctgaagtggtgtagtgaatcctggaaacagtgttcacttttgctggaatctgggagatatccaggtgaggg

SEQ ID NO: 144393 - DNA, 569 bp, Homo sapiens
atgacaatcattatatcattgagagaatttgcaggagacgttcaattatttatgctttaaaacagccattattgggtacccatcacatactgacactcaccgttccaggacctatactttgggatatgaacttctcagaacagagtaggcattgaatgtttattaagtaagtggcagtacctgcttccaataagctcccagtctaatgagggaggtggacctttacacagaaaagtataatttatagtttgatgagtattctagaataattagaaatagccaaaatgggagcacagggaaggaagtaacccagtttaggaagattgagaaaggctccrtagaaatagtgtttggggtagattttgaaggaggagcagatgtttgtcaggtgaaaaggttggaagaatggtgtctgagggcatgtgtgtatctgtgtgtagaggagtgtgaacacaggcattccaagcaagggtaatggcacatgttaaggcatggaggctgaagtggtgtagtgaatcctggaaacagtgttcacttttgctggaatctgggagatatccaggtgaggg

SEQ ID NO: 144394 - DNA, 560 bp, Homo sapiens
agaattcaaatatatttatgaccattacagraaaacttcatggactgtaatctgattttacattgaggcttgagaatgttctccaggatctcgccatggtcaaggtctttggataccaaaaagagaggcagaggaattaactgccgggagtggggatggagtgtatagtgtgaagagaagagtagaggtgccattgtattagactggtgcaaaagtaattgtggttttgccattacttttgcaccaacctaataccacaaggaacattctgttagtccactgggtgctttagaacaagaatccctcccctccaacacattgcaaagaacagtccataacaacatgacctctaattggtagttcattaggaaagtgaataaataattataggcatgggggagactgcaggaagagaagcaggctggaatcagccagagctttctctcccactgattcccaataaagcattgtgtcctgacattgaccccttggaggggatgagtctggggggagactggtaatgtccccacaactctcaaccaatccctgttctaatgaac

SEQ ID NO: 144395 - DNA, 587 bp, Homo sapiens
agttcttggcaccataagctcaggtacgaggagtgctaggctcttgtatgtttcaaaatttatataatcttggttgctgtcactgaaaaatgatttgatttaaccctagctttattgcagctggattgagagctcctcaaaaatactttccactcactgatggggaacagctttatgagtgtctatctaactctgaagcaaagcagagacaaaaaggatcatttccttaaataagagaaacaccaatgagccaattatagcacgaagccagtccttgaaccttcctttggaccttgctttctttagagacaggctgggcacaagccacaygtaaaatctgtacgtctcactgggcaatggcaagcaccaagggaaagcagtctatacgtgaagtggactaaataatgcccccaaggcttttctgtttatatatgatgcaaaaacactcaacattatctagctacaccattccacagttacatttttaacactctcgggaaattggagacgggtgggtttttgaagaaggggagcggagcgggcaggcggggtgaggagggggtctggggaattccagagactagcac

SEQ ID NO: 144396 - DNA, 587 bp, Homo sapiens
agttcttggcaccataagctcaggtacgaggagtgctaggctcttgtatgtttcaaaatttatataatcttggttgctgtcactgaaaaatgatttgatttaaccctagctttattgcagctggattgagagctcctcaaaaatactttccactcactgatggggaacagctttatgagtgtctatctaactctgaagcaaagcagagacaaaaaggatcatttccttaaataagagaaacaccaatgagccaattatagcacgaagccagtccttgaaccttcctttggaccttgctttctttagagacaggctgggcacaagccacatgtaaaatctgtacgtctcactgggcaatggcaagcaccaagggaaagcagtctayacgtgaagtggactaaataatgcccccaaggcttttctgtttatatatgatgcaaaaacactcaacattatctagctacaccattccacagttacatttttaacactctcgggaaattggagacgggtgggtttttgaagaaggggagcggagcgggcaggcggggtgaggagggggtctggggaattccagagactagcac

SEQ ID NO: 144397 - DNA, 587 bp, Homo sapiens
agttcttggcaccataagctcaggtacgaggagtgctaggctcttgtatgtttcaaaatttatataatcttggttgctgtcactgaaaaatgatttgatttaaccctagctttattgcagctggattgagagctcctcaaaaatactttccactcactgatggggaacagctttatgagtgtctatctaactctgaagcaaagcagagacaaaaaggatcatttccttaaataagagaaacaccaatgagccaattatagcacgaagccagtccttgaaccttcctttggaccttgctttctttagagacaggctgggcacaagccacatgtaaaatctgtacgtctcactgggcaatggcaagcaccaagggaaagcagtctatacgtgaagtggactaaawaatgcccccaaggcttttctgtttatatatgatgcaaaaacactcaacattatctagctacaccattccacagttacatttttaacactctcgggaaattggagacgggtgggtttttgaagaaggggagcggagcgggcaggcggggtgaggagggggtctggggaattccagagactagcac

SEQ ID NO: 144398 - DNA, 587 bp, Homo sapiens
agttcttggcaccataagctcaggtacgaggagtgctaggctcttgtatgtttcaaaatttatataatcttggttgctgtcactgaaaaatgatttgatttaaccctagctttattgcagctggattgagagctcctcaaaaatactttccactcactgatggggaacagctttatgagtgtctatctaactctgaagcaaagcagagacaaaaaggatcatttccttaaataagagaaacaccaatgagccaattatagcacgaagccagtccttgaaccttcctttggaccttgctttctttagagacaggctgggcacaagccacatgtaaaatctgtacgtctcactgggcaatggcaagcaccaagggaaagcagtctatacgtgaagtggactaaataatgcccccaaggcttttctgtttatrtatgatgcaaaaacactcaacattatctagctacaccattccacagttacatttttaacactctcgggaaattggagacgggtgggtttttgaagaaggggagcggagcgggcaggcggggtgaggagggggtctggggaattccagagactagcac

SEQ ID NO: 144399 - DNA, 425 bp, Homo sapiens
tctgaattttgatgacaacatcagcatgggaacctttgggttaacactaatactcttgttagaatgtgaataactgtcgttatcatctattcaacgaatagctattgaatacatgtttattggctcgaaattgaatatctactatttgtcaagcactgtgctggaaatttaggactcaaaagtaagttaaaaayactgtggtcaattatattttaaaatatggaattgtattttaaaatatggaagtattagtgcatcaggccactgtaacccattaacctctaaggtcaaacaattcagattagtacatgtcatccaagaagtcctgggaaaatggaactcgggatagataaactatgatggagaaaggaatcaggaaaccttctggaatatgaaggactttggaaatagagagaaaaagaaga

SEQ ID NO: 144400 - DNA, 591 bp, Homo sapiens
aatctggtgattaaatgagataacatttctcttaatgtctggccaattttcgtcaattatttttattattrtttcctccatacattcaacagatacatttctcaaggccctagtatgtgccaaccacaacctgttagggaataagcctgaaatgattggaactcagggtgaatcccaggggcattctaaaaatgttttcttcaacctaataaagttgaccttccatatacacaaattatgtatgattcgaccaaccacaggtcaaaaatatttggaaaatagcaataaaaaataatacaataataaaaaatgcaaataaaaacaatgcagtatcactatttacatagcatttacattgtattaggcattagaagtaatcgacagtgatttaaagtatatggcaggatgtatataagttgtatgcaaatactctgccatattatataagcaacttgcgcatctgtggattttggtatccacaggggtcctttaaccaatggcacagataccaaggatgactatacatgacaacttccatgactctagttttctcacagttattttctcttttttaactgtaaaaattaaggc

SEQ ID NO: 144401 - DNA, 378 bp, Homo sapiens
gaattcaaaccccagccctcttaccttctcccaacagctctatgacttctagacagcattgcacatatgttgagaagtattttcgatctccttagcagcttcaactgaactgctaagaaacagctggtttgggcatacatgcttttttacacctgaatttctagtcacgtgttagcccagggccaagacttgcagcagcaaacttagctcccaggcatgatcgttagcaggagtgagctgttgccttctatgagcccaacagtgagttgcttgccaaagtcatcactccaccttgatctcctggttagtcragttcagtcaagatttccctcagaagctggagctcgttactgtttctccagtctcttccaaggttac

SEQ ID NO: 144402 - DNA, 570 bp, Homo sapiens
aagctttctgactaaatccaggctttgggataaggatgtgattagaattctgagaattttcatttgctaaaatactgttgtgtatacaaatagataacaatgctgggaggggggcttgtggggagagattggatacaggtagacttttttttttttcatttactgatcaatttcttatttctaagccagaaatcactgtagattcttggcatcaaacttcaggccacacaacatcattatggaaaggttaccccagcatcacaacatcctaatgctctactgttcccatctggcctcttgtcctgaatcaagcctggatctcattattgcttcagagacctttcatcttgttccagttgtaaagatgcaaaacaccatctcctgagctccatccctgcctttgcaggatggaagaagttggctcaagtaacagtcccccacccccgaaactcttgmaatggtttgtacagggtcactgtgggaggcaacgtagaacatcactaagaattacagaggtgtaatgacaagtggataggatccacttctcaaagatttcacctctgtctctat

SEQ ID NO: 144403 - DNA, 576 bp, Homo sapiens
tacagggtcactgtgggaggcaacgtagaacatcactaagaattacagaggtgtaatgacaagtggataggatccacttctcaaagatttcacctctgtctctatagtccaggcaagaggataagctttggataacagaactcagagaatgagaaatggaaatgatattgggcactgtgactaagattgataaagggcccaagtgagatggcgtatgctttcattggatggtacattatgtgaagatactggtgttttctttatggtttttcatatataaagagatataggagataaacttcttcatcatggggtaggaggggagaatttgcaatctgatgtcaatggctcccttagtcacccgtgactcaccactcagcatcatctctcagaagcccacaccctggcttttctgtcctgtagctgggaccttctgcctgtctccatttcttcctatgtgtttttcatccctttcacactccttgccactcrtggatgcctcttctctttgtccctataggaacttccaatcctgctttagaacttactccttcaggaaagcaactctcactgaag

SEQ ID NO: 144404 - DNA, 498 bp, Homo sapiens
  misc_feature (1)...(498): n = A,T,C or G
nnngactctatgatatccccaattatgtagaggtacatatttgaagttccttagattttagaataatcagatgtattctttatctcaaaaataatgggaaaaataaagtctaatggtaggctccacagagtttaaaattcaccaacattatgtttttcataaaaacatttacaacattctgaaatgtgttctatgctttaaattctacattagcattgttaaggcatttgttaactacaagatctagaaaagaagttgtaaaagttgcagatttatagcaagttgccaagagaacaattgtttgatatcatttcatttataataactcacctatttgtcaatctcaacattccagacaccaaaaaaaaaataaaaaataaaaaataaacaaggcctttgagttgccaaaaccatcttcataaaagtctgagtgctaaagcccatrcccttcattcacaagaaagttcattgagccctttctctctgacacattttcta

SEQ ID NO: 144405 - DNA, 587 bp, Homo sapiens
gcccagatacaatgcaaggaacaaatgagargggtttggggaccactagagacagtgagaaaccacagtagaaatccaggaaattagagaaaagaagtaataactatgaaaaggagcatgaggtatctacaaccttagccctcatggcatcattttggataagagcttcttacacctcaccgatttttaacggcattactctctaatgtaataatgtactgtgttaactttgccccaaaggaagaaatacattgaatttcttctgtttaggtaggcaagggactgatgattgcattgtatttgtattttgttctcaaaattgcttattttctcagtagaaagttctgtcttagtcaccatgagcccttaggttggtcaccaaactgcaggctcaattcttttaaggggccaattacaaatccaaacatgcaaagggacaatggtatggcctcaggggcagcataaagagcattgcttttgctatgaaatttatactctggagagtatatcattctctccagaacaaccattccaatgcctaccaatcagcttcaactcctaaccaactaattccactttatagacat

SEQ ID NO: 144406 - DNA, 580 bp, Homo sapiens
taggtttctgattactgatgctaatatatactaatggaacactggagctaatttatatactttcagatccaatattttctctagctggtcaaagactaagtagtgcagtgattttccatgacttccgttattagacctgaaccatattttgttgtctctgaaagtgctggtgctatttaagcaggggccattcaaccactgactcacagaatggaggacgtattttctgaaagtatttacccttggtgtgttcataacatcttctgcattacctcattcaagatccaccaacactttcccrtgtcctcagtgacttcagaacctaatgcttagttacccactctactgtaagctcaccctcctccctacatttaatacatactcctgagtacatactcctgttttcagctccacaagcttatgttttcattctacctccgataccaatgactcagtcacctttgatctcatcatcattaaaatggccctaattcacctctgataacagcgtcacctaaatctgatgttgagaaatgttgagaaaatctcaacattttctccagtacttgactgttcattt

SEQ ID NO: 144407 - DNA, 580 bp, Homo sapiens
taggtttctgattactgatgctaatatatactaatggaacactggagctaatttatatactttcagatccaatattttctctagctggtcaaagactaagtagtgcagtgattttccatgacttccgttattagacctgaaccatattttgttgtctctgaaagtgctggtgctatttaagcaggggccattcaaccactgactcacagaatggaggacgtattttctgaaagtatttacccttggtgtgttcataacatcttctgcattacctcattcaagatccaccaacactttcccgtgtcctcagtgacttcagaacctaatgcttagttacccactctactgtaagctcaccctcctccctacatttaatacatactcctgagtacatactcctgttttcagctccacaagcttatgttttcattctacctccgataccaatgactcagtcacctttgatctcatcatcattaaaatggccctaattcacctctgataacarcgtcacctaaatctgatgttgagaaatgttgagaaaatctcaacattttctccagtacttgactgttcattt

SEQ ID NO: 144408 - DNA, 421 bp, Homo sapiens
agacctggtgagacacagttccactctatccagcctcaggaatcctatgttcagtcttaacataattttgtatacaaatatagagctgtatcttaaacaggtaaggctgaattatacatgacatgcatttatgctcctccccagcagtagagtcaggatttagcacataaaaggaaatagtccatgctgattacaatctaaggcagaamaatcttcccctcctgttcagagcactgcagttatactcagtaatagagctcaatggacttgtgagttggaggtgatgggactgtcagtggcctcacttcaaggccagatgtctggaaattgcaatggttgtgacctaaaacagtcttgtatccatcaatcttgaattcttaggaacactcagtcaaggtcggtttgaggagaaccatgagaa

SEQ ID NO: 144409 - DNA, 348 bp, Homo sapiens
acaagaacaaatgtgttctcctggctgggtgcagtggctcacatctgtaatcccagcactttgggaggctgaggcgggtgaatcacttgagcctaggagttcgagaccagcctgggcaacatggtgaaaccccgtctctgcaaaaaaaaatacaaaaattagctgggcawggtggcgcatgcctgtggtcccagctacttggaaggctgaggtgggtggatggcttgagcccagggggcagaggctcagtgagccgtgttcgtgccactgtatgccagggctgggttacagagccagaccctgtcttgaaaaaaaaaaaaagggaaaaaaatgtgttcccctataaat

SEQ ID NO: 144410 - DNA, 567 bp, Homo sapiens
tccatttgtgtttaccttcacatccaaactcgaacaactctgctctgagttaattccccaatttcattatggccacactggggaaggggagaggaatctgtgtacaaaccaccagacagaaaacaatgggaacaggcagcaatccaagagctttggcatgatttgcaagagaaaaccagctctgattaatgctatcaaaatgcttgtctttcctgtgattgatattccagccccttgttacaattattgatgctggtgaccactattatgagagtctttttatagtttgctgttttggagggaggttgcatggacttcaccagaacatttgcacacctgcctcaatttaacctaaaacccattattttgcaaacaaagcatataaacccaacatagcaatcattgtttcccatattctgctattaaaayactcctgctcatggtaaggagtagatctcctgctggcctactataggaatagtgtgtaaaaggcagcgtggagggtaggatgcaccatttgaaggttctttggcatatgaaacctggcaaaccaaagacatcatttga

SEQ ID NO: 144411 - DNA, 558 bp, Homo sapiens
ctttttatagtttgctgttttggagggaggttgcatggacttcaccagaacatttgcacacctgcctcaatttaacctaaaacccattattttgcaaacaaagcatataaacccaacatagcaatcattgtttcccatattctgctattaaaacactcctgctcatggtaaggagtagatctcctgctggcctrctataggaatagtgtgtaaaaggcagcgtggagggtaggatgcaccatttgaaggttctttggcatatgaaacctggcaaaccaaagacatcatttgaaatggtattgtgtgccctggggtggtgacattacagcaggctgaaatcagcaggtattaagttttatgaattgctgatcttcaggagtaagtgataaaacagtcacaagtatctaaaaacgcccttgccctgaagagcttgccctggataccacaaatgtgcctagaaacactatgcacctctgtgcatggggtttgtttgtttgtttgttttgagacagagtctcactctgtcacccatgctggagtgcaatggcaggatctcac

SEQ ID NO: 144412 - DNA, 437 bp, Homo sapiens
atgaattcattttgtatgtactcaaagtacatgagagaggaaaaagaagcaatgccttacaatcagcgcaagtcaccgtgcagtggccacctgcagtggtgaagtaaaggggcatgcaggaagctgaatcccaggtcaaaaccaagccttggtccagcctgaacagaatcactttcaaaatatcttggcattagtcaacctgtcttctakaaatacttgtatataataatgagaaaatgttcatcgtgattattttcagtagcatagtacagccaagccctcaaaaagaggaagttttcattggtaaggcatttcatttaaacattgaaatctggtgtaatgtgaagtatgaaataagttttgaaaggaagctgatgattaagaagaaatgcagtgggcatttaataactggaggaaccgcaagataattaactggc

SEQ ID NO: 144413 - DNA, 566 bp, Homo sapiens
attgttcatgctacgtttctaacatgtcaccctcactttagcaactttaatggcatgacaaggcatacaggagcgccgtctggtcatgcaaagagctttccagctgcaagctccatttttcccaaaaaagggaaagcctgaagttccccaatacattcatgagggggcttcagaggaggaggggcccagggtctgtctgcattttagagaagtccaaacatgccagacaaggaagacatccatggtcccccagctgctaatccacaaaargccgggttggtcttctttataaacctaatcctcccgtccacagtgattaggtgtctgaggacactctgcatcagaagcaccgggttctttctgaatcagtcgatgagccaatacccagcaatccctttagaaagcagggggttatgacatctgaccttagagaaaccagatgacataatccaaccctatacaactctattttgggtctcactaatcacaatcccctattgagggagaggggtctactatcttaggatgtgtctagggagataggaagagatgacctctggaagctt

SEQ ID NO: 144414 - DNA, 566 bp, Homo sapiens
attgttcatgctacgtttctaacatgtcaccctcactttagcaactttaatggcatgacaaggcatacaggagcgccgtctggtcatgcaaagagctttccagctgcaagctccatttttcccaaaaaagggaaagcctgaagttccccaatacattcatgagggggcttcagaggaggaggggcccagggtctgtctgcattttagagaagtccaaacatgccagacaaggaagacatccatggtcccccagctgctaatccacaaaaarccgggttggtcttctttataaacctaatcctcccgtccacagtgattaggtgtctgaggacactctgcatcagaagcaccgggttctttctgaatcagtcgatgagccaatacccagcaatccctttagaaagcagggggttatgacatctgaccttagagaaaccagatgacataatccaaccctatacaactctattttgggtctcactaatcacaatcccctattgagggagaggggtctactatcttaggatgtgtctagggagataggaagagatgacctctggaagctt

SEQ ID NO: 144415 - DNA, 489 bp, Homo sapiens
agtttagctagttataaaatcttggtctgatctgtgaggacatcatgcagaccctgagaactgggagtctgagtctcatgagtcagaaggagtgggytggggagtagaatgagtgccccgttctgagacgagtcctaccacttgatagccacacatttctgtggagtctcctgaccccatggcagtccccactggggagccctacccagagaagtgacatgacaggaggctgctgacaagctgtacaggcagagccacagacagaccctctaggaactgtagtgcctgggtgatgagccatcagctgccatctgtgtccctgcttcatccataataatatcatgggaagcttactaagtgctctgctgacctgacccaccaccccaataacactgtcagacaggcgcagaatgttctcattaaaccctcgcacatttggggcactcatgcagccttcttttcaaaaatgcatgcaaaccatctgcctaa

SEQ ID NO: 144416 - DNA, 489 bp, Homo sapiens
agtttagctagttataaaatcttggtctgatctgtgaggacatcatgcagaccctgagaactgggagtctgagtctcatgagtcagaaggagtgggttggggagtagaatgagtgccccgttctgagacgagtcctaccacttgatagccacacatttctgtggagtctcctgaccccatggcagtccccactggggagccctacccagagaagtsacatgacaggaggctgctgacaagctgtacaggcagagccacagacagaccctctaggaactgtagtgcctgggtgatgagccatcagctgccatctgtgtccctgcttcatccataataatatcatgggaagcttactaagtgctctgctgacctgacccaccaccccaataacactgtcagacaggcgcagaatgttctcattaaaccctcgcacatttggggcactcatgcagccttcttttcaaaaatgcatgcaaaccatctgcctaa

SEQ ID NO: 144417 - DNA, 492 bp, Homo sapiens
gaattcaaactcctgttaaaccaatctattgatttcctaatttcagtttgttctaaagttttaagatttaggatttctattttgaatgctttctcattctctgacaaaatacttctgtatttcttaaaccaattaattatakctgtatgaggtttgtttctgataatttcaaatcctggatgctccaaggatatgtccctactgttcattgattatcttgagttttgttaatatcttaacctctactattcctggctttttaaaaattaaatgccgggcattatatgtaaacatttaagaggtaatttgaggttctggataattgtatctacattttaagaggattactttttctctaggcaatgagactagaagccccagttaccccaggtcatcttaatatcatcagggactgacataattttgcggttggtcttcagttcctttgagggctgatccctttttagtatccccaggtcaaaatgatttcaa

SEQ ID NO: 144418 - DNA, 492 bp, Homo sapiens
gaattcaaactcctgttaaaccaatctattgatttcctaatttcagtttgttctaaagttttaagatttaggatttctattttgaatgctttctcattctctgacaaaatacttctgtatttcttaaaccaattaattatagctgtatgaggtttgtttctgataatttcaaatcctggatgctccaaggatatgtccctactgttcattgattatcttgagttttgttaatatyttaacctctactattcctggctttttaaaaattaaatgccgggcattatatgtaaacatttaagaggtaatttgaggttctggataattgtatctacattttaagaggattactttttctctaggcaatgagactagaagccccagttaccccaggtcatcttaatatcatcagggactgacataattttgcggttggtcttcagttcctttgagggctgatccctttttagtatccccaggtcaaaatgatttcaa

SEQ ID NO: 144419 - DNA, 492 bp, Homo sapiens
gaattcaaactcctgttaaaccaatctattgatttcctaatttcagtttgttctaaagttttaagatttaggatttctattttgaatgctttctcattctctgacaaaatacttctgtatttcttaaaccaattaattatagctgtatgaggtttgtttctgataatttcaaatcctggatgctccaaggatatgtccctactgttcattgattatcttgagttttgttaatatcttaacctctactattcctggctttttaaaaattaaatgccgggcattatatgtaaacatttaaraggtaatttgaggttctggataattgtatctacattttaagaggattactttttctctaggcaatgagactagaagccccagttaccccaggtcatcttaatatcatcagggactgacataattttgcggttggtcttcagttcctttgagggctgatccctttttagtatccccaggtcaaaatgatttcaa

SEQ ID NO: 144420 - DNA, 594 bp, Homo sapiens
aaatcttgtaaggtcttggttagttgaatagggggaagttggcagaaggctcagcattaaattgcaccaggataaatttacttgttcttttccactgaactccacattgatagcccaaagtttctatctttgacttgtatcatctttcttctcttgatttcacactatacattaaaatgtacaacttattwttatagctatttcctaaaagtatttcatcattaatcagttttcaactcagatgttatatcgtcaataacaatttcctggtagtcctctgcaacatttttttaaatgaccaaaatagtcatatgtcccaacggaggtacaatttacagcattgtgcgttctatttctggacatataactatataatctgagttatgaaaatcaaagaaactaatttaatatgtgaatttctatcactgaacattttaaatacttgtattcaagataatatcacagattatatatgcaaattaatgtaaattcgcagtggacaatattatattgtcaaaatcacactgacacagactctcagaagtagaagcttcctatcagaaggttaatattttctggatataacacagcaat

SEQ ID NO: 144421 - DNA, 594 bp, Homo sapiens
aaatcttgtaaggtcttggttagttgaatagggggaagttggcagaaggctcagcattaaattgcaccaggataaatttacttgttcttttccactgaactccacattgatagcccaaagtttctatctttgacttgtatcatctttcttctcttgatttcacactatacattaaaatgtacaacttattattatagctatttcctaaaagtatttcatcattaatcagttttcaactcagatgttatatcgtcaataacaatttcctggtrgtcctctgcaacatttttttaaatgaccaaaatagtcatatgtcccaacggaggtacaatttacagcattgtgcgttctatttctggacatataactatataatctgagttatgaaaatcaaagaaactaatttaatatgtgaatttctatcactgaacattttaaatacttgtattcaagataatatcacagattatatatgcaaattaatgtaaattcgcagtggacaatattatattgtcaaaatcacactgacacagactctcagaagtagaagcttcctatcagaaggttaatattttctggatataacacagcaat

SEQ ID NO: 144422 - DNA, 425 bp, Homo sapiens
tgcaaataataataatcatctccccttggaacaagacatggtttttcatgttttcctttcatcatatcagagcctgaaaaatgcttggacccctaacagacayattcaataaatatttgttgaatgaatgaaaacaatatatactctatcatatattctccttaaatttcaatacagtaagaagagtttagaagggttagcttccattattctcaattaaagataccatgtggcctgtatggcagaaatgtctcttcagaatatttagcctttgattccataatgaactcaaaaacaacttttatgctaatgtctgaaatcaggaactctattattataattgtatttcagattagagttcaaaatctacttgaggtgtgattgcttagtatccagaatcagagcagaaccaagattcctcgtca

SEQ ID NO: 144423 - DNA, 331 bp, Homo sapiens
aatgcttggacccctaacagacatattcaataaatatttgttgaatgaatgaaaacaatatatactctatcatatattctccttaaatttcaatacagtaagaagagtttagaagggttarcttccattattctcaattaaagataccatgtggcctgtatggcagaaatgtctcttcagaatatttagcctttgattccataatgaactcaaaaacaacttttatgctaatgtctgaaatcaggaactctattattataattgtatttcagattagagttcaaaatctacttgaggtgtgattgcttagtatccagaatcagagcagaac

SEQ ID NO: 144424 - DNA, 425 bp, Homo sapiens
tgcaaataataataatcatctccccttggaacaagacatggtttttcatgttttcctttcatcatatcagagcctgaaaaatgcttggacccctaacagacatattcaataaatatttgttgaatgaatgaaaacaatatatactctatcatatattctccttaaatttcaatacagtaagaagagtttagaagggttagcttccattattctcaattaaagataccatgtggcctgtatggcagaaatgtctcttcagaatatttagcctttgattccataatgaactcaaaaacaacttttatgytaatgtctgaaatcaggaactctattattataattgtatttcagattagagttcaaaatctacttgaggtgtgattgcttagtatccagaatcagagcagaaccaagattcctcgtca

SEQ ID NO: 144425 - DNA, 604 bp, Homo sapiens
aatataaggttgcattgaggtaaagtatacaaatttacaaaataatttggaacagaatrtagtgtctaaacatagttccacacatatatagccagctagtattctacaatgattgattttcaatggtgaaagaacagacttacaaatgatgcttgattaacttggtgatcaaatgaaaaaagatgagtcttgatcttcacctttcttgttatagaaaatattaagttgaaatagatcagaggcctgaatgtaacatgtaaaactctagaacttctagaagaaaatatctgagaaaatctttatgaacatggttaggaaaagatttcttagataaggtgagaaaatgggataaataataaaaataaaaatagaaaaattggactttataaaaattaagaacgcctgctcttaaaaaatagccattaagaaaattaaaagataatccacagaatgggagaaaatatttgcaaatcatagatcagataaggaatttgtatccagaatatacaaagaattcttacaactcaatattaagaagccaaacaatttggttaaaaaaattaggtaaaatatttgaaaagacacttcaccaaaaaacaatgat

SEQ ID NO: 144426 - DNA, 604 bp, Homo sapiens
aatataaggttgcattgaggtaaagtatacaaatttacaaaataatttggaacagaatatagtgtctaaacatagttccacacatatatagccagctagtattctacaatgrttgattttcaatggtgaaagaacagacttacaaatgatgcttgattaacttggtgatcaaatgaaaaaagatgagtcttgatcttcacctttcttgttatagaaaatattaagttgaaatagatcagaggcctgaatgtaacatgtaaaactctagaacttctagaagaaaatatctgagaaaatctttatgaacatggttaggaaaagatttcttagataaggtgagaaaatgggataaataataaaaataaaaatagaaaaattggactttataaaaattaagaacgcctgctcttaaaaaatagccattaagaaaattaaaagataatccacagaatgggagaaaatatttgcaaatcatagatcagataaggaatttgtatccagaatatacaaagaattcttacaactcaatattaagaagccaaacaatttggttaaaaaaattaggtaaaatatttgaaaagacacttcaccaaaaaacaatgat

SEQ ID NO: 144427 - DNA, 604 bp, Homo sapiens
aatataaggttgcattgaggtaaagtatacaaatttacaaaataatttggaacagaatatagtgtctaaacatagttccacacatatatagccagctagtattctacaatgattgattttcaatggtgaaagaacagacttacaaatgatgcttgattaacttggtgatcaaatgaaaaaagatgagtcttgatcttcacctttcttgttatagaaaatattaagttgaaatagatcagaggcctgaatgtaacatgtaaaactctagaacttctagaagaaaatatytgagaaaatctttatgaacatggttaggaaaagatttcttagataaggtgagaaaatgggataaataataaaaataaaaatagaaaaattggactttataaaaattaagaacgcctgctcttaaaaaatagccattaagaaaattaaaagataatccacagaatgggagaaaatatttgcaaatcatagatcagataaggaatttgtatccagaatatacaaagaattcttacaactcaatattaagaagccaaacaatttggttaaaaaaattaggtaaaatatttgaaaagacacttcaccaaaaaacaatgat

SEQ ID NO: 144428 - DNA, 604 bp, Homo sapiens
aatataaggttgcattgaggtaaagtatacaaatttacaaaataatttggaacagaatatagtgtctaaacatagttccacacatatatagccagctagtattctacaatgattgattttcaatggtgaaagaacagacttacaaatgatgcttgattaacttggtgatcaaatgaaaaaagatgagtcttgatcttcacctttcttgttatagaaaatattaagttgaaatagatcagaggcctgaatgtaacatgtaaaactctagaacttctagaagaaaatatctgagaaaatctttatgaacatggttaggaaaagatttcttagataaggtgagaaaatgggataaataataaaaataaaaatagaaaaattggactttataaaaattaagaacgcctgctcttaaaaaatmgccattaagaaaattaaaagataatccacagaatgggagaaaatatttgcaaatcatagatcagataaggaatttgtatccagaatatacaaagaattcttacaactcaatattaagaagccaaacaatttggttaaaaaaattaggtaaaatatttgaaaagacacttcaccaaaaaacaatgat

SEQ ID NO: 144429 - DNA, 613 bp, Homo sapiens
  misc_feature (1)...(613): n = A,T,C or G
gtattaataaatggaataaaaaattatgttttccttcaataatatgaactgacattctatataaagaactaaaatataaagttaataactacttacatttgtaaatctataaaattataaatgataatacatactccattttaatttatccttacaaagctctagaggtacatgggaataagtattcttttattttactaagcaatgaaaattcatggaattatgtgactctctcaaggtttacaagtaaatrtcatagccaggacttgaaccttcatcttctgtctccaaagtgaggatggtttttattataccaccccattgtctaataggcagtattttgttaaaacaaaattaaaaagaaaaagagaaaaatcttattgtacattatttacggtactcctgcagaagaatatttgagaaaatggcttatgtaaggaagagaacatattggctagtctcaataaaaatttaatgtttaaaattattgagcctattattggcttaaaaaaaaaaaaatatttggatcagtgttttcctcacctttccaaccactaaatctgatctccttaaagccccacctttctgggcatannnnnnnnnnnnnnnnnnn

SEQ ID NO: 144430 - DNA, 644 bp, Homo sapiens
gtgaaatccaggctggtagtgtgagctgagcacaacctgcttggccaagtgggtggagccagcccagtggtcactagaaaaactccagcagagaacctactgaccacagaagtctacagctgacaaagcagtaccaaaaggatcctctgtcatttctaagtatgaagtctgtwctctaatcattgttggccatctctgctctttctctgttcaggatgctgttactctcgcccatacatatttctgtatattttaagtgatattctttagagatatcattcccagtattttaatctaaaacaaaaaataaataaataaacctttgttaccatttatagttttcctataaaataatcagttgtttttctggttgctaatctctgaagatttacaggctgttcatcctacctctctccttccacaaacaattgaacacattttgttcatttaaattctcctttcactttgtgaaatcttagcttaccttcatagttataatttttttacctctactgtatttataggtgccagatttgaccttcttattctagagcatgccattctgttctgcgcttacttgattacaagtttccttctctaaaatatgtctcatggggcatgaattacgtctcatttcttttttc

SEQ ID NO: 144431 - DNA, 644 bp, Homo sapiens
gtgaaatccaggctggtagtgtgagctgagcacaacctgcttggccaagtgggtggagccagcccagtggtcactagaaaaactccagcagagaacctactgaccacagaagtctacagctgacaaagcagtaccaaaaggatcctctgtcatttctaagtatgaagtctgtactctaatcattgttggccatctctgctctttctctgttcaggatgctgttactctcgcccatacatatttctgtatattttaagtgatattctttagagatatcattcccagtattttaatctaaaacaaaaaataaataaataaacctttgttaccatttatagttttcctataaaataatcagttgtttttctggttgctaatctctgaagatttacaggctgttcatyctacctctctccttccacaaacaattgaacacattttgttcatttaaattctcctttcactttgtgaaatcttagcttaccttcatagttataatttttttacctctactgtatttataggtgccagatttgaccttcttattctagagcatgccattctgttctgcgcttacttgattacaagtttccttctctaaaatatgtctcatggggcatgaattacgtctcatttcttttttc

SEQ ID NO: 144432 - DNA, 642 bp, Homo sapiens
agtaaagggacggaaaaaggtcaatcaaacaaatggaaaataaaaagagcagaggtggatattcttattttagacaaaaccaactttaaacaaaaaatcattgaaaaagacaaagaatkgcattacataaaggtaaagtcaacaggaagacttaactgtcttcaatgtatatgcgtctaacactggaacaccagataataaaacaagttcttagagacttatgaaaacttaaataaccacacaataatcctaggggatgtcaacccccactgacagtattgaacagatgatcaaggcataatgctaaaaaagatattcaggatctaaacttgactcttgaccaaatgaacctaacagacatttacagaacagtcctcccaacaaaaagagaatatacattcttatctgcatatggcgcatactctaaaatttgccacacattcaatcataaagcaattctcagcaaattaaaaacacacacacacactcataactacagtacaaaaaaaaatcaatacagagatgatctctcaaaaccatacaattaaaatgaaattaaagaacctgttcctgaatgactatttgataaataacaaaattagggcagaaagtaagaaattctttgaaactaatgaagacaaa

SEQ ID NO: 144433 - DNA, 642 bp, Homo sapiens
agtaaagggacggaaaaaggtcaatcaaacaaatggaaaataaaaagagcagaggtggatattcttattttagacaaaaccaactttaaacaaaaaatcattgaaaaagacaaagaattgcattacataaaggtaaagtcaacaggaagacttaactgtcttcaatgtatatgcgtctaacactggaacaccagataataaaacaagttcttagagacttatgaaaacttaaataaccacacaataatcctaggggatgtcaacccccactgacagtattgaacagatgatcaaggcataatgctaaaaaagatattcaggatctaaacttgactcttgaccaaatgaacctaacagacatttacagaacagtcctcccaacaaaaagagaatatacattcttatctgcatatggcgcatactctaaaatttgccacacattcaatcataaagcaattctcagcaaattaaaaacacacacacacactcataactacagtacaaaaaaaaatcaatacagagatgrtctctcaaaaccatacaattaaaatgaaattaaagaacctgttcctgaatgactatttgataaataacaaaattagggcagaaagtaagaaattctttgaaactaatgaagacaaa

SEQ ID NO: 144434 - DNA, 642 bp, Homo sapiens
agtaaagggacggaaaaaggtcaatcaaacaaatggaaaataaaaagagcagaggtggatattcttattttagacaaaaccaactttaaacaaaaaatcattgaaaaagacaaagaattgcattacataaaggtaaagtcaacaggaagacttaactgtcttcaatgtatatgcgtctaacactggaacaccagataataaaacaagttcttagagacttatgaaaacttaaataaccacacaataatcctaggggatgtcaacccccactgacagtattgaacagatgatcaaggcataatgctaaaaaagatattcaggatctaaacttgactcttgaccaaatgaacctaacagacatttacagaacagtcctcccaacaaaaagagaatatacattcttatctgcatatggcgcatactctaaaatttgccacacattcaatcataaagcaattctcagcaaattaaaaacacacacacacactcataactacagtacaaaaaaaaatcaatacagagatgatctctcaaaaccatacaattaaawtgaaattaaagaacctgttcctgaatgactatttgataaataacaaaattagggcagaaagtaagaaattctttgaaactaatgaagacaaa

SEQ ID NO: 144435 - DNA, 580 bp, Homo sapiens
cagtcaggtcttcccatggcacattatagtaaaaaggtcttcccatggaacatwatagtaacaatgtctagagttaatgacaaagagagaattgtaagaacagcaagagaaaagtgtctagtcacctataaaggaaccaccaatggactcatggtgaatttctcagccagaaacttacagtccaggagaagatggcatgatttattcaaagtgctcaaaggaaaaataactgtcagccaaggatacttcattcggaaatattgtactttatgtgatggagaaataaagtatttcccagacaagcaaaaggtgagggaatttgtcaccactggaccaatcctacaagaaatattctaggatgtcctaaacatggaagcaaaaagaaaacaatcagaatcacgaaaatacacaaaagaatcaaactcaatggttagacaaacacacaaaaaagaaagagaaaggaataaaatgatgccactataaataaccaaaaagccacaattacaaacaataagagaaaaaaaagaaataagaaatatgcccccaaaaccagaaaataataatatgacataaataaaac

SEQ ID NO: 144436 - DNA, 580 bp, Homo sapiens
cagtcaggtcttcccatggcacattatagtaaaaaggtcttcccatggaacattatagtaacaatgtctagagttaatgacaaagagagaattgtaagaacagcaagagaaaagtgtctagtcacctataaaggaaccaccaatggactcayggtgaatttctcagccagaaacttacagtccaggagaagatggcatgatttattcaaagtgctcaaaggaaaaataactgtcagccaaggatacttcattcggaaatattgtactttatgtgatggagaaataaagtatttcccagacaagcaaaaggtgagggaatttgtcaccactggaccaatcctacaagaaatattctaggatgtcctaaacatggaagcaaaaagaaaacaatcagaatcacgaaaatacacaaaagaatcaaactcaatggttagacaaacacacaaaaaagaaagagaaaggaataaaatgatgccactataaataaccaaaaagccacaattacaaacaataagagaaaaaaaagaaataagaaatatgcccccaaaaccagaaaataataatatgacataaataaaac

SEQ ID NO: 144437 - DNA, 580 bp, Homo sapiens
cagtcaggtcttcccatggcacattatagtaaaaaggtcttcccatggaacattatagtaacaatgtctagagttaatgacaaagagagaattgtaagaacagcaagagaaaagtgtctagtcacctataaaggaaccaccaatggactcatggtgaatttctcagccagaaacttacagtccaggagaagatggcatgatttattcaaagtgctcaaaggaaaaataactgtcagccaaggatacttcattcggaaatattgtactttatgtgatggagaaataaagtatttcccagacaagcaaaaggtgagggaatttgtcaccactggaccaatcctacaagaaatrttctaggatgtcctaaacatggaagcaaaaagaaaacaatcagaatcacgaaaatacacaaaagaatcaaactcaatggttagacaaacacacaaaaaagaaagagaaaggaataaaatgatgccactataaataaccaaaaagccacaattacaaacaataagagaaaaaaaagaaataagaaatatgcccccaaaaccagaaaataataatatgacataaataaaac

SEQ ID NO: 144438 - DNA, 552 bp, Homo sapiens
gcaaatggatggatggaaagatggatggctggatggatgggcagatggatgtaaaagtattttcaagaaagcttctctatcatgtctctcagatcatatgcttattttggtgattaacagatatgttttaacacagactttaaagattattgtgcataaatgatctctcagtagtgtgtgtgtgtttgtgtgtgtgcttgtgtttgtgtgagagagggagatgggtgggggggagtgagagacaggagaatgcagaagatggagagagaagaatacttcagattctggtgtttttcttttttattgtatcctctggccaagtgcacctcggctttttttattgcctgtttcttgagaacatgaaagtattyttcacatagcataccaattcatttgtccttttggaaagagtcaagctctgatagagagttgactgttgctatgttcctggcttagttctccatattaaacttcttactgacataataaaatacattttttcctgaatataaatggcaacattcaataacttcagttgccagcaaagacaaa

SEQ ID NO: 144439 - DNA, 605 bp, Homo sapiens
caaattctctatctctaataaatggttttgattctttcatttagcaattattaacatctattgtatactaagcagtagggatttttttttaatgataagttcctatatttaaaaagtcacagagaatacagtttggtattaatgtgactacagaatcctgctcaagtggttttgtcatgtcctggtatgaactgaatgtttgtgttcccccaaaatgtatatgttgaagacataatctctgaaatgacagtatttggaagtgaggcatttgggaggtaattagctcatgagggtggagccttcataaatggggttattgcccttgtaaaaataaatacaraagagataatctccctcttggcatgtaagggtccagcaagatgacagctgtcaacaagctgggaaatgggatctcaccagatgttgaatctgctggaccttaatctggagactttccagcctctaaaactgtgagaaatcaacttttgttgtttcagcctctcagtctatgatagttttgttatattagcccaagccaagacatgccaacaatagtttaacactgatttggccttaatattgtggaacagcatgatgttaactag

SEQ ID NO: 144440 - DNA, 372 bp, Homo sapiens
atgagcacttcttaaagagagtaaattactactttctttgactatctccccaaaatgatcaaatttataaacagtggtcatcttacatcctgattttttgcaatgtaakatacatgcttcctttcttttgatctttcttgaaataaaaagagaattggtttcatattattgccttcattttatacacaagttgttttgaatctatttttcaggattctaccaaatactctatatgtcaaagggatgagttagcagatggaactttattttccaattcatttcttttaaaagcttcatgcaaaaggaactttcagtgcacaaagtcgaaattgtagtgtgttttgctttcttaagcactaaaatggtcaaaga

SEQ ID NO: 144441 - DNA, 470 bp, Homo sapiens
agcaggccttattttttatatatttcaataacaaaacagttgagccccctactcaatgtttccaatgagacataagagattgtagtaggagatcattactttaaaagatctttgcaaaagaaggagaaacayaatttcaccccaggtgatatgagggccagatgttcccacggaaactgattataaattaatccattatgatctgcactttataagatagagtgtgggatgggagtttggggaacagaactcttcaatcttcagacttttgaagaaactcttaaagaaactttacaaacagtggatgtaatacgtaaatttgacttcttatttttcagtaaaatatgaaagggactattttgggaagcttttcttttaaatgtttatatctgcagctctaattcttcatcttataaaacaaatcaattaactaatatagatcacaaaattagtaaagaaatcttcaacgc

SEQ ID NO: 144442 - DNA, 470 bp, Homo sapiens
agcaggccttattttttatatatttcaataacaaaacagttgagccccctactcaatgtttccaatgagacataagagattgtagtaggagatcattactttaaaagatctttgcaaaagaaggagaaacacaatttcaccccaggtgatatgagggccagatgttcccacggaaactgattataaattaatccattatgatctgcactttmtaagatagagtgtgggatgggagtttggggaacagaactcttcaatcttcagacttttgaagaaactcttaaagaaactttacaaacagtggatgtaatacgtaaatttgacttcttatttttcagtaaaatatgaaagggactattttgggaagcttttcttttaaatgtttatatctgcagctctaattcttcatcttataaaacaaatcaattaactaatatagatcacaaaattagtaaagaaatcttcaacgc

SEQ ID NO: 144443 - DNA, 595 bp, Homo sapiens
atacattgctgtggaagtggcttgttgtggaagcatctgccactgagagagcgtggcctaaaagcacaggagccagtccctgaggacawctgggctacaacggtgaacagtaaaaatggacaatgggaactttaaagagttttcctgccacaacatagtctgtagtgtcaccctagtgctctcttttgacaaagcttaacactgtgccagctagtaaaggaaaaatacttacacagttcagctccagtgtcaaaaagtagggcaaagaagagtggatttggagatggtggggcaataaactgaaaatagacacacttctctattttgtgtcatccctcttttctaattcaactatttcaacccctattcaggacccccatctcacacccaattgctctaaaagcttcctaatccatcttcctgcctctattcttataatatcttcccaaatccatcttcaacaaagatgacagtgatttaagagtccaattttgaaaataatattctcatacttaaaattcctaagtccctcctcctaaacaaagcatgttacatgttgcttggtctgccacgttcccaccactacctgctgtga

SEQ ID NO: 144444 - DNA, 541 bp, Homo sapiens
aatcacacattggaacaaaaatggaattttgatcaaagtgggcagaaagacagataatatacagatcagttaatctatttgtataattatggttatacaaatatatatgtgtatagtttatagccaagaaatgtatacaccttttaatctttgaagttgatatgtgtattttcaaatcattccaatgcatttctcttctgattcttaccactgtaaatttaacccctaagaatttaaatagtcataaactaagtgcttacattaaaaacgtctactcttggagaagacatactgaaaatcaccagcagttttaggtcatattaaattagtttacacacatatacacacacacactagatagatagttcaatcaacttatcaatagatagaagacagataaatatagatgtaaatatgtagttatgtttctatataaatccattgacagcagtctacgtgaaaatgacatattatggcgcttttggtacattatcagtggacaatgccttgccartattgaaataaaattgtaactgttgtg

SEQ ID NO: 144445 - DNA, 634 bp, Homo sapiens
gagtgacataactgctgcccatatatgttgtcacatgaaaattcttagaaaatatcttagtaggttcagtgcatccacttatttcacaaacagtttaagagtctgtcacatgccaggttgtttgctgtgtgtttaactcatgtataataaagcatacacaatcatgggttgaagttcttaatcgtcttccaacatgttattgtcaaagcagatttggttttaaccatttctattttcatcaatataaatgtatgaacagatcaataggtgaaggatagacaaagacagtagataaaacctttgtcaggggaagttgtagaatgaataataaggtttcytaaaacctcagcccttaatttaacattttggaaggtaggcaaaatcttgtcactacctttaaaatgcagtattcaataaagtatctctttggtaaccaaacaaatatgtattgccacaactaaaaatccatttagacctccatgactgatttatactttttgaacttcttaactaagtatgctgctgctttaaaaatatacaaaaatataaatttagcagacataacaataaaatctaactattaaaaaaactggtaaatgaattcattgaactttcaggatacaaaattaacgta

SEQ ID NO: 144446 - DNA, 492 bp, Homo sapiens
tgaacatgattttgtatgtatatttgtacatatcaaatagtttttaagataattcttgaaaatgaaattatcatttcaaaggctataaatattaaaatgtggawatgtatattgcctgattttccttgagaacaactgtacttctttatgtttttttgtcacccaggctggagtgcagtggtgtaatcttggctctctgcaacttccacttcccgggttcaagcgattctcctgcctcagcctccttggtagctgggattacagccatgtgccaccacacccagctaatttttgtatttttagtagagacgagatttcaccatgttggtcaggctggtcttgaactcctgaccccgtgatctgcccgccttggcctcccaaagtgctgggattacaggcatgagccaccgcacctggcctactattttcttgaaataaagatttaatcaatcctagaagcttcttacctgtgtatatatattttcacatttc

SEQ ID NO: 144447 - DNA, 492 bp, Homo sapiens
tgaacatgattttgtatgtatatttgtacatatcaaatagtttttaagataattcttgaaaatgaaattatcatttcaaaggctataaatattaaaatgtggaaatgtatattgcctgattttccttgagaacaactgtacttctttatgtttttttgtcacccaggctggagtgcagtggtgtaatcttggctctctgcaacttccacttcccgggttcaagcgattctcctgcctcagcctccttggtagctgggattacarccatgtgccaccacacccagctaatttttgtatttttagtagagacgagatttcaccatgttggtcaggctggtcttgaactcctgaccccgtgatctgcccgccttggcctcccaaagtgctgggattacaggcatgagccaccgcacctggcctactattttcttgaaataaagatttaatcaatcctagaagcttcttacctgtgtatatatattttcacatttc

SEQ ID NO: 144448 - DNA, 587 bp, Homo sapiens
ggcccctttaatgacccagtggtccactccagtcatcatgagtgctcaaaggttatgagctaaaagtgtctctattagagttcacaagtccctgaatcatattcacttatgtcatggaggtgtcacttatctttgtatctcccatagatcttcacacagggttagttccaagtaaacaaccagccctgtcagcattactgaagtatcacatgatatctgttttgagctcatagcttgcagagtctcatggataatactccagatttctttctgtcctgacagccaaaccaatttccagaatattaaaacacacaaaatattcttttttgtgagaytttcaaatgaggcccacctcaaaaatttagccaaaacagctagtgtttttgagggaaaaaataaactctaatgggttttgaatcccctctcccaattcttctcaggcaacctctaaggattgtattggaaataggtgttgtaaaacatccaccacctgaaactgtcatggggtgtttggtgtgaatgatacatggtaagaaagattaggattaacagtatatttgccaggttagtatgcacaaggcagatgg

SEQ ID NO: 144449 - DNA, 607 bp, Homo sapiens
acaagcacaccagtttggactagcacaaaggtctgagaggctcagggaaactgtgacctgttacattagtaaaggtcttatattctacaagaccaatacataaagactgggagaaataaaagtttgttttattttcctatttgcatgaacrccaacaaaaagagccaaggaaatttaagaaacaggaacacaaaatcgaaacaaacaaacaaacagacaaaaaaacaagacaaaactccaaaaacaaatcgtaataaaatggagctgtgtgatttactgacagagaattgaaaataattgtcataaaaatgttcaatgagctcgagagagcaatgcatgaactaaaagagaattttaacaaagagatacaaaacttttaaatgaaccaaacagaaacctaggagttgaagaatgtaataagtgaactaaaatttttgatagaggtgtacaacagcagattagagcaagcagaagaaaggacagagaagatgaagacaagtcatttgaaattatccagtcagaggaggagttaaaaaaaaaagaatgaaaaagactagagtgcagataggttaacattcctataagacatcatcaagtggaccaatat

SEQ ID NO: 144450 - DNA, 545 bp, Homo sapiens
ttactgttttaagccatgccaaacttagcagcaattatttttataaaagtaaatctgattgataattctaatttcatttcttaggttagtggtgaaattattttttcaactatttattagctggctatttgtatatttttgtaaaatgactgtatccttcatccattttaatttttcactgatcaataggcattattacaaataataagtgtttgtatctttgtgttacagagcttgctttcccagtttgtcttttattccttgatattctctggtgtatktttttaacagttttattggaatataatttatgtaccatgtaatttacccatttaacatgcaaaattcaacatatttttactatttattgtgagtgagaagtgacattatgttgtggttttttgtggcacttttttacataaagaagtatatatttgtagcaacttcatatatgtttctgaaaagttaactttctatttccaaatacttcttgctatattctatagcaatgatgtattcttgcctagaatttctaattatattga

SEQ ID NO: 144451 - DNA, 567 bp, Homo sapiens
agctggtccttctcaggatggtttctcttggattacttttttaccttaaaataggccatactttcccatttattggtacattttgtgatttttttattgataaaagcagaacttttgaacctaataactcaaatcatcagattctgctcctaccccaagctttgttgatttttgtggggtgtattttttttttctgctgtaggctgtctttgtgcaagaaattagtcagatatataagctttagatcttttgagggcctttttaagcctgtgactatcactggttgtayataataactttctaattcctccatatatttggttttcttttgaatattctagggttttactgtctgattcctaaatgggtaaaaagagaaaaatgaagatggggagaaaaaaggctctggccctttaaatttcctggacgttgcttcatcaaagtgggaggggcttgcaacattagagcaagaggtacaacaattgctgctcacttatgtatctatgcctccaagaccaaaagaagcaatcaacaattaaaaaataaatccccaatttttggtggaca

SEQ ID NO: 144452 - DNA, 520 bp, Homo sapiens
ctaaaaagaccaagtgaaagaaaaagttgtatatatgtaggctacatatttacactcagcattagctaaagattactgatctttcactagttgcagaaacaactgtaccctatgcatggtgtggaataatgtatgcaatcatataggatctcaggagagggtacttaattattcagaaagttgatgtttatgcatactgagaagcaagataacaagacacaataaatttgattaactttttatctttctgctttggagcaaaatatatgtgcaaggagtgaagataaaaaactcagaatcaaattaatgtatgagtttgggaagtraagcaaaaactgaaataagccatttcttttagttttttttaatggggacaatttgaaggcattaataaaattcaagaatatttaattatttcatctaccaataatgtactatatctaactattagccagtgttatattacaactactcttggagacacaaagatgactaatcatatctgatttccaggaagtga

SEQ ID NO: 144453 - DNA, 571 bp, Homo sapiens
ttattattgtgtatgtgtgtggttgtgtacgatgtgctaaacctttgttatgtataatattgaaccatttctttatataacatggtattttgaaaacaatcttaactatgctgcttttatactaattatatgtcgtatttcagagaaaagattttttttctccaaaattcattgttattttggttcaaagaaaatatgagtacttaaaactggcacacaaactgcatttgccgcatttgaatgttctgcattaacaacctagcttagcatttccactgcatgttaaaagatagcagcaataagcccaccaggggatgagagaagcttgttgaggataacagtccttctcttccaaattcacacaggtttacttygaaattttaagtgacagtaatttgtaatttatgcctcattaacaaacatatgataagtaaatgaattttagaaaatactagtaaaacagcattaattcttaaatgggagtcattttgatgtttaatgtttgtttgctatatgaccttatgtaagctggtcaaatgagctaaagtccatttctttcatttattcaatc

SEQ ID NO: 144454 - DNA, 618 bp, Homo sapiens
gaatcttgggttatgtatctaaggcttaggcatggaatcactgaatgcgggaggatcttctccactctgaactagagcttacatccctataagaaaaaggagtaaaaataaacagataattaaactgatttcatttttaaatggggagttttacataaagatcatgaatacttaaagagatcatttaaatcacaaatttgagccactgataagtatttaaggtacaaaaggctgatttaagcaatcaagaaacactctataacttacaccaaaaaaattctcattctattaagtatctgtgttgaaaagttaygattatttattttaccttatgtcaacatatggagcagttcttaagtgactgaaaattgatcatccaaggtcaacacataccctattagccattcaatagttttctttactaatgcctgagtaatcctcaagaattgaagtaaatgccagaccgtttaccattaaatattctgagatactatcatttgttttcacagaaaataaatggtgaaacatcaaatacatccacgtaatagtcactgtgagtgtcataagtagaaatatgtatttttaataaagcattgatacatttatttatgtagtaag

SEQ ID NO: 144455 - DNA, 618 bp, Homo sapiens
gaatcttgggttatgtatctaaggcttaggcatggaatcactgaatgcgggaggatcttctccactctgaactagagcttacatccctataagaaaaaggagtaaaaataaacagataattaaactgatttcatttttaaatggggagttttacataaagatcatgaatacttaaagagatcatttaaatcacaaatttgagccactgataagtatttaaggtacaaaaggctgatttaagcaatcaagaaacactctataacttacaccaaaaaaattctcattctattaagtatctgtgttgaaaagttatgattatttattttaccttatgtcaacatatggagcagttcttaagtgactgaaaattgatcatycaaggtcaacacataccctattagccattcaatagttttctttactaatgcctgagtaatcctcaagaattgaagtaaatgccagaccgtttaccattaaatattctgagatactatcatttgttttcacagaaaataaatggtgaaacatcaaatacatccacgtaatagtcactgtgagtgtcataagtagaaatatgtatttttaataaagcattgatacatttatttatgtagtaag

SEQ ID NO: 144456 - DNA, 618 bp, Homo sapiens
gaatcttgggttatgtatctaaggcttaggcatggaatcactgaatgcgggaggatcttctccactctgaactagagcttacatccctataagaaaaaggagtaaaaataaacagataattaaactgatttcatttttaaatggggagttttacataaagatcatgaatacttaaagagatcatttaaatcacaaatttgagccactgataagtatttaaggtacaaaaggctgatttaagcaatcaagaaacactctataacttacaccaaaaaaattctcattctattaagtatctgtgttgaaaagttatgattatttattttaccttatgtcaacatatggagcagttcttaagtgactgaaaattgatcatccaaggtcaacacataccctattagccattcaatagttttctttactaatgcctgagtaatcctcaagaattgaagtaaatgccagaccgtttaccattaaatattctgagatactatcatttgttttcacagaaaataaatggtgaaacatcaaatacatccacrtaatagtcactgtgagtgtcataagtagaaatatgtatttttaataaagcattgatacatttatttatgtagtaag

SEQ ID NO: 144457 - DNA, 563 bp, Homo sapiens
tttaaaacaagaaaagaaaaaatagcgtgagaaaaaaaaattgtaaacgttaaaccatttagctttctctcaaattatttgataacaaattaagaaaaaaagaacmttgaagttaaatccaataatgcctttctggtagcaggcacagatccagtcataagtcttatgtaacagaacctctaggttacagctatctcttaaagatagctaatatcattatattacttagcacaaaggtgcaaagatactaaagaaaattaaggcaataccaaaattttaactatgtataaaaaatacaaagatcggccgggcacagtggctcatgcctataatcccagcactctgggaggccgaggcgggcagatcacgaggtcaagagattgagaccttcctggccaacatcatgaagcctcatctctactaaaaatacaaaaattaactggatgtggtggcaggagcctgtagtcccagctactcaggaggagagaatcaactgaacccgggaggcggaggctgcagtgagccgagatcgcgccactacactccagcctgggcgacagagc

SEQ ID NO: 144458 - DNA, 597 bp, Homo sapiens
atgtttatttaaattgtataatctggaattgaagaaataaccacagggcgattttgtccaaccactatgtacacagtgaaacaaaacgaagccaaagttccactgattatctgtgccatctataccctgtgggaccacagtgaagatttttgtccctagatatttgggtcaaagtgtttagttacygtctttggttactctccctacttctgaattcttccccttctgaatgcacagtcacctcgggaagattaacagtatacatttcctcaaggtgactgaacttcattcaaggggctcagggtctgtgaactgactctgttcttaactttgtggaggacctatgactttctattttggtagttaaagtcagacttctgttctctagccctagagctcttctgcttatataaatcaagtaagacttcagtaggctgtctatctactttagtcataaagatatgatcagatacctaatgcctaagatacctgcaagtcatactattctaatatgactttgctccactccctattataataaacactccattacagtaactacatctaccttttcttggaagattgacaacacttggt

SEQ ID NO: 144459 - DNA, 370 bp, Homo sapiens
acagacaaaggcacattcagagagttgttgctggctctcctcactgcccctccccaagaacagcagagaccacgcaggagacaagaaggtgacttcactggaaatttcagacattagggarcagggagtcactgctcagaagccaaactggaggtgacagcaacccagcccccatctctgcccaagaccatccacctacaggacattcctaatgggagcaagacagagacagggcacacttcagttgtcacaggcctcttgttcagtggtggcttcccctgtagagactaggctgtcatttgggccttttagcctcccacggatcagctcggcaatggccctccaagtctttttgtttagtttctccagg

SEQ ID NO: 144460 - DNA, 370 bp, Homo sapiens
acagacaaaggcacattcagagagttgttgctggctctcctcactgcccctccccaagaacagcagagaccacgcaggagacaagaaggtgacttcactggaaatttcagacattagggagcagggagtcactgctcagaagccaaactggaggtgacagcaacccagcccccatctctgcccaagaccatccacctacaggacattcctaatgggagcaagacagagacagggcacacttcagttgtcacaggcctcttgttcagtggtggcttcccctgtagagactaggctgtcatttgggccttttagcctcccayggatcagctcggcaatggccctccaagtctttttgtttagtttctccagg

SEQ ID NO: 144461 - DNA, 634 bp, Homo sapiens
atatgtgttaagtgttttataatttttttatttctctatgaaagaagtgttaacatcaaactataataattagatgttaaattttgtttattggtcacatcattataaaactgtttgaacaagcgttcaagatttttcttggaaagttgagaagcttaagtatttccaaggtaattatatgcattattagtatttattgacaaatctcttttttagcatatattgtacaacacagacctatgaacagccttctaaaatgttttcaaatttgacttcygctaaagaaaatttcctataatcactttgttatttttcttccaaggatcttagaaagttgcatatattcatatgagtcctttgttatacttcagtttctttgtattagttaagtgtgtttgttttcacatgaaatcaggggtacacagactaggctgtatggttaaggtcaaatagcaatacgtagtagagcttagaacaggttagctttataattttttcaaatgataacatccgttttgtcaatacaattctcattttttcagatgtgcataataaaggtaaaatttagtattttcgagtacaaattgacattgtcaagaatataaattaatgttatagctagagttttatagca

SEQ ID NO: 144462 - DNA, 543 bp, Homo sapiens
taaacataggtaacttgagtctggacattttattttattctttattctgtgttgttttcctctgtctttgttaaaatctctggagtctgaatgtatgactgggcttctttatgaatacaaatatttagcatgtctagggcagtctttctagtccctgtatttagagagagctacctcactgtggatagagatgctgtcttttaaccccataaagttatttccagttggcaggtaatagtgaactgggtttaascttgtctaaagaacatctgcttcagatcattttaatttatcatgaagacacaactattctatattatctacatcaaataaaatctctgtgcaaaccagaaataaagactcaaatagaacgattttctatttaacagtcaaccatatttgcactcaaactcagccttttataagttagacctctgtgttcaactctctatttggtatgactgtatgcttgtccttgtagaacttgatcgtattgtaaaaataaatctgttaattggaaggttcaagaggggcttcagaaga

SEQ ID NO: 144463 - DNA, 351 bp, Homo sapiens
aaaggctcatcctacatggtggmaggcaagaaaatgtatgcaggggaattgccctttataaaagcatcagatctcatgacagttattcactatcatgagaacagtatgggaaaaacccacatccatgattcaattacctcccactgggtccctcccatgacatgtgatgattatgggagctacaatttgggatgagatttgggtgggaacacagccaaacaatatcaactatcaatattaatttcagatatgttttaagtagtgactcaaatggtatcaatttttaagataaaataaacttaaaactttcaacggaaattatatgacacaaataaaataggtactagtata

SEQ ID NO: 144464 - DNA, 566 bp, Homo sapiens
tctcaatccccgcatcctcactacctatttgtttgagcaccaataaatagcatgggctcccagagcttggggcctttgcagcctccacacttgcgatgggcccctggtcccactttgtctctcaaactgtctttttctcattcctttgaytccaccagacttcgtcgcccccatgacctgttgttgggtgtgatcactccaacattgctggctgcccaacatggggtgacaaagaccctggtgaaggaatgctagagcatgtgaaagcggaggacgcatagtcaaaggacaccagaggatgtctaaaagaagctcggtgggaaagctgagcactcggaagaaccagggtaacaacgggacaaaatgaaagcagacactctgcttacttaaatttcttaaggcatttactatgaagagggggagtgaaagttagtactcagaatttgttatcactctttagtacagtaaagcagttttgtccatggtttcctgaacaaggaactatggagttgtatcaatgggagagaattggaagatattttaaaaaggtgtagaaaaagggagca

SEQ ID NO: 144465 - DNA, 566 bp, Homo sapiens
tctcaatccccgcatcctcactacctatttgtttgagcaccaataaatagcatgggctcccagagcttggggcctttgcagcctccacacttgcgatgggcccctggtcccactttgtctctcaaactgtctttttctcattcctttgattccaccagacttcgtcrcccccatgacctgttgttgggtgtgatcactccaacattgctggctgcccaacatggggtgacaaagaccctggtgaaggaatgctagagcatgtgaaagcggaggacgcatagtcaaaggacaccagaggatgtctaaaagaagctcggtgggaaagctgagcactcggaagaaccagggtaacaacgggacaaaatgaaagcagacactctgcttacttaaatttcttaaggcatttactatgaagagggggagtgaaagttagtactcagaatttgttatcactctttagtacagtaaagcagttttgtccatggtttcctgaacaaggaactatggagttgtatcaatgggagagaattggaagatattttaaaaaggtgtagaaaaagggagca

SEQ ID NO: 144466 - DNA, 566 bp, Homo sapiens
tctcaatccccgcatcctcactacctatttgtttgagcaccaataaatagcatgggctcccagagcttggggcctttgcagcctccacacttgcgatgggcccctggtcccactttgtctctcaaactgtctttttctcattcctttgattccaccagacttcgtcgcccccatgacctgttgttgggtgtgatcactccaacattgctggctgcccaacatggggtgacaaagaccctggtgaaggaatgctagagcatgtgaaagcggaggacgcatagtcaaaggacaccagaggatgtctaaaagaagctcggtgggaaagctgagcactcggaagaaccagggtaacaaygggacaaaatgaaagcagacactctgcttacttaaatttcttaaggcatttactatgaagagggggagtgaaagttagtactcagaatttgttatcactctttagtacagtaaagcagttttgtccatggtttcctgaacaaggaactatggagttgtatcaatgggagagaattggaagatattttaaaaaggtgtagaaaaagggagca

SEQ ID NO: 144467 - DNA, 566 bp, Homo sapiens
tctcaatccccgcatcctcactacctatttgtttgagcaccaataaatagcatgggctcccagagcttggggcctttgcagcctccacacttgcgatgggcccctggtcccactttgtctctcaaactgtctttttctcattcctttgattccaccagacttcgtcgcccccatgacctgttgttgggtgtgatcactccaacattgctggctgcccaacatggggtgacaaagaccctggtgaaggaatgctagagcatgtgaaagcggaggacgcatagtcaaaggacaccagaggatgtctaaaagaagctcggtgggaaagctgagcactcggaagaaccagggtaacaacgggacaaaatgaaagcagacactctgcttacttaaatttcttaaggcatttactatgaagagggggagtgaaagttagtactcagaatttgttatcactctttagtacagtaaagcagttttgtccatggtttcctgaacaaggaactatggagttgtatcaatgggagagaattggaagakattttaaaaaggtgtagaaaaagggagca

SEQ ID NO: 144468 - DNA, 557 bp, Homo sapiens
tgttgaattaaagaagaactcataaaagaaattagaaaataggccagatgcagtggctcacmcctgtaatcccagcactttgggaggctgaggcaggtggatcatgaggtcaggagatccagaccatcctggccaacatggtgaaataccatttctactaaaaatacaaaaattaaccaggtgtggtggcatgcgcctgtagtcccagctactcaggaggctgaggcaggagaattgcttgaacccaggaggtggaggttgcagtaagccgaaatcatgccactgcactccagcctaggcaacagagcaagactccatttcaaaaaaaaaaaagagattagaaaataatttgaacttcatgatcacaaatatatgtcatatcaaaatttggggtgtgcttaagggccacttgacatggtttggctgtgtccccatacaaatatcatactgaattgtagctcccacaattcccacatgttgtgggagggatgcagtgggaggttattgcatcatgggggtgggtctttcctgtgctattctcatgatagtgaataagt

SEQ ID NO: 144469 - DNA, 580 bp, Homo sapiens
agtgggtgacacagttctaaatgactgttgaattaaagaagaactcataaaagaaattagaaaataggccagatgcagtggctcacccctgtaatcccagcactttgggaggctgaggcaggtggatcatgaggtcaggagatccagaccatcctggccaacatggtgaaataccatttctactaaaaatacaaaaattaaccaggtgtggtggcatgcgcctgtagtcccagctactcaggaggctgaggcaggagaattgcttgaacccaggaggtggaggttgcagtaagccgaaatcatgccactgcactccagcctaggcaacagagcaagactccatttcaaaaaaaaaaaagagattagaaaataatttgaacttcatgatcacaaatatatgtcatatcaaaatttggggtgtgcttaagggccacttgacatggtttggctgtgtccccatacaaatatcatactgaattgtagctcccacaattcccacatgttgtgggagggatgcrgtgggaggttattgcatcatgggggtgggtctttcctgtgctattctcatgatagtgaataa

SEQ ID NO: 144470 - DNA, 398 bp, Homo sapiens
atctttactttacacacacacacagtcacactcacattcacttatgcatgcgtacacacaaaagaacaaaaaaagtaagtatatgtggtgttggatatgttaattagtttgactgtagtgaatatttcataatgtacatgtatttcaaatcatcaagttttamaccttaattatatacaattttaagttgccaactacacctcatattgaaaaacaatttattgccttgttaagtgtattattccattttcacactgctgataaagacgtacctgagactgggcaatttacaatagaaggagatttaatggaattacagttccacatggttggggaagcttcaaaatcatggtggaaggtgaaaggcacgtctcacagggtggcagacaagagaagag

SEQ ID NO: 144471 - DNA, 331 bp, Homo sapiens
caaaaaaagtaagtatatgtggtgttggatatgttaattagtttgactgtagtgaatatttcataatgtacatgtatttcaaatcatcaagttttaaaccttaattatatacaattttaagttgccaactacacctcatattgaaaaacaatttattgccttgttaagtgtattattccattttcacactgctgataaagacrtacctgagactgggcaatttacaatagaaggagatttaatggaattacagttccacatggttggggaagcttcaaaatcatggtggaaggtgaaaggcacgtctcacagggtggcagacaagagaaga

SEQ ID NO: 144472 - DNA, 580 bp, Homo sapiens
ctgcatgcacactgcacggatcaggaagtcctttaatatgtgtgacacaatcatagaaaaccggcactatttcagggagggggacaaggtggatggaggccaggtaaaataggagagactgactattaccataaagagactctttaagtcatcaaatacagttataaacttcatasgaataaattcagtttctttttaattacccattgatgggagtttatgataataaattataaaaaataaaaaggtctttgttcattatgattatagtgtgaatatatttacaaccttaatatattgtctttgacatgtcaaagaaaatgttaagtgagaagcatagtgataaggaacacttaaatgcaaaataataataataataataataattccaggtcatgaccaggaatctacaaaaatttaaaagggtaatatgaatgtaaattagagtgggaatttaatttgtcccaggagattcctgatttatgcctccttgtcctggctgaattattaataacacaaattacagtattaaaatgtcccagattggttagatctctataaatatcttgtcagagtagaa

SEQ ID NO: 144473 - DNA, 580 bp, Homo sapiens
ctgcatgcacactgcacggatcaggaagtcctttaatatgtgtgacacaatcatagaaaaccggcactatttcagggagggggacaaggtggatggaggccaggtaaaataggagagactgactattaccataaagagactctttaagtcatcaaatacagttataaacttcatacgaataaattcagtttctttttaattacccattgatgggagtttatgataataaattataaaaaataaaaaggtctttgttcattatgattatagtgtgaatatatttacaaccttratatattgtctttgacatgtcaaagaaaatgttaagtgagaagcatagtgataaggaacacttaaatgcaaaataataataataataataataattccaggtcatgaccaggaatctacaaaaatttaaaagggtaatatgaatgtaaattagagtgggaatttaatttgtcccaggagattcctgatttatgcctccttgtcctggctgaattattaataacacaaattacagtattaaaatgtcccagattggttagatctctataaatatcttgtcagagtagaa

SEQ ID NO: 144474 - DNA, 580 bp, Homo sapiens
ctgcatgcacactgcacggatcaggaagtcctttaatatgtgtgacacaatcatagaaaaccggcactatttcagggagggggacaaggtggatggaggccaggtaaaataggagagactgactattaccataaagagactctttaagtcatcaaatacagttataaacttcatacgaataaattcagtttctttttaattacccattgatgggagtttatgataataaattataaaaaataaaaaggtctttgttcattatgattatagtgtgaatatatttacaaccttaatatattgtctttgacatgtcaaagaaaatgttaagtgagaagcatagtgataaggaacacttaaatgcaaaataataataataataataataattccaggtcatgaccaggaatctacaaaaatttaaaagggtaatatgaatktaaattagagtgggaatttaatttgtcccaggagattcctgatttatgcctccttgtcctggctgaattattaataacacaaattacagtattaaaatgtcccagattggttagatctctataaatatcttgtcagagtagaa

SEQ ID NO: 144475 - DNA, 580 bp, Homo sapiens
ctgcatgcacactgcacggatcaggaagtcctttaatatgtgtgacacaatcatagaaaaccggcactatttcagggagggggacaaggtggatggaggccaggtaaaataggagagactgactattaccataaagagactctttaagtcatcaaatacagttataaacttcatacgaataaattcagtttctttttaattacccattgatgggagtttatgataataaattataaaaaataaaaaggtctttgttcattatgattatagtgtgaatatatttacaaccttaatatattgtctttgacatgtcaaagaaaatgttaagtgagaagcatagtgataaggaacacttaaatgcaaaataataataataataataataattccaggtcatgaccaggaatctacaaaaatttaaaagggtaatatgaatgtaaattagagtgggaatttaatttgtcccaggagattcctgatttatgcctccttgtcctggctgaattattaataacacaarttacagtattaaaatgtcccagattggttagatctctataaatatcttgtcagagtagaa

SEQ ID NO: 144476 - DNA, 477 bp, Homo sapiens
atataatttttttccatgatgtattttagtagtaccacttcaaataaccatttttggtttagaatgcaatgtatagtgtaccacattcaggcagaaatatttatttaagcagaattctctaagttcttactcgtatttgatctgaaaatcaaaatattggttscaagcatgtttcatcacctttatataaccagaagtatccttattacctagaagtattcttgaatgcagagaacacataatagtatttatatgaatatttatattaagtaagagaaattcaggttttgattcttaaatttctacccactatgcttttgtggaaaaaaaaacttgaaaggtggtagctaaaataaatctctatagtgacccattcttgtttcattttctatccttaagatgctcttttatcaaaatctatacctagatctgagatgcctctttcttgtttcattccttgtttttatatttttaggc

SEQ ID NO: 144477 - DNA, 477 bp, Homo sapiens
atataatttttttccatgatgtattttagtagtaccacttcaaataaccatttttggtttagaatgcaatgtatagtgtaccacattcaggcagaaatatttatttaagcagaattctctaagttcttactcgtatttgatctgaaaatcaaaatattggttccaagcatgtttcatcacctttatataaccagaagtatccttattacctagaagtattcttgaatgcagagaacacataatagtatttatatgaatatttatattaagtaaragaaattcaggttttgattcttaaatttctacccactatgcttttgtggaaaaaaaaacttgaaaggtggtagctaaaataaatctctatagtgacccattcttgtttcattttctatccttaagatgctcttttatcaaaatctatacctagatctgagatgcctctttcttgtttcattccttgtttttatatttttaggc

SEQ ID NO: 144478 - DNA, 533 bp, Homo sapiens
ggcgccataattcctgtacaacaaaacaaaccgtgagccaatcaaacatcttttctttataaattacccagtctcagatatttctttacggtaatgcaatgactgcctaacacaccatctaaaactcagcctctttgtttcttgacctccagatcctaataatttttattttctctccactacccatttacgtttaagaaagcactaaacatcacaattaaaagtttaaatgctataccaatgaactcaagtatctactagagtcttcttagctgatcaataggatgcatattattcatattcttattcagtgtacgtaagaaattcgttacgtgagtttgaaggtatgacaagtaaactttttgattctttataaaggctcatgcatctggaaagagctgatcccggaagcttgattggctgatttacacagagctaatggagcacacttatgagtaatgaataatggtgggtgcaagcttggagaccartgcttccaccatgctcaatggctgcatgagacagggagcagg

SEQ ID NO: 144479 - DNA, 247 bp, Homo sapiens
caagtccaaaccattgttagggcaatggtatatttaaaacacatcccaaaacactgttgtctaagcagtgaaatggttctgtatgttttagctcaaaacggagtagaattatcttctaaccaattattgattaataatactagttcacactactagtacttaactgcaattttgaaatccttaaagctctgaaarctcaaagctgtttataaattcggcaccaaaactcatcagccagcaaagcctg

SEQ ID NO: 144480 - DNA, 646 bp, Homo sapiens
ggtcatggatcctgttatgcctggaacacactcagcctcctggttcctccatcaaaaatgtatctggtttctgatctacctgattccagggagcagagtgtaccacggcccacacccacatcctttcaacatgatctccgggcttcttccttttcttgcctccaaggtgagtgccactcaatttagtggccgggaacttgagcctatgttgcttttgttgggagggcacaaaggttatgtgtgaccctccaccctgattttaatccaattgaaagaaacatacttttaatccaactgaaaaaacacactgagtatcatacattctacctctacttcttttcctgaagcattttcgatgattaaaagtttgcagtaggcatttgaatttgcaaggttttctcaatcatttactgttttggagtcaagaacatgatcgtccccttgcyaagccctgagtttttggatgtcctgtgcttcttttttcttaggcttgcacactggtcaattcttccctaagctcccctctgtctttaataccttaccaaacacagccgacagcaatcaacaccaccactactgctgcgtgtattgactgctagagctacaaatccactcaattcctcttcagttattgcaggggaggatt

SEQ ID NO: 144481 - DNA, 581 bp, Homo sapiens
ctatcttttctttaaaaagttaaactataaactaaattcttcccatagttaccttaatatacatgtagagataagtaaaagcaatgaacctaaaagacatcactgcgtgcaggggggttaggagaaaaagttactcacgctaggcctccttttcattgttacaatagctttacctgcctacggatggttttttttttttttccatctgaatgtgtttgtgaaattgcaacaactattgttgtacatgtccctttatcaggggttaagaatactttccacaaaaagcacatacaaatatattaatagaaccattttggttctctatgaattccagagcaagaagtgagatggaaggatgctttgaagagcaaggatgatttcaggagggagtaagtggccagaaagcwttcaggtacaataattggatgggattatgtttttccaaaccaagtaataaaaatgcaggttaacactagcttatataaagccatctgcattgaaaggtgtattagtctgtttttgcactgctataaagatactacctgagactgggtaatttataaaggaaagaggtttaattg

SEQ ID NO: 144482 - DNA, 581 bp, Homo sapiens
ctatcttttctttaaaaagttaaactataaactaaattcttcccatagttaccttaatatacatgtagagataagtaaaagcaatgaacctaaaagacatcactgcgtgcaggggggttaggagaaaaagttactcacgctaggcctccttttcattgttacaatagctttacctgcctacggatggttttttttttttttccatctgaatgtgtttgtgaaattgcaacaactattgttgtacatgtccctttatcaggggttaagaatactttccacaaaaagcacatacaaatatattaatagaaccattttggttctctatgaattccagagcaagaagtgagatggaaggatgctttgaagagcaaggatgatttcaggagggagtaagtggccagaaagctttcaggtacaataattggatgggattatgtttttccaaaccaagtaataaaaatgcaggttaacactagcttatataaagccatctgcattgaaaggtgtattagtctgtttttgcactgctataaagatactacctgagactgggtaatttrtaaaggaaagaggtttaattg

SEQ ID NO: 144483 - DNA, 566 bp, Homo sapiens
ggaatttttgagtgtcagcgtgccactcaaagggtggcgggaggggcacctagcagtcagtgcagcaaggcagacaggacccgcatgccagcaccctgcctgtctgatgacactgattccgaaaggtaagtgcataatttcctgtggctgctgtacacattataaccaactggatggcttcaaacaacacatatttattctctcacagttcaggaggtcgtaagtccaaaatcaaggtggtgtcagggttggctccttctggaggctctgcaggacaatcagttccatgcctctttgctggcatccgctggctgctggcagtccttggacacccctggctgtcgacgtggcattcttacctctgtctctgttactgtgttcacacagccttctctgtgtgtctctcaaacctccgtatccttttacaaagacaccacaggatttagaatgtactctaaatccaagatgatttcatcttgarataaatacatcttaaataattacatctgcaaggctctattccaataaagtcacattttgaggttctgggaaaacatgaacttgcg

SEQ ID NO: 144484 - DNA, 436 bp, Homo sapiens
ggttgaaagtggagagctaggctggggaaggagtgggggctgggacacacacagacctggaatctgtgatttactagtcctgtgatcttgggtgtgttccttgatctctttgagctttcttctcctcatttgcrcaaggggttaataaatctcccatggagagttgtcctggggatctagtgaagcaatgctctggggatacatatttgtaagtctctatctctatttagaggactcgccatcccctcctctatctaaatcactcttgacttctctccatttacaaaatctgttttaaatgtcagagagcctgagacttatgaggaccatcagagtaatagtgacccagtctttgtagatgggaccaatgttgatcaagctttttcacaaatttgtttcatcccactcttccaagcatcctaggaagagatcattc

SEQ ID NO: 144485 - DNA, 428 bp, Homo sapiens
ttgaaagtggagagctaggctggggaaggagtgggggctgggacacacacagacctggaatctgtgatttactagtcctgtgatcttgggtgtgttccttgatctctttgagctttcttctcctcatttgcgcaaggggttaataaatctcccatggagagttgtcctggggatctagtgaagcaatgctctggggatacatatttgtaagtctctatctctatttagaggactcgccatcccytcctctatctaaatcactcttgacttctctccatttacaaaatctgttttaaatgtcagagagcctgagacttatgaggaccatcagagtaatagtgacccagtctttgtagatgggaccaatgttgatcaagctttttcacaaatttgtttcatcccactcttccaagcatcctaggaagaga

SEQ ID NO: 144486 - DNA, 590 bp, Homo sapiens
aagcaccctggccttgccaacagtggagagtgccccagggccaaccccgatgaatctctgycagatgaggtgcagaaggggatggggcaaaggaagcagatactcccccacgtgacttccccacaggagccacttaaccagaggaagacagtgatatggtttggctgtgtcccacccaaatctcatcttgaactgtagttctcgtaatccccatgtgctgtgggagcaacacggtgggaggtaattgaatcacgggggtggttacctccatgctgttctggtgatagtgagtgagttctcacgagatctgatggttttataagggacttttccccttttgctcagcacttttccttgctgccgctatgtgaagaaggatgtgtttgcttccccttcctccatgattataagtttcctgaggcctgcccagccctgcagaactgtgagtcagttaaactttctttataaattacccagtctcagatatgtctttactggcaatgtgagaacggactaatacagatgggcagagaaaggtctccgtgccagcatctaacctggtgatcaaggatggaaagaagagtggggcc

SEQ ID NO: 144487 - DNA, 590 bp, Homo sapiens
aagcaccctggccttgccaacagtggagagtgccccagggccaaccccgatgaatctctgccagatgaggygcagaaggggatggggcaaaggaagcagatactcccccacgtgacttccccacaggagccacttaaccagaggaagacagtgatatggtttggctgtgtcccacccaaatctcatcttgaactgtagttctcgtaatccccatgtgctgtgggagcaacacggtgggaggtaattgaatcacgggggtggttacctccatgctgttctggtgatagtgagtgagttctcacgagatctgatggttttataagggacttttccccttttgctcagcacttttccttgctgccgctatgtgaagaaggatgtgtttgcttccccttcctccatgattataagtttcctgaggcctgcccagccctgcagaactgtgagtcagttaaactttctttataaattacccagtctcagatatgtctttactggcaatgtgagaacggactaatacagatgggcagagaaaggtctccgtgccagcatctaacctggtgatcaaggatggaaagaagagtggggcc

SEQ ID NO: 144488 - DNA, 473 bp, Homo sapiens
ccttgcctggcctccattatccagagtctgcgctcctatggcctcacttatctggatcctaggaatgaaagtagagggaacacatcaggaccccagacagccagaatcaatgtcacaaagcccacaggctttacttgctggatatcagccacagcctattttattttaaggcaaattgtaacaaagttcagttgtttggtttcctaacccagagcaaaattgcaggttctgctgttaaacactaaaaggaagaragggaataataaatcaaaaggatcaagtcacaaaggggccagggaagagaaacacgagaggctgccactttataggatcatcagaaacagctgagggcagacacagaaaagttaggaaatgaaacgacatatggtttgcggccattactctgctctaaccttgtagaactctgtggaattctgtcataataaaacagttcatttcatctgaattgggga

SEQ ID NO: 144489 - DNA, 556 bp, Homo sapiens
gaaagacagctaagaaccaagcagctggagggggctctgggtgcaagaactactgtgtagccaggtggtctcttcagggctcagttctcacagcaaacaagccccagccaatttctgaccttgaacccctcagtttgatgttcaaatgttcaagagaatctaattggtctggtctgggccctgttcccagttttggatgttggatgcattcagagtggtggtggaaatgggagacggtgggtccctaaaggaacatcaaggtcctattactaggagaagtgggaagggatgccaggcaggtagaagcacatatgtccatcggaaggcctcagacaggacacaggcacagtgagaaaccagagaacattcccacggagcaagaacacttctgaatgtaactacagtcctgtctgttgaatgttacaagcccagattgataagcaaatttccctggggtcagctggtgctaaccccacatggcaggatggagcaaggctgatggatgttgtttatggaaacwgaccacgtggtaatcttgcagccacactccagctat

SEQ ID NO: 144490 - DNA, 559 bp, Homo sapiens
gcctatatttaaggtgattagagaacaggtgagcattttaaaatgcctctgatgagtagctttggcatcctgattgctttattttaaaaattcaatttagtagatatgaatatttaaatgtgattgatatatcctttacatttttataatagtgtagagtttacaaagttcatttatatacattatcttacttcatatttattaataataaaatagggaggccaagaatgaaaatgagggtctgagaggtttcatgattcaccaaattcacaccacttatcattggaactggagcccaggtcattaaacgatctgtctgttgcatagtagcacctcctatgtattgcatattaaatatatctctgactttccatgccataatctttgaggtgttgttagttatgttactaaagaagaaaatagataaatattctaataccaccatagttgtagggaaaattaagatataamctcactataggggttcagaccatgtcccttgattagtccagcagactaagttagttaagggagattatattatccagttgttattgac

SEQ ID NO: 144491 - DNA, 538 bp, Homo sapiens
tatgtaaaagtcatatatactacatttctctgactttcatttgaactcaagttcatgagaagtatggtgaagttctattgagagatgtagaagatatgtctaaactaaattataaaaatatctgactctggtttgatgcttggggagctcagtaaaccagagttttacacagagcacatacaaatgtgagaattggggatgtcatatctagctggagtcatggaaagccagtttggagataaaaccaacatagagaagaatggagaagtcagggaattgcagataaatggcactacagccctgtgataaacatgcttaaacttcctctaccttgaaatgtgtcagttacacaaagtgatatatcgtctttataggttatggtttaagactatttgtgtcatttttttctgttccttgcaactagatacaatcttatacatgcctaacagaggttctggaaagcagactatgtagaaagaaaactatgactacaattttawttttaactgtatcataaaatttttaggaaaaaataagt

SEQ ID NO: 144492 - DNA, 580 bp, Homo sapiens
aaagcttcatattctgacttaaatatctttctttaattagttaccacttttctttcttcctctgataaggagtaaccaccttctgatgaaagcatgcataaagctgacacactgatgaaggtcaagaccttcaatggtcttttattagttttttgacaaccgctcttstgatgcaattaaaaaccttattccacatcctcaaactatctgggagcaacttatctataatggaggatgaggtttctttcattctagaaagattaagtgcaacataatcacaagtaaaataattgaaacaacaacaaaaccaccaccatgtggagagcctactgatggtgtgccctgcccaaggtgttagaaatctgcttggtaaggcacccacttctcccccacatatatcagagaatattgcagataactacacttatctctagcagtgttattgcatatattagtgttaatagaggagaaacttcatataaaatgcctaatttataaataagttggtaaattttctagcgtttattataggctaagtggtcactggaaacttctaaaatactcacaatgtagaatctga

SEQ ID NO: 144493 - DNA, 580 bp, Homo sapiens
aaagcttcatattctgacttaaatatctttctttaattagttaccacttttctttcttcctctgataaggagtaaccaccttctgatgaaagcatgcataaagctgacacactgatgaaggtcaagaccttcaatggtcttttattagttttttgacaaccgctcttgtgatgcaattaaaaaccttattccacatcctcaaactatctgggagcaacttatctataatggaggatgaggtttctttcattctagraagattaagtgcaacataatcacaagtaaaataattgaaacaacaacaaaaccaccaccatgtggagagcctactgatggtgtgccctgcccaaggtgttagaaatctgcttggtaaggcacccacttctcccccacatatatcagagaatattgcagataactacacttatctctagcagtgttattgcatatattagtgttaatagaggagaaacttcatataaaatgcctaatttataaataagttggtaaattttctagcgtttattataggctaagtggtcactggaaacttctaaaatactcacaatgtagaatctga

SEQ ID NO: 144494 - DNA, 612 bp, Homo sapiens
atggggagcaaagccactagacaaccatctgaagattagaaacagaagactgtcacccagatagcaattttgaagctataaacagaacaattcaccacaagatagcaatcaggagactgtaaatcaaatggtacacaggagacatgtgaatgaatattggaatrctgctcttgtaggttacccgtaggttttcaaaagacaaatacccatcttgcaaaatatttgacctgtttctacttacttatctttccaagacaagtagagagctctaaaaaaataatataatcagttttctgcctcttttagaaacagaagaacaaagcttccaggcattaaagacttatcccattagctgcccactgactcctattgcaagaggcagatacatagcacaaagtatcctgatcagaacttaatgcctcaattcagttatcttaagcatcatcttttctatatcatctttgttcatgtatttagggatttatacaatcaccctgctattacttagtatggaactatcatatttgtgtggatttatagccatcacgacaacaacattaagataatagtagacactgattggatgcttgccgcatgctggctttctgttaa

SEQ ID NO: 144495 - DNA, 561 bp, Homo sapiens
tcaaactttgtttttagtcactacatagtaaaatgttaagttggcatacaagaccaaatgtccatgaattccgtatctcactattttttatgcacacacacgaaaaaatcartatgagatttcacctcttaaataagcattttctgttttaaaaaatatgttttaaaaaaggagatgaggtaggattcactttaaaaaaaatgcctttccacagctattaaagacttctatgtacaaaatcattgatgaaaatattccctcagatggtatatgcagggaggtgtgcagggaggtacagggagcacagatatcacaggtagatatgacgggagtcagatctagcttctttccctcctgcttcatcagaggctggttcctctttaggtttagtgactctgttttctgcagacccatcttgctaagccacttctgcctcttttccttttgcctcactttccctgtagtttgcactttttctgctgcctttttcactcatctacccttgggctctccctttattgacccttcagctcacttaaactttctcttgggttgaatgac

SEQ ID NO: 144496 - DNA, 487 bp, Homo sapiens
gtcttttcccagcaataatgtatgaatgtggtgctcatactcccaagactttccaaaagagctatattttaaagcagtttaattttttaaataaaagcaatttattcatatctgtaaaataatttttccacttttttggacattataaaataatgtcacaaatcaataagtttatgcatcacaatattgatctggacattggtaaaggcaagatacagtatatgaatggttaaaacagtgccctccagagccacactattcaggttcaaattctggcccagcaacttacatgggaaggtcacttaatttctccatatttcagtttgatcctctttaaaatggcataatctataatgcctacctcataagtgtgttataagaatcaaatgagcaatgtaggtaaagtgccctatacatgttacatattwaaaaaactcttataataaagatcttcatagttggtattaactatttgttggttgaatta

SEQ ID NO: 144497 - DNA, 590 bp, Homo sapiens
ttgctcctggttatgaattgtggattttaaaaaaaaacaacagcatttatgatggctaataaaaagagaaagccaggagaaaaatctccctccccaacccataccaccctattagtttctttttcttttttacattaagctataaacagaattttgggggaaaattatataaaaatccaatttgtatcacagagaggcatgggtagattccaagatatgactctatgataaagtaaaaaaaggaccttctacttctcccagaggcaagcgagagaagtcattaaccttttccttgccaaaaaattgtgtacttgataatcagtagtaaatttcaatcaccacacactgaaaagaatttgtgagttcrttttcatatatccagcccactataagcataaagtttcacaagctgattttgttatatcattgcaggaagctgaaatataaggtgttgaattgcttctctcttataaagaactacagctcatgtgttgtttttataatggctcattgatcctaagtcaatcttaatatgtagtttcagtactcttaaattataatttgacaaatagctttctaaaaattatgta

SEQ ID NO: 144498 - DNA, 489 bp, Homo sapiens
tttaaacactcttataggtcctgaactacttcagtgaagaaaatgaacagtgtccactactcaatagaggtctcattctagaaggagaaatagaacaaaaaataaaaagaggaaattatatatgaaatctccagagtggagaaagttagacattttagtcaaggtcatgaggaaacacctcagtgagaagggatggaatgtggctgtccaggcaaggagcttcttrggcaatagaaaatcagtcctctcctgaactgcatctgactgataatctcatatattgacttaaaaatgtaagtattaaatatgtttttaaatgtaaatatgaaatatatttttactcttctagaagttgcattttattcttaacatttgtttgccattttgtagtcttttgtgccttactcatgtttttatcacctttttaatgttataaatatattaaacatatttattttatatgtttatgttgctttatatcattgaatg

SEQ ID NO: 144499 - DNA, 553 bp, Homo sapiens
ttaaagattttaagtcacatgagcttgaaaaagcatttgactagttttttctctttagtagtatctgatttaagcacttttatttattttttaagccaactagttagagctcttttatgtactttttaatagtgaaacattgtgtacacaacacataaatatgtagatgtaggcctgycaataaaagtgtatcttatagattaataaagaccttctttttttccttcttttttttttctttttttttttttgagatggagtctcactttctcacccaggctgcagtacaatgcttgcaatcttggctcatggcaacctccacctcctgggttcaaacaattctcttatctcagcctcctgagtagctgggattacaggcatgtgccactacacctgggtaatttttgtatttttaatagagttggggtttcaccatgttggccgggctggtctcaaactcctgacctcaagcaatccacccacctcggcctcccaaagtgctgtcattacagacatgagccaccatgcccagccttcttctttttaagtctta

SEQ ID NO: 144500 - DNA, 553 bp, Homo sapiens
ttaaagattttaagtcacatgagcttgaaaaagcatttgactagttttttctctttagtagtatctgatttaagcacttttatttattttttaagccaactagttagagctcttttatgtactttttaatagtgaaacattgtgtacacaacacataaatatgtagatgtaggcctgtcaataaaagtgtatcttatagattaataaakaccttctttttttccttcttttttttttctttttttttttttgagatggagtctcactttctcacccaggctgcagtacaatgcttgcaatcttggctcatggcaacctccacctcctgggttcaaacaattctcttatctcagcctcctgagtagctgggattacaggcatgtgccactacacctgggtaatttttgtatttttaatagagttggggtttcaccatgttggccgggctggtctcaaactcctgacctcaagcaatccacccacctcggcctcccaaagtgctgtcattacagacatgagccaccatgcccagccttcttctttttaagtctta

SEQ ID NO: 144501 - DNA, 568 bp, Homo sapiens
ttttacaatccatcttcaagttcaccagctctcctctgtcataatcattcagctcttaatctcatatactaaactattttatttcagactttttttagttagcaaattacaattggattctttaaaaattttttctatttgttgaggtttcctatttttaaattaattacagtcatttttacctttactcataataactcataaatagtccatttcagataattcaaaattcagggtaatcttagggtcaggcccagtttattgtcttttctcttgataatcatccatacatttgtctctcatgttgcataaatttggtttgtattataaacatcgaaatactatgttgtggggactctagattcacagagttatccaaaaagtgatgatgctattttactttagtgcacaataagtttggttagactcaaagtgctcattgcctcttgtctgtggtggtaagagctccaatattatttaaaatagcttccaatctacctgatacccatgtagttcaaggactagggtagagtayatgcacaaagtttctggttttctttaactgggt

SEQ ID NO: 144502 - DNA, 478 bp, Homo sapiens
gtctggtttgtcttccagggtttttatagttttgggttttacatttaagtcttgaatccatcttgagttaatttttgtatacgatataaggaaggggtccagttttagtcttctgcatatggctagtcagttctcccagcaccatgtattaaatacggaaacctatccccattgcttgtttttgkcaaggtttgtcaaagatcagatagttgtaggtgtgcaggcttatttctgagttctctgtcctgtacatgggaaaaaaacttttttattgctctattagtctgttctcacactgctaataaagacatacctgagatagggtaatttataaaggaaagaggtttaacggacttgcagttccacatggctggggaggcctgacaatcatggcagagggtgaagaggaagcaagatatgtcttacatagttgctggcaagagtacatgtgcaggggaactctcatttataaagccat

SEQ ID NO: 144503 - DNA, 620 bp, Homo sapiens
aaaacatgatttaacaaaatatcctattccacctggaaatggagttctaaaacaatattgtcagacttaggggtggccctaaagttcagtggagaaaatagtcctcccattgaggaaacctacaagaagttcattttgtttttccttttatttctgggaaagaaaaatatctagatacgtagatctatagcaattaattagaagctgatggcttggcaagatggttggatgtttggaagaaacaaggttactgacaacaaggyctggggaagtggcatgtaaataggcttctcagaatgacagcagagtcaaagcaatttgtgttgttagaatttttgtctctaatgtacactctgaagatacttagtactcagtactcagaataggtgcactactctctgtatgtcagtgagcttctttccccagtcatgccagtgttttcttagagggacatattggcaggtgtggtggtgccatatgagttccactatctgcttaaccgaggttggtctggttaacacaactgctgacttttcagtctccaatatacagaccaatattgagaccctaaaaaggtgtgatactccagggcaacagccattcacctaacagaaaattga

SEQ ID NO: 144504 - DNA, 617 bp, Homo sapiens
attgctatatttatttcaaaataaaattattgaacatgaatacacatttccagtagttatagtacattttaaactgataatatttaaataatgctttcagtgtcaawctttctttcagtttcaaattgtaattaataattaaaaaaatttttcagttcatttttctaggaggtgttcttatgcacacagcagaaaggagagagtgttggcatttgtttagtgcctaatatgatcaacaggttttattttgtgttgtgactatgaggaattgcctgaggagttgtctttaaaataatttgtacgttcatgggtaaataattatataatatattaacaaacaacttctagctacaagagaagggaaataacctgtgtgttattttcactatccatggcctactatatgccagaaagactgttaggtgcttaacacattagtccttggatcacaccctcaggtggatacctccctcaccagtccctgtcccacaagttgtttttgatcatgtcacacaactggtgagtgataaaatgaaattttatccattccacaccaaagaatgtctcagttagggattgcattcagctgcaagggagagcccaattaatttgtgaat

SEQ ID NO: 144505 - DNA, 600 bp, Homo sapiens
ttggggcttataaaaaatctctgagatattttattacctattaactcattatgtcattaaaactatgattataacctttattagcttttatcccctttttcactgtcacttttgcattttggctcaccgagaagtgaaaaaaaattcaagaaaaacacataaaataataaattgatatactgtgatgcttaattagaagaaataagcattaatatgattctaataaataaaattcttactaatgaaatttaagttgattatttaaaaactaaaatttcctacattgatttacttatttaacagatatttactgagtacttcatttgtccagttactaaatattggtgcgaaatggtcaccagtagcttatttatttacttatttttatttcttgatgaagtttcactcttgttgtccaagctggagtgcaatggcatgatctcagtttactgcaacctcagcctcctgggttcaagcgattctcctgccttggcctcctgagtaactaggattacaggtgcgtgccacccactcagctaattcttgtattttttgtagagatgggatttcaccaygttgatcaggctggtcttgaactcc

SEQ ID NO: 144506 - DNA, 569 bp, Homo sapiens
atttcattttcctcaattccttactgttttttatctatatattaaatatatatatatatattttcctaggccctctcccacttggacaagtacctatctctcaaaccctgcttctgggaagccttatataagatgcactgtcttcacatttgctgccctgtagcataagtaaatacagttatttaacttaggataatgccatatgatttgccaaaattgtattttgaattttgttctagacagaagaaattttatrtcattaagatgagtgaaattcctattaaaaaggataaaagcgcaactcgatttctgacttcataaagattgaatattgtttcttactcattctacttggaaatagtcaagaaactctctgaaagtagaatatttcaaaaaattctgagaaaattaagatatttagaaacaaaaaggatagctgttttgaaaaataagtaaagtaagggaaatcaaaaaatttttcttgactactttgactttactgggtatatcacatacattaatagattctgatagcacttcagttttttgttgttttctccgtgttgcag

SEQ ID NO: 144507 - DNA, 453 bp, Homo sapiens
gttgcgtcttcaaagagcacaaacgatcttgtgaaggcgattgtttggataccaagaaagataaagatctctttctatctttagtgatagcacccataggtgaatagaaggaaggaggctccgtcttagccgggaggaaactcacttgttcaacatcactggaacttctaagttgaagtggaaaagggagcatgtgattttcaacacttmcaacacttccaagagtagcatgtttccatagtcatgcataatctcagtctgatttgaggctaagaaaatattaaaagtttccaactcttaaaaagtataggagtcccacggcctggacacatagtaaaacacttaataaacactttagatttttttttccaaggaagcagattacgtcttgaaacaccctttactctcaggccagtatggtacggtcagtaagaggtatcaagtaaaattaat

SEQ ID NO: 144508 - DNA, 466 bp, Homo sapiens
gagtggggaaattggaaaaaatggaacccaaattaacattaattttagaactccacacccatttttgagaaacagaactcacaccagtatcccctccttttaacttatgatgttttaactcaggtacttgttcaaggacttatccaattcccctagtccagttgtgccttccatgtttaactacatccagctttgctgggactggccaggtagatgacagagtagacctcaaacagccctcaactggaaggaacacccatagcccagttcctgacaatgcagcaataaaggcccaatgctgccagatcttacaaaattttcaaaagaaaaaaaaagtcataatcttatgtgaaaatactgattttwaaatattagttgatttttttaaagtatatctgaaggtcacaactagcccagagttctccaagtttcatcctctgttttaaattctgctagaacacttggg

SEQ ID NO: 144509 - DNA, 568 bp, Homo sapiens
aaattaaatgtctcattcaccattctattcacagtaactgacaaatgatattcaatagaataatcttcccaatcagattgtaatgctcttgacttaaagactgtctcatattcattctcaacatgtgcaamattttcattcatgatactaaagataaaaattcattaatttaactaggtagcctactaatttaaaatattctactcatgtcaataaatcaaccaatcaactagataaacatttaagatatcttaaatgcaatttaacaaaatttctttctgataatcataataatgccctttaaataccaaacaacatttttgaggaatgttgtatctacataaatgcagttgtaatttaatagtgtgttattgtaataatagctattgtaaaatttaaatggaatttagtgataacaaataaataaatcttgttttactatataaacacattgttcacagctatcttgaacctaaattccttccagtaccctaaagaattaaaataatgattcagacttctgaaattagattggaacttaggttggtgcttactttgactaactgta

SEQ ID NO: 144510 - DNA, 583 bp, Homo sapiens
gttatccaaccccttcagcttcccaaagtgctgggattacaggcgtgagccaccgtaccccgcctaattttgtaataaaattctgacgcagtctttcagtcttttattatttccttaaaataaaatgactgggttaaagggtaaaattattttagaattgctgatatgtatagacagactgttctccagaaagaatacaactaagtcaatgtcaacttagctaaagccctatcggaaaataaaaacatcgatatactttcctcacttaaccattaggcaccttactaattttcaggttatatttggcactgaactgaacaatacaaaaatactttgagcagyatgtcactcaccttctaactttcaatgatatatgatccaagataaaatcattcaatctatgattcccacactcaagaaatgtttgcttgcccatcattttcaaaaagaaaaataataaggatgggtgctaaaagtacaaatttggctgggcgcagtggctcatgcctgtaatcccaacccttagggaggcagaggtgggcggatcacctgaggagtttgagaccagcctggccaacatggt

SEQ ID NO: 144511 - DNA, 549 bp, Homo sapiens
ttttttaattgttgttctttgaaaggaaagatgaatgagcatatatcatttggggcagaattctccagaaactataatctacaaccactgcatttatctgaaattctgtcttttattttaaaggtcgtggctgtataattctgattttagcaagcagaaatatttttcaaaaatgcagcctaattttattgttcacctttaaatattcatttcacatttgatgggctaaaaatttgaaattcaaattacttccttttcctttattcttagcaaaatcatctaaaagtaagagttgcagttcatttataataaaatacaaataaaataaacttcataattcaacaagaactaattaaaattatttgagagccagtacttactgccaagtaaactgtaaattctagttctattattyggattctttataacttattttaggaaaattattcatctattaagtcattgaatcacagagctaaaagggacattaaagttcacctcctaaaaactctcctattaccaatgacgtctggagagtttcctcagcag

SEQ ID NO: 144512 - DNA, 424 bp, Homo sapiens
cggtatcagtggggtactgctactctcccacccctgccctggcatctctgctccctggccccagactccgtcactggtagagctgggcagacccagcagttccaggatagcgggtggaagtgagcaggaaggaagagctgggtttgtggagaagccttccccttatggggcaggctatagggaaagggaaggcagccaccaaagctccagagcctgatggcgcatctattgggctgggacttcccagcatacaccattagggaagtgtagggttggctgggagagaacgagggagccaggggctctgggatrgaggtggggagagaaggggaggtgagggtatcagcaagagggaagttgggctttcctttccagcagttgggctcccccatcctgcatcttcctccttgatttagaagaattc

SEQ ID NO: 144513 - DNA, 406 bp, Homo sapiens
caacagaattgtttccaactgttatacaagggacctctgtattgagagaacctgagtcacagggcatttattgtgtttagttattggttagacccatgattggcctgtgctggactcaagcctttgttacagcttgtactacracaagattccactccttatatcaggaaaccttaaaacactgagtagcacattgcagagcttcccttgcttctccaggcgaattgccctctcctggcagctgaaacccagaggcacaagagtcttttgtgcctatcattggacaacatatccccatccttggagccacctgactagttgctctacctttgcagatttctaggtgtttctcaggtttcctgtaatctcagggtgccaactgtgatgcctccccctccccaagtct

SEQ ID NO: 144514 - DNA, 389 bp, Homo sapiens
caacagaattgtttccaactgttatacaagggacctctgtattgagagaacctgagtcacagggcatttattgtgtttagttattggttagacccatgattggcctgtgctggactcaagcctttgttacagcttgtactacaacaagattccactccttatatcaggaaaccttaaaacactgagtagcacattgcagagcttcccttgcttctccaggcgaattgccctctcctggcagctgaaacccagaggcacaagagtcttttgtgcctatcattggacaacatatccccatccttggagccacctgactagttgctctacctttgcagatttctaggtgtttytcaggtttcctgtaatctcagggtgccaactgtgatgcc

SEQ ID NO: 144515 - DNA, 349 bp, Homo sapiens
acacatcatttaataatttacagtccatgtggaagactgtrtcatgtattatttatgggagcaaatgctcagggccacaacaatgcaggctatatttctcaagctcgcattattaccttttaggtcactcagaataaaaagttctgagttgccacttaggaaagtcactatctataccagtcatcagaagaaacatcactgattaattgcaatctctggaatgaggtcaataacaaaactagcagggtcgggggcacaggggagacagccaattatctcactagaaatactcttgagttattcaccttgtctttaagtagggctgagcctgagtccctacgaaaagaag

SEQ ID NO: 144516 - DNA, 349 bp, Homo sapiens
acacatcatttaataatttacagtccatgtggaagactgtatcatgtattatttatgggagcaaatgctcagggccacaacaatgcaggctatatttctcaagctygcattattaccttttaggtcactcagaataaaaagttctgagttgccacttaggaaagtcactatctataccagtcatcagaagaaacatcactgattaattgcaatctctggaatgaggtcaataacaaaactagcagggtcgggggcacaggggagacagccaattatctcactagaaatactcttgagttattcaccttgtctttaagtagggctgagcctgagtccctacgaaaagaag

SEQ ID NO: 144517 - DNA, 349 bp, Homo sapiens
acacatcatttaataatttacagtccatgtggaagactgtatcatgtattatttatgggagcaaatgctcagggccacaacaatgcaggctatatttctcaagctcgcattattaccttttaggtcactcagaataaaaagttctgagttgccacttaggaaagtcactrtctataccagtcatcagaagaaacatcactgattaattgcaatctctggaatgaggtcaataacaaaactagcagggtcgggggcacaggggagacagccaattatctcactagaaatactcttgagttattcaccttgtctttaagtagggctgagcctgagtccctacgaaaagaag

SEQ ID NO: 144518 - DNA, 349 bp, Homo sapiens
acacatcatttaataatttacagtccatgtggaagactgtatcatgtattatttatgggagcaaatgctcagggccacaacaatgcaggctatatttctcaagctcgcattattaccttttaggtcactcagaataaaaagttctgagttgccacttaggaaagtcactatctataccagtcatcagaagaaacatcactgattaattgcaatctctggaatgaggtcaataacaaaactagcagggtcgggggcasaggggagacagccaattatctcactagaaatactcttgagttattcaccttgtctttaagtagggctgagcctgagtccctacgaaaagaag

SEQ ID NO: 144519 - DNA, 516 bp, Homo sapiens
gtaacaggtgcttgctgctgattggatggggcagagatgaactcatagcaggtggaagctgttcttctttaggctgaatgcttctgggtggggctacaggagcagggttggtggtccaggtggagccatgagcgtcaaacatgcaaaaaacccagaaagatgtctcaaaaggctgatctacaatagtggtgctatttgcaggagtaattagggaaattgcatatcttgtaacctcaggagtaatggctgacaatcktttatgtctgcaccttagcaggactctggttcctctctccccctaggctgatggcctcccattagctttacaaaagcagtcaaatttggggcaagacctattatcatttatactgtagcctaaatgtcttctaaagttagctgggtccaatagcccaggaataattaaaagaaaggcaagatgggggtatgtgggtggtagctcagcttactgttataatttttctcactgatataatatttgcaaagccagttttaata

SEQ ID NO: 144520 - DNA, 578 bp, Homo sapiens
gatatattattacataagtatatatatatatatatatatatatatatacacgcacagagagagagagagaaagagagacagtaagagagagagacacacagtaagaaagaaagaaagagagaaagtttctctatagttcttatattatacatrtattccatcttgacagggatctatctattgtgtatacaaaaatccagtttgggggctatgtgtatgtgtattttagttcacaacataaaaccatgtgaaacttgacccaattgtatttagttgctcttcattctcttgaaaaattgatgtcattatcagtaaaaaatattcctcttaatccctggtaatatttttgctatgaaattacatttatctgatattgaaataggattccatttatctttttattaatattgatgtggtatatcatttcccatctttttagaataaaataattataacacatttaaagtgaatttctggaagaaagcaaattttaatgtcattttttcatctatttttagcttttcacttgagtgtttgaaggtagctactgagagagagaatttaaatatactatgttg

SEQ ID NO: 144521 - DNA, 578 bp, Homo sapiens
gatatattattacataagtatatatatatatatatatatatatatatacacgcacagagagagagagagaaagagagacagtaagagagagagacacacagtaagaaagaaagaaagagagaaagtttctctatagttcttatattatacatgtattccatcttgacagggatctatctattgtgtatacaaaaatccagtttgggggctatgtgtatgtgtattttagttcacaacataaaamcatgtgaaacttgacccaattgtatttagttgctcttcattctcttgaaaaattgatgtcattatcagtaaaaaatattcctcttaatccctggtaatatttttgctatgaaattacatttatctgatattgaaataggattccatttatctttttattaatattgatgtggtatatcatttcccatctttttagaataaaataattataacacatttaaagtgaatttctggaagaaagcaaattttaatgtcattttttcatctatttttagcttttcacttgagtgtttgaaggtagctactgagagagagaatttaaatatactatgttg

SEQ ID NO: 144522 - DNA, 578 bp, Homo sapiens
gatatattattacataagtatatatatatatatatatatatatatatacacgcacagagagagagagagaaagagagacagtaagagagagagacacacagtaagaaagaaagaaagagagaaagtttctctatagttcttatattatacatgtattccatcttgacagggatctatctattgtgtatacaaaaatccagtttgggggctatgtgtatgtgtattttagttcacaacataaaaccatgtgaaacttgacccaattgtatttagttgctcttcattctcttgaaaaattgatgtcattatcagtaaaaaatattcctcttaatccctggtaatatttttgctatgaaattacatttatctgatattkaaataggattccatttatctttttattaatattgatgtggtatatcatttcccatctttttagaataaaataattataacacatttaaagtgaatttctggaagaaagcaaattttaatgtcattttttcatctatttttagcttttcacttgagtgtttgaaggtagctactgagagagagaatttaaatatactatgttg

SEQ ID NO: 144523 - DNA, 517 bp, Homo sapiens
tcaatgattcccaactactcaaataagagatgaattttataaatttcacctacaatatattctgaccacaatttacctctctaatataatccacctctggttcctaagtagataacttttcctacttaaaccaatctataccttttaccttaaagttatttttcctttgctgcttgtcccccattttgctcaacacgactgtaacatttatccttaaattcctagcttaatatcacttccccatgggaagacacaaccccttcaaatatattcatttctttcaactcctactgtaatttagaccacaccgtgcatcatttgagcattatttttctcctatattttaatttttaaaaaatctttaagtaatttgtaatttccttgaagtcattaaacattctttttccctattttccaaagcacaggaaacactaaaccaggaaaacacaggaaaaaamcaataagtaaatttcccaaacatatttgctttttgatttattgattaattgattattga

SEQ ID NO: 144524 - DNA, 518 bp, Homo sapiens
gcctgtaatcccagcactttgggaggccgaggcaggctgatcacctgaggtaaggagttcgacaccagcctggccaacatggtgaagccctgtctctagaaaaatacgaaaattagctgggcgtgttggtgtgctcctgcaatcccagctactcgggaggctgaggcaggagaatcgcttgatcccaggaggcagaggttgcagtgagctgagaccaagccattgcactccagcatgggcaacaagattgaaactccatctcaaaaaaataaataaatatataaaactttaggtwtaataaaatgttattaattgaactttcctttcacataggaaaagttgttagcatttgctaagttgtacctttccttgatatttccacattaatatttctcttttctaggagtctctacgagaatatatggcatgttcaactcctttacactgttttttaaacatgtgttgcatgtatgttctgctttcaatattaaaaaaacaaactgttttggagcaggagt

SEQ ID NO: 144525 - DNA, 518 bp, Homo sapiens
gcctgtaatcccagcactttgggaggccgaggcaggctgatcacctgaggtaaggagttcgacaccagcctggccaacatggtgaagccctgtctctagaaaaatacgaaaattagctgggcgtgttggtgtgctcctgcaatcccagctactcgggaggctgaggcaggagaatcgcttgatcccaggaggcagaggttgcagtgagctgagaccaagccattgcactccagcatgggcaacaagattgaaactccatctcaaaaaaataaataaatatataaaactttaggtayaataaaatgttattaattgaactttcctttcacataggaaaagttgttagcatttgctaagttgtacctttccttgatatttccacattaatatttctcttttctaggagtctctacgagaatatatggcatgttcaactcctttacactgttttttaaacatgtgttgcatgtatgttctgctttcaatattaaaaaaacaaactgttttggagcaggagt

SEQ ID NO: 144526 - DNA, 510 bp, Homo sapiens
caacttgattggattgaaggatgcaaagtattgttcctgggtatttctgtgagggtgttaccaaaagagattaacatttgagtcagtggactggaagaggcagacccaccctcaatctgggtgggcaccatctaatcatctgccagtatggctagaatagagcaggcagaagaaagtggaataaagagacttgctgagtcttctggccttcatctatctcccatgctggatgcttcctgccctcgaacatcagactccaagtgcttcagcttttggactcagacttataccagtgatttgccagggtgaaggctgcayagtcagcttccctccttttgaggttctgggattcagactggcttccttgctccttagcttgcagagtgccccggggattcaccttgtgattgtgtgagtcaatactccttaataaactccctttcatatatacataaaccctattagttctgtccctttagaaaaccctaatacacatacttattatttact

SEQ ID NO: 144527 - DNA, 510 bp, Homo sapiens
caacttgattggattgaaggatgcaaagtattgttcctgggtatttctgtgagggtgttaccaaaagagattaacatttgagtcagtggactggaagaggcagacccaccctcaatctgggtgggcaccatctaatcatctgccagtatggctagaatagagcaggcagaagaaagtggaataaagagacttgctgagtcttctggccttcatctatctcccatgctggatgcttcctgccctcgaacatcagactccaagtgcttcagcttttggactcagacttataccagtgatttgccagggtgaaggctgcatagtcagcttccctccttttgaggttctgggattcagactggcttcctwgctccttagcttgcagagtgccccggggattcaccttgtgattgtgtgagtcaatactccttaataaactccctttcatatatacataaaccctattagttctgtccctttagaaaaccctaatacacatacttattatttact

SEQ ID NO: 144528 - DNA, 510 bp, Homo sapiens
caacttgattggattgaaggatgcaaagtattgttcctgggtatttctgtgagggtgttaccaaaagagattaacatttgagtcagtggactggaagaggcagacccaccctcaatctgggtgggcaccatctaatcatctgccagtatggctagaatagagcaggcagaagaaagtggaataaagagacttgctgagtcttctggccttcatctatctcccatgctggatgcttcctgccctcgaacatcagactccaagtgcttcagcttttggactcagacttataccagtgatttgccagggtgaaggctgcatagtcagcttccctccttttgaggttctgggattcagactggcttccttgctccttagcytgcagagtgccccggggattcaccttgtgattgtgtgagtcaatactccttaataaactccctttcatatatacataaaccctattagttctgtccctttagaaaaccctaatacacatacttattatttact

SEQ ID NO: 144529 - DNA, 270 bp, Homo sapiens
ataatatttcaaataaccaactttcccacttccatttccaaacataaccccatctgaaagttaaacatatccttcctttatagacaatcgaacctctattatgttccattagttaaaattcaaaagtataattgcctttatgtatagttcattgtggacaaagtatcrtcttgtatatatatgccaatgaatggatcctgagacatctaatgaattcttgccattttgaatatagaagccatatattatgttatttttttacctttataa

SEQ ID NO: 144530 - DNA, 517 bp, Homo sapiens
aaatggtgtgccatgaattgaagactataatatttcaaataaccaactttcccacttccatttccaaacataaccccatctgaaagttaaacatatccttcctttatagacaatcgaacctctattatgttccattagttaaaattcaaaagtataattgcctttatgtatagttcattgtggacaaagtatcgtcttgwatatatatgccaatgaatggatcctgagacatctaatgaattcttgccattttgaatatagaagccatatattatgttatttttttacctttataagagcatgacatttataaaaacatttaatctagtatgaaaacataaggtagaatgctggtccattcctttgttataattgtttgctttgaatctcagattaagttaattacatttttcatttcatagtgtactactgttaatacatgaattactcttctatttactattaacattttctctttcttaccgtgttctttcaatctaccctccataagactact

SEQ ID NO: 144531 - DNA, 517 bp, Homo sapiens
aaatggtgtgccatgaattgaagactataatatttcaaataaccaactttcccacttccatttccaaacataaccccatctgaaagttaaacatatccttcctttatagacaatcgaacctctattatgttccattagttaaaattcaaaagtataattgcctttatgtatagttcattgtggacaaagtatcgtcttgtatatatatgccaatgaatggatcctgagayatctaatgaattcttgccattttgaatatagaagccatatattatgttatttttttacctttataagagcatgacatttataaaaacatttaatctagtatgaaaacataaggtagaatgctggtccattcctttgttataattgtttgctttgaatctcagattaagttaattacatttttcatttcatagtgtactactgttaatacatgaattactcttctatttactattaacattttctctttcttaccgtgttctttcaatctaccctccataagactact

SEQ ID NO: 144532 - DNA, 517 bp, Homo sapiens
aaatggtgtgccatgaattgaagactataatatttcaaataaccaactttcccacttccatttccaaacataaccccatctgaaagttaaacatatccttcctttatagacaatcgaacctctattatgttccattagttaaaattcaaaagtataattgcctttatgtatagttcattgtggacaaagtatcgtcttgtatatatatgccaatgaatggatcctgagacatctaatgaattcttgccattttgaatatagaagccatatattatgttatttttttacctttataagagcatgacatttataaaaacatttaatctagtatgaaaacataagktagaatgctggtccattcctttgttataattgtttgctttgaatctcagattaagttaattacatttttcatttcatagtgtactactgttaatacatgaattactcttctatttactattaacattttctctttcttaccgtgttctttcaatctaccctccataagactact

SEQ ID NO: 144533 - DNA, 312 bp, Homo sapiens
acatcattcaatttatgtaagatgtacattgcttccatccataaaggcaggacaactccaagtgrggaggaggcatccaaggtagataagagacaaaagtggcattattttaagtttctgattactcttcccaaaggaagtaatcagatatccatttatctcagtgagcagaggaatgactttgaatagaatgggaggcaggtttgccctaagaagttcccagcttgacttttccctttagcttagtgattttggggtcccaagatttatttttgtttcacataggtaataataaccaataattggttgttt

SEQ ID NO: 144534 - DNA, 312 bp, Homo sapiens
acatcattcaatttatgtaagatgtacattgcttccatccataaaggcaggacaactccaagtgaggaggaggcatccaaggtagataagagacamaagtggcattattttaagtttctgattactcttcccaaaggaagtaatcagatatccatttatctcagtgagcagaggaatgactttgaatagaatgggaggcaggtttgccctaagaagttcccagcttgacttttccctttagcttagtgattttggggtcccaagatttatttttgtttcacataggtaataataaccaataattggttgttt

SEQ ID NO: 144535 - DNA, 312 bp, Homo sapiens
acatcattcaatttatgtaagatgtacattgcttccatccataaaggcaggacaactccaagtgaggaggaggcatccaaggtagataagagacaaaagtggcattattttaagtttctgattactcttcccaaaggaagtaatcagatatscatttatctcagtgagcagaggaatgactttgaatagaatgggaggcaggtttgccctaagaagttcccagcttgacttttccctttagcttagtgattttggggtcccaagatttatttttgtttcacataggtaataataaccaataattggttgttt

SEQ ID NO: 144536 - DNA, 312 bp, Homo sapiens
acatcattcaatttatgtaagatgtacattgcttccatccataaaggcaggacaactccaagtgaggaggaggcatccaaggtagataagagacaaaagtggcattattttaagtttctgattactcttcccaaaggaagtaatcagatatccatttatctcagtgagcagaggaatgactttgaatagaatgggaggcaggtttgccctaagaagttcccagcttgacttttccctttagcttagtgattttggggtcccaagatttatttttstttcacataggtaataataaccaataattggttgttt

SEQ ID NO: 144537 - DNA, 503 bp, Homo sapiens
ccaataaggtctgctctactctctctggctcaagggagggaattggaaattagatagccacaccatgctggacagggtgtaggacatggtggccagaaatgcaatgaaatttcctactgtttttaaaatggcttttaaaaaaatgagtatttgctttgttgctgtagacctctgattgtttcccaggcctccaataaggtaatttaaaccattttattttcttttgttttgcttttgatgtcttaatggggtcttggatcttccttgtctgttgttttgctgacaacrttacttattaggttgattttaaactaatgatgataataatgatcttgacatttatggagtgcaaatcccatgtttaattgccttacatgcattatctcgtttaatcttcacaatattattagtgtattttattttaaaaatctctctgaagcatggagaatttaagtaaacatcccaagtacacttatatagtaagtgataaaaccacaaatctt

SEQ ID NO: 144538 - DNA, 503 bp, Homo sapiens
ccaataaggtctgctctactctctctggctcaagggagggaattggaaattagatagccacaccatgctggacagggtgtaggacatggtggccagaaatgcaatgaaatttcctactgtttttaaaatggcttttaaaaaaatgagtatttgctttgttgctgtagacctctgattgtttcccaggcctccaataaggtaatttaaaccattttattttcttttgttttgcttttgatgtcttaatggggtcttggatcttccttgtctgttgttttgctgacaacattacttattaggttgattttaaactaatgatgataataatgatcttgacatttatggagtgcaaatcccatgtttaattgccttacatgcattatctcgtttaatcttcacaatattattagtgtattttattttaaaaatctytctgaagcatggagaatttaagtaaacatcccaagtacacttatatagtaagtgataaaaccacaaatctt

SEQ ID NO: 144539 - DNA, 536 bp, Homo sapiens
tatgtcactgctgcctctgtccacccctgccaccctaggaccagggagggtatgggtaggccaggcaactttacatgctcccaatggtgaaacccagtgccactkctatggcaggaaactgcaagcaggccatatgccccgcagctgccagttttcactaccccagccatggggtcctaactttcccagtaagaagctcacagtacagccatcctgctctttcctgaccatttcacctgcagcccagcctctaaggcctgtgatcttccctctgacttccactgcctgagcattctccctgccctaacctgactgttctgtcagtgacccagagaccaatccatccctcctaatcacagcagctcctaaattctgggctgatataatcctggtctagccccttctggactcatatatgccatccagtgggccacttaggggcctgaaagtcaagaagttatctaacctggtccacgactcctggcacctgactacccaccaggaggtcaggccagcccaactagcggataccatca

SEQ ID NO: 144540 - DNA, 536 bp, Homo sapiens
tatgtcactgctgcctctgtccacccctgccaccctaggaccagggagggtatgggtaggccaggcaactttacatgctcccaatggtgaaacccagtgccacttctatggcaggaaactgcaagcaggccatatgccccgcagctgccagttttcactrccccagccatggggtcctaactttcccagtaagaagctcacagtacagccatcctgctctttcctgaccatttcacctgcagcccagcctctaaggcctgtgatcttccctctgacttccactgcctgagcattctccctgccctaacctgactgttctgtcagtgacccagagaccaatccatccctcctaatcacagcagctcctaaattctgggctgatataatcctggtctagccccttctggactcatatatgccatccagtgggccacttaggggcctgaaagtcaagaagttatctaacctggtccacgactcctggcacctgactacccaccaggaggtcaggccagcccaactagcggataccatca

SEQ ID NO: 144541 - DNA, 536 bp, Homo sapiens
tatgtcactgctgcctctgtccacccctgccaccctaggaccagggagggtatgggtaggccaggcaactttacatgctcccaatggtgaaacccagtgccacttctatggcaggaaactgcaagcaggccatatgccccgcagctgccagttttcactaccccagccatggggtcctaactttcccagtaagaagctcacagtacagccatcctgctctttcctgaccatttcacctgcagcccagcctctaaggcctgtgatcttccctctgacttccactgcctgagcattctccctgccctaacctgactgttctgtcagtgacccagagaccaatccatccctcytaatcacagcagctcctaaattctgggctgatataatcctggtctagccccttctggactcatatatgccatccagtgggccacttaggggcctgaaagtcaagaagttatctaacctggtccacgactcctggcacctgactacccaccaggaggtcaggccagcccaactagcggataccatca

SEQ ID NO: 144542 - DNA, 536 bp, Homo sapiens
tatgtcactgctgcctctgtccacccctgccaccctaggaccagggagggtatgggtaggccaggcaactttacatgctcccaatggtgaaacccagtgccacttctatggcaggaaactgcaagcaggccatatgccccgcagctgccagttttcactaccccagccatggggtcctaactttcccagtaagaagctcacagtacagccatcctgctctttcctgaccatttcacctgcagcccagcctctaaggcctgtgatcttccctctgacttccactgcctgagcattctccctgccctaacctgactgttctgtcagtgacccagagaccaatccatccctcctaatcacagcagctcctaaattctgggctgatataatcctggtctagccccttctggactcatatatgccatccagtgggccacttaggggcctgaaagtcaagaagttatctaacctggtccacsactcctggcacctgactacccaccaggaggtcaggccagcccaactagcggataccatca

SEQ ID NO: 144543 - DNA, 327 bp, Homo sapiens
ctgaatcaaatgttaatctcttttggcaacacccacacagacacatccagggctaatamtttgtatccctcaatccaatcaagttgacactcagtattaaccatcacattgctcatgaatggtttaccactatccccttgttgctattcttgtgaaagcgactttttatgagaactgattgtttaaaagggtgtggcagtttctgcctctctctcttgctcctgctctggccatgtaagatgtgcctgcttcccctttaccttctgtcatgattgaaagtttcctgaggcctctccagaagccaagcagatgtcagcatcatgctac

SEQ ID NO: 144544 - DNA, 431 bp, Homo sapiens
aaaaccagtgctcagaacaagtttatagcattaaacacctacatcaaaaagctaaaaatattttaaattaacaatgtagggttgcatcataagaaaatagaaaaggaagaacaaataaaaccaaaagctaggggaaaaaaagaattaacagagaatgcagcagaattaaatttaaaaaaacyatccaaataatctgtttctttgaaacagtatatctggttctttgaaagaaaaaacaatattgactgactgcgagctagactaaactaggaaaaaaagagaaaagaaatgataaaggtgacattacaattgatatcacaaaaatacaatagatcatcagagaatcctgtgaacatctctacatgcacaaactggaaaacctagaagaaatggatattttgctggaaacatacaacctccaagactgaacc

SEQ ID NO: 144545 - DNA, 555 bp, Homo sapiens
aatttaaaaaaaccatccaaataatctgtttctttgaaacagtatatctggttctttgaaagaaaaaacaatattgactgactgcgagctagactaaactaggaaaaaaagagaaaagaaatgataaaggtgacattacaattgatatcacaaaaatacaatagatcatcagagaatcctgtgaacatctctacatgcacaaactggaaaacctagaagaaatggatattttgctggaaacatacaacctccaagactgaaccaggaagaaagaaactctgaacagatccatattgagcaatgaaatcaaattagtaataaaaaatcttccagcaaataaaaggccaggaccagacagactcacagccagtttttaaccaaatgtatatagaaaagctgataccaaaataatttcaacaaaattgaagaggagggatccctctataacttattctacaaatccagtatcacctttgtaccaaaaccaggcagtgatacaacaacaacagcmaaaaggatagcacagaccaatacccttgatgaacacagatgcaa

SEQ ID NO: 144546 - DNA, 223 bp, Homo sapiens
cagcaacgaacaagaacaacctgaattttaaaatacaataccaattacgttagcatgctccaaaatgaaatgtttaggtataattctaacaaaatgtgtacaagatttttacaggaaatttacaaactstgttgaacaaaatcagtgaagaacttagtatatttggaaatatttgctgttcatagataggagacaaatattttaaagatgtgagttcttccca

SEQ ID NO: 144547 - DNA, 511 bp, Homo sapiens
tttgtactttacagttttgtgttggcgctggaagaagtgaagacttttggggctttggtgatgtcatgaatgtattttgtaggtaagaaagacaaaaattcaggggcatcaggggaaaatgctatgatttgaatgtttgtattctccgcaaaattmatatgttcaaatcctaaccctcaagtttatagtagtaggaggtatgggggtaaaactgtcatgaatgagactagtgcccttataaaagagatccaagagagattccccatcacttctggtatgtgagtttacagtgaaaaggtggccacctatgagaaagtgggccctcattagacaccaaatctgctgatgccttcatcttggacattacccccctctccaaaattgtaagaaacaaatttctgtcatatatgagctacccaccagcctaaaaagactaagagagttaacatttgttttttcatgggatacctgggtttgtaccttattctctaaatacacttgttagtaattt

SEQ ID NO: 144548 - DNA, 511 bp, Homo sapiens
tttgtactttacagttttgtgttggcgctggaagaagtgaagacttttggggctttggtgatgtcatgaatgtattttgtaggtaagaaagacaaaaattcaggggcatcaggggaaaatgctatgatttgaatgtttgtattctccgcaaaattcatatgttcaaatcctaaccctcaagtttatagtagtaggaggtatgggggtaaaactgtcatgaatgagactagtgcccttataaaagagatccaagagagattccccatcacttctggtatgtgagtttacagtgaaaaggtggccacctatgagaaagtgggccctcattagacaccaaatctgctgatgccttcatcttggacaktacccccctctccaaaattgtaagaaacaaatttctgtcatatatgagctacccaccagcctaaaaagactaagagagttaacatttgttttttcatgggatacctgggtttgtaccttattctctaaatacacttgttagtaattt

SEQ ID NO: 144549 - DNA, 511 bp, Homo sapiens
tttgtactttacagttttgtgttggcgctggaagaagtgaagacttttggggctttggtgatgtcatgaatgtattttgtaggtaagaaagacaaaaattcaggggcatcaggggaaaatgctatgatttgaatgtttgtattctccgcaaaattcatatgttcaaatcctaaccctcaagtttatagtagtaggaggtatgggggtaaaactgtcatgaatgagactagtgcccttataaaagagatccaagagagattccccatcacttctggtatgtgagtttacagtgaaaaggtggccacctatgagaaagtgggccctcattagacaccaaatctgctgatgccttcatcttggacatyacccccctctccaaaattgtaagaaacaaatttctgtcatatatgagctacccaccagcctaaaaagactaagagagttaacatttgttttttcatgggatacctgggtttgtaccttattctctaaatacacttgttagtaattt

SEQ ID NO: 144550 - DNA, 291 bp, Homo sapiens
caatcagcatgcacttccttccctctgaggtttataaaagccctgggctcagccagagcagggcagaggatggccagaggatgaagagagcagaggacggrcagacaaccagctgcagaaaggagtaccctctctgctgatggctggagatgatgggatgaccagctgcagagagctgcagagacaacctgccatgaaagaggtgctaccttctctgttgagagcttcagagacctgcagcaatgtcaaaatgacttgctgcagagaggagtcaccctctctagagcctcc

SEQ ID NO: 144551 - DNA, 291 bp, Homo sapiens
caatcagcatgcacttccttccctctgaggtttataaaagccctgggctcagccagagcagggcagaggatggccagaggatgaagagagcagaggacgggcagacaaccagctgcagaraggagtaccctctctgctgatggctggagatgatgggatgaccagctgcagagagctgcagagacaacctgccatgaaagaggtgctaccttctctgttgagagcttcagagacctgcagcaatgtcaaaatgacttgctgcagagaggagtcaccctctctagagcctcc

SEQ ID NO: 144552 - DNA, 449 bp, Homo sapiens
ctcacaaacatctctgacctacscttacttccatttattgcttcatgcataactattcattagtttctcacaaaactaatctctgcttgcagagattgttctgtttgagatttttctaaacccctaagtaataataaattcatgtaatagagaagttgaaactttctgtgatagtcttaatgacttctttatggtaaaagatatttaaagaaattatcctgagaagaaacatttgctaaagaatttatctttcttttcaatttacctcccaaatgcaaaagcatgataggatgaaatagtaatacgtgtgaaaaaaatatttttccaaataagaaaagcccctctggcattctttctgcagggaataatagacccaactatagctttatattgatgaaatacagttgggtggtcaatgcattttcacagtggaatgagactcaataggt

SEQ ID NO: 144553 - DNA, 449 bp, Homo sapiens
ctcacaaacatctctgacctacgcttacttccatttattgcttcatgcataactattcattagtttctcacaaaactaatctctgcttgcagagattgttctgtttgagatttttctaaacccctaagtaayaataaattcatgtaatagagaagttgaaactttctgtgatagtcttaatgacttctttatggtaaaagatatttaaagaaattatcctgagaagaaacatttgctaaagaatttatctttcttttcaatttacctcccaaatgcaaaagcatgataggatgaaatagtaatacgtgtgaaaaaaatatttttccaaataagaaaagcccctctggcattctttctgcagggaataatagacccaactatagctttatattgatgaaatacagttgggtggtcaatgcattttcacagtggaatgagactcaataggt

SEQ ID NO: 144554 - DNA, 439 bp, Homo sapiens
tctctgacctacgcttacttccatttattgcttcatgcataactattcattagtttctcacaaaactaatctctgcttgcagagattgttctgtttgagatttttctaaacccctaagtaataataaattcatgtaatagagaagttgaaactttctgtgatagtcttaatgacttctttatgrtaaaagatatttaaagaaattatcctgagaagaaacatttgctaaagaatttatctttcttttcaatttacctcccaaatgcaaaagcatgataggatgaaatagtaatacgtgtgaaaaaaatatttttccaaataagaaaagcccctctggcattctttctgcagggaataatagacccaactatagctttatattgatgaaatacagttgggtggtcaatgcattttcacagtggaatgagactcaataggt

SEQ ID NO: 144555 - DNA, 429 bp, Homo sapiens
cctacgcttacttccatttattgcttcatgcataactattcattagtttctcacaaaactaatctctgcttgcagagattgttctgtttgagatttttctaaacccctaagtaataataaattcatgtaatagagaagttgaaactttctgtgatagtcttaatgacttctttatggtaaaagatatttaaagaaattatcctgagaagaaacatttgctaaagaatttatctttcttttcaatttacctcccaaatgcaaaagcatgataggatgaaatagtaatacgtgtgaaaaaaatatttttccaaataagaaaagcccctytggcattctttctgcagggaataatagacccaactatagctttatattgatgaaatacagttgggtggtcaatgcattttcacagtggaatgagactcaata

SEQ ID NO: 144556 - DNA, 439 bp, Homo sapiens
tctctgacctacgcttacttccatttattgcttcatgcataactattcattagtttctcacaaaactaatctctgcttgcagagattgttctgtttgagatttttctaaacccctaagtaataataaattcatgtaatagagaagttgaaactttctgtgatagtcttaatgacttctttatggtaaaagatatttaaagaaattatcctgagaagaaacatttgctaaagaatttatctttcttttcaatttacctcccaaatgcaaaagcatgataggatgaaatagtaatacgtgtgaaaaaaatatttttccaaataagaaaagcccctctggcattctttctgcagggaataatagacccaactatagctttatattgatgaaayacagttgggtggtcaatgcattttcacagtggaatgagactcaataggt

SEQ ID NO: 144557 - DNA, 572 bp, Homo sapiens
ggaaagttttaataacataactagaaatagctacttccaaatttaaaatatgattagaacttttattgtcacttaaattggacagaagatgaaagtttagacagataatctttcacttaaagttaaatgcagtgagaaggaaacagcctattaaataacatttaacgtatctacagctarcatctatacataatggtgaaagaatgaatgctattgtaacatcagggtcaagacaaatatctgctttcactacgcctattagtatcacattggggatcttcgcctgcaaaataagacaaaatgaagaattgacatacagagtgtatactaagaaacaaaactgcttctattttcagaggacatgtccatcaacatacaaaatgtacaaaaagttcttagatctcataagtgaacttagcaaggtctcgtaatacaaggaaaatatacagaaatcaatcatattattatattacagcaattaatacttggaatttgaagtttttaaatgacatcagttacagtagtactaaatataattaagtacttgggtataaatttaacataacatgtga

SEQ ID NO: 144558 - DNA, 572 bp, Homo sapiens
ggaaagttttaataacataactagaaatagctacttccaaatttaaaatatgattagaacttttattgtcacttaaattggacagaagatgaaagtttagacagataatctttcacttaaagttaaatgcagtgagaaggaaacagcctattaaataacatttaacgtatctacagctaacatctatacataatggtgaaagaatgaatgctattgtaacatcagggtcaagacaaatatctgctttcactacgcctattagtatcacattggggatcttcrcctgcaaaataagacaaaatgaagaattgacatacagagtgtatactaagaaacaaaactgcttctattttcagaggacatgtccatcaacatacaaaatgtacaaaaagttcttagatctcataagtgaacttagcaaggtctcgtaatacaaggaaaatatacagaaatcaatcatattattatattacagcaattaatacttggaatttgaagtttttaaatgacatcagttacagtagtactaaatataattaagtacttgggtataaatttaacataacatgtga

SEQ ID NO: 144559 - DNA, 572 bp, Homo sapiens
ggaaagttttaataacataactagaaatagctacttccaaatttaaaatatgattagaacttttattgtcacttaaattggacagaagatgaaagtttagacagataatctttcacttaaagttaaatgcagtgagaaggaaacagcctattaaataacatttaacgtatctacagctaacatctatacataatggtgaaagaatgaatgctattgtaacatcagggtcaagacaaatatctgctttcactacgcctattagtatcacattggggatcttcgcctgcaaaataagacaaaatgaagaattgacatacagagtgtatactaagaaacaaaactgcytctattttcagaggacatgtccatcaacatacaaaatgtacaaaaagttcttagatctcataagtgaacttagcaaggtctcgtaatacaaggaaaatatacagaaatcaatcatattattatattacagcaattaatacttggaatttgaagtttttaaatgacatcagttacagtagtactaaatataattaagtacttgggtataaatttaacataacatgtga

SEQ ID NO: 144560 - DNA, 455 bp, Homo sapiens
atagagaacccatatacaaatccacagacctacagtgaactaatttttgacaaaggcactaagaatattcattggggagaagacagtattttcaatacatgttgctgagaaaactgggtatccatatgcagaaaaataaaacttgacccccatctctcaccttaaaaaatcmaaggaaaatgtattaaagccataaatctaagaccccaaattatgaaactactaaaattatacacattgggaaaactctccaaaacattgatttgggcaaaaatgtcttgagcaataccccacaagcacaggcaaacaaaacaaatatggttaaatgagatcacatcaagttaaaatgcttctgcagggcaaaggaaaccattaacaaagtgatgaaaaaacccacagaatgagagaaaacatctgcaaactacacttctgacagaggattaataacaagaata

SEQ ID NO: 144561 - DNA, 469 bp, Homo sapiens
tacaaatccacagacctacagtgaactaatttttgacaaaggcactaagaatattcattggggagaagacagtattttcaatacatgttgctgagaaaactgggtatccatatgcagaaaaataaaacttgacccccatctctcaccttaaaaaatccaaggaaaatgtattaaagmcataaatctaagaccccaaattatgaaactactaaaattatacacattgggaaaactctccaaaacattgatttgggcaaaaatgtcttgagcaataccccacaagcacaggcaaacaaaacaaatatggttaaatgagatcacatcaagttaaaatgcttctgcagggcaaaggaaaccattaacaaagtgatgaaaaaacccacagaatgagagaaaacatctgcaaactacacttctgacagaggattaataacaagaatatttaaggaggtcaaaaaattacatagga

SEQ ID NO: 144562 - DNA, 171 bp, Homo sapiens
tgtggagctgcaattgggtctgccccrtttgaactgcttggaggctttgcttacactgtgaggggaaaaccacctattcaagccttagtaatggtggctgcccttccctccaccaagctctagttttatctataagcccctgagtggggctgctgcctttctttcagaagt

SEQ ID NO: 144563 - DNA, 171 bp, Homo sapiens
tgtggagctgcaattgggtctgccccatttgaactgcttggaggctttgyttacactgtgaggggaaaaccacctattcaagccttagtaatggtggctgcccttccctccaccaagctctagttttatctataagcccctgagtggggctgctgcctttctttcagaagt

SEQ ID NO: 144564 - DNA, 171 bp, Homo sapiens
tgtggagctgcaattgggtctgccccatttgaactgcttggaggctttgcttacactgtgaggggaaaaccrcctattcaagccttagtaatggtggctgcccttccctccaccaagctctagttttatctataagcccctgagtggggctgctgcctttctttcagaagt

SEQ ID NO: 144565 - DNA, 469 bp, Homo sapiens
tacaaatccacagacctacagtgaactaatttttgacaaaggcactaagaatattcattggggagaagacagtattttcaatacatgttgctgagaaaactgggtatccatatgcagaaaaataaaacttgacccccatctctcaccttaaaaaatccaaggaaaatgtattaaagccataaatctaagaccccaaattatgaaactactaaaattatacacattgggaaaactctccaaaacattgatttgggcaaaaatgtcttgagcaataccccacaagcacaggcraacaaaacaaatatggttaaatgagatcacatcaagttaaaatgcttctgcagggcaaaggaaaccattaacaaagtgatgaaaaaacccacagaatgagagaaaacatctgcaaactacacttctgacagaggattaataacaagaatatttaaggaggtcaaaaaattacatagga

SEQ ID NO: 144566 - DNA, 469 bp, Homo sapiens
tacaaatccacagacctacagtgaactaatttttgacaaaggcactaagaatattcattggggagaagacagtattttcaatacatgttgctgagaaaactgggtatccatatgcagaaaaataaaacttgacccccatctctcaccttaaaaaatccaaggaaaatgtattaaagccataaatctaagaccccaaattatgaaactactaaaattatacacattgggaaaactctccaaaacattgatttgggcaaaaatgtcttgagcaataccccacaagcacaggcaaacaaaacaaatatggttaaatgagatcacatcaagttaaaatgcttctgcagggcaaaggaaaccattaacaragtgatgaaaaaacccacagaatgagagaaaacatctgcaaactacacttctgacagaggattaataacaagaatatttaaggaggtcaaaaaattacatagga

SEQ ID NO: 144567 - DNA, 544 bp, Homo sapiens
tatttatgtttatatgattttcagtttagttgttagttatgcatcttatagcttaaaacatgtgaagattctgaaatggaagcaaagaagtaatttatgtcattaggcatgtaaaaattattcagagaattataactagctagtacacacattgatcaaagaaagaagaagaagaaagaagtttcagatgtcacttataaaatttagggtggatataagaaagtattttatttatgtgtttaatttttgtggatacatagtagrtatatatatttatgggatacatgagatatgatacaggcatacaatgcataataattacaccagagaaaatggaatattcatcaactcaagcatttatcctttgtgttacaaaaaatctaattatactcttagttattttaaaatgtacaattaattttttaccatattcaccgtgttatgctaccaaatactaggacttatttattatttctaactatttttgtatccgttaatcattctcacttatcctccaccctcccactacccttcatagcttcta

SEQ ID NO: 144568 - DNA, 544 bp, Homo sapiens
tatttatgtttatatgattttcagtttagttgttagttatgcatcttatagcttaaaacatgtgaagattctgaaatggaagcaaagaagtaatttatgtcattaggcatgtaaaaattattcagagaattataactagctagtacacacattgatcaaagaaagaagaagaagaaagaagtttcagatgtcacttataaaatttagggtggatataagaaagtattttatttatgtgtttaatttttgtggatacatagtagatatatatatttatgggatacatgagatatgatacaggcatacaatgcataataattacaccagagaaaatggaatattcatcaactcaagcatttatccttygtgttacaaaaaatctaattatactcttagttattttaaaatgtacaattaattttttaccatattcaccgtgttatgctaccaaatactaggacttatttattatttctaactatttttgtatccgttaatcattctcacttatcctccaccctcccactacccttcatagcttcta

SEQ ID NO: 144569 - DNA, 397 bp, Homo sapiens
catggaagcaggaaatcttgccttcattgttggaagcaagtaaaactccagagaaggagatatacagcaaaataaactgtcgatttcaagcaaattttgggagactagaggtcctctggagggagggtagcttccaagcctcagcaaattgtcttataggtttgagccataaagatagctcaagctggtaccaagcccccataagagatttgtcaaaggtcaggaccacctccactcagagttccttccgttggtcaccaaatacaaactgaaaatatgtgagacaggtctcagtcaacttasaaagtttattttgccaaaattaaggatgcatgcccatgatgcagcctcaggaggttgtgaggagaattgccgaaggtgatgagggcacggatgg

SEQ ID NO: 144570 - DNA, 397 bp, Homo sapiens
catggaagcaggaaatcttgccttcattgttggaagcaagtaaaactccagagaaggagatatacagcaaaataaactgtcgatttcaagcaaattttgggagactagaggtcctctggagggagggtagcttccaagcctcagcaaattgtcttataggtttgagccataaagatagctcaagctggtaccaagcccccataagagatttgtcaaaggtcaggaccacctccactcagagttccttccgttggtcaccaaatacaaactgaaaatatgtgagacaggtctcagtcaacttacaaagtttattttgccaaaattaaggatgcatgcccatgatgcagcctcaggaggttgtgakgagaattgccgaaggtgatgagggcacggatgg

SEQ ID NO: 144571 - DNA, 397 bp, Homo sapiens
catggaagcaggaaatcttgccttcattgttggaagcaagtaaaactccagagaaggagatatacagcaaaataaactgtcgatttcaagcaaattttgggagactagaggtcctctggagggagggtagcttccaagcctcagcaaattgtcttataggtttgagccataaagatagctcaagctggtaccaagcccccataagagatttgtcaaaggtcaggaccacctccactcagagttccttccgttggtcaccaaatacaaactgaaaatatgtgagacaggtctcagtcaacttacaaagtttattttgccaaaattaaggatgcatgcccatgatgcagcctcaggaggttgtgaggagaattgccsaaggtgatgagggcacggatgg

SEQ ID NO: 144572 - DNA, 567 bp, Homo sapiens
gcgcaggtggtcggacatgcagcaggactggcaaaacagagtatctgtgtgtcagtgtatgttttattcatctgtcatttgggtcagggtctgtgggcagatgccmgcagctaatgccttcttgtgaggagcaatacctccgttaaaaaggcaattagctactggaaaatgatcagagatgaaatcagaaaatcagaaaatgattttagctgtagctgctttggtgacttttaataacagaactgagctaatagaagaaaaaataaatgagcttgaatacaggctatttgaaaatacatggtcacacgagatgaaagtaaaagtaataaaacaacaatgaaacatgcttataggatctagaaaacaacctcaaaagggcaaacttaagagttatttccttaaagacaggggaaaagaaagagataggggtagaaagtttattcaaaggaataagaacagacaattttgtaaatgtaaagtatcaatatctgaacacaagaaggttatagaacgtcaagcagatttaacccaagaagactacctcaaggcatttaataatcaaactcc

SEQ ID NO: 144573 - DNA, 567 bp, Homo sapiens
gcgcaggtggtcggacatgcagcaggactggcaaaacagagtatctgtgtgtcagtgtatgttttattcatctgtcatttgggtcagggtctgtgggcagatgccagcagctaatgccttcttgtgaggagcaatacctcygttaaaaaggcaattagctactggaaaatgatcagagatgaaatcagaaaatcagaaaatgattttagctgtagctgctttggtgacttttaataacagaactgagctaatagaagaaaaaataaatgagcttgaatacaggctatttgaaaatacatggtcacacgagatgaaagtaaaagtaataaaacaacaatgaaacatgcttataggatctagaaaacaacctcaaaagggcaaacttaagagttatttccttaaagacaggggaaaagaaagagataggggtagaaagtttattcaaaggaataagaacagacaattttgtaaatgtaaagtatcaatatctgaacacaagaaggttatagaacgtcaagcagatttaacccaagaagactacctcaaggcatttaataatcaaactcc

SEQ ID NO: 144574 - DNA, 567 bp, Homo sapiens
gcgcaggtggtcggacatgcagcaggactggcaaaacagagtatctgtgtgtcagtgtatgttttattcatctgtcatttgggtcagggtctgtgggcagatgccagcagctaatgccttcttgtgaggagcaatacctccgttaaaaaggcaattagctactggaaaatgatcagagatgaaatcagaaaatcagaaaatgattttagctgtagctgctttggtgacttttaataacagaactgagctaatagaagaaaaaataaatgagcttgaatacagrctatttgaaaatacatggtcacacgagatgaaagtaaaagtaataaaacaacaatgaaacatgcttataggatctagaaaacaacctcaaaagggcaaacttaagagttatttccttaaagacaggggaaaagaaagagataggggtagaaagtttattcaaaggaataagaacagacaattttgtaaatgtaaagtatcaatatctgaacacaagaaggttatagaacgtcaagcagatttaacccaagaagactacctcaaggcatttaataatcaaactcc

SEQ ID NO: 144575 - DNA, 578 bp, Homo sapiens
tataaaacaactagaaaaataataagaaaatggcaggattaagtccttacttatcaataataacattgtatgtaaatgggctaaactctccaatcaaaagacatacactagcttaatcgatgaaaaaataaaatccattaactgatgcccacaagaaacatgctttacctctaaagacacacagactgaaaataaagggataaaaggagctattccatgccatgaaacccaaatacgagcataattagctatayttatatcagacaaaacagatttcaagacaaaaactacaagaagagacaaagaaggtcactatataatggcaaagaggtcaattcagcaaggggatataacaattttaagtatatatgcatccaacagtagagcacccagatatataaagcaaataatgttaaaacacaagacagtgatataccccaatgcaataatagctgaagacttcaacagctcaccttcagcattgaacacattttccaaacataaaatcaacaaagaaacataaaacaatatgcactgtagatcacatggttctaaaagatagttacagaacatttcat

SEQ ID NO: 144576 - DNA, 578 bp, Homo sapiens
tataaaacaactagaaaaataataagaaaatggcaggattaagtccttacttatcaataataacattgtatgtaaatgggctaaactctccaatcaaaagacatacactagcttaatcgatgaaaaaataaaatccattaactgatgcccacaagaaacatgctttacctctaaagacacacagactgaaaataaagggataaaaggagctattccatgccatgaaacccaaatacgagcataattagctatatttatatcagacaaaacagatttcaagacaaaaactacaagaagagacaaagaaggtcactatataatggcaaagaggtcaattcagcaaggggatataacaattttaagtatatatgcatccaacastagagcacccagatatataaagcaaataatgttaaaacacaagacagtgatataccccaatgcaataatagctgaagacttcaacagctcaccttcagcattgaacacattttccaaacataaaatcaacaaagaaacataaaacaatatgcactgtagatcacatggttctaaaagatagttacagaacatttcat

SEQ ID NO: 144577 - DNA, 533 bp, Homo sapiens
ccagcctggccaatatagtgaaaccccatctctactaaaaatacaaaaattaactggacatggtggtgggtgcctgtaatcccagctactagggaggctgaggcaggagagtctcttgaacccaggaggcagaggctgcagtgaggcaagattgcaccactgcactctrgcttgggtgacagagtgagactccatctcacaaaaataaaagtatgttttttttaaagttaaacaaaattgacaaaccattagcaagagtaactaagaaaaaaagagaagatccaaatgaataaaatcagaaatgaaaaaagttacattacaactgatactgtagaaattgtacagaaattgtacaaaaaatcactactgtctactatgagcaacaatctactaaaaacttggaaaagctaaaagaaattgacacattcctggacacgtacaacctaccaagattaaactaggaagaaatccgaaagctgaacagaccaataaaatgcaatgtgatagaaggcataataaaaatttcccagtaa

SEQ ID NO: 144578 - DNA, 533 bp, Homo sapiens
ccagcctggccaatatagtgaaaccccatctctactaaaaatacaaaaattaactggacatggtggtgggtgcctgtaatcccagctactagggaggctgaggcaggagagtctcttgaacccaggaggcagaggctgcagtgaggcaagattgcaccactgcactctagcttgggtgacagagtgagactccatctcacaaaaataaaagtatgttttttttaaagttaaacaaaattgacaaaccattagcaagagtaactaagaaaaaaagagaagatccaaatgaataaaatcagaaatgaaaaaagttacattacaactgatactgtagaaattgtacagaaattgtacaaaaaatcactactgwctactatgagcaacaatctactaaaaacttggaaaagctaaaagaaattgacacattcctggacacgtacaacctaccaagattaaactaggaagaaatccgaaagctgaacagaccaataaaatgcaatgtgatagaaggcataataaaaatttcccagtaa

SEQ ID NO: 144579 - DNA, 533 bp, Homo sapiens
ccagcctggccaatatagtgaaaccccatctctactaaaaatacaaaaattaactggacatggtggtgggtgcctgtaatcccagctactagggaggctgaggcaggagagtctcttgaacccaggaggcagaggctgcagtgaggcaagattgcaccactgcactctagcttgggtgacagagtgagactccatctcacaaaaataaaagtatgttttttttaaagttaaacaaaattgacaaaccattagcaagagtaactaagaaaaaaagagaagatccaaatgaataaaatcagaaatgaaaaaagttacattacaactgatactgtagaaattgtacagaaattgtacaaaaaatcactactgtctactatgagcaacaatctactaaaaacttggaaaagctaaaagaaattgacacrttcctggacacgtacaacctaccaagattaaactaggaagaaatccgaaagctgaacagaccaataaaatgcaatgtgatagaaggcataataaaaatttcccagtaa

SEQ ID NO: 144580 - DNA, 299 bp, Homo sapiens
aaagacatcttttaagaaactttcatctcagcattgttcttcagttactcaaggttgaattgagcttttatcttgcaaaaatgaggagacaactttctgatctagctgtataatttatttaaaatctcaagaatcatacacatatcaaaacattgcactgatgttgatcyattatgcaaaaaatgcattgtaccccataaatatatacaattatttgtcaataaaaacaaaattttaaaaatcttagaaaccaacttataattgcagagttcttttgcttaaagaaatagcaattaatg

SEQ ID NO: 144581 - DNA, 299 bp, Homo sapiens
aaagacatcttttaagaaactttcatctcagcattgttcttcagttactcaaggttgaattgagcttttatcttgcaaaaatgaggagacaactttctgatctagctgtataatttatttaaaatctcaagaatcatacacatatcaaaacattgcactgatgttgatctattatgcaaaaaatgcattgtaccccataaatatatacaattatttgtcaataaaaacaaaattttaaaaatcttagaaacsaacttataattgcagagttcttttgcttaaagaaatagcaattaatg

SEQ ID NO: 144582 - DNA, 463 bp, Homo sapiens
aatttaagaccacacattaagaagcagagtcagtatgaggctaaaaaagtctgatagagttagagcattagtttttctctcaaggatagttaaatcagctgctgaaaacctttaaaacatctagaaagcaaaactttatattcaaatgcaatgggaaaaacctctgtcattattatgtgtaggatacaactcatttcctcacgttttaaacatgttcctttatttcatgtccccaaaggcttatatatactatgctgattttttagttatcaggaatttaatattagtccttttacattttagctttcacaatatgtttgaggatcactgaattgtatataaaatttagctgcttttctcctgattgaataataaataaaagttacagcagaatatctaacctatgggggcacaaaacaatgagtaatatrttctccacacgcagtatgtgattagaaataat

SEQ ID NO: 144583 - DNA, 356 bp, Homo sapiens
aagagggaggtagctgggacccctaaaggaggcttccatacactgggactcattactggcccccgacaaatcctggggaagggatgagttgaggaggtgtgaagtaaccccctctcaccagggacctctggaatcctggcagcaggakacccacaacccctacagacacttgagatgccagggagagcttcttagaaaggtgtcaggggcaggattccaggctattcagagcccaaacagtttggtacaggaatgtctgcaatggagcaaggccagggatgcccatcccctcaatgctcaacaagcttccctaggagaatttagtcatgggggaactattggacctgatcagagca

SEQ ID NO: 144584 - DNA, 356 bp, Homo sapiens
aagagggaggtagctgggacccctaaaggaggcttccatacactgggactcattactggcccccgacaaatcctggggaagggatgagttgaggaggtgtgaagtaaccccctctcaccagggacctctggaatcctggcagcaggatacccacaaccccyacagacacttgagatgccagggagagcttcttagaaaggtgtcaggggcaggattccaggctattcagagcccaaacagtttggtacaggaatgtctgcaatggagcaaggccagggatgcccatcccctcaatgctcaacaagcttccctaggagaatttagtcatgggggaactattggacctgatcagagca

SEQ ID NO: 144585 - DNA, 593 bp, Homo sapiens
tgttgatttcctgtgcttattggattatctccaagattgtggccaagtggtgtttgaaccaggtcatgtgactgctgctggttttgcaktggaatttgcacttagtgggcctgttaccaggggctctagggagtatgaatcctatatgttttttgagtggactggactgactccaggtctttggtcagcagatctggcactggaataaggatctacttcaaaatctgcagatggttttcctgtttccaggtgatgaacgggtactgcttcttctaggtctctgggagggcttatgctgggtaattctgagaatcctcagacagataataccgaccctagaccatggctggaagggctttgaactgagtccaggactggttcaagtctgtagccatgactgaggcctataagcctgccattggtgtcagaagtggatttgtattctagtggcttcctgggaaagcaggactgttctcagaccatagctgacatgagctggagtcaatttacagggctgttttaagattcacagtggggccaaggtcagtaggcttgcctacagaggcaatgctgagtgaatttttctctaggtc

SEQ ID NO: 144586 - DNA, 593 bp, Homo sapiens
tgttgatttcctgtgcttattggattatctccaagattgtggccaagtggtgtttgaaccaggtcatgtgactgctgctggttttgcattggaatttgcacttagtrggcctgttaccaggggctctagggagtatgaatcctatatgttttttgagtggactggactgactccaggtctttggtcagcagatctggcactggaataaggatctacttcaaaatctgcagatggttttcctgtttccaggtgatgaacgggtactgcttcttctaggtctctgggagggcttatgctgggtaattctgagaatcctcagacagataataccgaccctagaccatggctggaagggctttgaactgagtccaggactggttcaagtctgtagccatgactgaggcctataagcctgccattggtgtcagaagtggatttgtattctagtggcttcctgggaaagcaggactgttctcagaccatagctgacatgagctggagtcaatttacagggctgttttaagattcacagtggggccaaggtcagtaggcttgcctacagaggcaatgctgagtgaatttttctctaggtc

SEQ ID NO: 144587 - DNA, 593 bp, Homo sapiens
tgttgatttcctgtgcttattggattatctccaagattgtggccaagtggtgtttgaaccaggtcatgtgactgctgctggttttgcattggaatttgcacttagtgggcctgttaccaggggctctagggagtatgaatcctatatgttttttgagtggactggactgactccaggtctttggtcagcagatctggcactggaataaggatctacttcaaaatctgcagatggttttcctgtttccaggtgatgaaygggtactgcttcttctaggtctctgggagggcttatgctgggtaattctgagaatcctcagacagataataccgaccctagaccatggctggaagggctttgaactgagtccaggactggttcaagtctgtagccatgactgaggcctataagcctgccattggtgtcagaagtggatttgtattctagtggcttcctgggaaagcaggactgttctcagaccatagctgacatgagctggagtcaatttacagggctgttttaagattcacagtggggccaaggtcagtaggcttgcctacagaggcaatgctgagtgaatttttctctaggtc

SEQ ID NO: 144588 - DNA, 593 bp, Homo sapiens
tgttgatttcctgtgcttattggattatctccaagattgtggccaagtggtgtttgaaccaggtcatgtgactgctgctggttttgcattggaatttgcacttagtgggcctgttaccaggggctctagggagtatgaatcctatatgttttttgagtggactggactgactccaggtctttggtcagcagatctggcactggaataaggatctacttcaaaatctgcagatggttttcctgtttccaggtgatgaacgggtactgcttcttctaggtctctgggagggcttatgctgggtaattctgagaatcctcagacagataataccgaccctagaccatggctggaagggctttgaactgagtccaggactggttcaagtctgtagccatgactgaggcctataagcctrccattggtgtcagaagtggatttgtattctagtggcttcctgggaaagcaggactgttctcagaccatagctgacatgagctggagtcaatttacagggctgttttaagattcacagtggggccaaggtcagtaggcttgcctacagaggcaatgctgagtgaatttttctctaggtc

SEQ ID NO: 144589 - DNA, 563 bp, Homo sapiens
aaaacgaaaacaaagatgagtaaccatttcatagaggaagcctataatttaaaaaaaaaacaaaaacaagtgttggtgaagatgtggaaaaatcagaactctcacatattggttgtaaaaatgtaaaatgtagcaggtactttgtaaaacactytgaaagttattctaaattttacatatacttaccacataacccacctattctgcattccactttagatatatactcaagagaaataaaaacttgtgtccactgaaaatgttttacatgagtgttcacatcagtattataaataatagctcaaaagtggaaagaaatcaaatattcatacaaaagatgatcagataaacagactgttatgtaggcatacggtggaatattatttaaccataaaagggaatagcatactgatacatactagataaattttgaaaacgtaatgttaggcaaaagaaggcagtcacaaagaccacatatatgataatatttatatgaaatgaaaaagtctggagaaaatataaaacaaatatttcattaactaatatttcttataacaattaac

SEQ ID NO: 144590 - DNA, 563 bp, Homo sapiens
aaaacgaaaacaaagatgagtaaccatttcatagaggaagcctataatttaaaaaaaaaacaaaaacaagtgttggtgaagatgtggaaaaatcagaactctcacatattggttgtaaaaatgtaaaatgtagcaggtactttgtaaaacactctgaaagttattctaaattttacatatacttaccacataacccacctattctgcattccactttagatatatactcaagagaaataaaaacttgtgtccactgaaaatgttttacatgagtgttcacatcagtattataaataatagcycaaaagtggaaagaaatcaaatattcatacaaaagatgatcagataaacagactgttatgtaggcatacggtggaatattatttaaccataaaagggaatagcatactgatacatactagataaattttgaaaacgtaatgttaggcaaaagaaggcagtcacaaagaccacatatatgataatatttatatgaaatgaaaaagtctggagaaaatataaaacaaatatttcattaactaatatttcttataacaattaac

SEQ ID NO: 144591 - DNA, 525 bp, Homo sapiens
atttttggtgtgctgcactgcccttcccccagggaggaaaactgtctctaggctagattactggggaccctgaagcacctttcggttcagccagtgcagtgtcactgcagctctctaggtggacattggggaatgtcagcagtagcttttagaatgtagagatggggtgctgtagttcccagggcaggatgcagtcccatgayagctacacttcacaatggtgccctgccacagcctctcaggtccgaggggaggggtgagtgatttagcatgagttcccagtctggagcaatgctctcaagaggtctccaaattaccactcatactaatgccaaggtttgtggcagtagaggaactctcctgtggtttggatcccaacagtctatggcaagaatgtgaacatcaaaactctcccactcaccctctccccagaacaccaagcctctacaggcgcctgaccaattctcagaaaagttggcttcttgtttcctcctacttctgtgccttaggcatttcccctgagtt

SEQ ID NO: 144592 - DNA, 525 bp, Homo sapiens
atttttggtgtgctgcactgcccttcccccagggaggaaaactgtctctaggctagattactggggaccctgaagcacctttcggttcagccagtgcagtgtcactgcagctctctaggtggacattggggaatgtcagcagtagcttttagaatgtagagatggggtgctgtagttcccagggcaggatgcagtcccatgatagctacacttcacaayggtgccctgccacagcctctcaggtccgaggggaggggtgagtgatttagcatgagttcccagtctggagcaatgctctcaagaggtctccaaattaccactcatactaatgccaaggtttgtggcagtagaggaactctcctgtggtttggatcccaacagtctatggcaagaatgtgaacatcaaaactctcccactcaccctctccccagaacaccaagcctctacaggcgcctgaccaattctcagaaaagttggcttcttgtttcctcctacttctgtgccttaggcatttcccctgagtt

SEQ ID NO: 144593 - DNA, 525 bp, Homo sapiens
atttttggtgtgctgcactgcccttcccccagggaggaaaactgtctctaggctagattactggggaccctgaagcacctttcggttcagccagtgcagtgtcactgcagctctctaggtggacattggggaatgtcagcagtagcttttagaatgtagagatggggtgctgtagttcccagggcaggatgcagtcccatgatagctacacttcacaatggtgccctgccacagcctctcaggtccgaggggaggggtgagtgatttagcatgagttcccagtctggagcaatgctctcaagaggtctccaaattaccactcatrctaatgccaaggtttgtggcagtagaggaactctcctgtggtttggatcccaacagtctatggcaagaatgtgaacatcaaaactctcccactcaccctctccccagaacaccaagcctctacaggcgcctgaccaattctcagaaaagttggcttcttgtttcctcctacttctgtgccttaggcatttcccctgagtt

SEQ ID NO: 144594 - DNA, 586 bp, Homo sapiens
agagtccccaggagaaaattttccttctaacaaaaagcagatcagaaattgatccctttctaaccacacacagttcaaagactaacaaagagcattctggaagatcaagctgtaaaacaaagataagcaactcaggcacacaggaggagctgcctaggtaattaccaaagttcacatacatatgatgggctccagtaaaaacagtgggccttaacaagcacattcctttccctttctttaggcacactaagatagagaagctggaaggttacaaggtgggggaagtagtgggggatgcctgcagctgcaagaagtttcctggaaacaggcacagaaactgccccctttcctttcagcacatgcagataagcagctcaaactaaggacctgcctgcatgatcaaagaatagggtgggggctgctagaaacactgctctatgcagatggcccacctgktcctaatgggttcttcagtccctataaagataagatgcccctacctcactatttatttatacaaatcctgatatttttactacaacctgcaaacttgtccaggacccctgtctgtgacagagttgttctt

SEQ ID NO: 144595 - DNA, 345 bp, Homo sapiens
tgatattcatttataaaaaggatgataatattatcacacatttctactttactgacatacatctgttttattataaatgggtaatggttgttgttcaatgcttttctgcatgtttagagaagaatatatggtattccttttttattatttaaacrtggtaaattaaattgattgacatttgaatgttaacctggaatttctcatataaaccccactttttaatgctgcattatcactttaactttgcttgtttaaatttgataatattttgttaaaaattgcatcaatactaatgaacaacagttgtatacagtttttgctgttgtttttgtttagaatatatat

SEQ ID NO: 144596 - DNA, 345 bp, Homo sapiens
tgatattcatttataaaaaggatgataatattatcacacatttctactttactgacatacatctgttttattataaatgggtaatggttgttgttcaatgcttttctgcatgtttagagaagaatatatggtattccttttttattatttaaacatggtaaattaaattgattgacatttgaatgttaacctggaatttctcatataaaccccactttttmatgctgcattatcactttaactttgcttgtttaaatttgataatattttgttaaaaattgcatcaatactaatgaacaacagttgtatacagtttttgctgttgtttttgtttagaatatatat

SEQ ID NO: 144597 - DNA, 345 bp, Homo sapiens
tgatattcatttataaaaaggatgataatattatcacacatttctactttactgacatacatctgttttattataaatgggtaatggttgttgttcaatgcttttctgcatgtttagagaagaatatatggtattccttttttattatttaaacatggtaaattaaattgattgacatttgaatgttaacctggaatttctcatataaaccccactttttaatgctgcattatcackttaactttgcttgtttaaatttgataatattttgttaaaaattgcatcaatactaatgaacaacagttgtatacagtttttgctgttgtttttgtttagaatatatat

SEQ ID NO: 144598 - DNA, 532 bp, Homo sapiens
gtgctggcatgtggtaaaggaagaactaaagagcctatggagatggaaagtttggaatagatacattatgtgaagccagaagacctagcagagtattatattccaytggaggacccagaggacacaccattcattgaagccactgagtatgcactgaggagagaggcactagctttcctaagaacttgaggggtggatctcctctgcaggctggggctcaatgtaggataggtagtcacagagctgggctcattaatatccatggggatgatgtctttcactccttccacccacaagtaatagagatgaggtgatagtagagatagttcaaagagaatggcatccctaggagtaacaagaatattactttatatacatataaatacatgtataacaatatacaatttatatatatatataaattgtatattgttgtatattattcttgcttattcggttttatttggaatatatatatatatatataatttttttccaaataaaggaaaacagaataaacaagaagctgagg

SEQ ID NO: 144599 - DNA, 532 bp, Homo sapiens
gtgctggcatgtggtaaaggaagaactaaagagcctatggagatggaaagtttggaatagatacattatgtgaagccagaagacctagcagagtattatattccactggaggacccagaggacacaccattcattgaagccactgrgtatgcactgaggagagaggcactagctttcctaagaacttgaggggtggatctcctctgcaggctggggctcaatgtaggataggtagtcacagagctgggctcattaatatccatggggatgatgtctttcactccttccacccacaagtaatagagatgaggtgatagtagagatagttcaaagagaatggcatccctaggagtaacaagaatattactttatatacatataaatacatgtataacaatatacaatttatatatatatataaattgtatattgttgtatattattcttgcttattcggttttatttggaatatatatatatatatataatttttttccaaataaaggaaaacagaataaacaagaagctgagg

SEQ ID NO: 144600 - DNA, 532 bp, Homo sapiens
gtgctggcatgtggtaaaggaagaactaaagagcctatggagatggaaagtttggaatagatacattatgtgaagccagaagacctagcagagtattatattccactggaggacccagaggacacaccattcattgaagccactgagtatgcactgaggagagaggcactagctttcctaagaacttgaggggtggatctcctctgcaggctggggctcaatgtaggataggtagtcacagagctgggctcattaatatccatggggatgatgtctttcactccttccacccacaagtaatagagatgaggtgatagtagagatagttcaaagagaatggcatccctaggagtaacaagaatattrctttatatacatataaatacatgtataacaatatacaatttatatatatatataaattgtatattgttgtatattattcttgcttattcggttttatttggaatatatatatatatatataatttttttccaaataaaggaaaacagaataaacaagaagctgagg

SEQ ID NO: 144601 - DNA, 532 bp, Homo sapiens
gtgctggcatgtggtaaaggaagaactaaagagcctatggagatggaaagtttggaatagatacattatgtgaagccagaagacctagcagagtattatattccactggaggacccagaggacacaccattcattgaagccactgagtatgcactgaggagagaggcactagctttcctaagaacttgaggggtggatctcctctgcaggctggggctcaatgtaggataggtagtcacagagctgggctcattaatatccatggggatgatgtctttcactccttccacccacaagtaatagagatgaggtgatagtagagatagttcaaagagaatggcatccctaggagtaacaagaatattactttatatacatataaatacatgtataacaatatacaatttatatatatatataaattgtatattrttgtatattattcttgcttattcggttttatttggaatatatatatatatatataatttttttccaaataaaggaaaacagaataaacaagaagctgagg

SEQ ID NO: 144602 - DNA, 626 bp, Homo sapiens
aaattagttcactctaggtctatggatttctttctcggttctctattatgttgtattgacctatgtttctttttttatgcaaataccatgctattttcrttgctatagctctatagtacaatttaaagtcaggttatgcgattcctccagttttgttctttatgctcaggatacttttggctaatataaatcttgtggatccatataaattgtaggattcattgtttatgtttctgtgaagaatatcattggtaatttgatagggattgcattgaatctgtagattgccttgtgcagtatggacattttaacaatattgattcttccaattcatgaacatggaatatctttgcatgtttttgtatcctctccaatttatttcctcagcattttacaatttttattgtaaagatcttttccttctttggttattttctaggtatgtaactttatctgtagctattataagtgagattactttcttgatttctgttttagattgtttactgttcacataagaaatgctattaagtttacatgtaaattttgtatcctgcaacttcactgaatttgtttataagttctaatagctttttgttggagcctttaggtttttccaaatataa

SEQ ID NO: 144603 - DNA, 481 bp, Homo sapiens
atggtcttctcactattcctgtcttccttttagtgaaggtgatttccactgctggtattatttaattccttgctktttatattttgtttatctattgtatgtttttcaatttgaggttaccatgaggcttgcatatactgtattatttttactggtgacaatttaacactgattgcataaacaaacaagtaagaagacaactaataaaaagtccacactttaagtttatccccacctccagtttttaacttcttattttttctctttatgtcttattgcaatgtttcttgaaaaatcagttattattttaattgtttcattatttagtctttctacgtaagagtgttttacacagcaaaattacagtgttatagtattatgtgttttaccctgtgctattaccagtgagttttgtaccttcagatgattttttattgatcatgaacatgctttttttcagattgcagaacttcctttagca

SEQ ID NO: 144604 - DNA, 481 bp, Homo sapiens
atggtcttctcactattcctgtcttccttttagtgaaggtgatttccactgctggtattatttaattccttgctgtttatattttgtttatctattgtatgtttttcaatttgaggttaccatgaggcttgcatatactgtattatttttactggtgacaatttaacactgattgcataaacaaacaagtaagaagacaactaataaaaagtccacactttaagtttwtccccacctccagtttttaacttcttattttttctctttatgtcttattgcaatgtttcttgaaaaatcagttattattttaattgtttcattatttagtctttctacgtaagagtgttttacacagcaaaattacagtgttatagtattatgtgttttaccctgtgctattaccagtgagttttgtaccttcagatgattttttattgatcatgaacatgctttttttcagattgcagaacttcctttagca

SEQ ID NO: 144605 - DNA, 481 bp, Homo sapiens
atggtcttctcactattcctgtcttccttttagtgaaggtgatttccactgctggtattatttaattccttgctgtttatattttgtttatctattgtatgtttttcaatttgaggttaccatgaggcttgcatatactgtattatttttactggtgacaatttaacactgattgcataaacaaacaagtaagaagacaactaataaaaagtccacactttaagtttatccccacctccastttttaacttcttattttttctctttatgtcttattgcaatgtttcttgaaaaatcagttattattttaattgtttcattatttagtctttctacgtaagagtgttttacacagcaaaattacagtgttatagtattatgtgttttaccctgtgctattaccagtgagttttgtaccttcagatgattttttattgatcatgaacatgctttttttcagattgcagaacttcctttagca

SEQ ID NO: 144606 - DNA, 294 bp, Homo sapiens
gcaacatgatcaaatacaggtagtacctgtataaaaccagtggaactgttggagtcaggaaaatatagttcagttcaccacaggatattccaatgactataaattaatcagcttgcctttagtacctcctccagatcccaagagagacaatacaaagtaggcaaaaattgatttgggcctaagtttagaaatatctcatttttggtagattcaaactttgtaatggtagtttaaaaagacgttttcacaattcccrtatttctaaaataattttagacttatctgaatttttgt

SEQ ID NO: 144607 - DNA, 579 bp, Homo sapiens
caatgaattctaaaatgttggtaattaaattgattgaactgtactggttaataagaattaaagcccccaagaacaggcgaactatgatttttttcattgttcacacaaattaatatwttcagaagaagagattgatggataagataaatttctgctgcaaaccttgctttcaggaaataggtgaaaacctttccagaaatctataattattcatagtgttatgtttccctttgatatatgcttgaggctcattagcattcttttcaaaagctagtgattaattttataatgctattagggatgcatatgtatgggataaattatattttagaaataagataatgttaaatactgaattaaaatagtggttgcattacaggaaagtggtagacatatgggattaggcataaacacgcagctttaatgcagggcttctcacccttgaagctgtcaacattgtgagctgaataattctttgctgtttgggggctatcctgtgcaatgcaggatgtttagcagcatctctggcctctaccgactaaatactaatagcatccccctgacagttgcgacaagcag

SEQ ID NO: 144608 - DNA, 538 bp, Homo sapiens
ggtctagtaatgtgtttgctccttttctggcaagaaaatgctatgaatttgttatagaaaaatctttgtttttctgattaagctttactgttaggcagccactgtgtttatggttctccgaggtggggtacggttctccgaggtggggctttctccgtgatccygccccagacctccacccataggtctgtaatcactgggtatatctgtccctaccctccagggttggagggctttccgtgtccttcccccagcttcaatgggtttctaccagtagcttaatgtcaacagactttgttctttctctagtagtttaccgtgaagaaagctccaggtaggatttcatgccttttctgcagcagctgctattcttcaaccccaagtttatgcaatggagatggcttttatagaaattttgccaattatttttgtgacaacttggtgaggtccatggagaaaactctaagattgggtgctatttctccttgtgtctatattccagagaggctgcatattcttttggtagacaacacttgct

SEQ ID NO: 144609 - DNA, 388 bp, Homo sapiens
atcagtaggttttgagtaaagtaggctctgctccatattgtgtgtaggcttcatccaatcaattgaagtggagtttcccaaacaagagtggggtttcccaaagaagaaggaattctcctcaagactgcaacatrtagaaaccctgccttagtttccaccctgcctgctctgccctgcagattttgaacttacagcccccacaatcatatgtgccaattccttaagataaatctcataaatctctctttctctgcatggatctgcttatatgcactttttttcaataaaaattacactgaatatgcctgcttctccttcctccacctcttctacctctgccattcctgaggcaggaatgccaacccatcctcttcctcctcctcctgag

SEQ ID NO: 144610 - DNA, 388 bp, Homo sapiens
atcagtaggttttgagtaaagtaggctctgctccatattgtgtgtaggcttcatccaatcaattgaagtggagtttcccaaacaagagtggggtttcccaaagaagaaggaattctcctcaagactgcaacatatagaaaccctgccttagtttccaccctgcctgctctgccctgcagatwttgaacttacagcccccacaatcatatgtgccaattccttaagataaatctcataaatctctctttctctgcatggatctgcttatatgcactttttttcaataaaaattacactgaatatgcctgcttctccttcctccacctcttctacctctgccattcctgaggcaggaatgccaacccatcctcttcctcctcctcctgag

SEQ ID NO: 144611 - DNA, 566 bp, Homo sapiens
ctgtctcgctggcattccaggcaccactggggtatggaaaaaaaaatcttgcagctagttcagtgtctgcatgaatggtcacccagaaacccagggcccttgtggggtaggcactggagggtatctcctggtctacgggttttgaagaccatgggaaaagtgcagtrtcagggctggagtgcatggttcctcagattcagtccctcatggcttcccttgggtaggggagaaaattccccgaccccttgcacttcccaggtgaggtgacaccccaccctactttggctcaccctccatgggctgcactcactgtccaaccattcccagtgagatgaacctggtacctcagttggaaatgcagaaatcacctgccttctttgttgatcttgctgggagctgcagactagagctgttcctatttgaccatctttccagccatacccttttttcatgttttgggggatactaatggttgcctgagaaaggtaggcttcatgtgtattaagaaagacctttcagtgttaatatacattgtttatgggggaattaaagcactcccagcccca

SEQ ID NO: 144612 - DNA, 566 bp, Homo sapiens
ctgtctcgctggcattccaggcaccactggggtatggaaaaaaaaatcttgcagctagttcagtgtctgcatgaatggtcacccagaaacccagggcccttgtggggtaggcactggagggtatctcctggtctacgggttttgaagaccatgggaaaagtgcagtgtcagggctggagtgcatggttcctcagattcagtccctcatggcttcccttgggtaggggagaaaattccccgaccccttgcacttcccaggtgaggtgacaccccaccctactttggctyaccctccatgggctgcactcactgtccaaccattcccagtgagatgaacctggtacctcagttggaaatgcagaaatcacctgccttctttgttgatcttgctgggagctgcagactagagctgttcctatttgaccatctttccagccatacccttttttcatgttttgggggatactaatggttgcctgagaaaggtaggcttcatgtgtattaagaaagacctttcagtgttaatatacattgtttatgggggaattaaagcactcccagcccca

SEQ ID NO: 144613 - DNA, 566 bp, Homo sapiens
ctgtctcgctggcattccaggcaccactggggtatggaaaaaaaaatcttgcagctagttcagtgtctgcatgaatggtcacccagaaacccagggcccttgtggggtaggcactggagggtatctcctggtctacgggttttgaagaccatgggaaaagtgcagtgtcagggctggagtgcatggttcctcagattcagtccctcatggcttcccttgggtaggggagaaaattccccgaccccttgcacttcccaggtgaggtgacaccccaccctactttggctcaccctccatgggctgcactcactgtccaaccattcccagtgagatgaacctggtacctcagttggaaatgcagaaatcacctgccttctttgttgatcttgctgggagctgcagactagagctgttcctatttgaccatctttccagccatacccttttttcatgttttgggggatactaatggttgcctgagaaaggtaggcttcatgtgtattaagaaagrcctttcagtgttaatatacattgtttatgggggaattaaagcactcccagcccca

SEQ ID NO: 144614 - DNA, 570 bp, Homo sapiens
catctctgacccctgctcaactttaagaacagtctcttagaaacacagaaaactttcctatgtacttttaagtaaattggcaaatgacagggtgtggtggctcacgcctgtaatcccaacactttgggaggccaaggcgagtggatcacttgaggccaggagttcgagaccagcctggccaatgtggcaaaaccctgtctctactaaaaatacaaaaattagctgggtgtggtgctggtgtgcgcctataatcccagctactcrggaggctgaggcaagagaatcacttaaacccaggaggcggaggttgcagtgacacaagatcatgccactgtactccaacctgggcaacagggcgagacagaaaagtggacttttcaatgctccttttatgagacttcctgttggatgggccatgttgctgtcttcttgaaattgtcctccatttttaaaaattaaaaaaaagttcttatcatctatgacactgaatctttgcattcatctcctatccttttcattagttcttctttgtctcttgttgtgggttcttaaatactgagttcttccctc

SEQ ID NO: 144615 - DNA, 582 bp, Homo sapiens
tttaaacataactgatcatgccactcctgctcaattatctatactggtttctcatcatctaccatagcaaatgctgttggttgccaactcagcaatcaattgtctccctttctcctactctctatcggaaacccaattttgttccagtatcctctacctgggccatataatccagaagaagtgggacagttcttccagggagtgaatcaagattggtctgagccagtaatggtggttgcattccccttgccagtgaatggtttaggattgggcacgtgatgcacttttggccactgaggcatgaggatgagtctgatgggagtggcaggagagctccttaggaaagattttccttactgattgaaaagacacaaatcaagacaaaacaaacaccaacaaacctcaaaaacaaagaaacaaatctctcttcctcttyggtcaccttgcgatcaggagaagagcaagtctgagagcaaaccatcataccaaggatggcagagcaaaaaaaatggaaagaacctaagtccttaatgacagagtcgagccactgaattcagtcatcctggaactgcctttgaacat

SEQ ID NO: 144616 - DNA, 414 bp, Homo sapiens
gtgatggaaagttaaaacgtggtgctgaacttggatgttagcaacaccaccatttacctcaaaaaaattctccacagtgtggtgtgtgtgtgtgtgtgtgtgcacagtttgcatttgcaatgatggaaatcagtttggatcattgggcagagtttccccagaaagartaagaggctcttttagaacgttaaaccagatccttattggtttcagccctcaactgattattttgtaggtaaaagaaagcctgaggaggctttcccctctgagtttttccgtggattgctggactctgaggccctcattcctcttgcaggaggtgtggagcaaaactgtgttgaatgaactgtagatggaaattctctccttcccaccgaggagccgctgcaggttgcagactcccagaatgccaca

SEQ ID NO: 144617 - DNA, 433 bp, Homo sapiens
aatacatatatgaatttatgcattaagagatgtatcttgggacaaacttgtctccacttaygaagaaaagtataacaaaagcattgctcaaataaatctttacagcccaactaaatcttctagtagatgcataaaactctcatttgttaatgcttaagcttagttggctaagactgacctttttatcatagccacctctagcacaagcatgttacccaaaaaatcaggacagcagaagtcaccaaaaaggaagaggatcttaatatatggaaagagcagagcagagatttcacatcagcctgtcttggtgtgaatcctgctgagtacataaccagtaatttatctctctgagcttcactcaggtgtatgcatgtgagaatacaatgacaccgcctacctgcactttttatttatttttttgtttatcagtgga

SEQ ID NO: 144618 - DNA, 627 bp, Homo sapiens
ttattcattgacattttatatatatacataatatacactagccactaacataaaatatcaagtttttatgtgtatgtgtatgtaaattttatcttattccctttcaattttaacacataatgctaattttttttattattattatactttaagttttagggtacatgtgcacaacgtgcaggtttgttacatatctatacatatgtcatgttggtgtgctgcacccattaactcgtcatttagcattaggtatatctcccaatgctatccctcccgcttcccccggtgtgtgatgttccccctcctgtgtccatgtgttcttattgttcaattccaaaatattattatttttggatcaaagagggaaacracaaatataggcttgtagaatatgcctcttatttctcaattaagtcttctcagccttacctctgatttctaccatgctggtatagatagttccctagggcttggactgacttcaaggcaacggcacctgcatgcaacaatcatgtgcattttttccctccgctcctgggcttcactggtacaagtgggagctctcagggtccacacatgtgtgcagcttagaagtgcagggaaattaacacccccccagaggaaaca

SEQ ID NO: 144619 - DNA, 550 bp, Homo sapiens
ctagaagctgaaataaggaaagaaaatggattcacggctggaacctccaggttgaactgatgttccctactctgccaatatcttgatttttaaccctgtggggcccattttggatttttaacctccataactgtgagataataaattagttgtttcaattcacttagtgtgtggtgatttgttacagcaacaacaggaaacaattaggttggtgcataatacagatgctatgtagaagccaaaaactgctgctaggtgtgctctttgccactggggtgtcaccacccccaggctctttcagtgatcagagctagaatatactcacttcacatacatgcacatatacacatttacatttatacatttatacttaaccatgagttcacaacaaaaccttctgttcctatccagtaccacagaatccattcggttttctccttttctatagttgcaattctcttctcccacagccagaaacatgagatttacttatctgatctrtacgtaaccaatctctcgttctggccacaagcttctccctgcatggaca

SEQ ID NO: 144620 - DNA, 550 bp, Homo sapiens
ctagaagctgaaataaggaaagaaaatggattcacggctggaacctccaggttgaactgatgttccctactctgccaatatcttgatttttaaccctgtggggcccattttggatttttaacctccataactgtgagataataaattagttgtttcaattcacttagtgtgtggtgatttgttacagcaacaacaggaaacaattaggttggtgcataatacagatgctatgtagaagccaaaaactgctgctaggtgtgctctttgccactggggtgtcaccacccccaggctctttcagtgatcagagctagaatatactcacttcacatacatgcacatatacacatttacatttatacatttatacttaaccatgagttcacaacaaaaccttctgttcctatccagtaccacagaatccattcggttttctccttttctatagttgcaattctcttctcccacagccagaaacatgagatttacttatctgatctataygtaaccaatctctcgttctggccacaagcttctccctgcatggaca

SEQ ID NO: 144621 - DNA, 546 bp, Homo sapiens
cgccaaccttctagagcaatgctgttcaatagaactttctatgatggaaatgcttcgtatctgtactatccaacatggtagccatctatagttcttaagcatttgaaatgtggtcaaagagacagaggagctaattttttaaattgtgttttattttaataaatataaatgtaaatagccatatgtggctagtggctaccacaatggcaaggtggttccggggtaatccaagctagagcccgtgaaggtctgaccctgggtgctgatggtatgactggaatggggaaaccagtagagaagaccacttagttccatttcagrtgttggccaagtcactaaacctctctgggcctcagtttcttcctttgaaaaaatggagataattatacttacctcccacctatctcaacttaccttacaagctacagaggactgtcattaactagcaaatcctctgtcatcagcacttgggtctaaactgcactagaagtttaattgtacattattcctgggggccaatttgaagatgtgagtgtgtgtgtgtgt

SEQ ID NO: 144622 - DNA, 648 bp, Homo sapiens
ggactctcctaaatttccaccaggtcttatgtgctggcttctctttgctgatgttctcaaacgagttacagcatacataaagttaaaaacaaatgacaaactaggaaagaatatttgcaaatgatatgtccttgatccctcaaatacatatcctacrgatcaatgaggaagaaacaagaccaacagtgcaatacagttgacagccatttatatgaaaggatataccagtggctgttaaatatatgaaactctgcttcacctaattcataataagataaatgcacatttaaatcatgctgagatgctcatttttacctatagggttggcaaaaatctcaatgttggttatcacatggtgttagggaagtgtacagaaacagtagagctcattgattgccactgctccaggtacaaagtggcacaggccctatggagggcaatttggcaatattatagagaaagcacatttataaacaaggtgcttttattaggtcaacccctttgttttaagtgtcatttatatattcagcactggccagaagctctgtgggaataatgaggcacttgcacagggcctgcccccaaggagcttgtgaccctgcctagtggcactggagacaggacatagtaaaaataatgatattttat

SEQ ID NO: 144623 - DNA, 460 bp, Homo sapiens
aattatgtgacacagatgctaacatctagttattatgagtgatccattctgtcatgaggtagcacttgaaaaacaacctgggacaaaagaacaggcctctggcactactgaatttttggagagagaaacctttagaagttagcatgtggttctttctggacatgttcattgccttagttcttcttttgcaaatattttgtaaatattcatgaagtgaaatgagatgtttgagaaggcagatctgcagatcccctaaagagcattgtcagttatgctgggctgttcctaccctatccctctgtttacctgcggcggcctctcagagcgtgatcgtggtggctttgtggtggttttaaatgtaatcgtgagaagctagctgagagaatgctagcagtgttccttcggatcaagttgagactagctgrtacagttaagcctaagtttctttttgtttctttcc

SEQ ID NO: 144624 - DNA, 565 bp, Homo sapiens
tatggcatgtgaattatatgtcaataaagctattataaaagttggagacttaatgtggagaatattgttgctccattcattccattctttgcaaagttctttgtgtgtgtgcatttgcttacattaaaatattgtgcaaagtattagctcaattataaatcttactaatggcacctatcggtcattcagagaacacctgagtgccaggctttgtgtctggtggtaaggggcattcactgctgctctctggacaccccacccagggcccttcttgaggagctgacaatctggaattgttgttttctttataatcagtactagctatcttacaagaagcaaactgacatcctacgtgtacattcagatgatctttacagagmatgatatgtgcacacagggtgggacggtcgggtcctgggggtgagagggaaggaggggatggaattccaggtggagccggtcagcaagggcccaggacagagatggccaaggggagttgtgaatttattgttgtccagcctgaatgttgtcattggctcccaaattttctgcgaagtaagtccca

SEQ ID NO: 144625 - DNA, 581 bp, Homo sapiens
cagggttcctattaagttaatacaatatcaagtttcactgcccgattgccttacagttcttaactacaatttatggcaatagatcttattccattctgttactggagctaaaagaaaatcaaattcatttatgtcaaaatccacattgtaaacagggctaatgaatgaaaacgagttcatgctttttgaagaactcggtttaaactggtagccaaagcagttgcagttaaaactatgtccagagtataaatgctttggcagccttcaaagcatacaaatttttcatatatctgagctctgcataagcaggaacaagaggaaaacactagcatgctctcttggtgactacagcaagggactatgaagaaggaaaccgctgtgcagtcacagtgaaaaagagccaagaactggacagctccttaggtcttcctcaacggtcaactgactcagcctcagccgtgctttctctctctcactctgaatgatgacttaagtacayttgctttacaggggaaccgcaaccatagccaaaaggaccacggctagcaaacatcaaacttttatttccatctagaggtcac

SEQ ID NO: 144626 - DNA, 520 bp, Homo sapiens
aatggaacagaatagagtggccagaaacagacccacacawatatggtcacctgatttatgacaaaaatgacactgaaattcagtgaggaaaggatgctctttataataaatggggctaggttatttggatagctacatggggaggacaaaaagaaccatgaccctagagatcatgctgtatgcaaaaataaaaacagtttcagttggaccacagatctaattgtgaacagtaaaccataaggcttttagaagaaaatgcaagagagtactttcataatcttaggctaggcaaaggtttcttaaacaagaggcacaaaagcactaatcacaaggaggggaaaaggataaactgggacttccttgaaagtaagaatttctactcaccaaaagataccactaggagaatgaaaaggcaaagccatagggtggcagatgatatctgcaattcatatacatggcaaaagtctcatatccagaatatataaggaactcataaattattaagaaaaaaggtagacaa

SEQ ID NO: 144627 - DNA, 547 bp, Homo sapiens
tagagtttaggtgaaatttaaatgaaacggtattctggtagactcaaaacaaagcagggctatttataatggggtgaacatctggtctggccttcaaagtagacccaggatcttgttgtcttgaaaactacaaagttaatgtagatttgaaatgttatgttcagaaactccatatttatatctctgcacctgggttgaaaatcaaggctgcttctctatgtcaaagtgacttcgatgctctaggcaagagtgggatgttttgttcttactgatacatgttcaacaacaaacttttttataatctgtgattttagataacaagtcatcttagtaagtaagaacttagtagtcactcaaagaaggagattgtyatgacatttttcagttgcagtgtgtatttaggaaaagcaccgtttcctgttaattttaatagctggccttatctgtctcttttatctaatcctgatgaatagctgggcagacttttactttctcagcttttatagccatgaattgagcatccttctatggattccccaagtcatca

SEQ ID NO: 144628 - DNA, 407 bp, Homo sapiens
ccactgtggggaatttaactgacccatagccgcagctactgtgctctgaaacgcaccccaggagmacgctggaggctgtgtttcccatggtttgctggcaggcaatactttaggcaggcctgtacgtgagggacaatttggccccaacaaccttaccaaatgtatagtctgagaccttctttccctctcttgttcagcagtcttagacctatttcacaggctgataactcccccacattcctctcctttaagctcccattatttccccagttccacgcaagttagtgtgctactgacaattgcacgaaacgttccattaaagaatttacaggtcggcccggcgcggtggctcactcacgcctgtaatcccagcactttgggacgccgaggcgggtggatcgcgaggt

SEQ ID NO: 144629 - DNA, 604 bp, Homo sapiens
aatatgttcttccaatatataaaaagcatcctgggagcgattctctttctagcttcaatgagcaaaatatttagagagtattgcttgttgttcattcaaagggaacatttcctaaatgttagagttatctaaatgggatcccagtaaatagtcatcatgaaatatgttgcctcatgcttggaggagtaaatatcttatcagagaccagttcaaacaactgctattctgccctcctgtgaaaccacaagaagaaagaccagtatccattgggaggctgggccaattgatctctaatgatcctcaaactatgaaataacatgattacctttctatgaattactgttccacattgcacacagattgtttaagtatttatttggcctttgccatgagaaaagcactatgagctagttttatatactgatcatctcatttaatttatgagagcggtaacattatgttgttggttttaattaaaaaagtgaggtatggagaagttaaataatgtgtccatgaccacaagctactgaagaaggaagctggtgtatgaactctagcaacwtgattctagaatcggggccttcctctttactgtagaaagctt

SEQ ID NO: 144630 - DNA, 613 bp, Homo sapiens
aagcaatgataataacctgatgacttttgcatatcaagaagtgaaatggccaacagtaatatcacaagagatgaacgtgaggaatttggaatattctggaatgacctacacttgaggctacttagtgctatttgaaagttgacttaaattaattaactaaagatgtattataaattccagagtaactaataaaaatgagaaataatttatacgccaggagaggagacagaatggaatcatataaaatgctcaattaaaaccagaaaagtcacaaaaatagtaaaggtgggggatagaatccaggaccrggaaatgggcattaggcaacaaaaacaaaaacaacaacaaaatttgaatagaattatagactgtagttaatagtagtgcatttgtattggttcattaattatgaaaaatgtaccctattaataaaatatatgaataatagagaaaactgataaatataggaactgtatgcagtatattcaaaattttatatcaatttaaatctatttcaaaataagtttatttaagaagtggaaaaattatggaagtgtaaaagccataagatagctataataactttgaaaaagaagcagcagtttagataaat

SEQ ID NO: 144631 - DNA, 535 bp, Homo sapiens
gcaggccctcacaatggtctcatccaacctttggattttactgatgcagaaactaagctacagagcaagaaatacaggtggctggggccacgttcacccacacttacccagtctagctctgtaggcagcattcgacgtgtgtcctctccccagtgaggttgctatgccttgagtcccaggcattttccaaaaggtaaagtgagaaggccatctcctatcrtacttatcctgagacaaggaggcagtgagctttggaaagcacgtcagggcagtagcgtgcccaccaggaaaggacgactccatcttacccccacccctcctggcaccttgctccatcctcatgtgcattacaagatgccatgcatgagcctcaaatcatctttatttcccacttactctataatccagccactgctcagggctcctttctgtggtctccttcctgtaagcaggagagagtactgggtccactctgaccatggacaccaaaaccatcactgcagcagcagcagcagcaaaagggatggaatggaat

SEQ ID NO: 144632 - DNA, 566 bp, Homo sapiens
acttaatgtttattcaccattccccaaccmaataattcatgtgttgaaatcctaacagccaaggtggtgttttaggaggtggagcctttgggacgtgcttagatcatgaaggtggggccctcatgaatgggattagtgcctatgttaggattctccagagaaacagagccaataggatatatataggatctatatctatgtagaaagatgagagcaggtttattagggcaattgtctcatgtgattatggagcttgagaagtcccatgataggctgtctacacactcgagagtcagggaagcctatggtctggctcagtccaagtactgaagcctgaaaactgggggagcagacggtgtaactctcagtctgcaactaaagtcctgagaacctgggggctgctggtgtaatttccagagtccaaagaccagaaaacctggagttctgatgtttaagggtggaagaagaagggtatcttagctccaaaagagatagacagaatttgccttcgtagacatacctggaaataatgctttaccagtgatccaggtattctttaatctagt

SEQ ID NO: 144633 - DNA, 606 bp, Homo sapiens
gcatagttttgactcttagaaccatagtaatgttttacatattccccaaataaatgagtaagtgaacatataaaattaatcggaatatagggggaactcaaaatagaatacaaatagtaacatatgaacccaactgtactgtaaatgagtaagtaaacaacactgaaattaatggtgaagaaaataactaacattaataactttggaaattactatttttcctttattatataaagctaaagataaaaaactttacaaaaataccattgttagtaaatctttttttcccccacagggtataggttagaaattctgtaactactttatgtgcatattaggtttgaacaaataagtatatatattgtagatggtgagaaccaggcttatcacagtgaggggaaatagatacaataaagaaatggggaagactaaaataaaatgtgtggtttttgattatgaacttatgattttaaatatttatacaggtagataaaatgtagatatatatwtattacatctacatatatgtgtacatatataatatgtatacatatatttcatagctctgtctgctaagaggagaagaaattacaactcaatagcact

SEQ ID NO: 144634 - DNA, 575 bp, Homo sapiens
tttcttatgtgggacacatggctcttatactctgggtggcacggattcctttattgccagtggcttaattttcccagatctatttccatgcagacagtgtgaggttggacttcatgcctcatgctcctgattggggctcggaagtctaacccagcttcytgcagtgccgcccccagcttattcaatgcccaacctgcaggtcctaagttgaacccgcacactgcacgctcacctggtctgtgctgccagctgcattggaaatggaagcattaaacaccgttctccactgtcagccacctgctagctaatgagtgacatcatttaacactgttttgaaaagagagatttaaagttgttttgaaaactgaaggaaaaatacaaatgtttgagtgttaaacattttgcccaaatactaaaatgtgaatgtctttttattgtgacagttcacaggaaagcgggctatagcatgcctgtgcttgtcaatgaaaatcttagcactgagtttggtaaacattctggcagtcgggaagccacttaaaaataaagtttaaagaaaagaaagagaagtgttcact

SEQ ID NO: 144635 - DNA, 609 bp, Homo sapiens
catattgagaacacaggacaggatgtcaaaaaaatttggttccagccctggttttgtgccctcagggaagcccctccagctcgccagctctcttcctctttatctataaaatcagacacttgagctacataccccctaatgtctctccactctagcgtcctatgagccagagccggcattggaatgtgctcctgatcccaagacacctttccccctcgcccaagaattccgccagcgactgagtcacatttccyatgagggccatgctgtagctattcatcatcctaaaagcctgggtcctgtgtgattcacatccagcgaaggccaccttgccactgaagtcttcattggcattgaaaccttgaaagctgcccctgacttctgctaccttggcaggacagagtcaaacagtgccctcttatccaaggagctggaaaatgggaaacaaagccagtggacatgaggccagactcagagtctggcacaggcataagaggaagttcaaagccaagagaaaagcccatgacactgtggctctcccaccaaccatccactcatgaactctagatgtcacagttcgcttctggaaaactgtatgtgcagaagctt

SEQ ID NO: 144636 - DNA, 540 bp, Homo sapiens
gcttatttcttcattactaaattcatttataaaatgctgaacattaaaaaatatgtatgttattcattgattaaagatatgaattcaaccaaagttctatttgcagaatttggaaattaggattttttatgatatgagaggtaataaaggttaatgccagcagttaccttaaggaatcagtatttgggtggcaagagaaggaaggagtgggggatgtctggtatctttgtctcagtgcttagaagctgattaccagatgaagatttattaagaaagttctcccagggaaaatcagtaaggaggtagacgcgaacatttatctaccaactgtagatgacttcaagtgyagtttttttaaaaaatgtgtctaagagccttgctacactaaatgtgttccttgactaacaacattggtgacacctacaagattgttcaaaatgcagaatctgggattctactctaggccttctgaagcagaatctgcattttgcaaagttctccaggcagttagaatgtacattaaattttggaaagcactgc

SEQ ID NO: 144637 - DNA, 472 bp, Homo sapiens
aaagtgaaaaggctccctctctttccttccgctggcccctagttctccagttccctcttcagacacaatcgccattaccagtttttggcaaactttcaaggatattatctgcccagacctgcatgtatttattcataaagcccttttatacaaaggttctgcctcctaattttcccaagttttgttcatttacagtacaactgtacctcattttatacaatacatgcactcagaaagctgtataaatacaattttttagttattaaagaagaaaaaaaaagatgcactaaagaatraggtaattgattttttttaatccttgtgctaataattatttcttctcacccctctaccattgaatcagttgtgtgtgtactttggtattggggttttcttaaaactgagcactcctgcattttaattgttctcatggttaaaaaacattgctctcaactcaaaaaaatacattatg

SEQ ID NO: 144638 - DNA, 500 bp, Homo sapiens
gaaaaaaaatcaatatatgaaaaagtgtattacaggaatagattatgggtaatttcatcaagatagtccatcataagagctggccaattttcatgatcgttaactatattttgaagtcttgcatcataatgaatagatgcttttttccttttagaccatggctctcgttggagaatatgttcacattyattttctacacgatgttgttctttttgaaattctcctgtgatttgacatacaacaacatgaacattccatattaaaatttcccatcttctgtgccatgcctcgatgttgttttgggtgtgtggaaatccattcctcacgcactcatatacataccacacatttggcagaaacaatactggtatttgaagggaacgccattatgtaagtgccttcttatcttaccatgcacttaattatttttcaaccattcattaatttgctggcttctccaggcaaatgcagctttaattcattaaaagtttttgtaatgt

SEQ ID NO: 144639 - DNA, 500 bp, Homo sapiens
gaaaaaaaatcaatatatgaaaaagtgtattacaggaatagattatgggtaatttcatcaagatagtccatcataagagctggccaattttcatgatcgttaactatattttgaagtcttgcatcataatgaatagatgcttttttccttttagaccatggctctcgttggagaatatgttcacatttattttctacacgatgttgttctttttgaaattctcctgtgatttgacatacaacaacatgaacattccatattaaaatttcccatcttctgtgccatgcctcgatgttgttttgggtgtgtggaaatccattcctcacgcactcatatacataccacacatttggcagaaacaatactggtrtttgaagggaacgccattatgtaagtgccttcttatcttaccatgcacttaattatttttcaaccattcattaatttgctggcttctccaggcaaatgcagctttaattcattaaaagtttttgtaatgt

SEQ ID NO: 144640 - DNA, 352 bp, Homo sapiens
gccaccagttccagaaagttccagaaatgcaggaactaatagcttatgatgrtgcctagagattatagccaggtgccccattgctgtgggttaaatcaaagtttggaaaactgcaggctgaattcagcccaccacctgtatttgtagatcccaagagctaagtatggctttttacactttaaaataatttttaaaagcaaaagatgaataatattttatatgtgaaaattacataaaattctaatgccagtgcccataaataaagttctgttggaacacaaccacctgcattcatttacatattgtctatggctatatttggctgccatggcagagttcagtagttggtatt

SEQ ID NO: 144641 - DNA, 507 bp, Homo sapiens
acggccaaggccatttcagtgaacacacagttgtawaacagtgtgttgggatctcaaaattgataatatagttcatataagttatatgcatatgcacttatatttcattaaatcagcttgatgtgagtttaaagcataactagtttcccaaaactcatgctgttctcataccagttatctctctggttcttcctttagcctagacccttgggttattttctttctttcatggtcatcttgaggtagaaggtggaactcaactcaggaggtgacactcaacttcagaggcaggacttggacactggagcaaagtgaggactagctaaaacagggacagggcagaagtagctttccataagacatgcccaccagtgtgccatggcaatttaccatttccatgacaacacccagaagttgccatccctttccatggcaatgacccaacaacctggaagttagcaccctttctggaaatttctgcatctgccccttaatttgcatataatt

SEQ ID NO: 144642 - DNA, 543 bp, Homo sapiens
gtcttttcaattatgcacaagtatgtctatgttcattgttctgaattcttgctcaagaatacctataatttctaagttggattactcttctctgtcttttatatcatttattcttttccttctcctctgctttctggaagattttcttaattttttcatatcacaacttaattttcacatcatttcatttcttttctttactaaattgataaagattttgattatgtcattctatattactatttaacagtccttgtatattgtactctaatctgttttatttttatttttcatgaatcttattgtgctctgtttcattttaacctcactctaagtaatgggtctttgcagtttgactacctggttttcatttctatttttttaaacaaaggatcctgatttatcttggsaatttactctagtctttgtgacctggcaagtctcagagaaatacaggagtcttgagctaaagccaatcagctagatgatctccagccgcagtgactgtttccaggaagcacacatgacccagtcagccaatga

SEQ ID NO: 144643 - DNA, 553 bp, Homo sapiens
accaaataaaggaataaaagctggccaccccagccagcagtggcaacctgctcaggtgcccttccgtgctgtggaagctttgttctttcgctcttcacaataaatcttgttgctgctcactctttgggtctgcaccacctttatgagctgtaacactcaccgtgagggtctgcagcttcatccctgaagtcagcaagaccacgaatccactgggagtaacaaacaactccagacatgccacctttaagagctgtaacactcactgagaaggtctgcagcttgactcctgaagtcagcaagaccacgaacccaccggaaggaagaaactctggacacatctgaacagctgaaggaacaaactccggccacrccatctttaagagctataacactcactgcggaggtccgcggcttcattcttaaagtcagtgagaccaagaacccaccagaaggaataaattccaggcaaacaacctcagagattaattagtgcaattcccagctgaattcccagtgtgcagcagcattcatccagggctgcactgaaaaagga

SEQ ID NO: 144644 - DNA, 553 bp, Homo sapiens
accaaataaaggaataaaagctggccaccccagccagcagtggcaacctgctcaggtgcccttccgtgctgtggaagctttgttctttcgctcttcacaataaatcttgttgctgctcactctttgggtctgcaccacctttatgagctgtaacactcaccgtgagggtctgcagcttcatccctgaagtcagcaagaccacgaatccactgggagtaacaaacaactccagacatgccacctttaagagctgtaacactcactgagaaggtctgcagcttgactcctgaagtcagcaagaccacgaacccaccggaaggaagaaactctggacacatctgaacagctgaaggaacaaactccggccacaccatctttaagagctataacactcactgcrgaggtccgcggcttcattcttaaagtcagtgagaccaagaacccaccagaaggaataaattccaggcaaacaacctcagagattaattagtgcaattcccagctgaattcccagtgtgcagcagcattcatccagggctgcactgaaaaagga

SEQ ID NO: 144645 - DNA, 487 bp, Homo sapiens
atgacttactggggtaggtattattatattattcctgttttacagagaacacatctgagtttggcagaattaattgctttcctcaagtcactaacctcataagcatgagagttgggaactggatctcaaggctttgtcttaaccagctaggctgcaccagaatcagagaatcagacctttgatgattctccacggccaccatgatttccaatgattttgccaataatactaaccaaactctccccaaatacagtgacacattttaagggacaaaatgaagggttggaaagacaccagcttaagcaagaaactcagccccattctgtctgaaacagacgggaacacagagatcacagagagtttattgtcaaatatttattaaaccagtattgtgggctcatttctatrctaaaccttatcagattataggagagattctggttactactgtcaaggaataaactgtttctgtgtaaactaaagaaag

SEQ ID NO: 144646 - DNA, 527 bp, Homo sapiens
aagacgatgatacaaccagggcatggaaataaatgaattgcagtccctcttcaaattcagaataactttatagtttctgtttcttaaaattctttactgcttttcataagcaacatcagagggaatataacaaacacacatttacaaaattaatcatttgaatatgaatatataattggagtcttaccttgacaactacctttttattcagcaggtgcataattccaggagctacgcctagcatggacaaaagggaccaagttcatgttctcatgatrtttgatcctagtggttaaatgctgtattttatcgcagttatttgttctcaataacacttttttaaaaatattgccatgtttttaacaccattagcaaggaaaattcaatcatatatcagtaattttgaagatagggtatttcaaggcaattttttttttggacatttaacatcatattccatttttcattatcttcttcctggattgagacatttagtaatttgtaaatatcatgcataaccaagagat

SEQ ID NO: 144647 - DNA, 522 bp, Homo sapiens
agtgatggtggctatcctcagcttgttcctcattttaaaatcttatcactgagtatgatattgctgtaggtytctgtagatgtcattcatcaggttttgaaagttcttttccatttctaatttgctgtaagtttgtatactgaatgattgttgaatgtgaccagtgatttttctgaagcttataagatgatcataaaactttgctttctttatttcttaatgtggtaaattgcattcatatattagtcggatttggtaacatatttctctaggaatttgtatattacacctattttcatatttagtggtataaaaagttggtcatgacattcttatctttctaatccccacagcatctgtagtaatatacagtatcagatatactgttatctatagcatctaaatttgtaacatttttatgcctaataagtgagatatatacacatatacacacacacgcacacacacacacaaagtcatgcatcactcaatggtggggatacagtctccgaaatgcatcat

SEQ ID NO: 144648 - DNA, 522 bp, Homo sapiens
agtgatggtggctatcctcagcttgttcctcattttaaaatcttatcactgagtatgatattgctgtaggtttctgtagatgtcattcatcaggttttgaaagttcttttccatttctaatttgctgtaagtttgtatactgaatgattgttgaatgtgaccagtgatttttctgaagcttataagatgatcataaaactttgctttctttatttcttaatgtggtaaattgcattcatatmttagtcggatttggtaacatatttctctaggaatttgtatattacacctattttcatatttagtggtataaaaagttggtcatgacattcttatctttctaatccccacagcatctgtagtaatatacagtatcagatatactgttatctatagcatctaaatttgtaacatttttatgcctaataagtgagatatatacacatatacacacacacgcacacacacacacaaagtcatgcatcactcaatggtggggatacagtctccgaaatgcatcat

SEQ ID NO: 144649 - DNA, 624 bp, Homo sapiens
tgggagatcatagtaaggactttggaattccttgaaagcgggatgggtggccgggtgcggtggctcatgtctgtaatcccagcactttcggaggctgaggtgggcagatcacaaggtcaagagttcaagaccaggctggccaagatggtgaaatctcatctctactataaaaaaaaaatacaaaaaaattagccaggcatggtggygggagcctgtaatcccagctactcaggaggctgaggcagagaattgcttgcacctgggaggcggaggttgcagtgagccaagatcgcgccactgcactccagcctgggcaacagagccagagcaagactccgtctcaaaaaaaaaaaaaaaaaaaaaaaaaaaaaaagaaagtgtgatgtgaagccatgtgtccacataagtggaacagattgtgtattacacaatcatgtcatcattttaaattctgagttatggcattgcaggaacttaagaaatgaatggggtgttattcctgcccccatggagtctataatctagtaatgtggatttcaggaaaaattaaacagattatatcttctgtcactttaagtgatgtattttatggtcctgggttatcgggagtaagaaaaattgaca

SEQ ID NO: 144650 - DNA, 624 bp, Homo sapiens
tgggagatcatagtaaggactttggaattccttgaaagcgggatgggtggccgggtgcggtggctcatgtctgtaatcccagcactttcggaggctgaggtgggcagatcacaaggtcaagagttcaagaccaggctggccaagatggtgaaatctcatctctactataaaaaaaaaatacaaaaaaattagccaggcatggtggcgggagcctgtaatcccagctactcaggaggctgaggcagagaattgcttgcacctgggaggcggaggttgcagtgagccaagatcgcgccactgcactccagcctgggcaacagagccagagcaagactccgtctcaaaaaaaaaaaaaaaaaaaaaaaaaaaaaaagaaagtgtgatgtgaagccatgtgtccacrtaagtggaacagattgtgtattacacaatcatgtcatcattttaaattctgagttatggcattgcaggaacttaagaaatgaatggggtgttattcctgcccccatggagtctataatctagtaatgtggatttcaggaaaaattaaacagattatatcttctgtcactttaagtgatgtattttatggtcctgggttatcgggagtaagaaaaattgaca

SEQ ID NO: 144651 - DNA, 476 bp, Homo sapiens
ttctgcacttacataacttaatggaactacaagaaataaataaatccattatcccaatggaatacttaatacctctctctcagtactcaatagataaagcagacaataaaattagccataaaagatttagaaagaaaaattaatatgtttcatccaatgggcatatggagaatattacatcccataattaaataatttacattcttttaaagcacaaatagaatagttttgaaaactgactacattctaaaccattaagttaacgttaacaaatttcaaaggatggcaagatagatacagagtgtattctcagaccacaatgcaaattagttacaagtcaaagacaaaataaaccaagagaaaaaaacatgtttacaaatctggcaaaattctaaacaagtcagagatcaaagaagaataatgcaaagtataaaayatttataaatgaccagtgactaaaatgttttctaacaaaa

SEQ ID NO: 144652 - DNA, 558 bp, Homo sapiens
ataagaaaaagtagtaatggaggaaatagggataaaatatttataggacatatasaaaacaaatagcaaaatggcagaagtaagtcctttcttatcaataattactttaaatgtaaattaattaaactttctaatcaaacaacagagactagtagaatgaagaaacaaacaaataacaacagtaaaacataatccaactatatgcagtcaagagatttcactttagacccaaagataaattgattgaaagtgaaggggtaaaaaaagatgttcaaagcaaatagtaagcataaaagagctgatatgaatacattaattcagacaaaacacttttatttaaaaactgttataagaaacaaagataaacattaactgttgccacaagagtccattctttgaaaagaaataagaattataaacaagtattcgccagactacagagtcccaaaacatatgaaataaacattgtcagaattgaagggagaaatagagggttctacagtagagagttctacaataacagaagatttaacgcatcatgttcattaatggatagaa

SEQ ID NO: 144653 - DNA, 558 bp, Homo sapiens
ataagaaaaagtagtaatggaggaaatagggataaaatatttataggacatatacaaaacaaatagcaaaatggcagaagtaagtcctttcttatcaataattactttaaatgtaaattaattaaactttctaatcaaacaacagagactagtagaatgaagaaacaaacaaataacaacagtaaaacataatccaactatatgcagtcaagagatttcactttagacccaaagataaattgattgaaagtgaaggggtaaaaaaagatgttcaaagcaaatagyaagcataaaagagctgatatgaatacattaattcagacaaaacacttttatttaaaaactgttataagaaacaaagataaacattaactgttgccacaagagtccattctttgaaaagaaataagaattataaacaagtattcgccagactacagagtcccaaaacatatgaaataaacattgtcagaattgaagggagaaatagagggttctacagtagagagttctacaataacagaagatttaacgcatcatgttcattaatggatagaa

SEQ ID NO: 144654 - DNA, 551 bp, Homo sapiens
ttggtgatttacacatggtgttgggcctgcaggtgcacagaagtaaaagaatgtctttggtattttgatatgaatggcattgaatttgtagattactttgggtagtatagttattttaacaatattaattcttccaatctatgattgtggatgtctttccatttctaggtgtcatattcaatttcttttatttgtgttttgtagtttttatggtagatgtcttttacctccttggttaaacttattttaaggtattttattttttgatagctattgtaaatgaaattgctttcttgatttcttttttagctagtcagtcattcatgtgtagaaatgtccctgatttttttttactaatttttattctgaaactttagtaagtttgtttatcagttctaagagtactttggcaaagtctttgtgtaggactcccataagcatttcttctagggcaggtctagtggtgatgaattacctcaacttttgcttgtctgggaaatactttatttcctttttatttaygaaagataactttgatggttatagtatct

SEQ ID NO: 144655 - DNA, 608 bp, Homo sapiens
gtgctccccgttttttaaggttggtacagtgattttcaggaaaatctgacttgaagggactttttcaaatccaagatttcagatggtatctaaagattccctgagcatgttcttcatttctcaatgcattgctagtgaagcgttagctcttaaataatttttaaacaaattagaatctcaaaaaaatatgatgaatgttttctggaaattcttaacctcaaggtattgaaagccaatttcagatccagaattctgtaacataagaacctaaaagcaaaatcatacacatgtaaagatactgtagtttttatttttagataatatcaagaacatagctgtgctgtggaatcactgacactttcttgcctcaatgtcttaagaaataattaagacagtgcccatrgacggccataatcccaaatcctgtagatgaaaacatgggatgcttgctgtggctttcaaaaacaactattcttttattataaaaaccattaaaggagcatacgtgtaaaaagctttcatggcaaaagaagagtttcagagggatacggaagaagggaaggtactaactgtgtcagaagctaactgccctttccagaaagaaaata

SEQ ID NO: 144656 - DNA, 532 bp, Homo sapiens
agtagtgattcatgcctgtcatcccagtgytttgggaggtcaaggtaaggagattgcttgtggccaggagttcaagaccagcctgggcaacacagcaagactctcatctccacataagagacagagggagagggagagaggaaatatttgtgtttctgtgaacatttatacaaattctagtagaagctctcttcttaaatacaattaggcatagcagttcgttaattattttgaaagagtttgtcaaaagcagagcatcattatagaaccaaccacattttaacatagatatccaaattattatagataagacactggggttccttctcatctatcctacataaatcacatctgtgacgtggctgatggtcacactgtatactgttcagagtgcactgaggaagaaactgtggctaacgtaaagagctatgtgacaagatcccttgccatgcgtaccttgtttagttggatatgcaatccttatgtagtgggaggtcaagtgggatttttgctcttttgaaaaattgacagc

SEQ ID NO: 144657 - DNA, 532 bp, Homo sapiens
agtagtgattcatgcctgtcatcccagtgttttgggaggtcaaggtaaggagattgcttgtggccaggagttcaagaccagcctgggcaacacagcaagactctcatctccacataagagacagagggagagggagagaggaaatatttgtgtttctgtgaacatttatacaaattctagtagaagctctcttcttaaatacaattaggcatagcagttcgttaattattttgaaagagtttgtcaaaagcagagcatcmttatagaaccaaccacattttaacatagatatccaaattattatagataagacactggggttccttctcatctatcctacataaatcacatctgtgacgtggctgatggtcacactgtatactgttcagagtgcactgaggaagaaactgtggctaacgtaaagagctatgtgacaagatcccttgccatgcgtaccttgtttagttggatatgcaatccttatgtagtgggaggtcaagtgggatttttgctcttttgaaaaattgacagc

SEQ ID NO: 144658 - DNA, 554 bp, Homo sapiens
atatttccaggtcctgccatcattccttaattttcccttcatcatcttgattcttcatcactgaaaggattcaattttgccgttttttaaaaccttatagccagaactgaattcactgttttaggtctagcaatattattttagrgtaggaaacttatttattaaaaacttttgtttcagccccaaatcacactagttttgcgtgttctgttgatagctccaaatgagattattgttattttgttcttaaaggtactgaaagcatcttaagtaatcatttcttttaagcttataagttatttaattagaaaacaaacgaaaagatcaccccctccaacaagcatacctcgttccccagtgttctctggattgctgaggtaatataaatgagggtaccagagagtggccatgtgaatagaagaatattagattattggtcatatggctctattttgttaataataatttttaaaggcttcattcagtctgagatatttataaaaactttaaaagtttccagattgttttaaagaataagtttctaagtttatttc

SEQ ID NO: 144659 - DNA, 489 bp, Homo sapiens
catccagcttgttttccatgttatcttatcttcaattaaaataaataatgtaaccccattgctcagctaaaggaaatggaggtgcctaagggcaaatagctgctgtgtgaagtttcatgtgcgtccctgtgaagagaccaccaaacagggtttgtgtgagcaataaagctgtttatttcaccygggtgcaggtgggctgagtccgaaaagagagtcagcaaagggtggtgtattatcattagttcttacaggttttgggataggtggtgaagttaagagcaatgttttgcgggtaggggtggatctcacaaagtacattctcaagggtggggagaattacaaagtacattgatcagttagggtggggcaggaacaaatcacaatgttggaatgtcatcagttaaggctatttttacttcttttgtggatcttcagttacttcaggccatctggatgtatacctgcaagtcacaggggatgcgatggctt

SEQ ID NO: 144660 - DNA, 463 bp, Homo sapiens
aagtgattcagagagagtagactcttctaagtaattatctgtgggactcagatttgtagttatattttaattctttctttctggcrcctccctgtttcagtgcttggtttgttcctgtccggaagcttagttcactatctccagtttcagctattattactctcacactaaaaagaatattgatgagggcactgggagactagagtttcaatcccagctcttctactgggtaactccaattccccagttaatttactttctgcctctaagatttagtttcctcataggtaaaaaagcaatgaattcgactacatagtaatgcaaacaatcatttattaaataagaaccatagtggcagattctggacttggaacatgggaacaatataatttaatgctcaatagttctataattgttatctctatcttacagataaagaaattgaggctcagagatggttaag

SEQ ID NO: 144661 - DNA, 463 bp, Homo sapiens
aagtgattcagagagagtagactcttctaagtaattatctgtgggactcagatttgtagttatattttaattctttctttctggcacctccctgtttcagtgcttggtttgttcctgtccggaagcttagttcactatctccagtttcagctattattactctcacactaaaaagaatattgatgagggcactgggagactagagtttcaatcccagctcttctactgggtaactccaattccccagttaatttactttctgcctctaagatttagtttcctcataggtaaaaaagcaatgaattcgactacatagtaatgcaaacaatcatttattaaataagaaccatagtggcagattctggacttggaacatggraacaatataatttaatgctcaatagttctataattgttatctctatcttacagataaagaaattgaggctcagagatggttaag

SEQ ID NO: 144662 - DNA, 400 bp, Homo sapiens
aacctgtcattttgctttgtttgctcacaaggcacatgccaacatataaatttccaggaataaaaggttaaatattctgcaaaagtctgatgcttagaggttaaaaagcctggcagagcattaataaccttgcagtgttgaagaagaaaaacaactgaagcctaggaaccatggtaagtatataaagctttgagtttaagtcctaggagggctcagctctaggagtagtgcaaacaagaagtagaccagcctaaaattcagcttcagattaactcaaatattaaatgcatgaagctaaacatgctactttccaatagttcactatacaaaagttaaatcatctctggaaraaaatagtatcatttacactttctgggttgtttttttttccacatacatt

SEQ ID NO: 144663 - DNA, 589 bp, Homo sapiens
ttcaaagttcaagggtgaactgacatggcaatttcaaatccctgggagccatagatggaaaagaagatctgtttacatttgtcaactcttttcaccaaatgcttttgagaaaaaataggagtaggaaagatacttgatgtcaggcctagggtgcattgagggtttcttgaagactgttctgctgccgtaattctactctaatactgtgcttcactgggtgttcctttttgctcttctgacactttacagtccaagaaccatctgtttccttggtagtgttaaggcctagggtttcttttattctacttgctcaaccattattcatcagcaagcactgagatgatagcagtgcctaagacgaaacatttagacactcagaayccaagccccgataaaggaaggcttatgatttcaccttcaaattatttgaaaattatagtgaactgaccctaaataatgcaaaacagaacacaaacacagatccgcagattggccagtcctccacaccagcagcctgacagatggggtgtgcccttttctggatataaatgtttttacaaactgagctgttcttttaccaaaatattca

SEQ ID NO: 144664 - DNA, 480 bp, Homo sapiens
ctggtgagggtcatggttaaaacatttaaatactgcaatagaacaaaatatttatcccatgcaagagacatttatgtgattccacataatatacttaggagtgaaatattaaagttataagaggcagaattgacttaataataatgggatgcattgatttttaaaaatctcctccatcattatttggtaagccagtactagatgaccaaaattgcaagtggtgtgccatccaccacaatcatatggccgaccccagttaatagatttcagtgtaaaaatgttaaagaaatacaataacataaagtaacattggttagaaagcttcacctgaggccaggcacggtggctcatgccagtaatcycagcactttgggaggctgaggcgggtgggtcacgaggtcaggagttcaagaccagcctggccaagatggtgaaaccccctctctaccaaaaatacaaaaatttaccgggtgcagtggt

SEQ ID NO: 144665 - DNA, 402 bp, Homo sapiens
actgagttgagcaaggcagcattcacaccatggtattcaagaattattcatgaagcttcagtgcttctcaacattttagtttcttatatctgattttacttaaagttcttttttgcagtgattgtttttggatatttcgtccaccgagataggaatttctcaataacaggaagaaacagattgagcacctaatgatatctaaatgctttaattgccggatcatctttcttcctgagtgttaatatctctatttattgtgggtggggagsatgtcattgggaggaaagggaaaggtttacatttagggaagtcgattacatagaatgatcctattttgagaaaaatcaaggctattcattttctgggttcagagtccagtaaagcttaggtaattttctaata

SEQ ID NO: 144666 - DNA, 645 bp, Homo sapiens
tgccaccatgcccagctaatttttgtgtagaggcggggtttcaccatgttggccaggatggtctccatctctttaccttgtgatctgccctcctmggcctcccaaagtgctgggattacaggcgtgagccaccgtgtcctgccatcatcttatttttcaaactacacacatctctcagtaacttgtctttatgacagaccctttcatttgtgttggtattccttcattttataagtcagctcatgtgctccagtggtcaaagaacttagtgcaattatgacagactccttgaatagcttgaatggtaaatacatgaagtagtcttcagggaccagaaatcatgttgatgtagagtccctccttccacagatgccctgccttcacatgacacagattcagaatggtttagaactacaggaaaagtttactattttggtacaggaggctgcaaagaaaaagatttcattaggaagcatatttacctgggagatttgagcatgtgcttttgtttcagattttctcattttgcaatctgcattgtttgtgctgacaagtccttctgagagaggctataagcaatttccagctggaatagagaggagaaaacaaacagcttgcaagcaaatacatgaagaaatctcagct

SEQ ID NO: 144667 - DNA, 444 bp, Homo sapiens
agaagctttttcaaatataaaatctcatccaaaaatatatgagaattttccaaacaaataaaacagtattataaacagtaccttttgcttgatcctgccttctattccatattcagtgaagatgctaaagacagatttacctttgaaaaacagtttatcaagcattatggttgaacaattgggagatactgtataaaggagtaagagaataatagagtatatacttggtaatgattttaaaaaataaattttaaaaatwatttttgaattttaatttttaaaaattttttaataattaaaatttaaataatttaataattaaaattttttaaatttaaaatttatcctaaaaataaattttaaacaattaaaaaataatttgtggtgtctgttaggtactaatgcactattaattgcttcgcaactattatcatatttaatact

SEQ ID NO: 144668 - DNA, 444 bp, Homo sapiens
agaagctttttcaaatataaaatctcatccaaaaatatatgagaattttccaaacaaataaaacagtattataaacagtaccttttgcttgatcctgccttctattccatattcagtgaagatgctaaagacagatttacctttgaaaaacagtttatcaagcattatggttgaacaattgggagatactgtataaaggagtaagagaataatagagtatatacttggtaatgattttaaaaaataaattttaaaaataatttttraattttaatttttaaaaattttttaataattaaaatttaaataatttaataattaaaattttttaaatttaaaatttatcctaaaaataaattttaaacaattaaaaaataatttgtggtgtctgttaggtactaatgcactattaattgcttcgcaactattatcatatttaatact

SEQ ID NO: 144669 - DNA, 444 bp, Homo sapiens
agaagctttttcaaatataaaatctcatccaaaaatatatgagaattttccaaacaaataaaacagtattataaacagtaccttttgcttgatcctgccttctattccatattcagtgaagatgctaaagacagatttacctttgaaaaacagtttatcaagcattatggttgaacaattgggagatactgtataaaggagtaagagaataatagagtatatacttggtaatgattttaaaaaataaattttaaaaataatttttgaattttaatttttaaaaattttttaataattaaaatttaaataatttaataattaaaattttttaaatttaaaatttatcctaaaaataaattttaaacaattaaaaaataatttgtggtgtctgttargtactaatgcactattaattgcttcgcaactattatcatatttaatact

SEQ ID NO: 144670 - DNA, 586 bp, Homo sapiens
actacatgaaaaacaaaggtgcggaagtgttcagagaagtctttgaaagagagatgttcatagggctgagttgtaaaaggtaagtagaattaaacagaaaaaaatcaggaagcgtcttccaggaaaaaaaaaataacatactcaaggacgctgggaggggtgggagactatagggcaatttggagtcagaaattgtggtcgtagttacccacagagtgggagaaaatcttcgccaactatgcatctgacaaargactaatatccagaatctacaaggaactcaaacaaatcagcaagaaaaaaactaacaatcccatcaaaaagtgggctaagaaagtaaatagacaattctcaaaaacagacatagaaatggcaaacatacatatgaagaaaattctcaacatcactaattatcagggaaatgtaaatcaaaactacaatgtaataccacattactcctgcaagaatggccataataaaataaataaataaataaatagtagacgttggcgtggatgtgatgaaaagggaacactcacactgctggtgggaatataaactagtacaagtactgtggaaaacagtg

SEQ ID NO: 144671 - DNA, 462 bp, Homo sapiens
atgctctactatataatgcaacactgwgttttcctcaaaaggcaaagactatctttctccaaataaagtatttttttttcacactggtaattgtacaaatgtttgtgtggttctctttctctttttctttctccttctctctctctctcatgctgagggcatttcagaattatttcctttcccatctgtttcccagcaaatgatatagactacaaagttcagagttgtatagatacaagggctgatggcatcagtatttcttactcacatatagccccccaaagctcaaaatcacatttgccactaaattccaattgcaaaagccagatggagaactgaaatgcaataaaacaagatgtgtatttccatttcaaatgtttaatgacttgccattggtagataaaaaattaggaacttaaggttaggtacagcagtcaggaaaggtgggcacatcaggacaga

SEQ ID NO: 144672 - DNA, 458 bp, Homo sapiens
tctactatataatgcaacactgagttttcctcaaaaggcaaagactatctttctccaaataaagtatttttttttcacamtggtaattgtacaaatgtttgtgtggttctctttctctttttctttctccttctctctctctctcatgctgagggcatttcagaattatttcctttcccatctgtttcccagcaaatgatatagactacaaagttcagagttgtatagatacaagggctgatggcatcagtatttcttactcacatatagccccccaaagctcaaaatcacatttgccactaaattccaattgcaaaagccagatggagaactgaaatgcaataaaacaagatgtgtatttccatttcaaatgtttaatgacttgccattggtagataaaaaattaggaacttaaggttaggtacagcagtcaggaaaggtgggcacatcaggacaga

SEQ ID NO: 144673 - DNA, 460 bp, Homo sapiens
gctctactatataatgcaacactgagttttcctcaaaaggcaaagactatctttctccaaataaagtatttttttttcacactggtaattgtacaaatgtttgtgtggttctctttctctttttctttctccttctctctctctctcatgctgagggcatttcagaattatttcctttcccatctgtttcccagcaaatgatatagactacaaagttcagagttgtatagatacaagggctgatggcatcagtatttcttactcacatatagccccccaaagctcaaaatcacatttgccactaaattccaattgcaaaagccagatggagaactgaaatgcaataaaacaagatgtgtatttccatttcaaatgtttaatgacttgccattggyagataaaaaattaggaacttaaggttaggtacagcagtcaggaaaggtgggcacatcaggacaga

SEQ ID NO: 144674 - DNA, 461 bp, Homo sapiens
tgctctactatataatgcaacactgagttttcctcaaaaggcaaagactatctttctccaaataaagtatttttttttcacactggtaattgtacaaatgtttgtgtggttctctttctctttttctttctccttctctctctctctcatgctgagggcatttcagaattatttcctttcccatctgtttcccagcaaatgatatagactacaaagttcagagttgtatagatacaagggctgatggcatcagtatttcttactcacatatagccccccaaagctcaaaatcacatttgccactaaattccaattgcaaaagccagatggagaactgaaatgcaataaaacaagatgtgtatttccatttcaaatgtttaatgacttgccattggtagataaaaaattaggaacttaaggttasgtacagcagtcaggaaaggtgggcacatcaggacaga

SEQ ID NO: 144675 - DNA, 605 bp, Homo sapiens
ctgtggaaatatgacagtaaaaataaaatcattcagtacggagagtagttgtgtgaattttttgtactcttgggttgtttccctaaacctttaggaaaccatgcatttcctctgtaccacatttttcactgstgtctcatccatggcttcttgttgcttctcaataacttggttcccttttgaaaatgctgcctactctgttatggaaggaaaacttaattttcattgtttgcatatctatgaaaatcatttctctatggctcctacctttgggacttagactacaaatgtaactatttgttggactctgtatctctgtgccttttcctctgctcagtgtaacttctatttattggactctgtatatatgtccccaacataacttccagatatcttttagggccagcagttacatcacacagaaagggcagttcaatatcatcctattatatttgctttgagacttagaaaaagggaatatgtttgacaaccatattttcataaaaacaattaccagggagaaatcaatggaaaaatcgctttgacatggaacattatgatatttcatgaaaattaagattcactgaaatgcaaaggaaattgat

SEQ ID NO: 144676 - DNA, 533 bp, Homo sapiens
ttactgggaacaaatctcctagggtattattgtctaaatacagtaagaattaatgctcaccttctatctaacttagcaaagttttttttttgaaaatttatatatgttattctaagtcctggatctaaaggatatttacaagtgtattaacaccacatataccttgaaaactttaaaatgtagcctaatacttcccaagtcagtgagccattatcatgtgacttttccatagatcctcagcattgcaggtagccagactatccttctaattttaaatgaaactttgaatacatacttggtgatacttttaygtctccctattactatgtctacataacagttaaatattaccaaataccaccatagcaggaaacatgtaaggaacacacttattgatgttaataatgttcaggaaagaaggaaatggatgacaactatgccgaagctcactctcttttatacaaaaccactttaaatatttatatcgcagttcaaaacaaaaagtatgggtaagcatcaagaacattcaccaa

SEQ ID NO: 144677 - DNA, 533 bp, Homo sapiens
ttactgggaacaaatctcctagggtattattgtctaaatacagtaagaattaatgctcaccttctatctaacttagcaaagttttttttttgaaaatttatatatgttattctaagtcctggatctaaaggatatttacaagtgtattaacaccacatataccttgaaaactttaaaatgtagcctaatacttcccaagtcagtgagccattatcatgtgacttttccatagatcctcagcattgcaggtagccagactatccttctaattttaaatgaaactttgaatacatacttggtgatacttttatgtctccctattactatgtctacataacagttaaatattaccaaataccaccatagcaggaaacatgtaaggaacacacttattgatgttaataatgttcaggaaagaagraaatggatgacaactatgccgaagctcactctcttttatacaaaaccactttaaatatttatatcgcagttcaaaacaaaaagtatgggtaagcatcaagaacattcaccaa

SEQ ID NO: 144678 - DNA, 472 bp, Homo sapiens
attgcatatctctaatgtaaagatactttcttggcaacaagcctgggaaggacagtcaatgggatgtgagtcaacccaaaatgatgtattattcggccaaacactcataagagtaattgctggaacctaagctacttggagtgccattacttttccccacgagaatcctggcagattccccaacattttctgyagcggtcagcacagttaatgactgaaatcatcctttgagtcaccttgaatttgcaatgtccctgttctcatggtgccactttctctcctagtcttcactgatattccctgccactgcactgctgtgacatcttagagcctcatttatttaatgtgatttttctataccttattctgggggagagtctcttctcccctcccaaacgagcgttagaccccaccaattctcccgtttttgtgtgaaagggaaaataacttagaaagtctcatttggcctgca

SEQ ID NO: 144679 - DNA, 472 bp, Homo sapiens
attgcatatctctaatgtaaagatactttcttggcaacaagcctgggaaggacagtcaatgggatgtgagtcaacccaaaatgatgtattattcggccaaacactcataagagtaattgctggaacctaagctacttggagtgccattacttttccccacgagaatcctggcagattccccaacattttctgcagcggtcagcacagttaatgactgaaatcatcctttgagtcaccttgaatttgcaatgtccctgttctcatrgtgccactttctctcctagtcttcactgatattccctgccactgcactgctgtgacatcttagagcctcatttatttaatgtgatttttctataccttattctgggggagagtctcttctcccctcccaaacgagcgttagaccccaccaattctcccgtttttgtgtgaaagggaaaataacttagaaagtctcatttggcctgca

SEQ ID NO: 144680 - DNA, 472 bp, Homo sapiens
attgcatatctctaatgtaaagatactttcttggcaacaagcctgggaaggacagtcaatgggatgtgagtcaacccaaaatgatgtattattcggccaaacactcataagagtaattgctggaacctaagctacttggagtgccattacttttccccacgagaatcctggcagattccccaacattttctgcagcggtcagcacagttaatgactgaaatcatcctttgagtcaccttgaatttgcaatgtccctgttctcatggtgccactttctctcctagtcttcactgatawtccctgccactgcactgctgtgacatcttagagcctcatttatttaatgtgatttttctataccttattctgggggagagtctcttctcccctcccaaacgagcgttagaccccaccaattctcccgtttttgtgtgaaagggaaaataacttagaaagtctcatttggcctgca

SEQ ID NO: 144681 - DNA, 487 bp, Homo sapiens
ttagcatcttctctggcttgaccagagtctctaatgcctcaaactcttagaaaatacttccttttgataacattttcaaagtatgaktaataaggaagatttttctgaggcatagtatttgaaaaaagatgagagcagaagactcaccagttttcttgtgttttctataataaatatttagtagtgaattgaaatctctgtgatctaattttcctatagtcaatggttagtctctttgcatattaaatagtagcaggggtaattgcataaaatagattcaaaattattttgaaataaatacatttattaaagtagaagtattcattaaaatatgaatttctggtctcaaaatttttgatgagggtggaacatcattattctagatgagggtttctcaatcacaccaatattgacatttggacttgatgattatttgtattgggggactgtcctgagctcaggcatttggactctatgaatgtttaac

SEQ ID NO: 144682 - DNA, 487 bp, Homo sapiens
ttagcatcttctctggcttgaccagagtctctaatgcctcaaactcttagaaaatacttccttttgataacattttcaaagtatgattaataaggaagatttttctgaggcatagtatttgaaaaaagatgagagcagaagactcaccagttttcttgtgttttctataataaatatttagtagtgaattgaaatctctgtgatctaattttcctatagtcaatggttagtctctttgcatattaaayagtagcaggggtaattgcataaaatagattcaaaattattttgaaataaatacatttattaaagtagaagtattcattaaaatatgaatttctggtctcaaaatttttgatgagggtggaacatcattattctagatgagggtttctcaatcacaccaatattgacatttggacttgatgattatttgtattgggggactgtcctgagctcaggcatttggactctatgaatgtttaac

SEQ ID NO: 144683 - DNA, 487 bp, Homo sapiens
ttagcatcttctctggcttgaccagagtctctaatgcctcaaactcttagaaaatacttccttttgataacattttcaaagtatgattaataaggaagatttttctgaggcatagtatttgaaaaaagatgagagcagaagactcaccagttttcttgtgttttctataataaatatttagtagtgaattgaaatctctgtgatctaattttcctatagtcaatggttagtctctttgcatattaaatagtagcaggggtaattgcataaaatagattcaaaattattttgaaataaatacatttattaaagtasaagtattcattaaaatatgaatttctggtctcaaaatttttgatgagggtggaacatcattattctagatgagggtttctcaatcacaccaatattgacatttggacttgatgattatttgtattgggggactgtcctgagctcaggcatttggactctatgaatgtttaac

SEQ ID NO: 144684 - DNA, 487 bp, Homo sapiens
ttagcatcttctctggcttgaccagagtctctaatgcctcaaactcttagaaaatacttccttttgataacattttcaaagtatgattaataaggaagatttttctgaggcatagtatttgaaaaaagatgagagcagaagactcaccagttttcttgtgttttctataataaatatttagtagtgaattgaaatctctgtgatctaattttcctatagtcaatggttagtctctttgcatattaaatagtagcaggggtaattgcataaaatagattcaaaattattttgaaataaatacatttattaaagtagaagtattcattaaaatatgaatttctggtctcaaaatttttgatgagggtggaacatcattattctagatgagggtttctcaatcacaccaatattgacatttggacttgatgattatttgtrttgggggactgtcctgagctcaggcatttggactctatgaatgtttaac

SEQ ID NO: 144685 - DNA, 390 bp, Homo sapiens
catcctgctgttgttggaccaggaggctgatggagcagccccagctcagaacttcacatccctttcagcaggtgcaagtccttagccagaagatggtggatgactcatgaagcatcagaaggcctttctggacttcctgaacaaccttcctccctcaatagtggtgtctgaggacmagctaatccagggcacccaaagttcaacattgacaaagtacagacaactagccatctgtgttgcccatgcttccaccacagagcagctcaccaatgcccaggtggagccatcctgggccctcagcctgatgttgcacaggatgaaggaggccttgagtgagcacagtgaagcccagcagtctacatttccagtgcccaactcagcaccaccagc

SEQ ID NO: 144686 - DNA, 390 bp, Homo sapiens
catcctgctgttgttggaccaggaggctgatggagcagccccagctcagaacttcacatccctttcagcaggtgcaagtccttagccagaagatggtggatgactcatgaagcatcagaaggcctttctggacttcctgaacaaccttcctccctcaatagtggtgtctgaggacaagctaatccagggcacccaaagttcaacattgacaargtacagacaactagccatctgtgttgcccatgcttccaccacagagcagctcaccaatgcccaggtggagccatcctgggccctcagcctgatgttgcacaggatgaaggaggccttgagtgagcacagtgaagcccagcagtctacatttccagtgcccaactcagcaccaccagc

SEQ ID NO: 144687 - DNA, 587 bp, Homo sapiens
agtgtaagcttaatctatcagtttgcagctcctgtcagtataaaggactagatcaacaattaattttcagtatgaatgtaccattaaatttgcacaaaatattatattataaacatgttctgtaaaawggcaaaaaaaaaaaagatgtgatttcatatggaaacaaaaatgtattgtgaccatctccttttgagaatcctgaatcagtacatctatgcaatcaatggctgtttagtattgagttatatactagatgctggacaggctgctaatacctatttgtgtttcattaaatgaaatgccctacagaaatgcctcctcttaattaatgtaagtatatttgaatactgattgcagcattaagctggactcttcaattatctgtagtgtgtgtgtctagtttaccacgaacggattttcagggtagctccatatttccatctcataagttatataaataaaaaatactgtaagaatcaaattatgtccttagcatcttcaacaataatgaaagtacaagacctatgccagagaagatttaggagaaggttgtcaagaaaaaaaaaaaagaaaaaaaagaaaagaaa

SEQ ID NO: 144688 - DNA, 587 bp, Homo sapiens
agtgtaagcttaatctatcagtttgcagctcctgtcagtataaaggactagatcaacaattaattttcagtatgaatgtaccattaaatttgcacaaaatattatattataaacatgttctgtaaaaaggcaaaaaaaaaaaagatgtgatttcatatggaaacaaaaatgtattgtgaccatctccttttgagaatcctgaatcagtacatctatgcaatcaatggctgtttagtattgagttatatactagatgctggacaggctgctaatacctatttgtgtttcattaaatraaatgccctacagaaatgcctcctcttaattaatgtaagtatatttgaatactgattgcagcattaagctggactcttcaattatctgtagtgtgtgtgtctagtttaccacgaacggattttcagggtagctccatatttccatctcataagttatataaataaaaaatactgtaagaatcaaattatgtccttagcatcttcaacaataatgaaagtacaagacctatgccagagaagatttaggagaaggttgtcaagaaaaaaaaaaaagaaaaaaaagaaaagaaa

SEQ ID NO: 144689 - DNA, 587 bp, Homo sapiens
agtgtaagcttaatctatcagtttgcagctcctgtcagtataaaggactagatcaacaattaattttcagtatgaatgtaccattaaatttgcacaaaatattatattataaacatgttctgtaaaaaggcaaaaaaaaaaaagatgtgatttcatatggaaacaaaaatgtattgtgaccatctccttttgagaatcctgaatcagtacatctatgcaatcaatggctgtttagtattgagttatatactagatgctggacaggctgctaatacctatttgtgtttcattaaatgaaatgccctacagaaatgcctcctcttaattaatgtaagtatatttgaatactgattgcagcattaagctggactcttcaattatctgtagtgtgtgtgtctagtttaccacgaacggattttcagggtagctccatatttccatctcataagttatataaataaaaawtactgtaagaatcaaattatgtccttagcatcttcaacaataatgaaagtacaagacctatgccagagaagatttaggagaaggttgtcaagaaaaaaaaaaaagaaaaaaaagaaaagaaa

SEQ ID NO: 144690 - DNA, 535 bp, Homo sapiens
attatttcccttctatgattctggtctgttatgaactctttgccaataggaagttcaattttgtgtgagtatacagctaagctcagcattttaacacataatagtgcaagaaaataatctgagaggaaaaaaaggaatgttattcttcctaacattatctcccagagtatcctttctaatgagtatatttctaaaaatagactagggcagtctaaatttgagaatgtcagatgtccaggaaatgctgagtctcctacataactaagtaagtctttgtgagccaaagctctatattctgagataaatattatttccaaattacaggattaagacccagtttacttttctgcacaggataacatgragaaaccaaattgatatacaaattttctcaggctgtcaactcaaagaaacacaatatatccagcctgtattacaaaacatggcagagctcaaaattttactggcagaaataaatctctcataggaattccaaattggtttaccttcagcttctactttctgattaagggtg

SEQ ID NO: 144691 - DNA, 535 bp, Homo sapiens
attatttcccttctatgattctggtctgttatgaactctttgccaataggaagttcaattttgtgtgagtatacagctaagctcagcattttaacacataatagtgcaagaaaataatctgagaggaaaaaaaggaatgttattcttcctaacattatctcccagagtatcctttctaatgagtatatttctaaaaatagactagggcagtctaaatttgagaatgtcagatgtccaggaaatgctgagtctcctacataactaagtaagtctttgtgagccaaagctctatattctgagataaatattatttccaaattacaggattaagacccagtttacttttctgcacaggataacatggagaaacsaaattgatatacaaattttctcaggctgtcaactcaaagaaacacaatatatccagcctgtattacaaaacatggcagagctcaaaattttactggcagaaataaatctctcataggaattccaaattggtttaccttcagcttctactttctgattaagggtg

SEQ ID NO: 144692 - DNA, 535 bp, Homo sapiens
attatttcccttctatgattctggtctgttatgaactctttgccaataggaagttcaattttgtgtgagtatacagctaagctcagcattttaacacataatagtgcaagaaaataatctgagaggaaaaaaaggaatgttattcttcctaacattatctcccagagtatcctttctaatgagtatatttctaaaaatagactagggcagtctaaatttgagaatgtcagatgtccaggaaatgctgagtctcctacataactaagtaagtctttgtgagccaaagctctatattctgagataaatattatttccaaattacaggattaagacccagtttacttttctgcacaggataacatggagaaaccaaattgatatacaaattttctcagrctgtcaactcaaagaaacacaatatatccagcctgtattacaaaacatggcagagctcaaaattttactggcagaaataaatctctcataggaattccaaattggtttaccttcagcttctactttctgattaagggtg

SEQ ID NO: 144693 - DNA, 394 bp, Homo sapiens
cctgccaaaacctagcaaggaaacaaggacctcagtcctgcagaacyacagaactgaattcagccaacaacctgggtgaaatccgaagtagagtctcctctgtagcctccaggttgagttcagattggccaacattttgattttagcctagagagatcctaagcagattttttgggcccagccaagctcatttatgtctgatctatgcaactctgagataataaatcactgttgttttgaatctacaagtttgttacagcagtaataggaaccgaatacattcatcattcaggtatttaatacaatataatcacttttcatttgctagaaatgtctgtgctgagatcatcctttacacttggcatatagcattcaccatggccgttgcatttat

SEQ ID NO: 144694 - DNA, 464 bp, Homo sapiens
ggtcttacttttcaatctttaatccattttgaattaatttttgtgtatggtgtgaggtaarggtccaacttcatgtttttgcatgtgaacatcgaattcccaacaccatttgttgatgaaaaaattatttattcattgtgtagtcttagaacactttctgatgatttaactttatacacaaggattcattactgtgctcttgtttcttttccattgctctgtatgtctgtctttatgccagtaatgctttggtgtgaaaggatatagaattttatcaaatgttttttctacatcagttgagataatcgtgtgttttttttccttcattctcttaatatggtatatttcatttattgattttactatgttgaactattcttccataaaaaaataaatctcatttcaacatggtgaatgattcttttaatatgtttttgaattgagattactagtatcttgttgag

SEQ ID NO: 144695 - DNA, 546 bp, Homo sapiens
tcacagttccatgtggcttgggaggcttcacaatcatggcggaaagcaaaggaggagcaaaggaggagcaaaggcatgtcttacatggtggcagacaagagaagtgttcagggaaaccaccccttataataccatcagatccaatgagatttattcactgttatgagaacagcatgggaaaaacmtgcccccattatccaattacctcccactgggtccctcccagaatatgtggggattacaaaagctaccattcaagatgagatttaggtgggaacacagccaaaccatatcaaaactttacaaagctcagaactacaacctaaaattacaaacatttagaaaagaaaacttctaaatagcagtaccatgtgtctcagagtctgtgcattttagccttaatgaaagctttcttcatgaaagctcataaaaacttactcacagctgagtcatctatctttcacaaaattataagaaatttgaccagtttgtttctcaattagaagcaaatagtgcacagacagtaaatgacattcaaaaaattgt

SEQ ID NO: 144696 - DNA, 586 bp, Homo sapiens
tctcaaatttattgttatttgtctaaaaagtattaaagcgtcttgctttggccattttttcagacttcactctcttgtgagggcttccatgtacatgttaaattaataaaacttctatgctttcctcatgttaacttgtttttgtcaatttcattcccagatccagtcgaagagcccattgaagatctaagaggcatagaagctatggttagtgcctcccttacaagcttaccattaatgygttacaggtttatcaatagtgttattacttttagaaagacatagttgtaaaagaggtggatctgagcagaaattaatacaggaaatacccattttacttttaatattcaatactaaataacattactacttacaattgtgtttgttttgtaagttttcaaaaactaatattttaagattatggccagaattatcatacagcatttattatatttttcaggaatcatctttatcatattttttgactaaaataatacttttctatttctcaacctctaattatagcatctaatttttaaaatatatgtacaataattgatgactagttactctcaattatttgagt

SEQ ID NO: 144697 - DNA, 626 bp, Homo sapiens
gattgctgcatcccaccctcagagtttctggttccctaggtccgaagtggggccccaaaatttgtgtgtgtcctgcccaggcgaaactgctgctgatccacactttgagaaccacgrctcagaagcttcccagttctccaattcaatggagggaacaatccagaaacttaaaaagacagccctttcctgttatatattccatcctgagagacgcttatatacaattctcctggtctcacaggaggagacgaggggccacttactccaggatctgtaatgtacagtcagggttcttcagggcctcacacagcaggatcaccccatcatccctcaggctattaaaacttaggtcaagacttttcagggttttatttttacagagcgcagagatcatatcctgacagcaattaaaggtcaagtcacactttctcagtctgcaaagaaacacaggttaaaaacaacaacaacaacaactacaacaacacaacaacaacaacaacaatgaaaacacccttaggttttacttctttgtttttgggttctgtttttatttgtttgttttgtttgtttgttttttgtttttgcataatggcataaccaagatgcaattaatatatcacacaatt

SEQ ID NO: 144698 - DNA, 626 bp, Homo sapiens
gattgctgcatcccaccctcagagtttctggttccctaggtccgaagtggggccccaaaatttgtgtgtgtcctgcccaggcgaaactgctgctgatccacactttgagaaccacggctcagaagcttcccagttctccaattcaatggagggaacaatccagaaacttaaaaagacagccctttcctgttatatattccatcctgagagacgcttatatacaattctcctggtctcacaggaggagacgaggggccacttactccaggatctgtaatgtacagtcagggttcttcagggcctcacacagcaggatcaccccatcatccytcaggctattaaaacttaggtcaagacttttcagggttttatttttacagagcgcagagatcatatcctgacagcaattaaaggtcaagtcacactttctcagtctgcaaagaaacacaggttaaaaacaacaacaacaacaactacaacaacacaacaacaacaacaacaatgaaaacacccttaggttttacttctttgtttttgggttctgtttttatttgtttgttttgtttgtttgttttttgtttttgcataatggcataaccaagatgcaattaatatatcacacaatt

SEQ ID NO: 144699 - DNA, 626 bp, Homo sapiens
gattgctgcatcccaccctcagagtttctggttccctaggtccgaagtggggccccaaaatttgtgtgtgtcctgcccaggcgaaactgctgctgatccacactttgagaaccacggctcagaagcttcccagttctccaattcaatggagggaacaatccagaaacttaaaaagacagccctttcctgttatatattccatcctgagagacgcttatatacaattctcctggtctcacaggaggagacgaggggccacttactccaggatctgtaatgtacagtcagggttcttcagggcctcacacagcaggatcaccccatcatccctcaggctattaaaacttaggtcaagacttttcagggttttatttttacagagcgcagagatcatatcctgacagcaattaaaggtcaagtcacactttctcagtctgcaaagaaacacaggttaaaaacaacaacaacaacaactacaacaamacaacaacaacaacaacaatgaaaacacccttaggttttacttctttgtttttgggttctgtttttatttgtttgttttgtttgtttgttttttgtttttgcataatggcataaccaagatgcaattaatatatcacacaatt

SEQ ID NO: 144700 - DNA, 626 bp, Homo sapiens
gattgctgcatcccaccctcagagtttctggttccctaggtccgaagtggggccccaaaatttgtgtgtgtcctgcccaggcgaaactgctgctgatccacactttgagaaccacggctcagaagcttcccagttctccaattcaatggagggaacaatccagaaacttaaaaagacagccctttcctgttatatattccatcctgagagacgcttatatacaattctcctggtctcacaggaggagacgaggggccacttactccaggatctgtaatgtacagtcagggttcttcagggcctcacacagcaggatcaccccatcatccctcaggctattaaaacttaggtcaagacttttcagggttttatttttacagagcgcagagatcatatcctgacagcaattaaaggtcaagtcacactttctcagtctgcaaagaaacacaggttaaaaacaacaacaacaacaactacaacaacacaacaacaacaacaacaaygaaaacacccttaggttttacttctttgtttttgggttctgtttttatttgtttgttttgtttgtttgttttttgtttttgcataatggcataaccaagatgcaattaatatatcacacaatt

SEQ ID NO: 144701 - DNA, 497 bp, Homo sapiens
ctattatgttaaaggttcagatttatctgcttggtgatgaaaagtaaggaaacaatggggtccctccgggggagtatggaacgtggatccaagggtcagagagaacagtgaagagggtattgctgaagtctaggggaaagagccttcagttattcatgtttccatgctgtttcttagaggctcrgcccaagtatctgatctttcccgcatctatgcataagttttctcaagcagtgctggtgatctccacaccgcatcttcctcctaaaatatttacggagtatttgcattcaagtatgttataaactattttaatttgagatataaatattagtcatgcagctaactgcacccacctttccaggagcatctgctttttgtgacagacactgtggctttcaagggccttgccttattacttattacttattgcaccccactattcaacctgtcttcctactgcactaatatgcaccctgtgctgcagtcatgcagaa

SEQ ID NO: 144702 - DNA, 358 bp, Homo sapiens
aaagcttaaatttgatatgggtgccgtgtttcttcattacttttcttttattggcatttacttragagttctagagccatgcccagagttccagaactccagagctaaaattagacaaagaaacttctccatctcagagagcagagaactcgcccacattagctgatctactggcacctcccacagactcacaaaggccatttgcataactcccatgcctcctagtaacatccaaaggctcaagccgatgtatctttttcaaccacagagcagtaattatcagacttttgcatttcaaaaacctggaaaacaaaaattcttcttaattcaagtcctacagagtggtcaacttcttatt

SEQ ID NO: 144703 - DNA, 424 bp, Homo sapiens
atcattaaatcagatacaaaatgatggggcagggagagagtgggtgactccttctcttaaaggattcttcctgctttcaacataagctggtgattccaatgagtgcatgaggacaaatcaatgtgaagggcccaggaaatgctgactgatccaaacaaagtgaacctggtcattaatgttctcctaaaggtgagatttgagattcaaagaaggtgagacccattgatcagttcagaggagccaagggatattctgatttgaggataaggtggagagagcagattaggctattgatagactgaagaamgagtgaaaaagtagcaggtgtaaaggagggaggcaggagtgagagatgcaataaatttttctaaagtagctgggtcaggaaaatttgaagagctagataaagattacagtagaattc

SEQ ID NO: 144704 - DNA, 569 bp, Homo sapiens
tgtaaggcttagagaggtctagtggcttgcccaagaacagaccacaagtacacagcagaggcatgattagaacmctgcccttctaactgcagtctggtgctctttcctggacacctgcacatctcttccagtaattgaactgacctgcatgttaagcatttcacattgctctaacacaccaaagcctatctacagaaatgttcagaaagatttgttcccaagccctcttccatgtcatgtatgcactttgttcctggcactctttgcagaccatctctctcccagcatgaaagttgtctataaaccctgtgtagtcgaattgcaatttggaatctctacaggagcccgactacattaaaccaatgcatggattaacacctacttcaacacacacaaccattctccacgtacatgggcagtttttacccaaccaaacaataacagacaggttctactcatacagaggaggcattgaaaggcacagtagaaacacagacacgcagtatagtgcttcgtgtccaggtgcattaatgagctgtggcctcaaatcccaggttcgccaagagtgt

SEQ ID NO: 144705 - DNA, 444 bp, Homo sapiens
gaattcccttaatcttttaggcacagcatctgtatgctcattcacatggactcrttttacatacactacctacccatgccaccaggatcatttatctggtatgtaaaatctgatacgtgtttttgtgctaattgaaatattggtttgtttgttgtcagcctcagatgccttctccaacaaggctaaaaacaatttcaagcagaatataaataagacgcatctgaggatatacctatgcatacacaaatttgtgtgtgggtggacatacatttattctacacaaatgcactgagggagagagcaagagtgagtttctattttcattctatcgtgcttacgtatattcatatgatttcacattgggtatagctttggatctgagaaaaccagactattatatgtctggtaacttcactggaaaatctgaaagaatctaaattagcc

SEQ ID NO: 144706 - DNA, 444 bp, Homo sapiens
gaattcccttaatcttttaggcacagcatctgtatgctcattcacatggactcattttacatacactacctacccatgccaccaggatcatttatctggtatgtaaaatctgatacgtgtttttgtgctaattgaaatattggtttgtttgttgtcagcctcagatgccttctccaacaaggctaaaaacaatttcaagcagaatataaataagacgcatctgaggatatacctatgcatacacaaatttgtgtgtgggtggacatacatwtattctacacaaatgcactgagggagagagcaagagtgagtttctattttcattctatcgtgcttacgtatattcatatgatttcacattgggtatagctttggatctgagaaaaccagactattatatgtctggtaacttcactggaaaatctgaaagaatctaaattagcc

SEQ ID NO: 144707 - DNA, 444 bp, Homo sapiens
gaattcccttaatcttttaggcacagcatctgtatgctcattcacatggactcattttacatacactacctacccatgccaccaggatcatttatctggtatgtaaaatctgatacgtgtttttgtgctaattgaaatattggtttgtttgttgtcagcctcagatgccttctccaacaaggctaaaaacaatttcaagcagaatataaataagacgcatctgaggatatacctatgcatacacaaatttgtgtgtgggtggacatacatttattctacacaaatgcactgagggagagagcaagagtgagtttctattttcattctrtcgtgcttacgtatattcatatgatttcacattgggtatagctttggatctgagaaaaccagactattatatgtctggtaacttcactggaaaatctgaaagaatctaaattagcc

SEQ ID NO: 144708 - DNA, 541 bp, Homo sapiens
gtggctgagagttaccattttgacattatgattaaaacagtctgtgaattatattgtgccaattgttggtagggaaayagattccattatcctgatgaagcatggagggtttgtttcattatctaattagaaactatcccaccagcaaggatatactgtgggtaaacacactcattttaaataaggatctggcagattactcacttactagtgaagtataatttccaggaattcttgttaagctgtcagtttctctgaggctgcaggacattttgtccttcatgatcaaatctaactaaccattgagtagatagctatccatcaagccatcagagcagcagaaatgacaaacttgcttttgcaaattacacaaccattaaacttcttctgtattttcaagccaaaagtccctgctatgccactgattaagggaaaagtgttcctcctgacatttgacattagactggtaaatatttttctttttctcacccctagaagtcacaacttgacgcactgacaataaaatgtcatgtcagcaaag

SEQ ID NO: 144709 - DNA, 541 bp, Homo sapiens
gtggctgagagttaccattttgacattatgattaaaacagtctgtgaattatattgtgccaattgttggtagggaaatagattccattatcctgatgaagcatggagggtttgtttcattatctaattagaaactatcccaccagcaaggatatactgtgggtaaacacactcattttaaataaggatctggcagattactcacttactagtgaagtataatttccaggaattcttgttaagctgtcagtttctctgaggctgcaggacattttgtccttcatgatcaaatctaactaaccattgagtagatagctatccatcaagccatcagagcagcagaaatgacaaacttgcttttgcaaattacacaaccaytaaacttcttctgtattttcaagccaaaagtccctgctatgccactgattaagggaaaagtgttcctcctgacatttgacattagactggtaaatatttttctttttctcacccctagaagtcacaacttgacgcactgacaataaaatgtcatgtcagcaaag

SEQ ID NO: 144710 - DNA, 557 bp, Homo sapiens
gaaacctcaaagtctttagcatatactaaccttcaggtctacatactgatgtgtaattttcaatgcactgtcaataactatcaataacatcatacacacgcacacacacacacacacggccattttggatttgatttttacattgcagttacatatataaaagtgaagttatagattttaaacatttgcatatttcttaaactttctttttaaggatatatagatttgatctttcttttaccctccccaccaaataatggcccacttgacttagggcaatgggggtgtcctgtagttgtttattatgaagaagttgttctcaggcctggagacatgattagaaccagctggggaaattgcttttgagtagcagtgactgagttttactcaggggatgcagctttaattgatctgtgcagtcccctcatcccatctttttataagctccccaggtgactataatgcgyggccaaggctgggaaccactgcattggaaaatgcagaatttatctctttaattcagacaaacatatgaaatgtggaccttgtgtattaac

SEQ ID NO: 144711 - DNA, 538 bp, Homo sapiens
ctcccacctcagcctccccagtagctgggagtacatgcatgtgccactattccagctactttattattttttgtagagataagatctcactatgttgttcaggctggtctcaaactcctgggctcaagtaattcttctgcctccrcctcccaaagtactgggattagagacatgagccaccacgccctgccaatgtataatcttagagttaatttttatgtaagatcacacacctgactcccactaactgaaccagacagcttctttcctaattcctagagccttgaaagagtatgatgactcccaaatatctccccaatttgcctcaaaatagttaccctagaatacttccttggggataaaacattttctctggaaaatggtaatgagtagcagcggataaactcatgaacatcatggtccaggtgagttcatgaaattaaccagatttaggaagttgggaaccaaggcaaaaagtaacaggtttgtcaaagctcaagtgggaggatttgtgggagcagaaaggtatgattgacag

SEQ ID NO: 144712 - DNA, 497 bp, Homo sapiens
aataagacaacctattaatacaatgttaatactagtttcctgcccaaagtcactggaattttttcttatatacaaaagggcttattttatttctcagatatagcacctacttggtatgcttaaacaaataaaattctagttaattaacgtgtgattttctctctcttagctgaaatatttcagtagccattcattctatttattaagattgctatactttaaaaaatttagatatacaaatctgtgtatgcgtargaagtaagaaatggggcccagcttttgtaaagtcaatgaatgactacagttgaaagaatacccatgtattttaacaactagtgctgtagccaaaacatgtctgcttacattctttatttctcataagtggaatttcttgtgaaaggttttgtttgttttgctatactcagagaaaaatgcactcatcggcgagttggacagggaattttctgaaagaataaaaagcacatgttctgaccatc

SEQ ID NO: 144713 - DNA, 461 bp, Homo sapiens
gaattcgcggccagtgcacggctgggagcagacttcaggctagctgtcctccgtcccaaccccctagagcgcgggcgcgcggggtcgcctgtcggggacactgcacggggtgcatacagaagtccccgcagaggcaggccgagcccaagccccgggcgaggcaggtccgcggggagcgccccggatcctcgcgaagaccctgcgggatttgagaaagggaggctcggggagagacggacccaactcctggtccggctgcacctactccatgttgcccacaacgcgccggccgcggcgccaggaggggaagagccaaacgtgcctcaccgtgatcgcggctttgcaycaacccctctcccttggattctcttctttctgcgatgtgcaaataaatccagtctcgatgcaaacttttttcctttctttccaacctctgctttagaccaacttccgagcaatcg

SEQ ID NO: 144714 - DNA, 534 bp, Homo sapiens
atccaacggcactttctggagaggaattattcatccagtgtgagcaagtagtgcctggtgctgggtcagggctccataaatatgggctggtttaactgaaaagggcagtgyggtgggtcacggcattggaggggtaagaatgacttcatgagaagaagtttgatgattatgaacactattgagggtcaccataaattcgccagttgcttatttcatgtgcatatcttcactaaatatacatgggtgtgcttctcctgccatttaagcatcgctgcctccagaatgaaatcccacaaattcttctcaatccttctactctcttctcagtgatgggccaggaaagcctgcatgcccaagttgagccagaacttcagtttcagagctcaattccacaggtacacaggacaacctaggggaagtgacttaaggcagaaggcagaagaggacaggagggcagtgactgaggcatcaagagagccactgaagatgacttttaggtctatgacaaggaaaatctacatacttttcccaagc

SEQ ID NO: 144715 - DNA, 534 bp, Homo sapiens
atccaacggcactttctggagaggaattattcatccagtgtgagcaagtagtgcctggtgctgggtcagggctccataaatatgggctggtttaactgaaaagggcagtgcggtgggtcacggcattggaggggtaagaatgacttcatgagaagaagtttgatgattatgaacactattgagggtcaccataaattcgccagttgcttatttcatgtgcatatcttcactaaatatacatgggtgtgcttctcctgccayttaagcatcgctgcctccagaatgaaatcccacaaattcttctcaatccttctactctcttctcagtgatgggccaggaaagcctgcatgcccaagttgagccagaacttcagtttcagagctcaattccacaggtacacaggacaacctaggggaagtgacttaaggcagaaggcagaagaggacaggagggcagtgactgaggcatcaagagagccactgaagatgacttttaggtctatgacaaggaaaatctacatacttttcccaagc

SEQ ID NO: 144716 - DNA, 628 bp, Homo sapiens
tgtcttccttatagcatctcaattaatacttacatatcctcccctcttctctgcaagatagatagtattttaaccctgtttaagagatgagtaaactgaaacaccaaaagattaagtaccttgtctaaggtcacatgctaaatggcagggtcagaatttgaasaaaggcaatctgacttggaagtccatattcttcaatgctatacactgtcacccccctggggctactacaagaatagggtaaatacgcatacatgaaaacactctataagtggcaaagtgctaaaatatcccatatgtatagttgaaagagaaatggagttgatttacatcacaatcatataacttcacagctgtgtgaccctgaacaagacacttatttcattgggcctctgcttcttcaactgtgcaaaagaacaaataaaaaatgtgatgcctatagggaggtacttagtaaactgataaactattaaatgaacataagttcttctcatatatatttatatttcatctgattcaattgacaaagttctttagaatggataaataacatttcagcaaaacaaaaccttgagtttattttataaagaataatttctagaaagtggtaagcccagctacattgcta

SEQ ID NO: 144717 - DNA, 602 bp, Homo sapiens
gtaagaccgtgctagatccagtcatttagacatagtcaccagagcctagtatgtgtcaggcaaaggaccatttgctcaaggcataatggtaagacattctatactttaaagacctctcatacaaaacaattgtctgcaggtattcartgtcttgagtctaggtcaattctgccctttatgaattcccatactttatataagctcttaacaccaaagaatattgatcaggattgtggaagagcttgactgaaaactggattattcaaagaatagtttaatgaactgctattcttcaggctacaaggaagaacatgggttttctcattagtggaatagtgttcaagccgaaaagagattaattttggtttggatggtccccggagataaactggatggaaatttcaggagataaagcttctcagtttagtttacatcaatccaatttaattatcccattaatggtatctaataagtgccaagggtttaccagagttgatgaaactcctgtttccatagagacactatgttgttattattttgatcttcaaagctgcagcctaatgtggcataaaaatgttgtagggaagacagatgtatgcaat

SEQ ID NO: 144718 - DNA, 661 bp, Homo sapiens
taactgttcatggcaaattttagtttcccacatccttatactggcagatcctttaatcattcacaaagcaaaaccatagctgcaacttcctgaaatcataatagatttctcttatctacagtatcctgaaaatttcacagtctgctaccccaactatttaatcttccagcaacttccagttgcccagatgccaagacctatcttgaaacagaggagagagaactggaattgatgaatttataaagcagatacatggaatcctgcccagacaatgtcatggaaaatgctctgtcattgactctcaaattctgtagttaaaacaagctcctycctctaaacagaatgttctacaattaccaccttgtacacagtaggtgctcaataaacaatgattcctatctgtttttttttattaacgatatattagtctttatttaatttttactttgtggagttgattataattggttgcaaaatattttcatctctatactaatgtccctttgcaatgtgacattgccattcttctcataaagaagtggaatctagttctctaccccctaaatctaacctcagctatgtcatttgctttggtcaaggggatgttggaaaacatgacatgggtggaggcaagaaaaatggatgctcaatgtcacttatc

SEQ ID NO: 144719 - DNA, 589 bp, Homo sapiens
acttgctgaaaactcattgacaagattttttgcttattaatcatgttttccaaatagtctgtgatttgctccttgtgctttgatatttaaaaattaatttttaaaaaggagacaattgtattaccttattaaaactagggaacagcaaaaatgtgtcttgcaaaaacaggccagattctgatgagggaggataaggcttggagaagttctaaggrcaggttacagctgtatttgttaactgatttctttttgtttgcaaattcagtacacaaaatcttcctagctgtcctctgccttttccatggcatcctaaaccattctgggacctcaaatgactatagtagtagcatcactacaagagggctaaaatagaaggcaggagcctcaacacacacaagagcctactccacagaaagttctgatactgaaataccactgtgttgggtccatagttcttgcttatacagttcatttttcttcaaactgtcatacaatgtgactaggttgacagcatacagctggttttacacctttgaagttcttcattagaagccatatttcacatgaacatagcttagagccatattgt

SEQ ID NO: 144720 - DNA, 429 bp, Homo sapiens
atagtcaatcctgacaatttcactattttcagtggcaaatctctgagtttaatttttatggctaatcatatcacagattcaccatacccatagaggtatatgctgtctacatttacacaatttttagtcttcagcaagtagtatgagtaaagtcaaccaagatgatttttaaatggattgttaaaatgataaaactaaatttaaaatattttatagtaatatgtggtatcaaaaactagacttccattttctaacttatattttgtactgtgtgttcattaggatccagtccaaagtgccttaraaaactcaaataactcaacttctgaaggaaaaaactatggttatattaacttctataaagtactagtgatcttagaggtgtttgataaaacaaagtgatgaagagcataaagtatatctacttta

SEQ ID NO: 144721 - DNA, 483 bp, Homo sapiens
ggagaagagacaccactccaggtcaggagttctcagcctgtgggacaaacgtcgtgtgcagctacagagttagtgtcaggaattgaaattcatgtatgtactaaataacttctgcaaactgaatagacagttctacaaacatgcatttttgtttttcattaattgagaagctatagtaatacattttatgcatgttaagatggtattcaatttatagtcactattcttcattatgtattttctcagtcaatgcatactaaacttaataactaccaggttcagtgaaacttgatgttaaaaaggagctctttgtactggaaaaagttggacattactgctcccagtggttaaatggttaacaccaattcgaatgcatcagctayaacaaagagtgccatttctctgggactgtgataaacaaccttgtacaaaactgttttttaccaaaggaatgagatggggagagtttggcaaaaaaaatat

SEQ ID NO: 144722 - DNA, 518 bp, Homo sapiens
gtcctgccaagtggggctccaatctgcggcccaggcccacccagttctgagccaatcttcactgatggtggcagcacatcagaggtcccaagccacctgggcaaagcragggctgccgctgtaagcctgaggtcctggaatatctgggaggtgctgacctcttgcagccccgctccccagtcgggggctctgctcgctcgactctccactgctggctgaagttctagtccaaaccagacagtccacccagaacacagcaccgcccctaactctggggggattctgctgccactctgagctcctgctgctgctgctctggaggaaccagctactcccagcttttcttctttggtgaaacagagatggcagcactgtctgcatcatagagtggcaatgaagagcaagcaaaatgacacatggagtgcctagtacgtgggaggcactctgcaaaggggaataattataaccataatacaaggcataaaaaggcacgttctagacagctgttaattacgtca

SEQ ID NO: 144723 - DNA, 578 bp, Homo sapiens
cttgctgcccactgacctctctgagaagagtgaagagccccattcatatggctgtgcagagaagcagcgcagcagaggggaggagcccttgccttggagccaagcagctttcctgagacttggaagagtcttcactgtaaacaaaggggagaataattccctccacccaaaactrctgcaggaattgagtgagcaggtttgaaagtacctatggtgatgcctgacaaaaacattcatacagttatgcatcaattcaatctaagataaggagacgtactaaagctttgggtcagagcctttgaatccttacctaacgttaacaaaaattttcacttggatgaatgcccacttcctcaccttggggctggaattcaagcagaatcttgtttggtgttctgcgcttcattctgcctcactaagagaattactaatttacaatcagacccaaaaaatatacagaaattaagaggacagaaaaatccaaatgagatatggagtttgatctagttaacttaaaaagaaaaaaagaaaaaaaaggaaaaaaaaaaaaaagctccgcaaacaaacaaaaaatgacc

SEQ ID NO: 144724 - DNA, 578 bp, Homo sapiens
cttgctgcccactgacctctctgagaagagtgaagagccccattcatatggctgtgcagagaagcagcgcagcagaggggaggagcccttgccttggagccaagcagctttcctgagacttggaagagtcttcactgtaaacaaaggggagaataattccctccacccaaaactactgcaggaattgagtgagcagktttgaaagtacctatggtgatgcctgacaaaaacattcatacagttatgcatcaattcaatctaagataaggagacgtactaaagctttgggtcagagcctttgaatccttacctaacgttaacaaaaattttcacttggatgaatgcccacttcctcaccttggggctggaattcaagcagaatcttgtttggtgttctgcgcttcattctgcctcactaagagaattactaatttacaatcagacccaaaaaatatacagaaattaagaggacagaaaaatccaaatgagatatggagtttgatctagttaacttaaaaagaaaaaaagaaaaaaaaggaaaaaaaaaaaaaagctccgcaaacaaacaaaaaatgacc

SEQ ID NO: 144725 - DNA, 578 bp, Homo sapiens
cttgctgcccactgacctctctgagaagagtgaagagccccattcatatggctgtgcagagaagcagcgcagcagaggggaggagcccttgccttggagccaagcagctttcctgagacttggaagagtcttcactgtaaacaaaggggagaataattccctccacccaaaactactgcaggaattgagtgagcaggtttgaaagtacctatggtgatgcctgacaaaaacattcatacagttatgcatcaattcaatctaagataaggagacgtactaaagctttgggtcagagcctttgaatccttacctaacgttaacaaaaattttcacttggatgaatgcccacttcctcaccttggggctggaattcaagcagaatcttgtttggtgttctgcgcttcattctgcctcactaagagaattactaatttacaatcagacccaaaaaatawacagaaattaagaggacagaaaaatccaaatgagatatggagtttgatctagttaacttaaaaagaaaaaaagaaaaaaaaggaaaaaaaaaaaaaagctccgcaaacaaacaaaaaatgacc

SEQ ID NO: 144726 - DNA, 561 bp, Homo sapiens
atctgaaggcaagctgatgacaccaggcaactgttatgggcttagagagatgtgtaagggcacttggaatagactgaaatagactagattaccccctttctgcctccatggtgtttgctttcttcactgattccatccacaccgagccttatctcctcagkataataaaatcaacctgagacaggaatcagtgcaaagcaagaccacagctgtgatgtggaccagataagaatttaagatctgctttacatttgccaatggaagcactgccatgttttctaaatagttgcttgtagagaaaaagacattacacagtaaataggtccacatttacagacaactcaaaaatctctggataggcacccaaaggaatggattttgtctccattcctagtttctgagttgattctattttcctggagaaggatcttgaaactcatgaagtctgaccaagataagaaggagcctctggagtgttggggataataactccgaaatccacagtaaattctactcctgtctcctttttgagggggatcattgttattcttctcaaaagcc

SEQ ID NO: 144727 - DNA, 561 bp, Homo sapiens
atctgaaggcaagctgatgacaccaggcaactgttatgggcttagagagatgtgtaagggcacttggaatagactgaaatagactagattaccccctttctgcctccatggtgtttgctttcttcactgattccatccacaccgagccttatctcctcagtataataaaatcaacctgagacaggaatcagtgcaaagcaagaccacagctgtgatgtggaccagataagaatttaagatctgctttacatttgccaatggaagcactgccatgttttctaaatagttgcttgtagagaaaaagacattacacagtaaataggtccacatttacagacaactcaaaaatctctggataggmacccaaaggaatggattttgtctccattcctagtttctgagttgattctattttcctggagaaggatcttgaaactcatgaagtctgaccaagataagaaggagcctctggagtgttggggataataactccgaaatccacagtaaattctactcctgtctcctttttgagggggatcattgttattcttctcaaaagcc

SEQ ID NO: 144728 - DNA, 561 bp, Homo sapiens
atctgaaggcaagctgatgacaccaggcaactgttatgggcttagagagatgtgtaagggcacttggaatagactgaaatagactagattaccccctttctgcctccatggtgtttgctttcttcactgattccatccacaccgagccttatctcctcagtataataaaatcaacctgagacaggaatcagtgcaaagcaagaccacagctgtgatgtggaccagataagaatttaagatctgctttacatttgccaatggaagcactgccatgttttctaaatagttgcttgtagagaaaaagacattacacagtaaataggtccacatttacagacaactcaaaaatctctggataggcacccaaaggaatggattttgtctccattcctagtttctgagttgattctaytttcctggagaaggatcttgaaactcatgaagtctgaccaagataagaaggagcctctggagtgttggggataataactccgaaatccacagtaaattctactcctgtctcctttttgagggggatcattgttattcttctcaaaagcc

SEQ ID NO: 144729 - DNA, 561 bp, Homo sapiens
atctgaaggcaagctgatgacaccaggcaactgttatgggcttagagagatgtgtaagggcacttggaatagactgaaatagactagattaccccctttctgcctccatggtgtttgctttcttcactgattccatccacaccgagccttatctcctcagtataataaaatcaacctgagacaggaatcagtgcaaagcaagaccacagctgtgatgtggaccagataagaatttaagatctgctttacatttgccaatggaagcactgccatgttttctaaatagttgcttgtagagaaaaagacattacacagtaaataggtccacatttacagacaactcaaaaatctctggataggcacccaaaggaatggattttgtctccattcctagtttctgagttgattctattttcctggagaaggatcttgaaactcatgaagtctgaccaagataagaaggagcctctggagtgttggggataataactcygaaatccacagtaaattctactcctgtctcctttttgagggggatcattgttattcttctcaaaagcc

SEQ ID NO: 144730 - DNA, 572 bp, Homo sapiens
agtcttgcggtctgctgaacagcaatcttcaccttggatgagctacatgcactcaaatccaacatgttcataactgagttgattcatcttcctccatggtaaacctgttattttgtattttctatttaatttgtaagatctgcccagttactcatgctaggaaactaggggttatctatgacttctttctgcctctcactccaaaaagcataatcactaacaaattactagatttcctctcatatgtattttttaaacttgtccttctcctccattctagtgtagtcctaatttagacatctgttagctcattagtgggctatggcaaaatagcagaactagctggattccaaattcagagttccaagaagccatagttgtccctctaaagtacaaatatgtcctcatccttttctttaaattcttcmatggtcccctttgcctataggataagcccaagttccttaacagtgtatactagatccttcattatctcacccttcccatctcttatgtacagtatgtcatccctcactatctcacttcattgctggcagttcccagaacctcaa

SEQ ID NO: 144731 - DNA, 390 bp, Homo sapiens
tttctcaactgctttgctaattttacatttttaaygcatactgttgccaattatagctatcttagcccaaatcaaaaaataaataatatccttcaacactgccattaaactccagcaaaacaagtcactaaagatataatctacttatgaaaaatggtgttattaggaactggatttcaaaaagtaactcattaatatatagagatgctaatgatacatttaaaagcaacctagaaaaaaaggagtgagagaaatatgacaaatttcctacatacacctgtagcctataaaagtccatcttttgttactcgcatcatatcactgcccaaataagaacatcagaagacaggcccataaagtttagctttgcaagctgcacatgaatttgtt

SEQ ID NO: 144732 - DNA, 557 bp, Homo sapiens
cttaaaggagatccatattctaaactctacagttaaaaatggttaagatggcaagttttatgtcatgtgtattttcccacaattaaaaactaagaaagagacatcccaccatttagctgggcagaatctgtgagtctaagcttggccagattctcgtaactgttatctgttttcaacaaaaactgtttctcgactagtgcatgtaaataaagcctccttcagagcatccacagagtggaagaaggagatccaagaatacatgtgtaacaggtatctcattgttgtggcttctctgatcttttgttctcatgtctagaacaatctgaaaattcattttgttggttggctaatggtagaatccatttgtcctgactttctggtcaccgtgtcccttacagaatctaaaagacactgctggcacccttgccagtgaggtggagggtagggtattttctttcttgctatttcaygtggatgctcagaaattataaaaactaaaactgatggcaatttcacttccttagcacagaattggggaaaagacagctcacacatta

SEQ ID NO: 144733 - DNA, 557 bp, Homo sapiens
cttaaaggagatccatattctaaactctacagttaaaaatggttaagatggcaagttttatgtcatgtgtattttcccacaattaaaaactaagaaagagacatcccaccatttagctgggcagaatctgtgagtctaagcttggccagattctcgtaactgttatctgttttcaacaaaaactgtttctcgactagtgcatgtaaataaagcctccttcagagcatccacagagtggaagaaggagatccaagaatacatgtgtaacaggtatctcattgttgtggcttctctgatcttttgttctcatgtctagaacaatctgaaaattcattttgttggttggctaatggtagaatccatttgtcctgactttctggtcaccgtgtcccttacagaatctaaaagacactgctggcacccttgccagtgaggtggagggtagggtattttctttcttgctatttcatrtggatgctcagaaattataaaaactaaaactgatggcaatttcacttccttagcacagaattggggaaaagacagctcacacatta

SEQ ID NO: 144734 - DNA, 633 bp, Homo sapiens
acaggtgtgcaccacattgcctggctaattttctaaattgtttggagagagagggtcttgctacaatgccctggctggtctcaaactcctggttcaagtsattttcctgtctctgcctccccaagtgcttggattacaggcataaaccacctcgcccagctgctctccttattctcagcacatatatttccctctgctattcactggggaagtgaaggttgccaggcataacctgtttcaatttatcttccttctccttcaaaatgtatccacatttactctccatctttttttccttcagtgttcttagaagaaaaaaaaatatctctgctcagtccaatcagtaccatagctctctggtgctagacaatgatgagcaaaacacaacagcctcaagaacactcggatcacctttcaatgtgtaaatccccgactgtgccccaccatcgtatcctctgaggcctgttctccaagactacaatatacccaagcctctgccatcttccaaattccttcccaactcctgcctttccttcaagccagaggaccattgatcccttgaatcaaccaatggctgctttgaacagctgggctccagtgtggcccatgtgtcttctccttctgtttactcct

SEQ ID NO: 144735 - DNA, 570 bp, Homo sapiens
caaccactgggcttggcagacaccagcactttgccttttttcctggatatgctcccacacttgagggggaagtgatgggctcttcctttcttcccaagttgagcagaggatgtggaggacagagaaagcctcagccaggtgtctcaacccccatgcctcttcccaggggactctccacaaggccttggatggttttcacattaacctcttccgctgcttgctggagcagctgataattttgctgtgcaccaaatgatgcatatgagagatcagaaaaatctgtaaccagagrggaaaaacggctgctaatgtagtggtaatagggtagtttaggcgagacttccagggaagagatttacaatttaaataagaaaaataataaactctaaattaacaaaaagagaggagaagaagaatgctatggctgtgtgattggggatggggatggtggggaccttgcaggaccctcagaacaaggctggaaggggcctcactgagtcagagggatgccaaaggtggaggttgaataatgagggccttcaggattagccccagctccagcaaggacag

SEQ ID NO: 144736 - DNA, 612 bp, Homo sapiens
gggtaataccacaaggggaataatgtgtgcaaagtgcagagtaagtgcatgtaaatagcttgcactagcagaaaaaagcactgcaaggagccaaaagaagaatataaatcaatcgtgatcctggtagaataaagttgagatgctctggcatatttgcaagtaatgatactagtgaaagagctaaacagaaggcaaaaatagagaccacaggtyataagaaaaagttatgcacagtcaagagttggaaagcaacttaacttaaaaaaaataaaaaccatctaccctggcagtgtataaggcatactaggcttgctgctaatacgaagtagccagggatatttgtctttctatcactggtgccaggcacagggtaagttctcaatatatatttgttcacaatggaggaagagtgatcggttagatagctatgtggcctacttaaaaataccacactttgccaacgtcacatgtggttcaagaaaatctgtttctgagttgtttttgtgggtgtggttcacagacaatattggtgacacatcaggaaagatggcaagcagaacgagaactagtgctacaaaaagtgatctcactgtaacagcatgggtgggcctg

SEQ ID NO: 144737 - DNA, 612 bp, Homo sapiens
gggtaataccacaaggggaataatgtgtgcaaagtgcagagtaagtgcatgtaaatagcttgcactagcagaaaaaagcactgcaaggagccaaaagaagaatataaatcaatcgtgatcctggtagaataaagttgagatgctctggcatatttgcaagtaatgatactagtgaaagagctaaacagaaggcaaaaatagagaccacaggttataagaaaaagttatgcacagtcaagagttggaaagcaacttaacttaaaaaaaataaaaaccatctaccctggcagtgtataaggcatactaggcttgctgctaatacgaagtagccagggayatttgtctttctatcactggtgccaggcacagggtaagttctcaatatatatttgttcacaatggaggaagagtgatcggttagatagctatgtggcctacttaaaaataccacactttgccaacgtcacatgtggttcaagaaaatctgtttctgagttgtttttgtgggtgtggttcacagacaatattggtgacacatcaggaaagatggcaagcagaacgagaactagtgctacaaaaagtgatctcactgtaacagcatgggtgggcctg

SEQ ID NO: 144738 - DNA, 292 bp, Homo sapiens
acttaataaaaatacatgaatgatttaagtgaggtcctgaagggctctcctgtgagtaaagtctttggtgcamagagttttgccatttattttattttatttattttgagacaaggtctcactctgttgcccaggctggagtacagtggtgccaacacagctcactgcagcctcgacctcccaggctcaagctatcctcccacctcagcctcccaagtagctgggaccagaggcatatgccaccacgcctggctatgccatttattttactttttaaagacccttttaactt

SEQ ID NO: 144739 - DNA, 292 bp, Homo sapiens
acttaataaaaatacatgaatgatttaagtgaggtcctgaagggctctcctgtgagtaaagtctttggtgcaaagarttttgccatttattttattttatttattttgagacaaggtctcactctgttgcccaggctggagtacagtggtgccaacacagctcactgcagcctcgacctcccaggctcaagctatcctcccacctcagcctcccaagtagctgggaccagaggcatatgccaccacgcctggctatgccatttattttactttttaaagacccttttaactt

SEQ ID NO: 144740 - DNA, 292 bp, Homo sapiens
acttaataaaaatacatgaatgatttaagtgaggtcctgaagggctctcctgtgagtaaagtctttggtgcaaagagttttgccatttattttattttatttattttgagacaaggtctcactctgttgcccaggctggagtacagtggtgccaacacagctcactgcagcctcgacctcccaggctcaagctatcctcccacctcagcctcccaagtagctgggaccakaggcatatgccaccacgcctggctatgccatttattttactttttaaagacccttttaactt

SEQ ID NO: 144741 - DNA, 547 bp, Homo sapiens
cttagtttttaatagcaatactagtttcyactatgtaagcgtaaatataaaaaatactgcccatgatgactgtaagatgatcgtagaatgagtcccaatttcagagatgttaaaatgtgggggaaaaaatgtctcagaatgaatgcaaaagtgcaaccagactaaactaaaaatataaaaagaaaaaaatgaatgaatgaggaagggcacttagataataatttattgtttattcctaattgttttgcttcatctaacttctttgcttctgtatctacaagttagagagactttccaaccggaagccacatactgtcctgatacccaggcaggaacaaatcttgatggacaggttacttattttttaaaattcgttcatacttatgacatcatcaactgataaggatgatcaggattattaggtcttacctggcatgaataggttttaatgggtcgtggaaatttggccacgagaagattgtgcccaccctcaccttttcactgcttgtacctccatgcttgctttcttcagctctgctgtcatttg

SEQ ID NO: 144742 - DNA, 569 bp, Homo sapiens
tccactatgtaagcgtaaatataaaaaatactgcccatgatgactgtaagatgatcgtagaatgagtcccaatttcagagatgttaaaatgtgggggaaaaaatgtctcagaatgaatgcaaaagtgcaaccagactaaactaaaaatataaaaagaaaaaaatgaatgaatgaggaagggcacttagataataatttattgtttattcctaattgttttgcttcatctaacttctttgcttctgtatctacaagttagagagactttccaaccggaagccacatactgtcctgatacccaggcaggaacaaatcttgatggacaggttacttattttttaaaattcgttcatacttatgacatcatcaactgataaggatgatcaggattattaggtcttacctggcatgaataggttttaatgggtcgtggaaatttggccacragaagattgtgcccaccctcaccttttcactgcttgtacctccatgcttgctttcttcagctctgctgtcatttggagtttgtttattgtttcctgtgctgccctgaaaagcaatgaagatct

SEQ ID NO: 144743 - DNA, 449 bp, Homo sapiens
tggtttgcaaagaatttctctgagtgtrtagattgtcttttttatcctcttaatagggtcttttgcagagtgaaagttttaattttgatgaatttcgggttatgaattttttcttttatagttcatgcttttggtgtcaattctaaaacgttttccctagccttagactcaaagatttttttccatattttttcttaggtgttttatagttttacatgtaagtttgtgatccattttccattttgagttaatttttgtataaggggtgaggtttagattgtggtgatggtgcttttttgcctgtgtatgtcaattgctcctgcaccatttgttgaaatggcttctttcattgaattgcttttgcacctttgtcaaaaatcacttaggcatatttgttgggggctatttctggattctctattctgttccattgatctttgtggctgtcc

SEQ ID NO: 144744 - DNA, 449 bp, Homo sapiens
tggtttgcaaagaatttctctgagtgtatagattgtcttttttatmctcttaatagggtcttttgcagagtgaaagttttaattttgatgaatttcgggttatgaattttttcttttatagttcatgcttttggtgtcaattctaaaacgttttccctagccttagactcaaagatttttttccatattttttcttaggtgttttatagttttacatgtaagtttgtgatccattttccattttgagttaatttttgtataaggggtgaggtttagattgtggtgatggtgcttttttgcctgtgtatgtcaattgctcctgcaccatttgttgaaatggcttctttcattgaattgcttttgcacctttgtcaaaaatcacttaggcatatttgttgggggctatttctggattctctattctgttccattgatctttgtggctgtcc

SEQ ID NO: 144745 - DNA, 449 bp, Homo sapiens
tggtttgcaaagaatttctctgagtgtatagattgtcttttttatcctcttaatagggtcttttgcagagtgaaagttttaattttgatgaatttcgrgttatgaattttttcttttatagttcatgcttttggtgtcaattctaaaacgttttccctagccttagactcaaagatttttttccatattttttcttaggtgttttatagttttacatgtaagtttgtgatccattttccattttgagttaatttttgtataaggggtgaggtttagattgtggtgatggtgcttttttgcctgtgtatgtcaattgctcctgcaccatttgttgaaatggcttctttcattgaattgcttttgcacctttgtcaaaaatcacttaggcatatttgttgggggctatttctggattctctattctgttccattgatctttgtggctgtcc

SEQ ID NO: 144746 - DNA, 404 bp, Homo sapiens
gtgtttgaaaattgcaccaggcctgtaaggaaggtgttattattcatacttgatagaagattctacagtgcattaagcataattctctagacccaagagaaagagtggataagagtcagaggcaggagttaaacctacctgcccccaaaggccaggggtctttccatagtgccattcctactacccttgcaatgacacttgtcaagagacctgactcagagaccacatataattgtacagctattaaaggaacacaacaattaattaaatcaaccagcatggkgttcacttgaaagaacagtatacattacacccatgtccctttagatatctaatatatatctcaaatttcacatgttccaaaatgagcctctgatcttcccaagtgccccttcccccactgc

SEQ ID NO: 144747 - DNA, 575 bp, Homo sapiens
ttccttagaattgtgaagatatttctccattgctcagttttgctgctgagaaggtaacattttgatttccaagtattttttatgtagcttgctttctatctctggaaactttcattctatcacattttatttttgtgatcatgttctcgtttctaacagatcccttctggtgttagactgttccttctgttggagcatcctttttttgtttgtttgtttcacagactcaatatcttctgaaacaacttttttattctttttttgaggcagagtctcggtctgttgcccaggctggagtgcagtggcatgatctcagctcactgcaaactccacctcccaggttcaagcgattcttctgcctcagcctcccgagtagctgggactacaggtgtatgccaccacacccagctaatttttgtgttttcagtagagatgagttttcaccgtattggccaygctggtctcgaactcctgacctcatgatccaccctccgtggcctcccaaagtgctgggattacaggcgtgagccactgcacccggcctcgatatcttcttatatctctttgaggaattc

SEQ ID NO: 144748 - DNA, 584 bp, Homo sapiens
cccccattccaggtcttagctcctggaaaacatttctagtcacagcctggcatatttaaaatgctgaaggaaaaaaacatttaccttgaacagtatatccagtgaaaatatctttcaaacatgaaggagaaataaagcctttcctagataaagagaaactgagagattccatcaacaccagacctgtccaacaagaaatgcyaaagggagttctttaatccaaaagaaaaggatattaattagcaataagaaataatctgaaggtacaaaactcattggcaatagtaggtacacagacaaacacagaatattataacactgtaattgtggtgtgtaaactaatcttatcttgagtagaaagactaaaagatgaaccaatcgaaaataataactatgacagcttttcaagacatagacagcataataatatataaatagaaataacaaaatattaaaaagcaggaacatgaagttaaatgtagagtttttattagttttttgtttgcttgtttgtttttgcaattagtgttgtcaccagcttaaaaataatgagtcataagatatcatttgctagcctcatggta

SEQ ID NO: 144749 - DNA, 582 bp, Homo sapiens
ttacgactattacgtgaattgttggtttatccttcctacattacttagatattttaaaatatttatcataatgaatttacaccaaagccttggtttattctgaggtgagtatgtgaatgcatcataggatttgattctttgtgttttacttctgtaagagtaacaacaattcgatatcaatgattaaatcaactttacattttaaawgacagtctaagtaaatgagtaataactttatattatctcaaattaaagtgaaacaactgacatacaagtcaattccctgcacctttttgctgagttaatgggatttcttttctaaagaagaaatatttaatgttattaaaggaagaaatagaagattggaagtcaatttttaaagcaaaataactaaaaatgaacagagtatagttgtcttcagcagattttttttaaaattccaaaggtctgtttctagtagattttctgtggtttaagctaaaataaatagttcgtggaaaccacaatatacaaatgatcagaaataatttttaaactctttttctaatgagttttttagtctaagaaacaccaaaataacag

SEQ ID NO: 144750 - DNA, 582 bp, Homo sapiens
ttacgactattacgtgaattgttggtttatccttcctacattacttagatattttaaaatatttatcataatgaatttacaccaaagccttggtttattctgaggtgagtatgtgaatgcatcataggatttgattctttgtgttttacttctgtaagagtaacaacaattcgatatcaatgattaaatcaactttacattttaaatgacagtctaagtaaatgagtaataactttatattatctcaaattaaagtgaaacaactgacatacaagtcaattccctgcacctttttgctgagttaatgggatttcttttctaaagaagaaatatttaatgttattaaaggaagaaatagaagattsgaagtcaatttttaaagcaaaataactaaaaatgaacagagtatagttgtcttcagcagattttttttaaaattccaaaggtctgtttctagtagattttctgtggtttaagctaaaataaatagttcgtggaaaccacaatatacaaatgatcagaaataatttttaaactctttttctaatgagttttttagtctaagaaacaccaaaataacag

SEQ ID NO: 144751 - DNA, 585 bp, Homo sapiens
atattagttttatgtggcataaatcactgtgcaaacattcaattttattttatagtctgtttattattccatcattccctcccatgatgttaatagtttaaattttaatactggaatgcaacatacaacacacaaatgatttcatctggctatttcaataataaggaaacaaattaaataaaaatgaaagggaagtttttgccatctgctactttgaagaactattattaatgcatcatctaattattgtacaactgtgtgattctcagcctttatgttactttttttacctttttgtgaaaaaaaaagtcttttawaaaggttctaccttcaaagagctctggagtcctcaattccaggggcttcagtatgcttcagtaactgtctaacctcctcaattccagtggattcaatacactttagtaaatccctcccatcaccctactttgaaccttgtcaactctaacattaaccccaaaatactactctctgacaagttcttaccctgccagcccttgactcatccattgatccttcctggcctcaagtccttccctgccatacgggacactatggtttactact

SEQ ID NO: 144752 - DNA, 529 bp, Homo sapiens
agtgggagctgaatgataagaacttatgagcacaaagaaggaaacaacagacactgtggtatgcttgaggtaggagggtgggaggaggaagatgaacagaaaagacaactattgggtactgagcttaatacctgggtgatataataatatgtaaaactcccatgacacatgtttccccatgtaacaaaccttcacgtgtacccccaaacctaaaataaatttttttaaaaaagatgtatggctgtaaaatgatcatgactttgagtactactaataagaatatctactattcaccaagtgcttactatgcatagcattgtgcaaggtgctccacatatttttaaaatttaatcgttaccaaaaaaatctatgaatcatgtataagcaaactgatatttaaaaaaaattagaaaactgaggctcagagaggttaagaagagccaagatgacayccctaaaggaaaaatactactgaatgatgattccttcaggaaacctaatagttctgttctggtttgttctgtcctta

SEQ ID NO: 144753 - DNA, 489 bp, Homo sapiens
tccccaaagcccatctggggctcgctgaaagctctttcttaattaccaacctcactaaaggtactcactggcttgactttttcaagagtatttttawaaattgacatataccttgcacaatataaaattcaccagtttaaagtgtacactttatggtttttagtggattcaccaagttgtgcaactatcaccattagttaattctagaacttttcaattccctccttcccccagatcctgtatttattagcagtttgtcccaaattctctctttccataatttcctttctgtgtcaggatttgcccattctggacatttcctataagtggaatcacatgtggtcttttgtgtctggtttctttcacttagcattatattttctttattttttaatttcattattatactttaagttctagggtacatgtgcacaatgcgcaggtttgttacatatgtatacatgtgccatgttggtgtgctgcacccat

SEQ ID NO: 144754 - DNA, 525 bp, Homo sapiens
ttctacatgttaacatgtaatgagtttattatcattatttttaagaaagtaataaataaatgtcaaaactgtcatatgcttaatttcaaatatgataaataccaatagctgtamcttattaaaacaaattctctttgagaaacttgatattttttaaaagtataaagaagtcctgagaccaaaagtttgagaactaatgaaacttaagactctttctcttttctttttcttccataattaaatgttgtttaatagttcctgaaagtctatggctgacaagtatgatgaaaacaaggatttataaaataattgtaaatttttatataaattgaaatgtaattcaataagtattcttatgtttatttttataagtcatttttacagttactgctttgtcaaaactaatatttccattaaaaaaagttgaggtatcttctaataagttccttgaaatgaacttttccttgaaaatcatctcttttttaactataggcatattaagctaaaaatgtcctctcttcattt

SEQ ID NO: 144755 - DNA, 412 bp, Homo sapiens
cgtctgtccctgcatttcctccacctggacttgcttaggccctcaggactgtcagcccagcccacggacctctccacgtgagctggactcccacctgcacaggtccctgtccgtgggyggccgggtctgggatgctgatggttttctcccatgccccggctccaacgtgtacatcctattccatggagaaagccaccgtccccccagagcgccaggttcctggcagctctgaacgctgctgcctccacgtggcctgcctttctctccccttcctggcctgatgaaattgtacttccactgctggggaagctccctggacactccttgtgtcccagccatcctgctcacggctcggtgagctccagaaagcagagcccgcaggttgtgtccctgggcctggctcccggcacag

SEQ ID NO: 144756 - DNA, 412 bp, Homo sapiens
cgtctgtccctgcatttcctccacctggacttgcttaggccctcaggactgtcagcccagcccacggacctctccacgtgagctggactcccacctgcacaggtccctgtccgtgggtggccgggtctgggatgctgatggttttctcccatrccccggctccaacgtgtacatcctattccatggagaaagccaccgtccccccagagcgccaggttcctggcagctctgaacgctgctgcctccacgtggcctgcctttctctccccttcctggcctgatgaaattgtacttccactgctggggaagctccctggacactccttgtgtcccagccatcctgctcacggctcggtgagctccagaaagcagagcccgcaggttgtgtccctgggcctggctcccggcacag

SEQ ID NO: 144757 - DNA, 409 bp, Homo sapiens
cagtggccaggctgggactcatctctgtgggctacggaggggctgccctgctccctagccagggacagggtgagaaggacctgggaacctctgsgtcccagccatggcacaggccttcttccggagctttggccccaaggagagggagaggcagcccagcagccctcgccttccgtggctgccactgtgacagccttgccctctgggaatggtgcgcaggaggccacttcacctgtctgggcctcttcgccctttcaaccctgagaagaacagtggtcctgattccccacaaaatcactccctcccagggatgccgagtgaggaacaagacgtggggcagctctgctctcctccctcctccctcccatggcagctgtgcccacctgcagaggtgcaggcaaggtggagg

SEQ ID NO: 144758 - DNA, 570 bp, Homo sapiens
gcacgattacaaggagcaagttcrgtttcctttcggagatgctgagcattaaattaaactttctaatacctgaaaagcagcctcaacacgatctgcacacttctttgtgctctgcagctgacaggggatggggagtggcaaatatcggcctttggagcattaaagaggaagctattaaggctgcatattttttcaaaaagaaagagtacaaagaattacaagaaaccccctaaattacaagtgtgggttacagtaattgctaaattacagagctccaactttattagatacacaccccctcagattctacagttttcaagggctgccttgagctgacaaaagctagaaagctctgtgggaagtgtggcggggagctgagcaggttagctaatgggagccccctttatgggcgaggccaggacacagaaatctggaccaggaccaatgaagtttttgttttctggtgttaaattaccctggggggcaatacagcctgtgctggggtttggaagtaggactgggatgttagcatttttttcatatgtggaagcagcagtggcctatggccaa

SEQ ID NO: 144759 - DNA, 570 bp, Homo sapiens
gcacgattacaaggagcaagttcagtttcctttcggagatgctgagcattaaattaaactttctaatmcctgaaaagcagcctcaacacgatctgcacacttctttgtgctctgcagctgacaggggatggggagtggcaaatatcggcctttggagcattaaagaggaagctattaaggctgcatattttttcaaaaagaaagagtacaaagaattacaagaaaccccctaaattacaagtgtgggttacagtaattgctaaattacagagctccaactttattagatacacaccccctcagattctacagttttcaagggctgccttgagctgacaaaagctagaaagctctgtgggaagtgtggcggggagctgagcaggttagctaatgggagccccctttatgggcgaggccaggacacagaaatctggaccaggaccaatgaagtttttgttttctggtgttaaattaccctggggggcaatacagcctgtgctggggtttggaagtaggactgggatgttagcatttttttcatatgtggaagcagcagtggcctatggccaa

SEQ ID NO: 144760 - DNA, 631 bp, Homo sapiens
aaccatctgagcctgatacttttgggggagtctagcactttaaaaacttaaactttttccatgggtctgtgagtttgggagtttttctttcttcttaaaattcattactatttttttcctagaaaagtgtcttttagcttatttaaaatcygtcagcttattccgagggggttgctttagctcgcttagtgaggacagtgtgcagcgcggtgattgacatgattgatcagcagagcacgatcgatcagtcggtgtgcaaacatgactgactgtggccagcgtcctgggatgctccatgttgaggcacatgtgtgcagtgcagggtgatgtgtattctgagaggggatgaagccacaggacccctgcacccttaggagagagcccccctccccaaggctgcagtcttgagtaggtagtgacgggactgggtctagggggctgagtggtcccagcaggccaagggcttcaggaattatgagaagtttggagttgcccagagagcagctttcaaaaccagtctggactgcagcctccagaaagacatgcgattgacaccacgaaccaggacacacctatatatggggtgggggtggggatgggatgtattaatgaaaccaaatttccgtgatgg

SEQ ID NO: 144761 - DNA, 471 bp, Homo sapiens
gactgtactaatgaggaaggttgagcctgtaggttttacacactcatggcaacttcaaggcagagaggccactgccaactgagggccacgggcaggagctttgtgagcccatcagcaagtctggaagatcaaggctcctggtcacagagagtagctgctatctggtcaattctgcagaaaacattatagctctggacaaaatatttraaagaacaaaataacaacagcctggagtcagtatagaatatctcaagtaggtagaagctggagtagagtctacacctgacagaggggaataaaactagataagtttctggtttctggaggcttttttgcccagaggtaggtactgagcaatcaaacttggataaaaagtcttaaaagcatccagggaaaaacaacatgtggtctacaggggaatagctagatgaatgctgattccttgacagaaacaacggaggccaaagacac

SEQ ID NO: 144762 - DNA, 471 bp, Homo sapiens
gactgtactaatgaggaaggttgagcctgtaggttttacacactcatggcaacttcaaggcagagaggccactgccaactgagggccacgggcaggagctttgtgagcccatcagcaagtctggaagatcaaggctcctggtcacagagagtagctgctatctggtcaattctgcagaaaacattatagctctggacaaaatatttgaaagaacaaaayaacaacagcctggagtcagtatagaatatctcaagtaggtagaagctggagtagagtctacacctgacagaggggaataaaactagataagtttctggtttctggaggcttttttgcccagaggtaggtactgagcaatcaaacttggataaaaagtcttaaaagcatccagggaaaaacaacatgtggtctacaggggaatagctagatgaatgctgattccttgacagaaacaacggaggccaaagacac

SEQ ID NO: 144763 - DNA, 471 bp, Homo sapiens
gactgtactaatgaggaaggttgagcctgtaggttttacacactcatggcaacttcaaggcagagaggccactgccaactgagggccacgggcaggagctttgtgagcccatcagcaagtctggaagatcaaggctcctggtcacagagagtagctgctatctggtcaattctgcagaaaacattatagctctggacaaaatatttgaaagaacaaaataacaacagcctggagtcagtatagaatatctcaagtaggtagaagctggagtagagtctacacctgacagaggggaataaaactagataagtttctggtttctggaggcttttttgcccagaggtaggtactgagcaatyaaacttggataaaaagtcttaaaagcatccagggaaaaacaacatgtggtctacaggggaatagctagatgaatgctgattccttgacagaaacaacggaggccaaagacac

SEQ ID NO: 144764 - DNA, 635 bp, Homo sapiens
tttaaaataatttgctcaagctcacacagctaataaatggcagagctgggacccaatccttatctgttggattgcaaagtccatgtgtaatatttcccctgccctggtaccagtaaagaagcagcacccataatctagtctagggtaataaggaatggccagaaatttaaaaggaaagtaaaagggctagcagttgagtggacattgaaatggagcagccagaaacaaatgaacaggaaaagagcaaagatagaactagaaagtctgagacaactacagagagtgaakctggagttcttggaactttttgtttttggtcttcggtcccatggtttggaggaggggtggcctggcccaggggcccaggatgggtacccctcagctgagcttgggtcctcactcctggatctgttctgcttacagtgaccacttcactgactgagctccagccccaggataccgctccaacctcggctagaagcaacatggggctcaattcagccttggatgggacaaaaggaacaaaaactaagggaatgaacaaataaggcatcctgggttttagacattaaagagttttctataagcttgaggatgacctcacgtaaagttatataggtgatattggccccatg

SEQ ID NO: 144765 - DNA, 583 bp, Homo sapiens
cttgagaactgcatggctgagagagaggaaacaggtggacaccacgtgggctgaaggaagcccagggtcaccaacccaccctggggccagaaggcaattgttccctttggaggatggtgtgttaatcatcagatcactgagctgtcaggctgcagagaggggaaatttaaagtcagggcttgtcagatttgcaacaaggaactgatttagcagcagtttgagtcccttttagtccttcttattctcatcagcaataagttggatgttggaaaaaatttaacatggtaatttatgccaggtgaactacactgtgctctgtgcttctggggtgctttcctggagtcctggaactttgtagctgggaaaggccgtctggtccagtgcctgatgattgattggttcttggtcatgtttattcaatcatactgattctctggagaagggaagtgacctgccyaaggttgtgtagcatgttagggctggagggggtctggtcccaggcagcaggtgcccttctccacagggaccattgaattctgtgctcctggaaacctccatcataaatacgatctccaaaatgagc

SEQ ID NO: 144766 - DNA, 614 bp, Homo sapiens
cagagaggtttaggcacttgtccaacatcacagagacaaatcagtgacagccaggaatagtatcgacatttccagcctggaaacttggtactgactcgctgtccactgatgacatgctcgatgtttttgtgtgtgtcttttctcctgcagtagggttttgcgtctcttaggtcctctgtagtggcgcaaaggtcatgaagggtgtacacagagcttctatcagatattggccactcctcccctatgccggtttccactggacgagcarggaggggcaattatagcagtgctgatgggagggaagtggagtccatgaaatgtccatcaagttctattccacaaccaaaggcacttcaggcattcgtgaggtggtggtagtgatggtgaatattttgggggaccagcagtggcattcccagtgcttctaaaatcaccttgtaagggtggggaactttctggttctgggtgaggggttctgatggaaattacggtgtcagattctggggtctgattgccttgcttttagggtgggcacaagccccgctctggcagaaggagtctgctcctcaaaggcagccctgggatagactctggaatgaccgggtggtcgtgcc

SEQ ID NO: 144767 - DNA, 442 bp, Homo sapiens
ccaatgctcatcactgagattagtagccattgtacatgcatgtgtaattattttgatgcttttttgtaattttcctttttttggtggtgtgtgggcacaggtgtgtgtgtgtgtgtgtgtatgcagatctgtgcatcttctgatgaaacttctgtctaaggccccctcttctgtgtgccatgcatttttctacaaaatctaatgcccttatcacatacttggacagccctgataaaagatattgactgactccatcttcagcctcctcaaaggtatattgtagtcagaaggccaawtcctaggcaagaagtctatttaaatggaaatattggtggtttttaagggttcatgctactataattcatgaatccttcttctactataccagagtttgctaacctcttccctttttggatatttatagatctttgtttgccatcac

SEQ ID NO: 144768 - DNA, 483 bp, Homo sapiens
ggttatttcaaagatgtgtggtaaatagcatggaacgtgggtaatgaggtgatatggtcacccttctgtggcmcagcagaaggaagctggggactgagaggcaagtgcagtgtcttggttgctgacacaggcctggtgaaacccttccctccagggagaattatatccagctgtggtcaaaactgggactctctggcacagaggaacattgtccaactctttggaattacaaagcacatgagtcaaaggagatctcctttggatggggaaatgaggagaaaaccagttttggagaaacatagaataaacaactttgcaccagcagcttctgacatctacacacccatatagatctccaggcatcacctggctcttgggctctgctaggacctgggtctttggatggctgtgtctatttcagagggtgattagatcctggtgggtggtttctgatctcccatccctccaataaggactttataa

SEQ ID NO: 144769 - DNA, 425 bp, Homo sapiens
atacaggaaatatctaaaagaaaggaagggaattttcagatttacattatataacaagaatacattttaatttatattaacaggcagtattggtatttctttagaaccttctgggctgagtgctaggggacaatgtgggaggataaatgagaagacatagagaagaaggtaagttcattattcttgtcctgaaggtacttrcaggtgagttgggaagatgaccagccacagtcatacttcctaaaggttcgggatgtcaggacctcatatagtaagacacaggctcaggcagcactggctggagatggggggaaagctcttgagggaaagatcagtggggaaagatgtaaactgctgttgttgctttttaagaatttaggaaaagctatgctatttcatttttaaaaaacaaagcttgtattgtg

SEQ ID NO: 144770 - DNA, 485 bp, Homo sapiens
agccattctgactgttgtgagatcttatcttattgtggttttgatttgtatttctctgatcattagtgatgttgagtattttttatatgtttggtgactgcttctttgtcttcttttgagaagtgtctgttcatgttcttagcmcacgttttaatggggttatttgggttattttcttgttgatttatttaagttccttatagattctggatattggtcctttgtcagatacataatttgtgaatattttatcccatcatgaaggttgtctgtactcttctgatagtttcttttgctgtgcagaagctctttagtttaattaggtgccatttgtcaattttcgtttttgaccaaagaataaattctttggtcataaattcttttccaaggccaatgtccagaaaggtatgtcctaggttttcttttagaatttttatagtttcaggtttttcatttaagtctttaatctaccttcaattaatttt

SEQ ID NO: 144771 - DNA, 575 bp, Homo sapiens
gtatcagtcaaaaagtgaaataaggtcaggttcattacaggctcatgcctgtaatcccaggtactcaggaggctgaggtggaaggattgcttcagcccaagagttcaagattacagtgagctatgatcaccctgggggacacagtgagacccagtctctgaaaaaatgaaaagaaaagaaaaaagtaagatacatcttaaaatagcaacaaaaattataaaggacttaagagtaaacatatgcaaggaaatatttgcaagtccttcataaagaatataataaaactttattaaaagacagcaaggaaggactaaatatatgcagaaatatrccattttcttggacaggaagagtcaatattataaagatgtcaatttccttcaaactgatcttgaggtttattgcaattccaaccgaagtgttaaacaggttttggtggatattgacaagctgactgtaaagtattgtcctatttgtatccgtgggattttaatttatggaggtgactgagtggtgacacagggtggtcaatgctactgaaaaaagaatttataacaatattctgagagagaggg

SEQ ID NO: 144772 - DNA, 457 bp, Homo sapiens
taatataattgtatttggaagagcaaatagctaagaataatcaaggcgcttacaaagaagaagaataatttgaggatacccstctgaccagatgtgaagtgatactatttaatttacggtggtttaaaaagcacaatttggcacaagattagaaaaatgaggccaatggaagacagtggagaatccagaaacaaacctgccttcttttatgctaaatagatatattctagtatcattttcattccttgttatttctttaactacatattttttagttattttcttagtggttggcttggggattactattagcatcttaatcttaatttataacaatctcatttgaattaatacccttttaatttccatagtatataaaacctgctccaaaatagcttcacccccttttccctctttttgctattattatcacaaattacatctttattcatcatct

SEQ ID NO: 144773 - DNA, 548 bp, Homo sapiens
cataggaaataacttcaactaccaatgtgtatgttttgggaaataaacatggaagaagataggtcagagtcagcttagtgtcatcatcaaaaaatgcctatactacttggctcttctttaaataygatacttgggttaggaacaaagactctgctggaaaagcagtttaattatcaccaaccttctcaaagcaaagcacaaaacaactactgtgggatttcaaatctgtcatcaatctctcttatacttcattcatcacaaggcccctggatttaacaagcactaggcctcacccacttcaaagaccatggggaaacccacttcaacaaaagtctcctttgagcctatgtggagtgattttacttttttcttactcttcatcccagaagttaattccagagttggttgatacaataatcttgagcaatcgactgcagacctaaacacttcttggctgactttatcccatttgaaatgcataaagttactgtgattcaagttatgccctaggtgttgattttttatgagcctataatcccagagatgta

SEQ ID NO: 144774 - DNA, 535 bp, Homo sapiens
ggtaataattttgcttctagaccagcaagctaatatmtcaaaaactcttacatataaatgtagttgtttaaaaatatttatgctgtgtaatgtctgtaatttatgagttacagacatgatatccattatatttttgcctaataattcatttttaggaaaaactaagaataaagttattctttgtatttttaccaatcttttccccaaccaagtgttactgaaactgtcattccgaaatctttttaccttttaaggttctcacttttgaggctgagaactatgaaactagtattcaaatttgcattcattgttgtaatttctggcagcatgtccaatttacttctactgttaggtgcttgtttgttgtacttatgaagaactaagaaggattttctagtagcccagagttatgttattttttgcttagtgacaatttttacaagagactttattataatgaaaccaatgaaatgcatcacagtactttttcagagtgccagtggcttatgagatattttttgatgtaaacttgtta

SEQ ID NO: 144775 - DNA, 535 bp, Homo sapiens
ggtaataattttgcttctagaccagcaagctaatatatcaaaaactcttacatrtaaatgtagttgtttaaaaatatttatgctgtgtaatgtctgtaatttatgagttacagacatgatatccattatatttttgcctaataattcatttttaggaaaaactaagaataaagttattctttgtatttttaccaatcttttccccaaccaagtgttactgaaactgtcattccgaaatctttttaccttttaaggttctcacttttgaggctgagaactatgaaactagtattcaaatttgcattcattgttgtaatttctggcagcatgtccaatttacttctactgttaggtgcttgtttgttgtacttatgaagaactaagaaggattttctagtagcccagagttatgttattttttgcttagtgacaatttttacaagagactttattataatgaaaccaatgaaatgcatcacagtactttttcagagtgccagtggcttatgagatattttttgatgtaaacttgtta

SEQ ID NO: 144776 - DNA, 535 bp, Homo sapiens
ggtaataattttgcttctagaccagcaagctaatatatcaaaaactcttacatataaatgtagttgtttaaaaatatttatgctgtgtaatgtcwgtaatttatgagttacagacatgatatccattatatttttgcctaataattcatttttaggaaaaactaagaataaagttattctttgtatttttaccaatcttttccccaaccaagtgttactgaaactgtcattccgaaatctttttaccttttaaggttctcacttttgaggctgagaactatgaaactagtattcaaatttgcattcattgttgtaatttctggcagcatgtccaatttacttctactgttaggtgcttgtttgttgtacttatgaagaactaagaaggattttctagtagcccagagttatgttattttttgcttagtgacaatttttacaagagactttattataatgaaaccaatgaaatgcatcacagtactttttcagagtgccagtggcttatgagatattttttgatgtaaacttgtta

SEQ ID NO: 144777 - DNA, 628 bp, Homo sapiens
atgaaaaagtgttcggaatgtacagactagcacagaagctggactaattgaacaagtattgctgaaaatgagtgctgtagatgacatgatagcaggtatggggttgtctgtcaggaaagtataacttaaatgtttataaagtttcacatacttctctttatattctataggtaatgtagatttgttgacactgctttgatttaaaataaatggaaatgtatagaaattttactttttatattaatggaaaacctgaaaagtgaaagaagaaaaacataattattatagtagacaaacataattactaacgttgttttctaaattttagaaaatctcwgtaccacggagtgctatgaagtctatcagaaaaataaacagtatctttttatgtagtatttcattcagcttttacataattaaaatgccacaataggtattacagttctgtataatgagcatttcaccaaattcccctagttctgtgcccctcaatctggcatatatgcaactatgacaggaagtactaaaagccttagataagcatggtgtatcttttttttttccccacgtatattttttgttgctttttgttttttttctgtaaaatgtcccggttcttccataactt

SEQ ID NO: 144778 - DNA, 628 bp, Homo sapiens
atgaaaaagtgttcggaatgtacagactagcacagaagctggactaattgaacaagtattgctgaaaatgagtgctgtagatgacatgatagcaggtatggggttgtctgtcaggaaagtataacttaaatgtttataaagtttcacatacttctctttatattctataggtaatgtagatttgttgacactgctttgatttaaaataaatggaaatgtatagaaattttactttttatattaatggaaaacctgaaaagtgaaagaagaaaaacataattattatagtagacaaacataattactaacgttgttttctaaattttagaaaatctcagtaccacggagtgctatgaagtctatcagaaaaataaacagtatctttttatgtagtatttcattmagcttttacataattaaaatgccacaataggtattacagttctgtataatgagcatttcaccaaattcccctagttctgtgcccctcaatctggcatatatgcaactatgacaggaagtactaaaagccttagataagcatggtgtatcttttttttttccccacgtatattttttgttgctttttgttttttttctgtaaaatgtcccggttcttccataactt

SEQ ID NO: 144779 - DNA, 628 bp, Homo sapiens
atgaaaaagtgttcggaatgtacagactagcacagaagctggactaattgaacaagtattgctgaaaatgagtgctgtagatgacatgatagcaggtatggggttgtctgtcaggaaagtataacttaaatgtttataaagtttcacatacttctctttatattctataggtaatgtagatttgttgacactgctttgatttaaaataaatggaaatgtatagaaattttactttttatattaatggaaaacctgaaaagtgaaagaagaaaaacataattattatagtagacaaacataattactaacgttgttttctaaattttagaaaatctcagtaccacggagtgctatgaagtctatcagaaaaataaacagtatctttttatgtagtatttcattcagcttttacataattaaaatgccacaataggtattacagttctgtataatgrgcatttcaccaaattcccctagttctgtgcccctcaatctggcatatatgcaactatgacaggaagtactaaaagccttagataagcatggtgtatcttttttttttccccacgtatattttttgttgctttttgttttttttctgtaaaatgtcccggttcttccataactt

SEQ ID NO: 144780 - DNA, 628 bp, Homo sapiens
atgaaaaagtgttcggaatgtacagactagcacagaagctggactaattgaacaagtattgctgaaaatgagtgctgtagatgacatgatagcaggtatggggttgtctgtcaggaaagtataacttaaatgtttataaagtttcacatacttctctttatattctataggtaatgtagatttgttgacactgctttgatttaaaataaatggaaatgtatagaaattttactttttatattaatggaaaacctgaaaagtgaaagaagaaaaacataattattatagtagacaaacataattactaacgttgttttctaaattttagaaaatctcagtaccacggagtgctatgaagtctatcagaaaaataaacagtatctttttatgtagtatttcattcagcttttacataattaaaatgccacaataggtattacagttctgtataatgagcatttcaccaaattcccctagttctgtgcccctcaatctggcatatatgcaactatgacaggaagyactaaaagccttagataagcatggtgtatcttttttttttccccacgtatattttttgttgctttttgttttttttctgtaaaatgtcccggttcttccataactt

SEQ ID NO: 144781 - DNA, 361 bp, Homo sapiens
cctttgtaaagctctcaatatgcaatgattctaaggggtctagttagsagcagggccagagaatgatgtggattttaaaaagtcttctgtgaagattctcacaaacctggaaaagtcataagtatttgcttttattgtgcttcattattcaaaataaatttattctcttatttcttcctttctttaatttcccacagatgccctagctaagttgttgttatccttcctaataagagatttactggcctttcaaaaagaaatctttacattaaaacttttgctttcccagctgcaccacttaccagctgttagaacttgtgaaaatggatataaaccattagcatgttatctaatggtaata

SEQ ID NO: 144782 - DNA, 361 bp, Homo sapiens
cctttgtaaagctctcaatatgcaatgattctaaggggtctagttagcagcagggccagagaatgatgtggattttaaaaagtcttctgtgaagattctcamaaacctggaaaagtcataagtatttgcttttattgtgcttcattattcaaaataaatttattctcttatttcttcctttctttaatttcccacagatgccctagctaagttgttgttatccttcctaataagagatttactggcctttcaaaaagaaatctttacattaaaacttttgctttcccagctgcaccacttaccagctgttagaacttgtgaaaatggatataaaccattagcatgttatctaatggtaata

SEQ ID NO: 144783 - DNA, 361 bp, Homo sapiens
cctttgtaaagctctcaatatgcaatgattctaaggggtctagttagcagcagggccagagaatgatgtggattttaaaaagtcttctgtgaagattctcacaaacctkgaaaagtcataagtatttgcttttattgtgcttcattattcaaaataaatttattctcttatttcttcctttctttaatttcccacagatgccctagctaagttgttgttatccttcctaataagagatttactggcctttcaaaaagaaatctttacattaaaacttttgctttcccagctgcaccacttaccagctgttagaacttgtgaaaatggatataaaccattagcatgttatctaatggtaata

SEQ ID NO: 144784 - DNA, 361 bp, Homo sapiens
cctttgtaaagctctcaatatgcaatgattctaaggggtctagttagcagcagggccagagaatgatgtggattttaaaaagtcttctgtgaagattctcacaaacctggaaaagtcataagtatttgcttttattgtgcttcattattcaaaataaatttattctcttatttcttcctttctttaatttcccacagatgccctagctaagttgttgttatccttcctaataagagatttactggcctttcaaaaagaaatctttacattaaaacttttgctttcccagctgcaccacttaccagctgttagaacttgtgaaaatggrtataaaccattagcatgttatctaatggtaata

SEQ ID NO: 144785 - DNA, 549 bp, Homo sapiens
cactgtacctggctgaatgagtgcctctatcctgacacttgtgtccccacgggatcctgcagaattcagraccccgtccacacaggggaaaactctctgttgcggtcctgatgactgaggagggagcttacccatggctctcctggtcatttttatttaatagtgagcgcagaacctcacattttctggaatgttcccatatgattttgtgagagaaaagagaatagagacccaaccccaagctcactgtgtcaaagggaaaattaagcttgggaactgagttacgcaatactccttccttgttctcaaacacatagctataacttcacaaccctgtgtcatagcctcatccataagccaggttcccacagtgacagaaggctgcatgtctcctcacatgtcctccctcacaatttgctgtgagcccctaaatctttcagaatgcacatcccacctataaactagccctaaaagtgagtcggctcaatttcaccctgacaatctcaattaccaggttattttcatagttctgggacaaggtcaggacca

SEQ ID NO: 144786 - DNA, 549 bp, Homo sapiens
cactgtacctggctgaatgagtgcctctatcctgacacttgtgtccccacgggatcctgcagaattcaggaccccgtccacacaggggaaaactctctgttgcggtcctgatgactgaggagggagcttacccatggctctcctggtcatttttatttaatagtgagcgcagaacctcacattttctggaatgttcccatatgattttgtgagagaaaagagaatagagacccaaccccaagctcactgtgtcaaagggaaaattaagcttgggaactgagttacgcaatactccttccttgttctcaaacacatagctataacttcacaaccctgtgtcatagcctcatccataagccaggttcccacagtgacagaaggctgcatgtctcctcacatgtcctccctcacaatttgctgtgagcccctaaatctttcagaatgcacatcccacctataaactagccctaaaagtgagtsggctcaatttcaccctgacaatctcaattaccaggttattttcatagttctgggacaaggtcaggacca

SEQ ID NO: 144787 - DNA, 198 bp, Homo sapiens
agcttccctcaaaaggaagcttgtgcaggaaacatcatgcatsgagcagcatggggacaggggctggccagctgggcagcgctcacactcctgacacccagactccacgatactcctctgtccccacccagggcagatccctgccctaaaagttttccctctcatgtccagcaaatgctgcatggagccctggaattc

SEQ ID NO: 144788 - DNA, 198 bp, Homo sapiens
agcttccctcaaaaggaagcttgtgcaggaaacatcatgcatcgagcagcatggggacaggggctggccagctgggcagsgctcacactcctgacacccagactccacgatactcctctgtccccacccagggcagatccctgccctaaaagttttccctctcatgtccagcaaatgctgcatggagccctggaattc

SEQ ID NO: 144789 - DNA, 198 bp, Homo sapiens
agcttccctcaaaaggaagcttgtgcaggaaacatcatgcatcgagcagcatggggacaggggctggccagctgggcagcgctcacaytcctgacacccagactccacgatactcctctgtccccacccagggcagatccctgccctaaaagttttccctctcatgtccagcaaatgctgcatggagccctggaattc

SEQ ID NO: 144790 - DNA, 184 bp, Homo sapiens
ctgcagaggccaacagttcccagagtgaccttcctcagaaaacagggtcttggaggagacagtyagaggagggggcctcatcctccccactgcacagcccctcatggggattggaaagtgagggtctctgcccacaagttggcagtcaccctaagctcttttgtgggaggaagcatagggaata

SEQ ID NO: 144791 - DNA, 299 bp, Homo sapiens
taatgttgggagaaggaagctgtagacaatccgtgaatatcccaacatctgttgtaggaaggttaagattattatttttttttttgctgtacttaactgaatactcatatttatagtgtgagacaaatgtaatgttgcatataaatagaactaggaaaatgtgcyatttgtcttaatatttaatcaagatggaagtctgggcccacctcctctgttttattaatatgtagacaggacaccaacacacatttgaatgaggacaaacaaaatgttagcaaatgaagaatggtattaattgg

SEQ ID NO: 144792 - DNA, 299 bp, Homo sapiens
taatgttgggagaaggaagctgtagacaatccgtgaatatcccaacatctgttgtaggaaggttaagattattatttttttttttgctgtacttaactgaatactcatatttatagtgtgagacaaatgtaatgttgcatataaatagaactaggaaaatgtgctatttgtcttaatatttaatcaagatggaagtctgggccyacctcctctgttttattaatatgtagacaggacaccaacacacatttgaatgaggacaaacaaaatgttagcaaatgaagaatggtattaattgg

SEQ ID NO: 144793 - DNA, 299 bp, Homo sapiens
taatgttgggagaaggaagctgtagacaatccgtgaatatcccaacatctgttgtaggaaggttaagattattatttttttttttgctgtacttaactgaatactcatatttatagtgtgagacaaatgtaatgttgcatataaatagaactaggaaaatgtgctatttgtcttaatatttaatcaagatggaagtctgggcccacctcctctsttttattaatatgtagacaggacaccaacacacatttgaatgaggacaaacaaaatgttagcaaatgaagaatggtattaattgg

SEQ ID NO: 144794 - DNA, 381 bp, Homo sapiens
tctgttgccaaggaagtgaggtcgcttctttaagtttccatcccctcggcctcctccttccagaaaaccttctcaggaccccagtgggctgctgactgctaaccctccccacaggtcaactccttacctgtacacagttatgtccacccagggcctgcttggacacctgcacctgatgttcaccagagacctaggaatccacttgcagcctgkgatcctacaggggcctaatgttaccctgcagattgggtagccacctggggaccaggtatcaacctggggactgtggttgacctgcgggctaatgtccacctggggactggttactcacctgaggcctgatgtgtacctggggcccaatgtccccctcagggtgaattc

SEQ ID NO: 144795 - DNA, 435 bp, Homo sapiens
gcttcttataaaaagtgttagattctgtgaaacatgtttagtgtatctgttgagataataatattaatatgttagtcagtctaggtacaggcttgttagtagtgttgatcttttcaaagaactggcttttgattttattagtgttttcacagttgttttcttattgtctatttcattaagttcttctataattctttttatttttttctttctgcttgttttatgtttagtttgcttttttgcttccagggtcataargtgggaggtttagttgttgatttgaagtcctctttttaaatacaaacatttacacgtagaagtttctaagtgccttaactgcttatattttggtatttgtgcctttattcatctcaaaatactttgtaatttcccttttgattatttcttctttgacacatcagttatttaggaatg

SEQ ID NO: 144796 - DNA, 435 bp, Homo sapiens
gcttcttataaaaagtgttagattctgtgaaacatgtttagtgtatctgttgagataataatattaatatgttagtcagtctaggtacaggcttgttagtagtgttgatcttttcaaagaactggcttttgattttattagtgttttcacagttgttttcttattgtctatttcattaagttcttctataattctttttatttttttctttctgcttgttttatgtttagtttgcttttttgcttccagggtcataaagtgggaggtttagttgttgatttgaagtcctctttttaaatacaaacatttacacgtakaagtttctaagtgccttaactgcttatattttggtatttgtgcctttattcatctcaaaatactttgtaatttcccttttgattatttcttctttgacacatcagttatttaggaatg

SEQ ID NO: 144797 - DNA, 435 bp, Homo sapiens
gcttcttataaaaagtgttagattctgtgaaacatgtttagtgtatctgttgagataataatattaatatgttagtcagtctaggtacaggcttgttagtagtgttgatcttttcaaagaactggcttttgattttattagtgttttcacagttgttttcttattgtctatttcattaagttcttctataattctttttatttttttctttctgcttgttttatgtttagtttgcttttttgcttccagggtcataaagtgggaggtttagttgttgatttgaagtcctctttttaaatacaaacatttacacgtagaagtttctaagtgccttaactgcttatattttggtatttgtgcctttattcatctcaaaataytttgtaatttcccttttgattatttcttctttgacacatcagttatttaggaatg

SEQ ID NO: 144798 - DNA, 481 bp, Homo sapiens
agcatctttattggcataataaaacttaactctcattgaattgaagtgacaataacaaagtaagtaacaccactgaatagtccctgacacatgaaaggtacacaagtactttcttattgcaaatgtttctctgctttaaaacttttragttttaattgttgcttttaaaaagagtgtttaccttggttttattttttcagagtaccttcaagtttaaatctgagagtgatattcatttggcagaacatcataaacaggttttgtatgatgggaaacttgcaagtagcattacctttacatatactgctaaggccactgatgctcaactctgcctggaatcatcaccaaaagagaatgcatcaatttttgtgcattcccaacatgctctaatgcttcaggtgggtgaatcatggctgtgttttcatgttcttgtcagaatttaacagtatctttattttatgtatcaaacattgctcatcta

SEQ ID NO: 144799 - DNA, 502 bp, Homo sapiens
tctttattggcataataaaacttaactctcattgaattgaagtgacaataacaaagtaagtaacaccactgaatagtccctgacacatgaaaggtacacaagtactttcttattgcaaatgtttctctgctttaaaacttttaagttttaattgttgcttttaaaaasagtgtttaccttggttttattttttcagagtaccttcaagtttaaatctgagagtgatattcatttggcagaacatcataaacaggttttgtatgatgggaaacttgcaagtagcattacctttacatatactgctaaggccactgatgctcaactctgcctggaatcatcaccaaaagagaatgcatcaatttttgtgcattcccaacatgctctaatgcttcaggtgggtgaatcatggctgtgttttcatgttcttgtcagaatttaacagtatctttattttatgtatcaaacattgctcatctataaatctgtgactttttgtttcttt

SEQ ID NO: 144800 - DNA, 502 bp, Homo sapiens
tctttattggcataataaaacttaactctcattgaattgaagtgacaataacaaagtaagtaacaccactgaatagtccctgacacatgaaaggtacacaagtactttcttattgcaaatgtttctctgctttaaaacttttaagttttaattgttgcttttaaaaagagkgtttaccttggttttattttttcagagtaccttcaagtttaaatctgagagtgatattcatttggcagaacatcataaacaggttttgtatgatgggaaacttgcaagtagcattacctttacatatactgctaaggccactgatgctcaactctgcctggaatcatcaccaaaagagaatgcatcaatttttgtgcattcccaacatgctctaatgcttcaggtgggtgaatcatggctgtgttttcatgttcttgtcagaatttaacagtatctttattttatgtatcaaacattgctcatctataaatctgtgactttttgtttcttt

SEQ ID NO: 144801 - DNA, 502 bp, Homo sapiens
tctttattggcataataaaacttaactctcattgaattgaagtgacaataacaaagtaagtaacaccactgaatagtccctgacacatgaaaggtacacaagtactttcttattgcaaatgtttctctgctttaaaacttttaagttttaattgttgcttttaaaaagagtgtttaccttggttttattttttcagagtaccttcaagtttaaatctgagagtgatattcatttggcagaacatcataaacaggttttgtatgatgggaaacttgcaagtagcattrcctttacatatactgctaaggccactgatgctcaactctgcctggaatcatcaccaaaagagaatgcatcaatttttgtgcattcccaacatgctctaatgcttcaggtgggtgaatcatggctgtgttttcatgttcttgtcagaatttaacagtatctttattttatgtatcaaacattgctcatctataaatctgtgactttttgtttcttt

SEQ ID NO: 144802 - DNA, 235 bp, Homo sapiens
taatggcaactcccattttatagtttctcagctcaatattcttggtgtccccttttaattctgtctctgtagctctgtcactctctttctgtatctgattctctccctctctctcctctctctcttgctcactstcactcttgctctctctccctgcttcacacacacacaaacacacacagacagacacacgcacacacacacacacacattttcagatctgatgtgtatggaa

SEQ ID NO: 144803 - DNA, 537 bp, Homo sapiens
tatagaattccagaacacttaacctactttccctccaccatgtttttgataattacctctagtccttttttgcaggtttcatctttactattttttaaatgtcagaggacgattaggctcacgactttgactgctcatctttcttatctttgctttcttactgatttttgtgtcattaatttcctgatatttcacattacacttaaacactggacactacacccagcactccctgacttatccacatggatgtcagttaggaatctcaaaattaatatgtctatatggagccactgaaactccccaaatttgctcttccccattctgtttaatggcaactcccattttatagtttctcagctcaatattcttggtgtccccttttaattctgtctctgtagctctgtcactctctttctgtatctgattctctccctctctctcctctctctcttgctcactgtcactcttgctctctctccctgcttcacacacayacaaacacacacagacagacacacgcacacacacacacac

SEQ ID NO: 144804 - DNA, 504 bp, Homo sapiens
tggaattcctgccagctttacctttaaagtataataattccaaatgttgtttccaaattcacattcccacccccaccacttggtaactatagcgcttcyctcacaaggccaagtgcagagatttcttggggaaataatgagaactattatacattcttatttcaaggacccttaaaattataggattactatatttgatactaatttaagcttctgtcattgcccttttttcaatccagtctccacacagctaccacagtgtgcaagtagaagtctcagccgtatcaccacactcctgctttaatgtccctactccattgcttcttttcttcttcagaagagtttaagcttaatgaagctgggcaacgttacatatttttccatgagctggagatcacttggtgtaaggtaaatgatcagtaaatattttcaaataacagaatccaggaataatagttttgtttctttgagagtacatttacttttaaaaatcaaggaaataga

SEQ ID NO: 144805 - DNA, 504 bp, Homo sapiens
tggaattcctgccagctttacctttaaagtataataattccaaatgttgtttccaaattcacattcccacccccaccacttggtaactatagcgcttctctcacaaggccaagtgcagagatttcttggggaaataatgagaactattatacattcttatttcaaggacccttaaaattataggattactatatttgatactaatttaagcttctgtcattgcccttttttcaatccagtctccacacagctaccacagtgtgcaagtagaagtctcagccgtatcaccacactcctgctttaatgtccctactccattgcttcttttcttcttcagaagagtttaagcttaatgaagctgggcaackttacatatttttccatgagctggagatcacttggtgtaaggtaaatgatcagtaaatattttcaaataacagaatccaggaataatagttttgtttctttgagagtacatttacttttaaaaatcaaggaaataga

SEQ ID NO: 144806 - DNA, 315 bp, Homo sapiens
ctagttgtccagtcccaagaaacccatcaaacttcasatgtctttactgacaaatggacattgcatttctcattgattttactatctctggggaggtgtgctccctgaaggcagcacttttatttccagtgaaaaaggcacggttaggcaatatgggaaaggcatttctgaatttcaggaccagtcctaaaattgagtttgggtcagttctctctagaaaatattctattttatctacaaagcaaaattattttattccttacaataatatcagagacagtttcgctactatttacattcagtcttttgccctaa

SEQ ID NO: 144807 - DNA, 550 bp, Homo sapiens
ctggcgctacaaagccacaggcaaagcaaactgttgtccccaaaatccattacttccttctacctgggtgcacaatcgcccatctaaaggtcataatttccatcctcccttgcaattaagtatcttcacataggtaagtcctggccaatggaatgtgaatggaagtaatatgcaaaacttctgagttgtacctttaaaaggaaagggtgtgcttcccactttcttttgtccccttcttgccagctgaagtgtgacaagaacttgaaatggaagccacaatgtaaggatgacaggacaacctgccagaagactgtgcagctccctcatcagcctgtatgcctagactgtgacatgagggagaaacagacttttgtgtttctaagccagtgytgtctttatctcagcagccaaattggtaacaaaactaatatttaatccagaaatttcctgcactctagcattcacaactcttttttttcaagacaaggtctgtctctgttgtccaggctacagtgcagtggctccatcacagctcacttgcagcctcaac

SEQ ID NO: 144808 - DNA, 539 bp, Homo sapiens
cctactttttttttttttccatccagtgttggagcagtaacagtggacttcagctktgagtcaattaaggtgatgttggaaaatggaaaatggagtggttcacattctgctgattaaagagtattttttggatttaatgagatttaaaacattttgcaacattttccagggaattcaaaactcccttggaattataagaattatgaaacttattttgagcagcataatgacaatacggcatcgctaagcattaaatgaaataaaaatatccgcaacaatttttgcctgtctaaatataggagagtagctgaaaaacaaaagagaccaaaacgcgcccagattttcaagaaaagaaagtccttatcaatgaagcatcaaacccgaagtagatgagtgggctctgttttacttttttttttttttttttttttggagtcttggttatgtttggaacacatgggttgctgaagaaaaacagaaaagtttttgatcttaccagtaaaaagaacttctctagaagttacaaaaagattaaatac

SEQ ID NO: 144809 - DNA, 487 bp, Homo sapiens
cacccaagtcttacttacccatgctaaatgtgcccagagtgccttgaataatctgaaacttcaatactaaagagtgatggaggtttattgccttctcagcttctcagagagttgcaagcacargacatgaatcagtggtatcataagtcctgagccacacactgctgttaaagtgctagtaatgtaacgccaaagaatcctagaattgtgaagagtcgtcctggagattgttgcttaaatcccctcattttccagtcatcctactggacctccttgcttggatgcccaaaccacaggacctggtgccaaacaaatggtcttccctttttgcacaaccatctactcctcctctgacttccttgtttctattaataacaccaacagtccccaatctctaaggctcaaaactggaatttcctttttcctctccttcttgctcatcattccatcttctcattgctacaggcccagtttagatcctattaat

SEQ ID NO: 144810 - DNA, 479 bp, Homo sapiens
cacccaagtcttacttacccatgctaaatgtgcccagagtgccttgaataatctgaaacttcaatactaaagagtgatggaggtttattgccttctcagcttctcagagagttgcaagcacaggacatgaatcagtggtatcataagtcctgagccacacactgctgttaaagkgctagtaatgtaacgccaaagaatcctagaattgtgaagagtcgtcctggagattgttgcttaaatcccctcattttccagtcatcctactggacctccttgcttggatgcccaaaccacaggacctggtgccaaacaaatggtcttccctttttgcacaaccatctactcctcctctgacttccttgtttctattaataacaccaacagtccccaatctctaaggctcaaaactggaatttcctttttcctctccttcttgctcatcattccatcttctcattgctacaggcccagtttagatc

SEQ ID NO: 144811 - DNA, 479 bp, Homo sapiens
cacccaagtcttacttacccatgctaaatgtgcccagagtgccttgaataatctgaaacttcaatactaaagagtgatggaggtttattgccttctcagcttctcagagagttgcaagcacaggacatgaatcagtggtatcataagtcctgagccacacactgctgttaaagtgctagtaatgtaacgccaaagaatcctagaattgtgaagagtcgtcctggagattgttgcttaaatcccctcattttccagtcatcctactggacctccttgcttggatgcccaaaccacaggacctggtgccaaacaaatggtcttccctttttgcacaaccatctactcctcctctgacttccttgtttctattaataacaccaacagtccccaatctctaaggctcaaaactggaatttcctttttcctctccttcttgctcatcattccatctwctcattgctacaggcccagtttagatc

SEQ ID NO: 144812 - DNA, 581 bp, Homo sapiens
ttttttttctattaaaagaaaatgtctttcttagagaaagcagatcgctgaagagacagatatggtaataacgatcattagtttacttggccttggttttccacagtgttgagttataatgtaatctatagttcatctttttaactaactctcaatacattatcaacccagtgcctcacactgtttacaaggatgatttattatttgtcagattttaagtgctaacctatgaaatgttaaacttctattggcagccactgcaggaaggtttgtaggtgtcctgactaatgctttgaaagaccagcattagcagtaaatcacagcatacaaaattttttaataaagtaatggaaaagattttacattctgggtcatctaagctttggtatttggaagttagttatgtgsgaaattaaaggggtaaaacattctcaggctttaacccttgaactttgggccagccatagtcaatagcaaaagcatcttggtagctttgttctcctaaccccgagatttcttggctatgagaactgacagagtgccaagtataggcctaattgcattccttgttactgagaaaa

SEQ ID NO: 144813 - DNA, 565 bp, Homo sapiens
aagggaggagaagagaggaagatgctgcagttcaagcagggtaaggagctcttgcccaggagtagatgtgtttcaaccagatgaactaatgactaattgtcctggccccttttccacacttacctcttgtgtaatatgcttatctccccctccccaggggaactgtaagcatctttggcagtactagaaagtactgtttaccaggaattaatagacaaagtaatctgagcctggtgtcaacagcctggaaggtcaataaggagaaatcaagcaattgaacaattatgtcgataaacatagcaatagaaacatttgaagcagactgtgtttggaggcccaggtgagtggtcagcaggcaggcrgatgtagagaaatctatcaggagatatcaagtcagagagataagacaggacactggttcagggaaggaaggaggatataatgaaaatggcaagtttctaagctgaataattctgttagaggctgctagttccccacccaaaatctactgtttcctttttacttagaaccctggtttcattctgttagcacagcaaagtttggc

SEQ ID NO: 144814 - DNA, 565 bp, Homo sapiens
aagggaggagaagagaggaagatgctgcagttcaagcagggtaaggagctcttgcccaggagtagatgtgtttcaaccagatgaactaatgactaattgtcctggccccttttccacacttacctcttgtgtaatatgcttatctccccctccccaggggaactgtaagcatctttggcagtactagaaagtactgtttaccaggaattaatagacaaagtaatctgagcctggtgtcaacagcctggaaggtcaataaggagaaatcaagcaattgaacaattatgtcgataaacatagcaatagaaacatttgaagcagactgtgtttggaggcccaggtgagtggtcagcaggcaggcagatgtagagaaatctatcaggagatwtcaagtcagagagataagacaggacactggttcagggaaggaaggaggatataatgaaaatggcaagtttctaagctgaataattctgttagaggctgctagttccccacccaaaatctactgtttcctttttacttagaaccctggtttcattctgttagcacagcaaagtttggc

SEQ ID NO: 144815 - DNA, 577 bp, Homo sapiens
gaggaagatgctgcagttcaagcagggtaaggagctcttgcccaggagtagatgtgtttcaaccagatgaactaatgactaattgtcctggccccttttccacacttacctcttgtgtaatatgcttatctccccctccccaggggaactgtaagcatctttggcagtactagaaagtactgtttaccaggaattaatagacaaagtaatctgagcctggtgtcaacagcctggaaggtcaataaggagaaatcaagcaattgaacaattatgtcgataaacatagcaatagaaacatttgaagcagactgtgtttggaggcccaggtgagtggtcagcaggcaggcagatgtagagaaatctatcaggagatatcaagtcagagagataagacaggacactggttcagggaargaaggaggatataatgaaaatggcaagtttctaagctgaataattctgttagaggctgctagttccccacccaaaatctactgtttcctttttacttagaaccctggtttcattctgttagcacagcaaagtttggccatatgactaatttttagccaatgaa

SEQ ID NO: 144816 - DNA, 487 bp, Homo sapiens
tgagaattctacagtcacagttctccaggttacaataatagaatattagggctagggtggggacaaaagtgacttcatcttggatgctgatctgccgtgttcacttctgattagccttagtcccaggaatggctcttgattcccactttacttactgtctccacagtaagaacatgtcaaccttgatgtcatcagacaaattacaggcaatgacgcacatagcatcctygcctgttccggagggtcgcctttgattgtcttgctagagcacatgtaccctctccctgtggtctataagccttgggtctgaggagtaacagtgcggagatctacctgtcttgtgggtgcccaagaccacacttttgtctgtacattccctgaatcaatgacccagtaccaacaaactggatttgtctgcccccttctttggtgtctcagctccttcagcatttgggaggtttgcatgtatgtctctttaatggaaaag

SEQ ID NO: 144817 - DNA, 533 bp, Homo sapiens
tagacaggccactgtgctacagtgtgatgagggctatcaagacgattgtaataacagctctcatgtattgtctgctcaccatgtcagctgccgggctatatgctgcacatgctttttatcatttaatcctctgaccacccaaaggattaaatggaaccaataatagtacctacctcactattactggtcccatttcagagaagaagaaactgaggcccaaagtagttaagttacttgcccacgattactctttggtgccaggawccaaaccaaggcctgcctaacactaaaacctgagtgttaccattacgttattctgcctccaagtacatacagagaaaagtaaataaggagtcggaagacattcagaagaatgaacagctgtccccatggaaacaaagcaaagcttccccgaggaggtaggggttaggctaccccccacttagcactaattcataaatagattcccagtttcagcctcctgacctgtctgaggatagaagccacgggccccactgtgtagtatcatcctt

SEQ ID NO: 144818 - DNA, 478 bp, Homo sapiens
catgttcatgtggctaaattttgccctggtaggtaatccagtgaagcctgtgaaccaaaattttgggttaagcagtttccaaggcagttttatttttaaaggctaaacctccccagactccaaagaacactagggccagacagcaccacagaagaacatcatgtatgaggttggcacaaaaataattgtggtttttgccatctgaaagcaatggcaaaaaccgcaattacttttgcaccaacttaatactaatcagtcctgacactttttagatgagcaacatacaagcctggatacaaggaactctgacccartttcccatttaacagtaaaatgaatccaactgtaagacagtcctatgattcaaagaccttccaagatgagatgagatcaggccattcggggtggtatgggtatggccgtagactttcccttgctctctgggcctacaactacattcataccaacctaaagaatg

SEQ ID NO: 144819 - DNA, 528 bp, Homo sapiens
aatcctctcctttgtcatttttaagattggtgtcctaaaacaaatctaggaacatattttttacagaaaacttttgaattttgggtwtattgaaaaaaataattttgttttgcttggttttcaaattataaaacaattcaaatatgtatacaatagtagagaataacataatacatatatgtttactaaatatccagctgtattaaattttaagacttcagtatctgtacttcagcttatttttaagataaaacgcagaggtgaaccttctgtgtattactctgatccatttctctctttctctgaagtagctactatcatacttctctcatttatcattttcatgaatattttatttgtttactgaatgttcatgtatctacaggaaatatatagtgcttatatggtaataaatataataatctaaacataagcatgttgaaactttcttgcaacttgttttatcttgttggtaagtgtagctctagttcatttgtataaaagactgtcatttcccatttcacaaac

SEQ ID NO: 144820 - DNA, 528 bp, Homo sapiens
aatcctctcctttgtcatttttaagattggtgtcctaaaacaaatctaggaacatattttttacagaaaacttttgaattttgggtatattgaaaaaaataattttgttttgcttggttttcaaattataaaacaattcaaatatgtatacaatagtagagaataacataatacatatatgtttactaaatatccagctgtattaarttttaagacttcagtatctgtacttcagcttatttttaagataaaacgcagaggtgaaccttctgtgtattactctgatccatttctctctttctctgaagtagctactatcatacttctctcatttatcattttcatgaatattttatttgtttactgaatgttcatgtatctacaggaaatatatagtgcttatatggtaataaatataataatctaaacataagcatgttgaaactttcttgcaacttgttttatcttgttggtaagtgtagctctagttcatttgtataaaagactgtcatttcccatttcacaaac

SEQ ID NO: 144821 - DNA, 428 bp, Homo sapiens
actaggccgtcttctgccatcttcaagcctagcaatattgggcagaaagcttagctgaactgagtcctcccactgatgccgtctctctggtctgttttctgacgccctcttccacttttaaggacctttttgattatattgggctcaccaaggtgatccaggattttctccatatcttgaagtcagctgattagcaaccttgattccatctgtaatcttaattctcctttgccatgtaacctagcatacatacagattcaggggcattattctgcctcccaagagggacccaagcatcaggcacagtcagcytgccatgaatttccttcccatactgggccagtgaaggaaagagaggacagaaattagggcacactcaagtgagtccatcatgtttacacacaaactgggtagccttgttctgatat

SEQ ID NO: 144822 - DNA, 630 bp, Homo sapiens
cagtactgttatccagtgcttgctgataaggccaactactgatttcgcttattagtctgtagaattttattttattagtttttttctgattttatttataaatttatattttatttttaataatatagtctttcataattgtttaagttgggttttttctcttttctaaatctctcttttaaatttttattcatttgtattgttttgttcttaatgtatatttaagattctgaatgagttcttctacttttggatacytcttctacccatgggttactatatattgttattgctattgttattttctaaatattttacatttgaatttatttttattctaaaaattgttttaaggattttttaaaatttgaagtaacagtgtagcaatgttgttgttttctacatttgttattaatttctaatttctttacatcataagtttaaaagagttgaaaaatgtatagctgtattaggaaaagaagatctaaagtatacataattgagaaaaaagaaacgaaatgtatttatatgtattctagaagaaaaatttctaaacttaaatgaattaaatctgtatgtgaaaggacacacatattcttggggaaaattgttatggagcaatcaatacgc

SEQ ID NO: 144823 - DNA, 630 bp, Homo sapiens
cagtactgttatccagtgcttgctgataaggccaactactgatttcgcttattagtctgtagaattttattttattagtttttttctgattttatttataaatttatattttatttttaataatatagtctttcataattgtttaagttgggttttttctcttttctaaatctctcttttaaatttttattcatttgtattgttttgttcttaatgtatatttaagattctgaatgagttcttctacttttggatacttcttctacccatgggttactatatattgttattgctattgttattttctaaatattttacatttgaatttatttttattctaaaaattgtyttaaggattttttaaaatttgaagtaacagtgtagcaatgttgttgttttctacatttgttattaatttctaatttctttacatcataagtttaaaagagttgaaaaatgtatagctgtattaggaaaagaagatctaaagtatacataattgagaaaaaagaaacgaaatgtatttatatgtattctagaagaaaaatttctaaacttaaatgaattaaatctgtatgtgaaaggacacacatattcttggggaaaattgttatggagcaatcaatacgc

SEQ ID NO: 144824 - DNA, 556 bp, Homo sapiens
tttcagctgatgcaatggacccggccctcttttcctctcactgtgtgtaccccctgggtaatctcatcttcaccaggcccttgattctacctgtatgctgatgaatccaagctgccacctgcccagacatcactcccaatctcccactgtatttgtgacaactgattatacatacccaaatcgcttcagaaccattaccaccaaaactagattcacccttttctccttaaaatcatttcttccccctctaattactctacctgctgtggtcacttcaaaaatactgggggactccccacccaaaatttttgcagatgatgccacacttgcaaatartttcctttgcaaattattgtcatttgcaaacagacaataaactgcaggatacaacacaatgaatttcaactaagccaagcgagtattattactcacataatgaggttttatgaggagggcagagaaactcccagtcaggtccaacaatggcttgaaagaacacggaaaggagactgctttgatttttaatgagattaaaaggtggggtttgggtgcaggt

SEQ ID NO: 144825 - DNA, 459 bp, Homo sapiens
cttagcgatatttattaacaaatcatcatggacccaactttatttggataagccccaagattcacagatagaaagaaatcctaggggctaaaggactacattaaaaattaaagaggagaaaaaggaggagggtgagaacttaatagtctcatgtttgttattgttttagaatgacttgaaattgtagagtgattgaatgctggcaaacaacacatcaggagaagaggatgctaactgagaatgactgcacatgataacttgcctcatgtttggtcttttaaaaatatcttcatagaatatcaggaattaatgaagctttgataaaatgtgcaaaggtttctcaatatagagggacactgagcacccagacagatggaaaattagaaaaaaaaaaagcctaaagaagtttgaagcatggtgaaaaaataaraaaatgagattcaacttgaaataatgtga

SEQ ID NO: 144826 - DNA, 473 bp, Homo sapiens
gagcaagtactggctttagaggattgttgcttttgtggattacacattctcaccattttgatattgacggatttctctcccttttctccacccaaatgtgaatttaaagagatttattattttctattcggcataaaagttggtctttaccagtaggaattgccacaaaataaagtataatttttattatatttagaaataacagcaagttcttgagtaaacatagtgaaagttaataaacttatcgtgaaatgcaaaggtatgcagataaaatatctaattctttatttttttgagacaagtttttctctaccactcagtctggagtgcagtggcacaatcacagctcatggtagcctcaaattcctgggctcaagcaatcctctcacctcagcctcctgagtagctasgactacaaacgcaccaccacacccagccactcttttcattttttgtagagacagggtcctcct

SEQ ID NO: 144827 - DNA, 535 bp, Homo sapiens
tcatacaatagctgtccttttgtgactggctcatttcatttggcacaatgtcttcaaggttcatctatgtgtagcatgtgccagaatttccttccttttttaaggtcaaataaaattctattttatgggttccttccaccttttggctwttgtgaatagtgctgctaaaaacatgggtgtgcagctctctttttgagatcctgccttcaattcttttggaggtagatcagaagtgggattgctggatgataggacagttctattgctaattttttgaggaagctccatactgtttcccacaggagcaataccattttacactcctgccaatagcacacaagggttccaatttctccacatccttgccaacacctgttaatttctgtttttttttttaattttgtttttatagtagccatcctaatagttgtgaggtggattaaagggagacttttaaatacatctcaaaattcatgtaccaaaattctaacttagggctttagagttcctggattccaagggaatgcactcttac

SEQ ID NO: 144828 - DNA, 424 bp, Homo sapiens
agttttaaaataggagatgagagccaggcacagtagcttattcctgcaatccctgtactttgggaggccaaggcaggaggattgcttgagcccaggagttcaggaccagcctgggcaacatagtgagattctgtctctacaaaaaaatttaaaaattagccaggtgtggtggcatgtgcctgtggtctcagctgctcaggaggttgaggtgtgaggctcacttgagcccaggagtttgaggctgcagcaagccataattgccccattgcattccagcygaggcaacagagcaacaccctgtttcaataaataaataataaaataaaataagagatgagactagctagacacttgacatgttatttcatttatttcttacaaaaaccataagctaggtattatttcttatttttattttacaaat

SEQ ID NO: 144829 - DNA, 554 bp, Homo sapiens
tggttatttgcccctgtgctaaggaataaacatttattgggctgaagatattytaagagtcatcccctcgcagttatttgcaaggtgtttacatttaggaatattcttctattaggtttgtgtgtgtggttttgtctctttctcttagaactcaagtatcaggaaattctaatcaactagtgttttccagttacatggattttgcttttttggagtttctttagtttggaagaaaatgtggtggtagcattttggcttcccaaccaaaacatttccatctgataccatcacactgaggtcagccagcttcagccaacactgaatatttccattacaatcaaagaaaaaccatagaactattctgctgacattatttagctcttattagacaaaggactttatgtacaagatctcattttattctcacagggaaccctttgagtcaagtactatcattatcttcattctgcaactaagaaaactaagtcccagagtggtaacgttacctgacctaggtcacacaatggtaagtcaagaagcagagcaatgaattc

SEQ ID NO: 144830 - DNA, 555 bp, Homo sapiens
tttattaattaaataataataaagtctattgaaaaaaaaactatgcccagcactggcacggtatcatttctgcattgttctattgttcaaagcagtcacaggaccagccaaagttcaagaactaggaaaataatctccaccttttaatggagagtggcaagggcactttggataaaacatggaataagagcaattgttgtgttgttgcagccatttttataaactacaatctgccatttaaatatatattttaaaaatagctatcaatccaaaaaaagtaagagatgagaaaggaggaaaaagaagcactgaaaaggtgagacaaatagcacaaagtgaggagatacagaaaagttcagatataataatcacaattcctgaaaatacactaaattcayttaaaaaacaatgattgtcagagtacaaaagaaataactaaagctatatgatattcataagagacacccttaaaatgtaagaataaagaacggttcaaagaaaatgatagaaaaatatacatggcaaattctgggttagccacattaacagactatg

SEQ ID NO: 144831 - DNA, 419 bp, Homo sapiens
ttattattctcttctctcaattttccatctttcattttgtttcacatctgaaattttttttcaactttttctattgttcctattgaattgttcatattgactaggaatttacaggagctctctttttaaaattctctctcctttttgtggtaccatcttgttcttttttgataccttatgtctttgaaaatgttagtaatagtttttcatagtctgttttccaagttcttttagtttgtttgttttttatcttcatctctggcttttatatttattagagagtttcttcagatacctggtgattttttttcatattttaaagtaggcacaaataaaactgttyggaaactctttgcatgaggtgagcttgtttatatggtttcagtgtaagatgatcagtatccttaagtcttttttct

SEQ ID NO: 144832 - DNA, 592 bp, Homo sapiens
gcctatggcaatgttatttttatttttactgcagagtacatcagagtgttttgtgggcacttgaatctctgggtgtcagttttgatctttccttctgaattgtaaaaaggcagaaatggatctgcctttttaattggcatggagtacctctggtacagaatcaaaatattagtcatcacgctgaggtgctgcatttttatccgacactcagttgttactcttataacccatatggaatcttatgaaggatagcttccagtcrcttcctccaagatattctataccaccaccatcaccacaccaacagtcccaatcaggccagaacatcaagtgtggctcttttaatagtcattgaataataatccatcttttaagtgaatcaaaccaacaaaatctcattgaagagggtccatatgtttactacatactatattacatcacataggcagagatttttcttagccttcataggaagtagaactggattttcttctctgcaactgattctgtctcatgaacattaaattttatactgattgtgttgtgtttttttgctttggtgtttgggaaactgagtctaatttattgtcca

SEQ ID NO: 144833 - DNA, 648 bp, Homo sapiens
gagtcacaacaaaacccaggtctttcagactttgaatcagctgctctttttgctaatgaaattaaaatgttacttcctgacttatatacaggttgtaacaggaagtaaagaaaaaaatgctaccctataagacatgaacaaaaacatcaacactatctacttgagatagttatgtagaattaaaatcaagtatcctccagaaactgytaaataaaattgtagacaaaaggtgttagatttctgtgttggtattttaggctgtcaacaaaaataatgtatgtatatatgtgtacatatatgtgtgtatacattagtgtatatatacacagaatacgaatgtgtatatgcatacatgtgtgtttgtgtgtgtgtgcgtatacacacccagatctcctcatttcttcccatcatcaaaacttaaccaccttgagtcacattgttaggggcttgcttagtcacagccagcagaactgaacaattaatgtttactcttgggctaagggattatccttaaaagcaacactgtttttttaacagggggtttctgaaaacataacagacacatcaccagcagtcaataacatttattgaattctaggcacagtaactagcatgtgcaacacttaataaattttagtgtctattaaa

SEQ ID NO: 144834 - DNA, 506 bp, Homo sapiens
aacaaactgcctgggtttgaaacctgaatctaccacttactaagtgatcaaatcrcttagcctatttcaccccaatgttctcagctataaaatggagattataataatatcctgcttcctggggctgttttgaacaataactatgttcactaatattataaacttagaacaatggctactatgtagctttgattttctttacctatttagacatgttatatattcatcattttgtttatttcccttcctcagacaatagtcaggagttgccaaggcatcgaatatcagtgtcacaaggaatttgtagtcagaaagtacttaggcaagagatttatagctgattctttctgaaatcctggaaattcagagctcaaaaaacttagagatcacctaacataatctcctcagttttgcagatgagaaaactgaaagtcagaaaagtgacttaaccaatagttaatggagagcatgtgatgaatctggtatgcaatccagatcctcaaact

SEQ ID NO: 144835 - DNA, 506 bp, Homo sapiens
aacaaactgcctgggtttgaaacctgaatctaccacttactaagtgatcaaatcgcttagcctatttcaccccaatgttctcagctataaaatggagattataataatatcctgcttcctggggctgttttgaacaataactatgttcactaatattataaacttagaacaatggctactatgtagctttgattttctttacctatttagacatgttatatattcatcattttgtttatttcccttcctcagacaatagtcaggagttgccaaggcatcraatatcagtgtcacaaggaatttgtagtcagaaagtacttaggcaagagatttatagctgattctttctgaaatcctggaaattcagagctcaaaaaacttagagatcacctaacataatctcctcagttttgcagatgagaaaactgaaagtcagaaaagtgacttaaccaatagttaatggagagcatgtgatgaatctggtatgcaatccagatcctcaaact

SEQ ID NO: 144836 - DNA, 506 bp, Homo sapiens
aacaaactgcctgggtttgaaacctgaatctaccacttactaagtgatcaaatcgcttagcctatttcaccccaatgttctcagctataaaatggagattataataatatcctgcttcctggggctgttttgaacaataactatgttcactaatattataaacttagaacaatggctactatgtagctttgattttctttacctatttagacatgttatatattcatcattttgtttatttcccttcctcagacaatagtcaggagttgccaaggcatcgaatatcagtgtcacaaggmatttgtagtcagaaagtacttaggcaagagatttatagctgattctttctgaaatcctggaaattcagagctcaaaaaacttagagatcacctaacataatctcctcagttttgcagatgagaaaactgaaagtcagaaaagtgacttaaccaatagttaatggagagcatgtgatgaatctggtatgcaatccagatcctcaaact

SEQ ID NO: 144837 - DNA, 371 bp, Homo sapiens
agcatccagattgtcatctctaaataacatttcttgctgaaagaaactggaaatccttggagaaacagctggttctgggtctggggcaggaattacatgaactaagctgggaatattttattatgccagaagtcaaaaaagtcatcaaaattaggaagacagtatctaaagaactagagcgcttcccactaaccraagattatttaactttagcatcaatttaaaaaataactgcaatgggttgaagcaaatcaaatatgcttaaatccatgatgtcataatgatactttttaaaaagatggtagggaaccaatttgttattcttaaaattggtttaaaaaaaggagaggagtaggaatcaagaagtcaag

SEQ ID NO: 144838 - DNA, 555 bp, Homo sapiens
aacttataataacagcctgagcaggcatagtcagctrttttaatcaataataatctcagctgtaggaataaaactactcagtaatagatccaggattttgacgccagaaagcatagggcctttagccattagatcatgttgtctggaacatttttttctctattagttttagttttgctcccaaaattccaatttatacaccttaattgacttgagtactttctaaatctgcttcccaggttcacacataaaattctgaatcatatctttagatggcaatcccatccagtctaggttgatttcctgtgtgtcaattctcaggcactctggactctaagaacagatgacatgaggtttcagaccacacagtcattaaagtctctaagagttcagcagagagggaaatcactatgaactggcatgtggaagaagggggaagagtgacctggaccttcacagctggcattctgaaatacagaaggagaaccctggagactgcgactaaatctgcttgcctagatgaaaaggtaatgctgcagagaagtacagataaag

SEQ ID NO: 144839 - DNA, 463 bp, Homo sapiens
catcagattattttccaaagtggccaaatcttgccatagagtatctaactgtggttttgatttgtagttgcctgatgagtgatgctattgagtatctttttatgggattattgrccgttcgtgtatcttcttgggaaacacatctattcctatcatttatcagttttgagttgggatatttgttactgagttaaaacagtttttctatattcaagatacatatatatacagacatatagatacgtgtttttcaaatatcttctcacaatttttgagctgccttttgacttgcttggttgtcctttgaaacaccaatgtctttaatttttaagaaattttaaatatctaatttttattttgttgctcatgtttttggtgttacagctatttctttgctagatccaaaatcctgaagattttcccatatgctttattctagctcttgcatgtgtgtctttaattc

SEQ ID NO: 144840 - DNA, 463 bp, Homo sapiens
catcagattattttccaaagtggccaaatcttgccatagagtatctaactgtggttttgatttgtagttgcctgatgagtgatgctattgagtatctttttatgggattattgaccgttcgtgtawcttcttgggaaacacatctattcctatcatttatcagttttgagttgggatatttgttactgagttaaaacagtttttctatattcaagatacatatatatacagacatatagatacgtgtttttcaaatatcttctcacaatttttgagctgccttttgacttgcttggttgtcctttgaaacaccaatgtctttaatttttaagaaattttaaatatctaatttttattttgttgctcatgtttttggtgttacagctatttctttgctagatccaaaatcctgaagattttcccatatgctttattctagctcttgcatgtgtgtctttaattc

SEQ ID NO: 144841 - DNA, 463 bp, Homo sapiens
catcagattattttccaaagtggccaaatcttgccatagagtatctaactgtggttttgatttgtagttgcctgatgagtgatgctattgagtatctttttatgggattattgaccgttcgtgtatcttcttgggaaacacatctattcctatcatttatcagttttgagttgggatatttgttactgagttaaaacartttttctatattcaagatacatatatatacagacatatagatacgtgtttttcaaatatcttctcacaatttttgagctgccttttgacttgcttggttgtcctttgaaacaccaatgtctttaatttttaagaaattttaaatatctaatttttattttgttgctcatgtttttggtgttacagctatttctttgctagatccaaaatcctgaagattttcccatatgctttattctagctcttgcatgtgtgtctttaattc

SEQ ID NO: 144842 - DNA, 463 bp, Homo sapiens
catcagattattttccaaagtggccaaatcttgccatagagtatctaactgtggttttgatttgtagttgcctgatgagtgatgctattgagtatctttttatgggattattgaccgttcgtgtatcttcttgggaaacacatctattcctatcatttatcagttttgagttgggatatttgttactgagttaaaacagtttttctatattcaagatacatatatatacagacatatagayacgtgtttttcaaatatcttctcacaatttttgagctgccttttgacttgcttggttgtcctttgaaacaccaatgtctttaatttttaagaaattttaaatatctaatttttattttgttgctcatgtttttggtgttacagctatttctttgctagatccaaaatcctgaagattttcccatatgctttattctagctcttgcatgtgtgtctttaattc

SEQ ID NO: 144843 - DNA, 593 bp, Homo sapiens
ttaagctttacaaagatggctgtgtttgggggaagggctattatcatataaactataaatgtctcccaaagttagcccagcctatgcccaggaacaattaagtcagcttgaaggctaaaggcaagagggggttgtctagatcagatatcctccactgtcataattttcttactgttactatttttgcaaaggtggtttctgaattgtcacaaacatcmtacccaagttaaataacttgctattttctatttttatccttcttttaaaaaataattttagattttgattcaaagatagagctcatttttgccactgaattctctaagaatttctatcaaggaggaagtcttgattagatcagtgaatctcagatatttatagtccttggaagaaacaggttaccaaaaaaagagggaaaatgaaagatggttcctttaagaaatgaacaaagaaggaatatacgtcccaaccacaagaagcaaatggaaggaaacggctggcttcagaatgttaatatcatcactgcaaattagttttcatataagtaattaatcaacttttgtcactttttgcgattcattgtgaacattctg

SEQ ID NO: 144844 - DNA, 618 bp, Homo sapiens
tgtgtttgggggaagggctattatcatataaactataaatgtctcccaaagttagcccagcctatgcccaggaacaattaagtcagcttgaaggctaaaggcaagagggggttgtctagatcagatatcctccactgtcataattttcttactgttactatttttgcaaaggtggtttctgaattgtcacaaacatcatacccaagttaaakaacttgctattttctatttttatccttcttttaaaaaataattttagattttgattcaaagatagagctcatttttgccactgaattctctaagaatttctatcaaggaggaagtcttgattagatcagtgaatctcagatatttatagtccttggaagaaacaggttaccaaaaaaagagggaaaatgaaagatggttcctttaagaaatgaacaaagaaggaatatacgtcccaaccacaagaagcaaatggaaggaaacggctggcttcagaatgttaatatcatcactgcaaattagttttcatataagtaattaatcaacttttgtcactttttgcgattcattgtgaacattctgcatgaggtccgtccttcactgtgctacttcaagtttaaaagcctg

SEQ ID NO: 144845 - DNA, 593 bp, Homo sapiens
ttaagctttacaaagatggctgtgtttgggggaagggctattatcatataaactataaatgtctcccaaagttagcccagcctatgcccaggaacaattaagtcagcttgaaggctaaaggcaagagggggttgtctagatcagatatcctccactgtcataattttcttactgttactatttttgcaaaggtggtttctgaattgtcacaaacatcatacccaagttaaataacttgctattttctrtttttatccttcttttaaaaaataattttagattttgattcaaagatagagctcatttttgccactgaattctctaagaatttctatcaaggaggaagtcttgattagatcagtgaatctcagatatttatagtccttggaagaaacaggttaccaaaaaaagagggaaaatgaaagatggttcctttaagaaatgaacaaagaaggaatatacgtcccaaccacaagaagcaaatggaaggaaacggctggcttcagaatgttaatatcatcactgcaaattagttttcatataagtaattaatcaacttttgtcactttttgcgattcattgtgaacattctg

SEQ ID NO: 144846 - DNA, 618 bp, Homo sapiens
tgtgtttgggggaagggctattatcatataaactataaatgtctcccaaagttagcccagcctatgcccaggaacaattaagtcagcttgaaggctaaaggcaagagggggttgtctagatcagatatcctccactgtcataattttcttactgttactatttttgcaaaggtggtttctgaattgtcacaaacatcatacccaagttaaataacttgctattttctatttttatcyttcttttaaaaaataattttagattttgattcaaagatagagctcatttttgccactgaattctctaagaatttctatcaaggaggaagtcttgattagatcagtgaatctcagatatttatagtccttggaagaaacaggttaccaaaaaaagagggaaaatgaaagatggttcctttaagaaatgaacaaagaaggaatatacgtcccaaccacaagaagcaaatggaaggaaacggctggcttcagaatgttaatatcatcactgcaaattagttttcatataagtaattaatcaacttttgtcactttttgcgattcattgtgaacattctgcatgaggtccgtccttcactgtgctacttcaagtttaaaagcctg

SEQ ID NO: 144847 - DNA, 637 bp, Homo sapiens
gtgtgcacagatgtgttaactgctaatgcatacttatctatttcaatgaattgaggaaacatgctgagggtttttatttcacagtgtggccaaattatgcttcgctgtttacatcattgaaagaactaaaagggttttcctatctgagattaaggcccaatatctcacttgaacccataataactagaaactagggagataagaaaatcttatactgggattgaacaaataagtaaattgatggtggayagtgggatccaggtttctctctgctgagaggttatagataagttggaagtcagaatgaaacatgtggtgtgggcttggggtcaaagacatcagtgtaaattcatctttaacttaaaatatatacagatagataaatacagaaatgattttgtatatgtgtgaacacatgggttagtatacatacatatatttcctagctctgccctctgagaggaccttctagaagcaataacatcccaggatgaatgagcacacccaatgcccagatcttggtttctaacaccattctccaatgaaaggaaccagggctccttgagaaatggctgactctaaggctgagacagagaatatacaaatgaccctggaacatcatgtagtgccagaaagt

SEQ ID NO: 144848 - DNA, 637 bp, Homo sapiens
gtgtgcacagatgtgttaactgctaatgcatacttatctatttcaatgaattgaggaaacatgctgagggtttttatttcacagtgtggccaaattatgcttcgctgtttacatcattgaaagaactaaaagggttttcctatctgagattaaggcccaatatctcacttgaacccataataactagaaactagggagataagaaaatcttatactgggattgaacaaataagtaaattgatggtggacagtgggatccaggtttctctctgctgagaggttatagataagttggaagtcagaatgaaacatgtggtgtgggcttggggtcaaagacatcagtgtraattcatctttaacttaaaatatatacagatagataaatacagaaatgattttgtatatgtgtgaacacatgggttagtatacatacatatatttcctagctctgccctctgagaggaccttctagaagcaataacatcccaggatgaatgagcacacccaatgcccagatcttggtttctaacaccattctccaatgaaaggaaccagggctccttgagaaatggctgactctaaggctgagacagagaatatacaaatgaccctggaacatcatgtagtgccagaaagt

SEQ ID NO: 144849 - DNA, 551 bp, Homo sapiens
tgtaaattatttcaataaagctttaaaaaaaaacgaggattttgaattaatccaatcagacaaagacagagaaaaaagaattttcaaaaatgaacaaaaccttcaaggatttggggattacgttaaatggccaaacctaagaataattggtgttcctggaaaagaagagaaatctaaaactttggaaaacatatctgaggtaataagccaggaaaacttccctaccttgctacagagctagacacccaaataaaagaagttcaaagaatacctgggaaattcattacaaaaagatcatcacctagacaaatagtcttcaggttatctaaagtcaagatgaaggaaagaatcttaagagctttcaggcaaaagcatcaggcsacctatagaggaaaacctatcagattaacagcagatttctcagcagaaacactacaagcgagaagggattggggtcttattgtagcctccttaaacaaaataattgtcagctaagaattttgtatccaccaaacttatcttcataaatgaaggagaggtagtctttttca

SEQ ID NO: 144850 - DNA, 629 bp, Homo sapiens
ctgtggcaacatctaattatagttgactattgaggaaattaaaacatactctacaaatacttatttctactcacataattgggaagagacatgtccttctgcattttcatccaaattctcctccaaagccaagcaaaattgacsctgttcttatatacgggtgctgagatctgaaaagaccacaagataaatgtgttggtcaaatctaaatttattaggtgatctttggaggagtagacaatcaatagtctggttatttattctgaagaaaatagctttggctaatgttgctcttgataagaatgaagtctctaaatttgaaatcatgagttacaaactcaaatgtctaccaggtttaagtagacatcacaaaacaggaatcaaggaaaatagaaatcaagtttagacagatcctgtctaaaagtagtggtgaccattagcaccaattgacttctaccttgtggaaatgtagacccaatattaatgggtatttttaagaaaaagaagaaaagcctgatttttgtcatgaaggttttgaaatattagcattggtttaaaaaaatgtaaaacactgcatggtccaaatgacatatatctgtgatattaatttgtactaaaggcaattaatt

SEQ ID NO: 144851 - DNA, 512 bp, Homo sapiens
ggattagcccactagtacttctttgggcaagccagcctgtctgtctgagcttcacctctttgtgtgacagcaaaggggaggcccctccagtttcttccattttacccatctatgatgcaattaatcaaaggctgtgaacttattcctgctgtgagccaggcattttactagttctcaggattacaaagacaaaaaagatacggcccctcccctaagcaggtcatacgatgtgagaaaaagtagaaataatcacaataatagtatatttttatagtttatataatattatgacccccatttcattgagaaatatccaaggagcttaaaccaattatgttgtttttcccctcacagcaggtggayggcaaaagtcagaagatcatctaagactataggagagggaaaacccatcatagttgggctgagtaattttgactcaagttataaagttggatactgatgtcactccctgttcatcaagtatcatctaaggaatataaaaagactttgtt

SEQ ID NO: 144852 - DNA, 426 bp, Homo sapiens
cttcatttctgctatcacaatggtgcccaaatctaaataatataaatgtttaaagtggtattttttaaatcaaaatatctgtagtttcctagaataagagaaaagtttccaattttgatgcaacatttttactgactgacaaaccaaacaatatccactgcactgaccagttcagaactgaatccagagagtgcaattcttaaaaattgctggttgaactgtaaagaaatcacatcattaattgtttctctcatcatgggattttctccatctgacttttctatgtacaatcaacctgagatttattgacytaacagtattttaaatagatttgttaagaaaaataaataggcaggttgcttatactagtgcttcccaatctctttccattaaagactctttttacgttttaatatatcttacagt

SEQ ID NO: 144853 - DNA, 635 bp, Homo sapiens
ggcctcagcacccagtttgggccctggtttggttccttgcaatgttaaagtcacactacaggtagcttggacccattctctgtgaaataattcctgtagtgattgaaaagagcacatcctcagaaacattggtaccaaaaatatataggaggtcaagggtgctttttaaaagaccaagaaagaaaaggaatagcacaaaaataaaattaagcactaaaatatttcatttagatatcctctaatctctatgaggggtcttagagaatagggcagatgagttaaaattaaaggaaaaggaataggggtgcatgcaaaatgttgctctgcgcctgggatctgtaagtgtggcccatcactcctcctaccagggaccaaaggcatccatgttctgtgctcagaggagcacagtggcacttcagctagcagatcctctgaagcaaaataccttcctagaaagggacattgcttattaaaacaaacaagyaaaaaaagtagcattatttaagagacatatgttggcttgcctcttttgtatcaggattctccttataatatgccactatgagtgtcacaaccaaaatatcactcacagagtacagagtcaatcttttaaatttaattttcattgaaaataa

SEQ ID NO: 144854 - DNA, 514 bp, Homo sapiens
atattgtaatgcctccttactttgcaatgccaaatactttcatgtatgtttcttagaaacaatgactacacacctattagaatggctaaaatccaaaacagtgacaacaccaaatgctgatgagtatgtggagcaacagaaactctcattcattgttcctgggaatgcaaaatggaaaagacactttrgaaaatcatctgccagtttcttacaacactgaatatacttttatcatgtgatctagaaatcatgctccttgatatttacccaaatgatttaaaaacttttatgtccacataaaaaccaggacattaatgtttatggcaactttattcacaattgccaaaacttggaagcaagcaagatgtccttcagtaggtgaatatgtaaataaactgttatacattcaggcaatggaatattatttaacagtaaaaataaatgagctctcaagccgcaaaaagatacagaggaaccttaaatctacattgctatcattgaaagaagccaatcc

SEQ ID NO: 144855 - DNA, 514 bp, Homo sapiens
atattgtaatgcctccttactttgcaatgccaaatactttcatgtatgtttcttagaaacaatgactacacacctattagaatggctaaaatccaaaacagtgacaacaccaaatgctgatgagtatgtggagcaacagaaactctcattcattgttcctgggaatgcaaaatggaaaagacactttggaaaatcatctgccagtttcttacaacactgaatatacttttatcatgtgatctagaaatcatgctccttgatatttacccaaatgakttaaaaacttttatgtccacataaaaaccaggacattaatgtttatggcaactttattcacaattgccaaaacttggaagcaagcaagatgtccttcagtaggtgaatatgtaaataaactgttatacattcaggcaatggaatattatttaacagtaaaaataaatgagctctcaagccgcaaaaagatacagaggaaccttaaatctacattgctatcattgaaagaagccaatcc

SEQ ID NO: 144856 - DNA, 599 bp, Homo sapiens
caatgtggattaatagctcggcacctcagtttgagtcttgaattcaccaatgctaaggatatgacactaagcacatcaattacactcttttagtatcatttttctcataatagaaatgataattatggtaattgggcctgtttatggtraagattaaatgagaaaacatttgttaaatgcctgcctcctagtaatggcatctgttattatttcgttctgtttagtcaagactgtgacataatgtagaaaaaagtctcacatcaccaaaaaaagtcacttgcatttttctttatattgacatcccaaataatgaaaagaaacatccaagagtcactgatatttgtagtgttttgtttttttttaagtaaactgagttcatcactggcttggaaataaaaagactggctctaagtctgactcctctaccaagtgctggggatttacagaatggcacttaatttctctggatcagagtttcttgaaaaacttggatgagatgataactcttatcataagacttaggacaaagaaaaggagtccctactttatgtcattcactgataagatgatttatatatatcttcaacagaaaagaaaaa

SEQ ID NO: 144857 - DNA, 540 bp, Homo sapiens
ttaatctgcctaaatgaattcatataaaatatcacacctatttatctcggcatctttccttgagataatgatgctatagactatctacaggagtggattacaatcttgatttctgccatgcttttttgggcattataatttggactctggcttcatatttcggggacaaattgtatagccaagtaaatttctccacctccccaggtctagctgtttattctccttagtctatgcattgagaatggagatcccatcttgccttgtagccatgttcagaagcaatgagcaacccatcattcatacctagctcaaatgcttcctctcctagaatctcttaattttyttccagaactctcctttattcaaaaatatttattaagcatctagtatgtgccaggcacttggatgcagcagaaaaaaaaaaaaaaagaaaattcaaaaccctactcctattttttttttttttttaacatggtttattgtattttcatagtgcctcttcttagttagtcataaatgctgtaatacaagggcaggaaa

SEQ ID NO: 144858 - DNA, 617 bp, Homo sapiens
tacatgtatcaattgatgtaaattgatcatgaacaacatcataatttttcaaagataaattgtccttattttacagagaaaatggcacacagaggttaaaaatctgtccaagaacacagactgggtctggaagcagccacctctctcactccattttcaacttcctatctttctgcatctccccgctcccctagattttcaacactaacatcaattgtggttcaacaagatgaacctttcctaatgattagttttgagttaactataagctcccagaggttaggggcagtctccaagcagtacttctcgygggaccacatgtgattcaccatgaaacaacagccaggtaactctgtgctatcatcagtgcccacaaagccacagataaactctggccttactctcaaaatgccctatttttttaattttgtctgaacatttgcaaagcttatgggcatttggcaaaggatctcagcactaaattaacaatgcacattctcattgaaaagcagtcatttccaccaaatgtacaatggcttttttcagatttgggcaataactagaaaaaaaaaacaacaaactctgtatttgtagattttcatattattaagtttgat

SEQ ID NO: 144859 - DNA, 590 bp, Homo sapiens
agggttgcctccttctaagagctgtggggggaatgttctccatgcctctctcctagctcctggtggcttgccagcagtctttggcttttggcagctagctccaatcttcacatgtgtctctatctctgtgtttaaatttcccccttttataaggacatagtcatactggattagggctcaccctaataacctcatcttaacttaatcctatttccaaataaggctatgttcacaggtactgggggtamaggcttcaacatctctttagaggacacaatttaatccataataattttacaatttttctggtaaatactaatataatgtctcattggagatagaacctgacaccacacacaagtgaaaacccatcattctcatggatttacccagaaaattctcacagagcttctgaggtgtctgacacaatacctaacacaacccttatgtgttaaatatatatcagaagagtgaattcattataacaatacttttgagtcccttttataccccttggggacattggctacattggctacacatcaagaaatgaaggcaagtactagatggttacttcctaaccccatatg

SEQ ID NO: 144860 - DNA, 590 bp, Homo sapiens
agggttgcctccttctaagagctgtggggggaatgttctccatgcctctctcctagctcctggtggcttgccagcagtctttggcttttggcagctagctccaatcttcacatgtgtctctatctctgtgtttaaatttcccccttttataaggacatagtcatactggattagggctcaccctaataacctcatcttaacttaatcctatttccaaataaggctatgttcacaggtactgggggtaaaggcttcaacatctctttagaggacacaatttaatccataataattttacaatttttctggtaaatactaatataatgtctcattggagatagaacctgacaccacacacaagtgaaaacccatcattctcatggatttacccagaaaaytctcacagagcttctgaggtgtctgacacaatacctaacacaacccttatgtgttaaatatatatcagaagagtgaattcattataacaatacttttgagtcccttttataccccttggggacattggctacattggctacacatcaagaaatgaaggcaagtactagatggttacttcctaaccccatatg

SEQ ID NO: 144861 - DNA, 425 bp, Homo sapiens
acatgtttgtttaaattccctgtagacctaaaaaagaaggtttatatgcaaaacttaatggggagagrataagccgtgttatcccagcctatcactgataattaatacctgggtaatattatttgtttacaaagcacacatatcaccttatgatgttctcacggtatcccttgaagtagtgctatttttatccctctagtgcagatgaggaaaatggatctcagaaaaattaagtggtgtggtgtttaaggttgtaacaggttggtgcaaaggtaattgcggtttttgccattaaaagcaatgggcattacaagcaatggcaaaaaccgcaaatactttcgccccaatctaatattactggtaagttttgtgtcggggcttaagcccccagtcttcaggcatttattcctgtgttctctccttga

SEQ ID NO: 144862 - DNA, 596 bp, Homo sapiens
ctagtaaaaaaataatccagagatgccaactcaccaaagccatgcatacagagcattttcatacatttctgtgaagatgcaatacatttgattcatagtcagcatagatagatgggagttttgaggtcaaatataaagcttgtgtgctcccagaaaagcagcattttgaaagtttgaaactcaggccaaagcactctagtggggccctatccttggcttctttgctttctcactctgtgctggcagggctcttgttgacttcaaagggagaggctctggctgggtaagagaagttctctttgagcgattaacttgagcaaatgagctgcattggaggacttcctaccaataagatcttgcctgtgataactaggagcacatttctaactttgaagaatatgagtgcttataataagtatttcagccacacaccgggagacaatatctgaggtaggtgggttcagtagcttttaaaaataaayttaaaataacatatcagtaagtatgtatgtaaatataaatacataaaatatgaacatccatttgtataagtctgtatttttcacatcgaataaatgggactgcagaagaaattt

SEQ ID NO: 144863 - DNA, 534 bp, Homo sapiens
tataccatgttcatggactggaagacaatatcattacatgacaatatttacctaattgatctacagattcaatacaacccctatcaaaatcctagctggtttttttacagaaattgacaagctgatcctaaaatttatatataattgcaaaggtccccaaatagccaaaacaatcttcaaaaagaagaacatagctgggggacacacacttctcaatttcaaatttactataaagctataataatcaagacagtgggctaagaayagacatatagatcaaagaaatagatgtgtagtccagaagtaagcacttatacctctgttcaaatgattttgacaagggtggcaagaaaatttaatggtagtaaagaataatctttttaacaaatggtgctgggacaactgtgtattcacatgtaaaagagtaagattagacccctatctcacatcatatacaaaaattaactcaaaacctattcagacttaaatataagagctaaaactagaaaactgttagaaaaaaacacaggcata

SEQ ID NO: 144864 - DNA, 476 bp, Homo sapiens
  misc_feature (1)...(476): n = A,T,C or G
aaataaaactgaattgtgttttacagattaaggtgatacctaaactagtgctttcggggtgcccttaccactagattaaactctgactcscttcatctctccattaattcaaaaattatttataagatgcttactacatgtttaggtgctctataacacaggaataaaatactctgatagtacaaagggacaaacaaaggatttcaatgtggaaagttaattaaagaagacttcaagaagaggtgacttgtgagctaggccttctgagaggagaggcattttagtaagttaatatgataaaggtgattcctggggctgcaaataatctctatgaaaagggtaatatctgagtatcttctctctggattccattttggaggaatataaatgctttcaaggtgtgatacacatcagtaggtcagaatgactttggccatatttccaacaccaataaatggaacnnnnnnnnnnnnnnn

SEQ ID NO: 144865 - DNA, 478 bp, Homo sapiens
  misc_feature (1)...(478): n = A,T,C or G
aataaaactgaattgtgttttacagattaaggtgatacctaaactagtgctttcggggtgcccttaccactagattaaactctgactcccttcatctctccattaattcaaaaattatttataagatgcttactacatgtttaggtgctctataacacaggaataaaataytctgatagtacaaagggacaaacaaaggatttcaatgtggaaagttaattaaagaagacttcaagaagaggtgacttgtgagctaggccttctgagaggagaggcattttagtaagttaatatgataaaggtgattcctggggctgcaaataatctctatgaaaagggtaatatctgagtatcttctctctggattccattttggaggaatataaatgctttcaaggtgtgatacacatcagtaggtcagaatgactttggccatatttccaacaccaataaatggaacnnnnnnnnnnnnnnnnnn

SEQ ID NO: 144866 - DNA, 559 bp, Homo sapiens
atatacagagagaggaaagacagcccaggactccagttatcaaccaatagagcaaagtcactgcaaggaggtgaattgcatgagcaggatcacttctgactcctgaaccttttttaccatgtacccactttgagtttcctagtatcagagatactccttgtaaagccttttgaacgttttaaagggaccatgaaggaatcatcttccccagtcatgaaggygtgtttcctgtgtccctccacacagtggattagtttgctagggctgccataacaaaacaccatagactgggtggtttaaacaacagaaatccattttctcatggttctggaggctagcagtgtgaaatcaaggtgccaggagggttgcttcttctgaggcctctctcgagggggtggtagggtcagttctttgagtgtctttacatggtcttcccccagttcatgcctgtgtcctaatcttgtcttctcataaggatgttagtcctattggattaatgatttcattttagctagattgcttctttaaagaccatatttccaaacgtagttatgttcat

SEQ ID NO: 144867 - DNA, 543 bp, Homo sapiens
gtcttagaccaccgagtgagggaggatgaaatctaaatagcttcctctgcatcaggaggggtcatttgatacagtaaaattttttttaagaagcttagaaagaatgtccctgtatttctttttaggccattttaaaaagaaatatgtaagattccatctgctaaagaaacagagttcaaatatgactttcagaaaaaataataggcagaaatgcacatatattacaatgtataaaacactgagattttacttctataaactatgagagtagtaatgtaaataggggtttttagggagtcaatgctcaacccaaagttgttacatctgctagcaatgcacacacatgctgaagtcaggcttcacctaaggtcttttcatgtatattcccaaacgtaakgtataaatgtattggactaaaggtctgcttggaccattgcttgtttttgagaaaagcggtggtaggcaactccttgtacaacagtttccatgctacatattatggaatcctcccaagccaagcgaatgactggcctaggatttggt

SEQ ID NO: 144868 - DNA, 400 bp, Homo sapiens
atttactatgcactgtctttttatttactctgagtatttctaaatatttaaaaattttttgagttatacatgctcttcagttccaagggtttttctaaacacataaagcataatcaagaaatggtacacttggaaacayaacaccatagaatgttaacacttgaagatgatttagtctaatgtcctcattttgacagaagaggaaactgaactcttgaaaatggcctcaattcatacaacatttggtagaaaattttgtgcagttgaagataatttttaatagcctattaatgcccaacaaacaagcagttaatttactgaattgaactgaaaacaaaagatagatctcttagtttgcttgcttgttcatatctaaacctaagaggactgctagtatgca

SEQ ID NO: 144869 - DNA, 415 bp, Homo sapiens
aaaggaaattacacacagctgagaggagtgatgcactatgtgcacacaattgtaattcacacgcattactttgttcatgaaatggttgataaacttttgagaatgagaaagattctctctctttgcacggttacaataaccataattgatatcaaaatgttagatttgcggaataaattatactttatcatgtaatgtaattctcacccagctaccctgtctagcagaaccatgtcccatttgacagatgagtgaaccaagccttaaatgggaagaagaagaaggcggaggagaaggaggaggaaagaagaagaagaaagaggaggaggaagaggagaaggggaggaggaagaagaggagcagctgacraagttcccatagtggaatgtggaagaccttggtttcaaatttagtc

SEQ ID NO: 144870 - DNA, 431 bp, Homo sapiens
aattttcttgttcaagaaatgcttgttctctggatgccccctttgtccctagtccttggctgcaaggagggcctcccagggacagagacattctgaatggggaacattttagatataaatgggatttttttttttcaaggaaaaggtgtaaggtagctctgtagagacttgaagataaataaacaggaagtgggtcctggcagacagagaccaggccaggatctggtctccagaaggtagtcttcaaggcttatcaaagtcaggactgtccagagggtggctgcattcagcagaggctgaatcacgggacaggcctgawttaggaggagcttctttttgaaatcgcgatatcatgtactggctgacttatctttctttgtcttccctttcatggttcttttttctcattctgccggtccccctctctcttt

SEQ ID NO: 144871 - DNA, 431 bp, Homo sapiens
aattttcttgttcaagaaatgcttgttctctggatgccccctttgtccctagtccttggctgcaaggagggcctcccagggacagagacattctgaatggggaacattttagatataaatgggatttttttttttcaaggaaaaggtgtaaggtagctctgtagagacttgaagataaataaacaggaagtgggtcctggcagacagagaccaggccaggatctggtctccagaaggtagtcttcaaggcttatcaaagtcaggactgtccagagggtggctgcattcagcagaggctgaatcacgggacaggcctgaattaggaggagcttctttttgaaatcgcgwtatcatgtactggctgacttatctttctttgtcttccctttcatggttcttttttctcattctgccggtccccctctctcttt

SEQ ID NO: 144872 - DNA, 508 bp, Homo sapiens
cttaaagatgatatccttggaaaataatttataagatcatttctcaaatatttcggattcaaaccaagcaccctggctaataggctgattattattaatgttattcttggatggagagtgctaggaggtcgtaagtgggatgttgggatcaaagtggatttgttatgagagtgtggttagctatctctcctaagagcagaatgactgtgctcgaaatgtttatataacctgatttacaaacctcttctatttttgtttgataaataataagaatgtgggaaagcacsccagttctctggaatatgactgccttttagaagaaggaaagggaaccagtgctgatgtctgcctgtggggaagtatgaccaactggctttgtggaaaaacattgagacgcacaggcctagatattttttacatgtttattcattcgttcattaattcttctcccatttatcattgaatgtgttttacctgttctttgctgagatcgagtgattataaataa

SEQ ID NO: 144873 - DNA, 531 bp, Homo sapiens
acagtgtgcaaccagtccaatagatctctaaaactcttctaacccggatattccaatagtctagtcatggaaggagtgtgtaaatattctctttatggctggatgcctagcatagactgtatctagatagccatgtcccagctaggctttaggggaagattcccaaatgggcaattaatttagatttaataggaccgttactgtaagtttaaataaatgccagttaaatattaacagcgtatttattgaagattaacattgctggttgcattgtgggattttcttttccttaaagaaaccctttatcagaagacttttartcatcttgactcttccgtcgcttgcctcagatccagggcagctcattaattactttgtacaacagttttcaacattctgaagtggttacctagacgaatgggaagaatggaaggccatataagaagggctatttctgtgcaggaaggattgatgagtgaatttgataagagtgttgagaagcattataatcctagactattagagttggaa

SEQ ID NO: 144874 - DNA, 452 bp, Homo sapiens
ctatcccatggattaaacaactgtcttacatgatgaacactctcaaatatatcactggcctagagtcatcccctgagaagacactattctagaaaattgcttaaatactaatgccaacaggtatatataataatcttttcaaaagaaatccaacattatggttaacagggagtgatctaagttagagatgggagatgtttataacaaccattgttatagtttaagtgcaatttaataaaaattagacaaacaatataataaagagccaagatcattattagcagatggtctgtctttatgcccaagattttaaaaattacaaatgcatttaaaggamtaaaacattttggcaaggtatcttgtgacaaaattaacatacagaaatgaaaaaatttttatgtgccaacactaacccaacctaatataatggaaaattgtttcatgtacaaaaa

SEQ ID NO: 144875 - DNA, 606 bp, Homo sapiens
tcgtatgggtattttgggctgcagtcatttttatggtaggtagattataccaacaccaagcactgtattcttccattgtgtgtgtgtgtgtgtgcatgtgtgtgtacatacagagagatctttagagagcatttctcttatttgaattcttctgatgttcgatatcaagacaaacagcaccatgccgaatctttcatctctatttcrttgatcttctgcctacacagtttaaaggaatactggttagaagtaatgaaactaaaacctgcaggcttaacatacacataaatttgacaaaccagcatggaagcattgcatttcagatccatgtggcaaattgatctttttttagttctgtcatttgaaagataaagcaatttgagataaggcccagaaaagatagtggcacatcagatgaaggacacaagtctcctgatttcttcttttatgaccttttcactatttgtctattaaaaaaaaaaaaaaacctgatgtaatgttatggcagtctaaagggttttcatgctaaatagataccattatctctaaactcttctatatagcaaaacccaacattttcatcttcttgactttatctctaccaaa

SEQ ID NO: 144876 - DNA, 606 bp, Homo sapiens
tcgtatgggtattttgggctgcagtcatttttatggtaggtagattataccaacaccaagcactgtattcttccattgtgtgtgtgtgtgtgtgcatgtgtgtgtacatacagagagatctttagagagcatttctcttatttgaattcttctgatgttcgatatcaagacaaacagcaccatgccgaatctttcatctctatttcattgatcttctgcctacacagtttaaaggaatactggttagaagtaatgaaactaaaacctgcaggcttaacatacacataaatttgacaaaccagcatggaagcattgcatttcagatccatgtggcaaaytgatctttttttagttctgtcatttgaaagataaagcaatttgagataaggcccagaaaagatagtggcacatcagatgaaggacacaagtctcctgatttcttcttttatgaccttttcactatttgtctattaaaaaaaaaaaaaaacctgatgtaatgttatggcagtctaaagggttttcatgctaaatagataccattatctctaaactcttctatatagcaaaacccaacattttcatcttcttgactttatctctaccaaa

SEQ ID NO: 144877 - DNA, 559 bp, Homo sapiens
tatctcatactgtatataaaaatcaactcaaaatgaattaaagacttatatgtaaaacctgaaattttaaaactactcgaagaaacgtaggagaaaagctccatgccattggtcttagcaatgatttttttttggatataacaccagaacacagacaacaaaaacaaaaataaatgagtgggactgcattgaactaaaacgtttctacagcagcaaaggaaacaacagaaatgaaaaggcaacttctggaatgagagaaaatatttgcaaaccatatatccaataaggggttaatrttcaaaatatatgagttctagtccatttttgcattgctacaaagaaatacctgaggctgggtaatttataaagaaaataaatttattttgggccaggcacatggtggctcatgcctgtaatcccagcactttgggaggccgaggtgggcaaatcagttgaggaaaggagttgtagacaagtttgaccaacatggtaaaaccccgtctctactaaaaatacaaaaattagccgggcgtgttgacgcacacctgtagtcccaact

SEQ ID NO: 144878 - DNA, 559 bp, Homo sapiens
tatctcatactgtatataaaaatcaactcaaaatgaattaaagacttatatgtaaaacctgaaattttaaaactactcgaagaaacgtaggagaaaagctccatgccattggtcttagcaatgatttttttttggatataacaccagaacacagacaacaaaaacaaaaataaatgagtgggactgcattgaactaaaacgtttctacagcagcaaaggaaacaacagaaatgaaaaggcaacttctggaatgagagaaaatatttgcaaaccatatatccaataaggggttaatattcaaaatataygagttctagtccatttttgcattgctacaaagaaatacctgaggctgggtaatttataaagaaaataaatttattttgggccaggcacatggtggctcatgcctgtaatcccagcactttgggaggccgaggtgggcaaatcagttgaggaaaggagttgtagacaagtttgaccaacatggtaaaaccccgtctctactaaaaatacaaaaattagccgggcgtgttgacgcacacctgtagtcccaact

SEQ ID NO: 144879 - DNA, 328 bp, Homo sapiens
gatgtgtcaatgtacgctcatcagttacagcaagtgtacttctctggtgggaattgttgataatggagaaggctatgcacgtgagggagaaggaggtatatggaatatctccgcatctctctcagttttgctgtgcacctaaaactgctctaaaaagaaaacagtcttaaaagaatatgtactctctctgatattktttgttagcgtgctctataaatgttaattatgtctactgggctgttaatgtcaacttttctatatccatactgattttaatttcactaattgcattaattactgagaaaggagcgtttatatattaaaaagt

SEQ ID NO: 144880 - DNA, 422 bp, Homo sapiens
accgtcttcaaaatgacagtaccattttacattccaccagcagcgtgtggagtttccagtttgtccacatccttgccatttcttggtattgtctgtctttttgattctttagagtattctttataaagaaaactccakaaagtgtctcaggttgtttgcagcacagatattttctcatatccattattttcccctaagggttgtaagtagaagagtggaggagtaggatatgggtataataatctttttaatgtcaaaagtatttttgactagccctgtatttcaccagtaaccccagacaggaaccattgttctatctgcattggaatattgtcattatagtgctgcataagccatcatgcttttaaagtaacaaagattaaaattcatatccctcagactgcttagttaccaacacttgt

SEQ ID NO: 144881 - DNA, 367 bp, Homo sapiens
ttctttagagtattctttataaagaaaactccagaaagtgtctcaggttgtttgcagcacagatattttctcatatccattattttcccctaagggttgtaagtagaagagtggaggagtaggatatgggtataataatctttttaatgtcaaaagtatttttgactagccctgtatttcaccagtaaccccagacaggaaccattgttctatctgcattggaatattgtcattatagtgctgcataagccatcatgcttttaaagtaacaaagattraaattcatatccctcagactgcttagttaccaacacttgtaatctacagcaaaaaataattttacattattattttacatttacacaaa

SEQ ID NO: 144882 - DNA, 582 bp, Homo sapiens
aagttatctgcatgtaagacccagcaaaggttttcagaataaaccagccctactgctattctaggggactgaatggtttaatttgatgtaatttcctagtcaagggcaaactgatatttcacaagatgatgacagctttaagaaaaaaagagttctttttattcttctttttaatgaatgacaccaactgcaaaggagccaggggaccttggttctagcttaagtctgctcctaactagtttaggtgacctggrggaaattccttaagttcactgggcatttttcctcttgtgaaatgagggcagtaagtgatgatctctaaagccctatcccttcctaccatcccttgatttgctggtgaaggcactggcattgctgctctctagttctaaggaggagcacacagggcaacatgcacaaaccaggaagcaggcatggcttgctagatagggatggtctggctatgactcaatggcaaatgacttgaccattccactttagcctttgggccctgggagtttcctctcctggtgtggaaagtcgtgttgacaacacggaattacctatggcctgctagtccgg

SEQ ID NO: 144883 - DNA, 582 bp, Homo sapiens
aagttatctgcatgtaagacccagcaaaggttttcagaataaaccagccctactgctattctaggggactgaatggtttaatttgatgtaatttcctagtcaagggcaaactgatatttcacaagatgatgacagctttaagaaaaaaagagttctttttattcttctttttaatgaatgacaccaactgcaaaggagccaggggaccttggttctagcttaagtctgctcctaactagtttaggtgacctgggggaaattccttaagttcactgggcatttttcctcttgtgaaatgagggcagtaagtgatgatctctaaagccctatcccttcctaccatcccttgatttgctggtgaaggcactggcattgctgctctctagttctaaggaggagcacacagggcaacatgcacaaaccaggaagcaggcatggcttgctagatagggatggtctggctatgactcaatggcaaatgacttgaccattccactttagcctttgggccctgggagtttcctctcctggtgtggaaagtcgtrttgacaacacggaattacctatggcctgctagtccgg

SEQ ID NO: 144884 - DNA, 590 bp, Homo sapiens
catttaagtctttaatccatcttgagttaatttytgtatatagtgtgaggtaggggtccattttcattcttctgcatatggttagccaattgtccaagcaccatttattggattgggtattctttagctgtgcagctttatttcaagagtctctgttctattccattggtctataggtctatttttgtaccagtaccatgctgttttggttactgtggccttgtagtatagtttaaagttgggtaatctgatgcctccagctttgttctttttgcttaggattaccctggcttttcaggctcttttttggttacatatgaatttaggaataggtttttctgattctgtgaaaaatgatgttggtaatttgatggaaataacattgaatatgtagattactttatcttaacaatattgaatcttacaaaccatgagcatggaatgcttttttatttgtttgtgtcatctatgatttctttcagcagtgatggaatctttcagcagttctcctcatagagatgtttcacctccttggttagatgtattcgtagctctgtgtgtgtgtgtgtgtgtgtgtgtgtattttaaat

SEQ ID NO: 144885 - DNA, 429 bp, Homo sapiens
gaattctggttataacacctcctccacacacatgcttccccctgtacccctcttcaggaagctgcccatgtactggatctaaaaacctcagacaagtctgagaactcctgatccaacatgctgcccaggtttcaaagggttcttataaatcagattatggcagaaatttccagacactttttggagtgtttgggcataaacaaaatcactaataaatattagatcatcctatagtgtctttactttcccagttgtacctatcctgcacttaaaagaaatgacccaaggtttctggacccagtaaagacactcctaagacaacatgagaagccagaatcctttggsagacttttcaatgaagagagttcagaaagcaaggaaatgacaagtcctaacaagttgttaggagaaaatgtaccataatatgaa

SEQ ID NO: 144886 - DNA, 429 bp, Homo sapiens
gaattctggttataacacctcctccacacacatgcttccccctgtacccctcttcaggaagctgcccatgtactggatctaaaaacctcagacaagtctgagaactcctgatccaacatgctgcccaggtttcaaagggttcttataaatcagattatggcagaaatttccagacactttttggagtgtttgggcataaacaaaatcactaataaatattagatcatcctatagtgtctttactttcccagttgtacctatcctgcacttaaaagaaatgacccaaggtttctggacccagtaaagacactcctaagacaacatgagaagccagaatcctttgggagacttttcaatgaagagagttcagaaagcaaggawatgacaagtcctaacaagttgttaggagaaaatgtaccataatatgaa

SEQ ID NO: 144887 - DNA, 430 bp, Homo sapiens
tgctcaacaatcagtaatagaaggaataaaaatctgatgaaatggggaaaaatatatcatatgtcttatatatgcatgtgtgtgtatgtgtgtgtgtgtgtgtgtgtgtgtgtgtgtgtgtatctctatatatcaaatatatatakagagagagagttgggtcaatcgtagcaaatgtgagtgtcagccatactcttgagtacatgcctgaggtccaggccatttcccccactaagatatagcaaatcaggcaagaagtgaaagatttcacagcgacttcctggagggccatatcatgataaccatccagacccttgctagactggccttctgccaaaggaaaggaaagcaggagattcctgaaggccaaagaacgcccgccaggaactgggcttttgagaagccgagaggtcagatcagcctatcctca

SEQ ID NO: 144888 - DNA, 536 bp, Homo sapiens
atacaatttcttagacacatcaacactaaaatataggatttttttttttttgagatggagtctcgctctgtcaccaggctggagtgcagtggcatgatcttggcgcactgcaacctctgcctcctgggttcaagtgattctcctgcttcagcctccgggtagctgggactacaggtgcataccgcyatgcccagctaatttttgtatttttagtggagacagggtttcaccatgttgatcagggtggtctcgatctcttgactttgtgatctgccagcctcggcctcccaaagtgctgggattacaggtgtgagccaccatgcccgggctaaactatagttttataattaaattatttcagacactctgcatattataagtaaagtagttcctaaaaagatctgccatgtttacgttatgtcatggttgataaactttgctagctgtcatattgtgtggcttttttctcttagataagtagggtgtttggaggctttccatctagagtttgttaactctagattgtttagtcaatc

SEQ ID NO: 144889 - DNA, 607 bp, Homo sapiens
atgcaagtattggcaaaattattaatggctctatcaaacattacatatcaacggcatgcaatgtggaagaattacaatcacatatgtacactagcatgtattttgccttatagttaagtgaaatcaatgatatgcagagtatgcatatcaactagcatattagtggaacatatttgagggataagtacttaaaaactcttggctctatgtgttaccaagaacccaatctacggaagagacttttcatgagttaacatttcttttgtaggcaataatataaattggaaaaggttcactaggatcagtgctgatgaaataaccagctatgtttgcagcaaggaagaaggtgtgacacaaataaaagtgttacctttatgccaaaacacccacttctttattcaccaaaacagatgacacacaacaatatggtttctaatcttaatgtggtgttgtagaaaatagtttyaagtgtgaatataatcagatctgagtatatgttttctcagcatgttctgcaaagaaatgggcagagggcattagactgattgttcccccagaagcactgtggttgtcatcaagggtgctcatgcagacttttgaaatgatg

SEQ ID NO: 144890 - DNA, 589 bp, Homo sapiens
aaggataaccgcaaatctcttcctattagaagaaaatgataaattccagtactttattgataacagattatttgtgatatctyacaacttatctttacttatcagtgtgtcataacaccaaaaccagaaaactaacaaaatggagaattggtgtgggaggcataattctaaattgagccccccagattcccaatccctggtctacataccctgtataatcctctccccttgaatgtgggtgggacctgcgagtatgatgggatgccactcccttgattacactgcataatatatgagactctgtcagagcccactgactgagattctcctgctgactttgaagtgaggtgccatgctgtgagagggccctctcactacgaactgaggaagggtttctaggagcttagagtcccaggtaacagccagcaagaaaatgaggaccccatcctagaattgcaagaaattgaattctgccaacaacttgaatgggcttggaagaggacctcagctaagataatctcagataagattgcagcccccactgacaccttcatttcagcctagtgagaccctgagcagaggactcacc

SEQ ID NO: 144891 - DNA, 589 bp, Homo sapiens
aaggataaccgcaaatctcttcctattagaagaaaatgataaattccagtactttattgataacagattatttgtgatatcttacaacttatctttacttatcagtgtgtcataacaccaaaaccagaaaamtaacaaaatggagaattggtgtgggaggcataattctaaattgagccccccagattcccaatccctggtctacataccctgtataatcctctccccttgaatgtgggtgggacctgcgagtatgatgggatgccactcccttgattacactgcataatatatgagactctgtcagagcccactgactgagattctcctgctgactttgaagtgaggtgccatgctgtgagagggccctctcactacgaactgaggaagggtttctaggagcttagagtcccaggtaacagccagcaagaaaatgaggaccccatcctagaattgcaagaaattgaattctgccaacaacttgaatgggcttggaagaggacctcagctaagataatctcagataagattgcagcccccactgacaccttcatttcagcctagtgagaccctgagcagaggactcacc

SEQ ID NO: 144892 - DNA, 453 bp, Homo sapiens
tctagagcagacctcctgtgtrtccttcaccactttctcctgtccctgcaaggaaggagaaggccagcaggagaggagtgtttgcgcagtgaggagctgggagagccagaatagcagatagggcaagagctgggggtagccagatccaggacgaggcaggagatagctggccaagacagggaaggctctggaaggaagtgatggatcatcgaaggtcacagcaaggtcaagaatagaacacttaaccttgctctgacctgaaaggatgagttatagctcacaggccatgagagccagccagctcaataagagaatggaataaatgctcaaacagaatgctgggagcctagagctctgtaggaaggagggagaggggcaaagtaaacaaaataacagattggcacaatggtagcatggaaggaacttgataactaagacactctggcctagacc

SEQ ID NO: 144893 - DNA, 586 bp, Homo sapiens
gtgtattgttccactttacctcttatctgagctatagacccaaatatccataagccaaccagatatccatatgcccacttgacttctttactttggactctcacaatcatcttggacttaacatgtccaacctaagcatttgacctttcccaaaactcttcctcctccaatattatccatctcagaaaatgatacctccatccccctggttgctcatgttagaaacatgggaatccttgccaccttcttatcacttggccccacatccaatgcaatatttagtcctgtcaactctacctacagaataaatgcataatgcagctgcttctctccatccccactagcaccactctggcctgtcaccctcacctccactgctgcagctcctcgctggtctccccacactgctcctccagcccatctaacacattctccacaccacaaccagaccaacaattttaacagcagttaggaacatcactccccttcttgaaacttccattgccttcccattgtttgtaaagggaaaamccaaaagtctagcctgcccaccgctagactgtgagaattaggaaagctgtccctt

SEQ ID NO: 144894 - DNA, 615 bp, Homo sapiens
tcgcagaattatgctttatggaaggacccacacatttatcaaggattattataaagccatataagaactgatcttacaaattttgtacacatagtagaagagtacagtgtttattatatggtactccttgtaaggttcacgttataaatttctgttagaatttagtattataagtactttgcttccctaaaataatttttaggctttctcttttctgatgataccacgtttctctttttgccctgcctgccaggacattcagagaaaaaaatcaaggctcaatcccagcaacttaggatggcataataaaagagtggcttatgggaggagacagggtttggagttaargctgggtttgaatcccagctctgtccctgtgtatctgtaggcaagaatgtaaaactccctgagcctgagcttctgtatctgtaaaatggagatgacacctgccttgcaaagttggtaaggtgcctggaccatgggagcgctcagccattgttttttctctcagactccccttgttcattatatacatataatatgaactacttcaaatccactttggaaaaagtgtatctaaattgaagaacaagggtattttgcgatttggtgaaa

SEQ ID NO: 144895 - DNA, 522 bp, Homo sapiens
ataatgttatataagtgctaaaatattaattatagcattatttgtgaaagcaaagatattggaagcaatctaaatgtcaaatactagagtgaggtttctccaccttggcactactgacatgtgggcagataactctttgttgtggggkccttcctgggcattgtgggatatttagtagcatccctgacctctgtctgctagatgtcgggagtacatttctccccaggttgtggcaaccaaaaaaagtctccagatgttggcagatatcccctggggccaaaatcacccctggttaagaatcatggcactagataactattcaggtaaatcttaatgtgtccacttgataaaaatattatgggatgattgcttttaacatggaaatgcttataaaagttaaaaagcaaacattataatatcagctacataaactatgaattatatagcaaggaaataaagagaacattagaattttttttgaagtttaattagcatcattgatgattttttctccattctgtt

SEQ ID NO: 144896 - DNA, 538 bp, Homo sapiens
cgaaacgtcattatgaggctcatgatgatgtataagaggactttgctctgaagagacacgagaacccactctgtgcaccacaatacccaaatgtttccatcattaacccattctgcagaagaagaaactttaagatgaaaacacacaatacaataccgcacctaacctttacttcactgataatcaaggtggggagagaagccaagactcckatcacctgtcttgcaacaattttaaaggagtgtcccattgcatattaaacatctctattgtactgaagttcaggaaagtaattagaattactctggcttttgtgactcataaacttaatgctctttcagcatcattttggctgagcagattttctaaccacagtttaatagcaaacggcatttaaataacaatctcaaaagtctttccagcatctcaaattatagtaaaataaattggctcttaaaattagaggctctgcttttacaggctatgagatatctcactggtttctgatatcttaactatgaaagaaaattacaattat

SEQ ID NO: 144897 - DNA, 556 bp, Homo sapiens
gtcagtttcttgtaggttttcttgcttgtgtgcatagaggtgtttgtaatagtctctaagggctttttatatttctttggggtcaggggtaatgtcccctttgtcatttctgattgagtttatttggatcttttctctttttttaaatttattggtttagatagtggcctgtcaatctcattctttcaaagaaccgcttcctggattcattaatcttttggatggttttttacgtgtcaatttcattcaggtcagctgatttcagttattttgtgtcttttgcaagccttgaggttgattcgtttttgtttttatagttcctctaggtgtgatgttaggtagtcaatttgagatcgttcaaactttttgatgygggcgtttagcacaataaattttcctcttaacactgttttagcttcatctcagagatgctggtatgttgcatctttattctcattagtttcaaagaatttcttgatttctgccttaattttattgtttacccaaaagtcattcagcagcaggttgtgtaatttccatgtaattatatggtttt

SEQ ID NO: 144898 - DNA, 582 bp, Homo sapiens
aatttaagcagcttttaaccccaatttcagctactattctagaggaccctcagaatgggcccaaagggagagaatatttgtatcaaacgtgaatacccagtgcagggatgcttttaataatcaggtagataaaatgaccttctctattgtcagccaaccctctcttccctagataacacatctgctgtttgctcaactttcccattaaaagaccaacctggagcccccaatataataccatgcctttgggggatagctacctagccagctacctagcacaaggttaattgcattggcaaccttccttcctgataaaggtgccatttatcttcacttattatttggactttgatatgctttccttcccaactatgcttctacaagtgcaaccattactgaatacctcatatatagtcatgacaggcatggtgcctcaaaggatattgtttctgacctargaactcactttacagtgatggggaaaaaatgaataaaccagctactagttttattatgtatcccatcatctaaaagcagctggagctagacttatagaacatttccatgagctgtggaaaaatg

SEQ ID NO: 144899 - DNA, 393 bp, Homo sapiens
agccccagtgggcatgtgttacagtgtgctctttcagtttagctcyctgtaggcggcttgcattagtcagctcaattagaccctttgccttatcgcaaggacagagggctttctgtatcccagggttcttgccttggtataccagcagaatcagatcacacatgggcttggagaatgagtgcaaagattttagcgagcggaagtagctctcagcagatgggggagccagaagggagatggagtgggaaggtggttttcccctggagtcggccactcagcagtggagctctctccttcgactgccccagccaaacttcacctcgtcctgctggtcaatagcctgctggcctgccggcatctgttgatgtgctcttacgccagagcattcccctc

SEQ ID NO: 144900 - DNA, 336 bp, Homo sapiens
tgaactttgtgtgatattttgcagaaacaggaaaactaaaaaatagaaagtgactggagctgatttgacccagaaagggttgtacctctgagattcttaattcatactcccattacctggttctccyggacttccctagttcccacccctctcaaagcccagttcttcaatgattgcttctctataggccacctcacattgtgtctatcaaattagttcctattgcttacaaccaaataccctaaccaatatatatgacaatataatatcaaaatattggtggtctcaaagcagaggtcaggtgaatgcatagagcatatttcacagatcttccaa

SEQ ID NO: 144901 - DNA, 439 bp, Homo sapiens
ctgttcagaattgtgccaaaaaatagaagctaatcaagactgccttggggaaattggcatatatggctaccctagttatagacaaaatagtctgacaaatcagcccctctttctttagcagcttgattggacaactgaaaatctgcttctctagtgaggagagtctctcaggctaaacccagtgttgtccratgtccttttctgtttatgcctcccagctgccctcagttttggagaaggccagatcagttttctatgggagactttgtcatgaccatgtcttagtccatttgtgttgctgtaaaggaaatacctgaggctgggtaatttataaataaaatagatttctttggctcatggctctgcaggctataaaacaagaacggcgccagcatcagcatctggtgaggacttcatggagcttccactcaaggtggaa

SEQ ID NO: 144902 - DNA, 590 bp, Homo sapiens
aaatgtagtgacacgttcacaaactctgtttcatagtctaatacagcacacacatgacaggttactgtgacttagaccaggcttgcaaaattaaagctaggactgagaataaaatccaaatctcaacttgccttcmagaacctttgcaattaattcatgttttgaaatctttctcagtctttgatgcattaggggtcatcctccaaccactgcccaccctagcatcgaccagtcctgtcacatgttgaccctaaactgcccaccttaatccactttgaactatactcctctttctgtagaaacaagccagccatttgtattcctctctccaccatcactaaccacaagaataaaaaaataaggataccttgactcatcaaagatagaaaatgcttaggttgtacagaataaagcccagcatttcatcccactttgtttttttctgaggccttttgatctgcacgtttttttctccctccttctctcctgtcttcttagaaataacgtggactctccctaggggatgctgaagagcagacacacggatcctttgacaaatcaataatggccaaaaaaaatgtattagttaa

SEQ ID NO: 144903 - DNA, 361 bp, Homo sapiens
tccctgaaaagcgccgccccctgctccatggtgccaggtcccatcgaccacccaagggctgagaagtgagggcacatgatgcgggactggcaggcagctccacctgcagccctagtacgggatccaytgggtgaagccagctgggctcctgagtctagtggggacttggagaacctttatgtctagctaagggattgtaaatacaccaatcagcactctgtatctagctcaaggtttgtaaatgcaccaatcagcaccctgtgtctagctcaaggtttgtaaatgcaccaatcagtgctctgtggctagctgatctggtggggacttggagaactttttatgtctagctaagggattgtga

SEQ ID NO: 144904 - DNA, 424 bp, Homo sapiens
ctgcttgttgattatgcagtgaaattaaagggagaagttctaaaccttgatctgctgataagtgggagtgcttgggtagctttggatatgcggcttagctctcgccttagtttcctcctttatacattgttgggattagaccagttraaccataaatccatccttctgttattagtaataatatatttattaagcagtgtctgtgttccaaacactgggctggtcaccttatatatcttagcttctttaattttcacagcaatcctctgacttggatactatttttatccttgatttatagtgaagaaaattgaggtttacaggaattcattcagttcatgcagctagcaagcagcaaagtaggcactagaattccaattcaatcccaaactctgtttcacaaacattgtaataccctaccttt

SEQ ID NO: 144905 - DNA, 578 bp, Homo sapiens
attaagtaacagaagtagttataggcaacatcaaaaaggctattcaagtctcctaatttctataatagtttgaacaatttccaaacaggcttgaatacacaaaagcaattcyagtccattacaagatattactacacacctagtagaacatctaaaattaaaaaatagtggcaataaaaagtttggcaagggtgtgtaaaaactggatgtatacattgctcatggaaatttaaagtggtatagccagtacgaaaaaatagtttggcatgttcattaaataataacactaaatatacactgactatacattccagtaatctcattcttgtatatttgtcccaaaaaatgagaatttatgtcaatgcaaaagtctgcacacacatttttacagcagctttatttgtaatagctcaaactgcaagcagataaaatggcttacaacaggtgaaaagttaaacaagttgtggtacatctacaccatggcatactactcagcaataaaaaggaacaacatattgataaacacagcaacatggatgaatctaaaaacacactatgctgagcaaaaaagctggtct

SEQ ID NO: 144906 - DNA, 614 bp, Homo sapiens
gtgggaagacttattggacagctgtactttttaagttgctagtaagtcatatgcagtggctgtatactcagtgtcaacatatatccaggttttcctgggactgtcctgacttatttctgttgttgtcctggcatatcaatgaatagcacccccttttactttcaaaatatactcataaacatgtacatcccttcctagtgttagaccatgaaatgttatgagcaacctattggtatggttttctaaatgtcttgaatgattattctgcctcatttatgcaacagaaaatatactatttttctgcagcatgctagcaactcctatagacagagcattcatagttgaatgggcaagtgtgtaaacaatggcaatgcacatgaaaaggactaggagggaagagaaacccccatctcaaacttgttcacttatttccacatctacagctggcattattgtccaatccaccttcatctttcatggggaccatcgcattaattcctaagtaggtgcaaagtattgatcctgggtgtgtcgtgagggtgttgtcaaaagaagttaayatttgagtcagtggactaggaaaggcaaacccacccttaatctgggtaggcacc

SEQ ID NO: 144907 - DNA, 402 bp, Homo sapiens
gggaaaacaaacatgttaacgtctagaaggggctataatgtggtagttaagggcactgaatttccagttggtttaagtagggttctttaagtaaacagggtatttcccagccctgaaattcctgagcaccttagtatcagcatcagtaaattttggtaatcaatatatagagacaaatatctaatttcctctttcatttttggagwccacggagcaagacagaaataagtcatgggagaaaatatacgaaccaatatgccattcataacaaaagagttcaataaaactctattcaaaacttattttcttttaatataatacatgatttaactttagaagtacggcaggaacaaaacaaaaaccttttaccccaggactagttaagttttttttttagtataa

SEQ ID NO: 144908 - DNA, 402 bp, Homo sapiens
gggaaaacaaacatgttaacgtctagaaggggctataatgtggtagttaagggcactgaatttccagttggtttaagtagggttctttaagtaaacagggtatttcccagccctgaaattcctgagcaccttagtatcagcatcagtaaattttggtaatcaatatatagagacaaatatctaatttcctctttcatttttggagtccacggagmaagacagaaataagtcatgggagaaaatatacgaaccaatatgccattcataacaaaagagttcaataaaactctattcaaaacttattttcttttaatataatacatgatttaactttagaagtacggcaggaacaaaacaaaaaccttttaccccaggactagttaagttttttttttagtataa

SEQ ID NO: 144909 - DNA, 596 bp, Homo sapiens
tcttgtccaggttaacaattaagtaaatgtctctaatattcatttcatttggagaaacgtttcatttttattaacgaagctgatgtttggtgtcattatagcaatcagaagagtctacattataatgtagtaataaataactttcatctctttatggcttatagcaacaacagttatttgcctcatctatctgtccgttggtggttggctgaagctctaactcaaggttctctcgacctaaggttgatgaagcagccactaccttaaacattgtttgttatcatggagtctcacacagcaatgaaaaactccatcctggaagtggcattcctttcatcataacccactggccaaawctgatcacatgggccactccacttcagatgggacaagagggctagttctaccatgtgcccaggaggatgaaagctggaaatagttggtggacagcatttgggactatcactttctaccacccttcagataatcaaatattcaactccccatatctcccataggcaaaatatactcagcctctccccaaagaagtcagtccaaaagttctgttttgctatggcattaagctcaaagcccag

SEQ ID NO: 144910 - DNA, 591 bp, Homo sapiens
tgcacccatagttctagctacactggaggctgagtggggacgttcacttgagcccaggagtttgaggttacgttgagctctaatccactgtattccagccttagtgacaaagtgagaccctattccccaaaattaattcaaggggaggataggatttgaatagacatttttccagagaagatacactaatggctagtaagtacatgaaaagatgctcaacatcattagttattagtaaaatgcaaatagaaactacaataacataccacttcatgcacagtaagatgactataatcaaaaaggcagacagtaacaagtgttaggaaagacacgcaaaaattggaatcctcatatattgcttctgaaaatgtaaaatgatgccattgctttggaaaattatttggcagttcccctaaatgctaaaagtagaattacaatatgacctattgattccaccccaggtacatatgcaagagaactgaaaatatacgttrataatagcattgttaataatagccaaaaaacagaaaatacccaaatgtccagcagctattgaacagataataaatgtagtgtatccatacattaaaa

SEQ ID NO: 144911 - DNA, 591 bp, Homo sapiens
tgcacccatagttctagctacactggaggctgagtggggacgttcacttgagcccaggagtttgaggttacgttgagctctaatccactgtattccagccttagtgacaaagtgagaccctattccccaaaattaattcaaggggaggataggatttgaatagacatttttccagagaagatacactaatggctagtaagtacatgaaaagatgctcaacatcattagttattagtaaaatgcaaatagaaactacaataacataccacttcatgcacagtaagatgactataatcaaaaaggcagacagtaacaagtgttaggaaagacacgcaaaaattggaatcctcatatattgcttctgaaaatgtaaaatgatgccattgctttggaaaattatttggcagttcccctaaatgctaaaagtagaattacaatatgacctattgattccaccccaggtacatatgcaagagaactgaaaatatacgttgataatagcattrttaataatagccaaaaaacagaaaatacccaaatgtccagcagctattgaacagataataaatgtagtgtatccatacattaaaa

SEQ ID NO: 144912 - DNA, 556 bp, Homo sapiens
cccagcactttgggaggctgaggcaggtggatcaggaggtcaggagatcgagaccatcctggctaacacggtgaaaccccgtctctactaaaaatacaaaaaaaaaaaaaaaaaattggccgggcgtggtggtgggtgtctgtagtcccagctactgaggaggctgaggcaggagaatggcgtgaacccgggaggtggagcatgtagtgagcccagatcgcgacactgcactcccgcctgggagacagagtgagactccgtctcaagaaaaaaaaaaaaaaaatgttattttggcaaacatkcacaaaaccttggcctggccttaatttagtcttctcaggagaatgtgtattttttaaaagcaagaaagggaacacaatgcaataaaaccaattttatttgtggtcttattgacattattttaaattatacatgcccttcagaaaatacaaatatttcccaaagaaataaaataattaaaacatcaaaactgaataattatgcctcattatccttccatggttttcatataatatatatgtgtatttggtggtat

SEQ ID NO: 144913 - DNA, 549 bp, Homo sapiens
  misc_feature (1)...(549): n = A,T,C or G
ntcttggctgtttttggctttatttctgggttctctrttctcttccattggtctatgtttttatagcagtaccatgctgttttggtttctatagccttgtcgcatagtttgagtgcgggaggtgatgtctccctatttgttctttgtgcttagtcttgcattgggtgtgcaggctcttttttggatttatctgacttttaggtttgcttgttcctagttccgtgaagaattctgatggtatattgatgggaattgcattgaatttacagattgtttttggcattatggtcatttttacaatattgattctacccatccacaatcatgggttgtatttccatttgtttgtattatctgtgatttctttcagcaagtttttgtagttttttttttgtagagaccttttacctccttggttaggtatattcctaagtatttgattttatttttgcagctgttataaatgtggttaagttcttgattttgattctcagcttggtcacgttcgtgtatagcagtgctactgatttttgtacactgattttgtat

SEQ ID NO: 144914 - DNA, 234 bp, Homo sapiens
ctgcagccaaggagataggagatcaattccataaccacgtcctcaaccaactacawttagggggttacatagcagggaaaaaaatgtaactatgtgtgggaaaacaggaattagggaaaggtaaggaagaggagttgatgattggtgacaccgagcacctttacatatacgtgtttgccatttctatgtcttcttttgagcaatgtctattcagatcttctacccattttaagt

SEQ ID NO: 144915 - DNA, 596 bp, Homo sapiens
ttgacattaaataatatgattgaatatataattgctcaataactcaacaatttaattgctaggtaatatctcaaagtaatgcatgagcctgcacaccaatacatacattaaaatgttcataaaagcattgtttctacagcttgaaacaactcatccacatgacttttaagaaaataataaataatcgtgcagtgtgcatacaaagaaataacatagtgaacaaatgtataaaccaaatctacttgcaacaacatggatggagctcatcaaaatgataaaaaagcaagatacaaagaatacaatattaaatagagttaaaaagcatgtataactacattttattgtttagaaatagacaaataagtggaaagactatgaaaaaaagcaaagaaataatcaagtgaatgatgtaaaatgaattatttagaacagctgttttatcaggttctaaaataaaagatgaatctgctggtgtagtttgttgcttgttggtgaaactctaattctttrcaaacttccttagcctgcccttttgtttcataagaaataatttagtccttttccatgttaacagtgagtttatattatttttaacc

SEQ ID NO: 144916 - DNA, 586 bp, Homo sapiens
atatatatgtatattttatacatatatatatatttatatatataatgaatgcttttcaggcatgaaaaccctgaaacatgagtcagacttcacttcccactgatttcctttgcaatgatgtgacctcttctgcaaagcatgggtactcttgctaagatgacatccttcatacccagccctgcatctgcattgccactgcctctattcatcagtatcatctccagtctccacagamaggtcaacgtcccctgattccataccgatcttcccatttgtctcctgacttttgaaaatattaatactttttaaagctatctaaggtttcacatgacagtctaccacctgcacacagcttgtaccaacaccctatctctaagtgaaccaggatgtcacatcttctcctgccagcaggtgtggtctacccacctcaccatgacagacacctactgccacggtaacctcaaaacatttcactgacttaaaaagctggattcaagctctgctgacccttcccacaccctggggctataactagaggaaagagaagtaatctagagggaaatcccaaggcacccacaggtgagcc

SEQ ID NO: 144917 - DNA, 586 bp, Homo sapiens
atatatatgtatattttatacatatatatatatttatatatataatgaatgcttttcaggcatgaaaaccctgaaacatgagtcagacttcacttcccactgatttcctttgcaatgatgtgacctcttctgcaaagcatgggtactcttgctaagatgacatccttcatacccagccctgcatctgcattgccactgcctctattcatcagtatcatctccagtctccacagaaaggtcaacgtcccctgattccataccgatcttcccatttgtctcctgacttttgaaaatattaatactttttaaagctatctaaggtttcacatgacagtctaccacctgcacacagcttgtaccaacaccctatctctaagtgaaccaggatgtcacatcttctcctgccagcaggtgtggtctacccacctcaccatgacagacacctactgccayggtaacctcaaaacatttcactgacttaaaaagctggattcaagctctgctgacccttcccacaccctggggctataactagaggaaagagaagtaatctagagggaaatcccaaggcacccacaggtgagcc

SEQ ID NO: 144918 - DNA, 537 bp, Homo sapiens
gttcttacctgaaacatttttatttcttagcccctagtgaccacatcaatcacttaaagtgtagctagattgcaagtcttagcttggagaaaaatgaaaagggtaatttctctcttattctcctcttttttattttattttttccctctgcctcctttatgaaggggagtttgctgcggcttgacatggcytttctcagcttccaacatttacaccaaaagctcttaatttggctcagttccttttgattcctccctctcccactcagactcttatttttctcttggtgctaaaccaggatgaggagcaagatcatgtcaatgttgttacaagagaggattaagggccaaacctatttattggcctttgtattgcagagtttagtttttattgtactcagttgtggcttctatttgtcagacacctgtgcttacaagtgatagaagtccaactgaaatggctttggaagagaaagaaagagaaaaagaaaatatggagactgaggtaggtcacagaatataagaatgagcagctgta

SEQ ID NO: 144919 - DNA, 477 bp, Homo sapiens
gtttgcaacaatgatatcagggcagttgtggttaagtactagtgcttagacgtttaagaggatttaatttattaagctaacaagtttggtttattactggtagaagcagttatatattttgagactttttctttaagagaatcataaatttaataatatgagcactaaacatagcacaaatattacaattctacacatagtaacacataaaaatctccttgggcattgaagatcctagtattgtaatgtagtaatggttcttttcagttctcttatatgcaaaaaggtcasaacctccatgttagttatttctagaactctacagacacatcatcaacctatggacaataataatatgagatttgaatgttatcttctcactatgcaactttggtccccaattatgagtgacacacatatcagcgatacttacagtgagtcaaatgaggaagcagtgtgggagttgtcaggggtagt

SEQ ID NO: 144920 - DNA, 463 bp, Homo sapiens
ttcacgttaaaatgacatggtaagggaaaaagaaaaaagaatgacatggtatggaaataatccaacagaattattttttgtatcatgagacttttcagagttcatgtatgcagtcgctctcattctgaatttyagaggactgagattatacacatttcctggtgaattcatactctctacttctgcaacacagaagacaaggatattacttgaagcattagcaggacgaatccaggcaaaagattagagaatggaaggattattagacactagaatgtttggcaaaaggaagctgtattgtccctcctactccaaatatcaagccaaatggttgaattgtatgctctctgagtggttcttccaaaataaagtatttatttaaaataaatactttaaataattatttaaataacttattttggctgggcgccaaacttgacatgggctgggccctatctgtcat

SEQ ID NO: 144921 - DNA, 466 bp, Homo sapiens
tacttcacgttaaaatgacatggtaagggaaaaagaaaaaagaatgacatggtatggaaataatccaacagaattattttttgtatcatgagacttttcagagttcatgtatgcagtcgctctcattctgaatttcagaggactgagattatacacatttcctggtgaattcatactctctacttctgcaacacagaagacaaggatattacttgaarcattagcaggacgaatccaggcaaaagattagagaatggaaggattattagacactagaatgtttggcaaaaggaagctgtattgtccctcctactccaaatatcaagccaaatggttgaattgtatgctctctgagtggttcttccaaaataaagtatttatttaaaataaatactttaaataattatttaaataacttattttggctgggcgccaaacttgacatgggctgggccctatctgtcat

SEQ ID NO: 144922 - DNA, 465 bp, Homo sapiens
tgaacctcccgcctcgacctctcaaattgctgggattacaggtgtgagccaccacacccggcctaaattttttatgggccatgctattacaaaacgtcattattaggggcagctggatggaaggtgtaggaggacactgtagtgcctttacaatatttctgtatatctaaaatcatttcaacaggaaacatttatttcaaaacgtgaaggtggttatccttccatgagtttaaagrcaggctcatggtgttgtcagaattcagaacgctggtcgtggggctgggggtgctgggatggggctgggcatggttggctttgtgatctgggggctggtgtgttccatctgtgcatgtctttcaagctgcacgctttcttaataaattttcataagtttaacaaaaaataaaacaaggatgcgaagcctgcttggattgttaagcctcgggaaattatccagccatgagc

SEQ ID NO: 144923 - DNA, 465 bp, Homo sapiens
tgaacctcccgcctcgacctctcaaattgctgggattacaggtgtgagccaccacacccggcctaaattttttatgggccatgctattacaaaacgtcattattaggggcagctggatggaaggtgtaggaggacactgtagtgcctttacaatatttctgtatatctaaaatcatttcaacaggaaacatttatttcaaaacgtgaaggtggttatccttccatgagtttaaagacaggytcatggtgttgtcagaattcagaacgctggtcgtggggctgggggtgctgggatggggctgggcatggttggctttgtgatctgggggctggtgtgttccatctgtgcatgtctttcaagctgcacgctttcttaataaattttcataagtttaacaaaaaataaaacaaggatgcgaagcctgcttggattgttaagcctcgggaaattatccagccatgagc

SEQ ID NO: 144924 - DNA, 457 bp, Homo sapiens
cgcctcgacctctcaaattgctgggattacaggtgtgagccaccacacccggcctaaattttttatgggccatgctattacaaaacgtcattattaggggcagctggatggaaggtgtaggaggacactgtagtgcctttacaatatttctgtatatctaaaatcatttcaacaggaaacatttatttcaaaacgtgaaggtggttatccttccatgagtttaaagacaggctcatggtgttgtcagaattcagaacgctggtcgtggggctgggggtgctgggakggggctgggcatggttggctttgtgatctgggggctggtgtgttccatctgtgcatgtctttcaagctgcacgctttcttaataaattttcataagtttaacaaaaaataaaacaaggatgcgaagcctgcttggattgttaagcctcgggaaattatccagccatgagcc

SEQ ID NO: 144925 - DNA, 444 bp, Homo sapiens
caaattgctgggattacaggtgtgagccaccacacccggcctaaattttttatgggccatgctattacaaaacgtcattattaggggcagctggatggaaggtgtaggaggacactgtagtgcctttacaatatttctgtatatctaaaatcatttcaacaggaaacatttatttcaaaacgtgaaggtggttatccttccatgagtttaaagacaggctcatggtgttgtcagaattcagaacgctggtcgtggggctgggggtgctgggatggggctgggcatggttggctttgtgatctgggggctggtgtgttccatctgtgcatgtctttcaagctgcacgctttcttaataaattttcrtaagtttaacaaaaaataaaacaaggatgcgaagcctgcttggattgttaagcctcgggaaattatccagccatgagcc

SEQ ID NO: 144926 - DNA, 554 bp, Homo sapiens
gctgcctccacagccctgcacgctctcccagcttcaagagaagcgtgcctgctcagtggctgtcttgcctccacctgccagtttggttagggcgagacaaccttgtttactggggcaggagagttgggaaacatagaccccctcattcttagaccctgatgccattgccttggcctcccttggtggggccttccctsggggcgggagaagggaaacacggcctggtctgtgcggttgagggctgggcagctaaaggcatgtggctccttgggctggtattatgaagtcatgggggctcggtgcctcccctaaaggggtgagggtgcccttcccctcccaccacaggcattcgtggctgtccttggtagtcatcttgggtagggagtgagctctcaggatcatcaacctaaggatgggtggaggcctgtggctgagggtgcccgtttctcccaggtttgcttgtacccaggtagcatgtacccagtggcccggggggcagcctctgcttttggggtatggctgctgagggttagccacattggtgcctcccttcc

SEQ ID NO: 144927 - DNA, 566 bp, Homo sapiens
ccacagccctgcacgctctcccagcttcaagagaagcgtgcctgctcagtggctgtcttgcctccacctgccagtttggttagggcgagacaaccttgtttactggggcaggagagttgggaaacatagaccccctcattcttagaccctgatgccattgccttggcctcccttggtggggccttccctcggggcgggagaagggaaacacggcctggtctgtgcggttgagggctgggcagctaarggcatgtggctccttgggctggtattatgaagtcatgggggctcggtgcctcccctaaaggggtgagggtgcccttcccctcccaccacaggcattcgtggctgtccttggtagtcatcttgggtagggagtgagctctcaggatcatcaacctaaggatgggtggaggcctgtggctgagggtgcccgtttctcccaggtttgcttgtacccaggtagcatgtacccagtggcccggggggcagcctctgcttttggggtatggctgctgagggttagccacattggtgcctcccttccctggtggtccctggagata

SEQ ID NO: 144928 - DNA, 473 bp, Homo sapiens
aaaaaagccacaacacatttctgagctccaactccagagtttctgatttakaagatctgtgggtggggcctaagaattttcatttctaacaagtccccaggtgatgctaatgctgctggtttagagaccacactttgagaaccattggcctatgctattggttttcaaccatggctgtaggtcagaattacctggaaagttaaaagcaaaacaatccacgtccagatcttttttcagatcaatttcaacagagtctatgtgggaggcaccagacagccatgattttagaccccaggtgattccaatgtgcagtcaagtgtaggggtgggttgcccctccacacctgtgggtgtttctcgtaaggtggaacgagagacttaggaaagaaaaagacacagagacaaagtatagagaaagaaataaggggacccagggaaccagcgttcagcatatggaggatcccgccagcctct

SEQ ID NO: 144929 - DNA, 626 bp, Homo sapiens
tttcaactctgtttccactatactatatctgatgagtaacaatttatccctagatcaaacaattgtttttatgcaagactagtacagagattaaaaagaagcttctggttttatttgcatttcccaaggtttagtaacaattccccattttctgcagcaaattataatcctctagcatccaataggagagttgagaattgtggayacagatctatataagaatgggaccagaaggggtgggtatgatagggaattgagaaagtttattcttactgagaaaaatctataattatttattacagttaagttcatgattctaaggtctgcattatacaatgaataaaccatgcaataatttcagagcctagaaatctgaaatctaaataactttctagttagtaacacctactggactggatattgcaatatgtttctactagtattgtaaccatcccaatagaaagtaagagatcagagattcatgaaaatggagtcaagattgtaggagaaagaaggaattttcttgacattcctcatgttttaggagaacacttttctaggtgggtttagcaacccttattagccatagtaccactctgccagtgggcagcaataaaaattgtcat

SEQ ID NO: 144930 - DNA, 566 bp, Homo sapiens
tacttaactttttttttttttttttttttttttttttgagacggagtctcgctctgttgcccagggtggagtgcagtggtgcgatcttggctcactgcaacctctgcctcccgggttcaagcgattcttctgcctcagcctcccaagtagctgggactacaggtgcgtgccaccaggcctggctaatttttctatttttactaagacagggtttcaccatattggccaagttggtctcaaactcctgacctcgtattttttttttycttcaacagtcagtatctgttttcgtgcttacaaccaatacccccaacttttacagacacaaaagcaaacataatagacttattattccttgttatgggcactcgttaaacatttacaacacggaaacacatgtccttttgttctggaaaatgttttagagtggattctaggtttcatgtattcctccccctttttctggatgaagggagacaccaggatggcagttgtgtgcctctccttctagccccaagtcaagcttctaatggagtctttctaaggaagttgacgttggtagaatt

SEQ ID NO: 144931 - DNA, 229 bp, Homo sapiens
agccattccatcctttctggtcatgttgcctatttaacaatgaaaaaataatcaaatttgtytgctccatttgagaagcaaactctctaccagacagaaacaaggatgtatgaattgccaagagttggcagccatcttgccaacacaagaggaaagcctgcatgagagtgaggccaagaccagggaaatggatccaacactctggaaagggattcagaagccagtttat

SEQ ID NO: 144932 - DNA, 622 bp, Homo sapiens
atttttaatttcatgtacagagaaacctctttttgttcaacagaacaaacttgcttcctcctgtttscacaggtgtaatgaaagctttttggcttgcagtaaggagggatgtgggaggtgattgaaataatttggttaatggggaaatctggaaagaaaataaatttgtgtatgtcattgtccatgtgtgtggtatatatttatgcttgattctgaagtgcatagaggtcagagaaactgctctgagggtggggttgttttcttaggataaactctgagagattaaatcactgggttagaaagcaaaaatgtttgcttaaagaatctttctttatgattacaacctaatttagactacagtgacacaattaattagcctaactgcttggcacattttccccctagaatcagatcacctcctccatcccctttgattacaactgctccagggcttcttgcagctagaataaaattcacactccctggaagactgcctctccatcagctcatgggttcccaatacctctcattcttacctcggggccattgtctattcccagcactttgaagagctccttctcatccttgtgcctcatgtccttcaattcttgatggaatgtca

SEQ ID NO: 144933 - DNA, 622 bp, Homo sapiens
atttttaatttcatgtacagagaaacctctttttgttcaacagaacaaacttgcttcctcctgtttgmacaggtgtaatgaaagctttttggcttgcagtaaggagggatgtgggaggtgattgaaataatttggttaatggggaaatctggaaagaaaataaatttgtgtatgtcattgtccatgtgtgtggtatatatttatgcttgattctgaagtgcatagaggtcagagaaactgctctgagggtggggttgttttcttaggataaactctgagagattaaatcactgggttagaaagcaaaaatgtttgcttaaagaatctttctttatgattacaacctaatttagactacagtgacacaattaattagcctaactgcttggcacattttccccctagaatcagatcacctcctccatcccctttgattacaactgctccagggcttcttgcagctagaataaaattcacactccctggaagactgcctctccatcagctcatgggttcccaatacctctcattcttacctcggggccattgtctattcccagcactttgaagagctccttctcatccttgtgcctcatgtccttcaattcttgatggaatgtca

SEQ ID NO: 144934 - DNA, 587 bp, Homo sapiens
acccctgcctccaagctcttcctccaccaatctttcccaccttagtagatagcaactccattttgctaattaattactcaggccattaaacttggtccaccttgatttctcacattccacatcaagtatagctcatcagtaggtctttcagtaaaatagagctagaatgctactacttctgaacaattccaccataatattttggtacagccttcctttagccagttttatgtgtaatagccaaagtgatcattttaaaatgagtaaytgagatcatgtttataatccaatgttttcctaactcattcatagtaaaagtccttatagtgcctacaagatgctataggatctggctcttgactatccctttgatgtcttcccctgctacttttcccagtgctcacttcatacccagccatgccaaccttgctgctgttcctcagcaagcatgccctctgctatatccctgaaacctataactatgcgtggtaaatagtactcaagaattgtttatttgaataaaggtaatgacatttcagctaaggcagagtaggagtggaaaataaggaggtagctccttagctgat

SEQ ID NO: 144935 - DNA, 523 bp, Homo sapiens
ttaagactgatgagtctgagagaaagaggttttaagcttattttagaagagatgattcaggagcaatcacagaagagcaatattgagacccaatttcctatcagtggtaagtaattgcattaaaatgtttattaaagcagatactgcataagctttgaagtagaacctgcagcccattggtttaagggtcactagtagtctccctactaaaaaaagaaaaggatatcttcatttcaaaccattccttaaggcataatactggtagttccaaatgaatcatctgaggtaataaagttaatttgtgtatgtgcgtttattatttttaagaaataatgataaacacgaaagtcagtcatttgctatttaaatgacccagtggggacattcaagccaaaacagagttcattgtatttccatgtctctcttaccatatctcttctaccaagtagctacccctcaccctcataaagttcccagargagaatagattagctgaacatgtactaacttctctgaataaaat

SEQ ID NO: 144936 - DNA, 513 bp, Homo sapiens
cagtcactgccatcccactgcaccaccttcacaagaatttctgcctgcagggattggatcacatctgccactagaggagaagtgagatcactgaaagagcagtgtggtacaactgtgattacaaatgggaaaagaaatgcataacagtacacctgaaaaatgaatgtcttttcagtgctgaaatattcagtgtcacttccgcccatcattatcattgcagaggttggtgttggtgtgtttgtacattcaatattaaacattggtcacagaaagttaatgttgtttcatgcctcctgggaacttacagtttgaatcattcaattcatatcttgcataccatgtgtatgctgtatattttgaataccattatatacaattgtactgtttttttctactttggcaaacactggaagatcagaagggcaatattattaaatccatataattcttaactttactcacagggatacaggccagaaactgctgtgagcrcaaatagataggaaaggtccc

SEQ ID NO: 144937 - DNA, 270 bp, Homo sapiens
gtgagtttctcctgtcacatggatcattggaaaatttttttgttcattcttaagtcataaattacattacttcatttcctctaacccttcaccttttctttctgatatrtgtttcaatgatgtagtgccaacatttcacactttccttgtcaatttaacaaacagtcaacaacttaagtctagtaagtatcttattctcgctgaagattaacaatgttggcccatctcttgattgcatctttgtctcaactttattattcataatattag

SEQ ID NO: 144938 - DNA, 440 bp, Homo sapiens
tagttacgctggatggtggtctcacagatatttattatcttgttccataatttacatatatttgcaaatataaaatactacacgatatgaaatacttaaagccccttttaacaacactagctcctcaggttggaaactgttctcctcctgtctaggtatttagaagttcctcagtaagcccttacattcttttcagttccctatgcctagaaagcccacagtgtcactgtgacttgtggttactgatgtcatttgtaacaatgagcctagttgttaacattagcagktacactttctaccatctactttcttgtatgagaaaacagttttaaatgtgtttgtatgtcttccaggagtgagatattacttgacctttccatttagctcatttattcattaaaactaatctcattcaaatattttgaatatgccgttaataa

SEQ ID NO: 144939 - DNA, 596 bp, Homo sapiens
gcgatgaccttgtagatgcgaggggagcgagagagagtctttcacactaaccagttgcatgggtttccacattgaaggaaacaagaatggcaagaaagaataaagagaaagaagacagagaatagaggacactgcrtgttacatctcatgttttgtagagcaggttgtggttatgagctattctcattttatgaaaaccattaaatcttttttttcctctggttctttattgttcactcagagatcacttagggtatttcatcaagtctccatgaaaaagaaggctgctccagagacagatgcaaaaggaagaaacggctggcccaatgctgtaattctccctagaaggaaaagcgtttgtaattagcctcggcagggcctatctgtgcagcagccccagtgtgggtgcatctgctccctgcaccataaattaggaaagccagattggcttgttaattgcaaggttgtgtgtgtctcatgttgtacaatgtgctctcagatataccattggaccctcctatgctcccaaaaaaaagcctcaggaagagcgacagagccttacccagactccagctgtgtctctggcacaacaaagg

SEQ ID NO: 144940 - DNA, 521 bp, Homo sapiens
ttcttttttaatgaggaaataataagcttatttgtaccccagaatgattggacaatataactcattttctctataataaattttaaaaatgaaattcatcaaaataataataaatagcaaaagaatcttcataaacaattcaaatgttgaagaatactgtgagaaagaaaatccagtgagtgctcttacaaacaggcctgaaaaatcaccactgctccagttcagcagatcttttgttgaggttttctggacggggaagggaataaccactatcaggacatttgtaaaacatacctgtagaaggcaaagtcaagatggacttaatttattccgacaattgatgtagcaacagagacatctcttacattattcatctttccaatagaaaattccyttcctggagagatcaggattgaattaggcccaagctaattcaaacgcaaatttatttaaaaagtaaacacacaaaataaattttgtccttgcacaggtctgctgtacagtgtgtgttttaagaaaat

SEQ ID NO: 144941 - DNA, 490 bp, Homo sapiens
gaattctgtttctgatttgaaggaaacaaaagagaaagagaaagccatttctgtagtcagtgacctttgaaatacatggctgttcatttacatggcagtggggtcatgagtgaatataaaattcaggaagttgggcttaaaacttgccrgagatgaccggctgcttacagagcaaacaggcaccttacatgggtgagcccatggtggaaggtcttattgaatttagcctgtcctttcctttagtgttttcacctcagaagttcatttcaagggctcagagccttaaataaataagaaaaagagaacgtcttaagaaattatttcctctacgaaaaaggaagacacatgtcccagataagctttctgttactgcttgttgtaaaggaaataaggaatatggaaattggcttcatcatgtgcatgggacaacccttaaatcttctgatggttacagtgctttgctgaacatacaaagcaaacaaaagccaaa

SEQ ID NO: 144942 - DNA, 490 bp, Homo sapiens
gaattctgtttctgatttgaaggaaacaaaagagaaagagaaagccatttctgtagtcagtgacctttgaaatacatggctgttcatttacatggcagtggggtcatgagtgaatataaaattcaggaagttgggcttaaaacttgccggagatgaccggctgcttacagagcaaacaggcaccttacatgggtgagcccatggtggaaggtcttattgaatttagcctgtcctttcctttagtgttttcacctcagaagttcatttcaagggctcagagccttaaataaataagaaaaagagaacgtcttaagaaattatytcctctacgaaaaaggaagacacatgtcccagataagctttctgttactgcttgttgtaaaggaaataaggaatatggaaattggcttcatcatgtgcatgggacaacccttaaatcttctgatggttacagtgctttgctgaacatacaaagcaaacaaaagccaaa

SEQ ID NO: 144943 - DNA, 534 bp, Homo sapiens
aatcatcttattttacatgaccatcgcagctgtactaggaaaagatgacattttgttaacttgtgggtaaataagtcttagtatctgggaasctttgattaattaatttcaccttctgtatagtaaaagtaagtgtgacataacagtctctaatggttgtgaaaaatatgcctaaaagggccaagtgcagtggttcatgcctgtaatcccagcactttggtaggccaagacgggcggatcacttgaggccaggagtttgagaccagcctggccaacatggggaaaccccatctctactaaaaatacaaaaattagctgggcatggtggcacatgcctgtaatcccagctactcagggagctgaggtgggaggatcactggagcccaggaggcaggagttgcagtgagccgagatcgccccattgcactccagccaaggcgacaaagtgagactctctgtctcaaaaaaaaaaaaaaaaagaaagaaagaaaaagaaaaatgtacctaaaaagtaactcagaattactaaagttt

SEQ ID NO: 144944 - DNA, 436 bp, Homo sapiens
gagccgagatcgccccattgcactccagccaaggcgacaaagtgagactctctgtctcaaaaaaaaaaaaaaaaagaaagaaagaaaaagaaaaatgtacctaaaaagtaactcagaattactaaagtttgctaaagtgaatctttagacaaagagaacacaagggcaattagaattggagccctagaatgagagatgtggtgatcgacctgaaccttgccacacaggttggaggtacacccttgaggggacatataaacctgttggagggarcagctcagaggtggaaagcatggactgagtatgggaagtagccaccagtctggtgggctgtagacatacttcaagtaatgaaaggatagggcagagccctccccaacatctgcatctgcctcccctctctacttccctcaaaaacttcccaaaacaagcagta

SEQ ID NO: 144945 - DNA, 442 bp, Homo sapiens
aaagagtaaaacgataattttaaatatttttaatcatatgttaaatagttacattttcaaatacagtcatgtgccacatgacatcattttggtccaagatggatcatatatatgatgatgtctcatggtctcataagattataataccgtgtttttactacatcttttttgtgtttsagtatgtctagatacacaaataccactgcgttaccattgcctacagtattcagtacactaatatgctgtacaggtttgtggtctcgaatccataggctatatcatatagtctaggtgtgtagtagtaaactatttcatctaggtttatgtggctatatcctatgatgtttgccaaaaggaaaatcacctaatgacgcctttctcagaaggtatctttgtcattaagtgacaaacaactgcaatgtgctcaatatgttttcagatg

SEQ ID NO: 144946 - DNA, 592 bp, Homo sapiens
aaatttaaaaaaagaaaaaaacaggcagcacatttcttgtgatggatccatctgagccactgtgcagttttctgattaaatttttgttttaaaaagatgcttgaaatcttaaatattacagttttactaattgatataatttaaagactatctccctccgatggggctgggaagatttagtaatgtaattgttttctttttatgtgaactaagctttatcttcaccctggaatcaaattaccatctgattgttcataaattttgtttccttttgcaaaacagtgaatagatagtatgtaaagatggaaattgacaaaacaaatctttraggaattaaacacattacaaatacattattggtcattcttgttctaaaaactgaaagcaggagcttcagattaaagcagttttctaaaacatgttttcttggtgtttcagggagactctggtgggccactagtatgtagacatgaaaatggtccctttgtcctctatggcattgtcagctggggagctggctgtgtccagccatggaagccgggtgtatttgccagagtgatgatcttcttggactggatccaatcaaaaatca

SEQ ID NO: 144947 - DNA, 436 bp, Homo sapiens
ttcaatataattataacttgttgtggtgagattacaggaaaatagaatgaaaggagacaaygtacggccttatagattttgtcaagggatatatttctactttatgttaacagctattgtaaaaagtatacacgatatttgtttttaaaatatgaaatgcttaactaattaattagaattctgtgatatactgtaaacaattgatttgaccgtaatggatcatattctctgttggaaatcatgagtccttctctttatttttattttgcactttttttggtgatgctttgttttgtcttgcctttctttctctcatcttacataatttgatacctctcttttgtccttgcaagccatgtccaagttaacgtttataatgaaagaacactttttcttgctagacagacattgcatgagtccctctttcagatatcaa

SEQ ID NO: 144948 - DNA, 543 bp, Homo sapiens
ccattagcttccacaacatgtcacagaataggagtggtgtagggaaaaaaaaaaagaaaaaaaagaaaaaaaaaaagctgcttgccttactattgacctttgtgttgaatgtaaggataatctaattttatcttttctcatcatgtacattttacatgacagaagttcactagtatkttacttttacattttcaaaataaagattttgaatttgacctgtattttctgccatagagacaacctttcttacaacaacaatttagggcaatttaggacacgtctccaccaagtaaaagctggtgggacatttaattcaaacataatagtgtttttaaaaagaaatgtgaagcaatttctttacagatttttaaagttagttatataaaactactcagtttgtaatgtgtactttgaagcccacattctttcacatattaaatcctgcgaacatttctccaaacatgaatataaacttttctttaaaaagtaatttcaaagagagtaataaagtaagagtaataatagctattatgtaattagtgc

SEQ ID NO: 144949 - DNA, 579 bp, Homo sapiens
aagtagaaattgtattcagcttgcaaaattctaagaaatctatactttcagttcagttttacttttctctctgttccttttttaattttttgaaaaagttttgaggcacaatctgcaaactcaagcatataataaaaagagcctcttttattttcttaaactcagtttctgctgattggcagagacttacatattgtcaatttgaggctaccctcctgtaaccaagaagtttgactctgcctcagagcatgacccatatctctattcttggattcccctgacccgtggtattttgccatttcacttcttcatgtcagctaggaggtaggggcagaaatcccccagggtttggggacctttgattactcctctatcctctatcctttacatttgaatattgttacgtttccatctctttgcccctttgttcttatgtcacatctacctgtaagcacctaacctaaaaataatgcaaaaaaaawatgtcattttctacagcagtgccttgagtagaaactcaatcaatggattgctggagaaaaaatactttcatctaagtctgagagtaaaataaaggat

SEQ ID NO: 144950 - DNA, 652 bp, Homo sapiens
gttgaccccgcaatgtgaatctaatagaatgggtatgctcataacatgcacggttagtatactttctcaatctgtatctttcctctagtaaatgttaaagtgaaaaattttaagagtaggtaatttttgtacaaccttttaagacatatgagttgggaggttatttaaaatgcaagttaaaaaaagatgacaggactaaaatggcctacaggggaaaatatttgaaatcaaatttawtaaataagttaatagtttatgtgcttgtcaattgatttatttgaatttcaaaagcaatctttattcattcttcaacttttaaaaaatacttcccacagcagcaatacaaagctgcaggtgtgacatggtattccacaaaccatcataatacatgcaagtcaacctatgtatccctgcattctacctccatagcttgagaatgccctccctggatcatcattttggagaactttttcctagatcaagtttcagaacagccattcatcaattgccatccattataagaccaatttgctgcatgatcaatttgacaaattaactcccccaaaacatgtatctactaactagttatgaagttcatagcaattcctattctgccaaggccacttattttttagtgtcagttgaaatattt

SEQ ID NO: 144951 - DNA, 453 bp, Homo sapiens
tagtcaccttgttccctcaaccaaattgagattatgttagttagaaaacaagaaaaaagcagatattgggtaggcaactagtagtatcaacaacagaagattactatgaaaggaaaaccaaaataaacaaaaagagttattgttagtgtagattacttatggcctagtaattgtgagaccttataattctcaccaggtttttctatcttagcaaataaaatgttattttgactacataatacaaaagcagccctggtttccaaataacataaaatgtatctcttagtgtctaggagaactcactaaaatagggtggggcatggtaacatgttttatgcagaatcagttacatatgtaaaatagagaaacttaaactgatcatgtggaagcaattttttcttttctgtatcatattgrtttaaactgcaaaaagtaaatatcaagaaagaatcc

SEQ ID NO: 144952 - DNA, 552 bp, Homo sapiens
agagaagagactttcaagaactatatgaaaagaagaaaagatagcatcaatgaggcagagaaatgtaagaagtttcttccagatgccaagagcaataaagaaaaaggcttttgatcctatctcactgaaaagcaccatggaaggaagaaacaattagtgtcagaaaactgaaggaatgagacggaatagagatagatattccttgaaatacatttcccagctacaagcagacgtaaactttaaaaggagttgggtataaaaggatctcgagatttttttattcaatggcataataaaatatgtacatgattccaaaattcccrtggaactatacacagtcctcaaagcagaaaatatgaaaacatacctgtttcatacacataagtaggccagcaatagggttataagtgagctcttttcctccacctcatctgtccttatatcacaatatttgaggtattagaaataaagatgttatataaaccttctttttaatgataaaggtagtacacacattggacatcaaccctgctccagtgagaaatgcaatac

SEQ ID NO: 144953 - DNA, 636 bp, Homo sapiens
ctctccaaaagctctcacaatgattaccttgtcatatcctatactgtatgtggggatgctctccttttcctgacwtcttcatggactgcatctttgcattattctgacgaagtctctgtatgattattttctgcatttttaacaccgttggacataaggctaaaatcaaggctctttctccccttcttcacaggtacagttctcatccccgtgggactctccttccaggtagatattctgaagattcagagatggtacaataggtgggaactcatagggcatactgtttccctatttctctcctgcagcctcctcaccaaccttaagtctcatgtcctccaggcctatgtaacaaagtgtgaatttgaatttggtcacatctcaacattgatcactcatacttttgggtactatggaaatttctagtacctttgggctcatgagagacattttcattctgatcatgaagagatgacacttttcactccagggataatttcagttcccttaaattatgcctttctgttgttctagtctcattttctttaccaaacctgcctccaagtctcatcttgctcctgaaatgttgaccctataatagttctgcaggcttccttccttaataatacaaatagt

SEQ ID NO: 144954 - DNA, 394 bp, Homo sapiens
agaattcacatctatttctagaaagtggaagaaaatatgagtgccattcagacccaaccctataaccagatgttcaaatgttaggtgacctgagatgccaaaaaataataataataataataatcaactccagaatggatcccccactgacttattctgatgcctaaatttccagtatygttatttccctttcattgggttagatccatgtgtctcaaaccagggcttgcacagcccagtaggtacgtggcagtatgcctgggatactacaggagaatcatggtacgttgtttgagaacagtggcttcactccaaaatttgagagaagttatatcaaaacaaatgcaaatgttttataagatgcaaattgacctaagtttaaaagctaaaatgc

SEQ ID NO: 144955 - DNA, 394 bp, Homo sapiens
agaattcacatctatttctagaaagtggaagaaaatatgagtgccattcagacccaaccctataaccagatgttcaaatgttaggtgacctgagatgccaaaaaataataataataataataatcaactccagaatggatcccccactgacttattctgatgcctaaatttccagtattgttatttccctttcattgggttagatccatgtgtctcaaaccagggcttgcacagcccagtagstacgtggcagtatgcctgggatactacaggagaatcatggtacgttgtttgagaacagtggcttcactccaaaatttgagagaagttatatcaaaacaaatgcaaatgttttataagatgcaaattgacctaagtttaaaagctaaaatgc

SEQ ID NO: 144956 - DNA, 511 bp, Homo sapiens
agatctagtccatacttcttgcgatggtgtcwctctgaagaatcctaatacaccattcaatagggttgttttttctgttatgaataatccacagtttgtttaaccactcccctgctgaaggcaattgggttgttcactatgactgacacattgcaataagcatcctttttacgcctttataaaggtttcttagacaagaccccaaaaagtggaattaccgcacatctcctaggtatgacccgtcttcagtgcaactggatactgcaaagttatccttcaaagacactgagccaatgttactcccgctattctaagagatcctgtttgcccacattctggccaactcttgaggttaactagatttttggtttagtttttgccaatagggtgagagtgaaatggtatctcattctttttacatgactttcctcaatgtgtggcacgtcttttcatgttgattggcagatcagacttcttcccctgaattggctatttatagctcttgcctatt

SEQ ID NO: 144957 - DNA, 511 bp, Homo sapiens
agatctagtccatacttcttgcgatggtgtctctctgaagaatcctaatacaccattcaatagggttgttttttctgttatgaataatccacagtttgtttaaccactcccctgctgaaggcaattgggttgttcactatgactgacacattgcaataagcatcctttttacgcctttataaaggtttcttagacaagaccccaaaaagtggaattaccgcayatctcctaggtatgacccgtcttcagtgcaactggatactgcaaagttatccttcaaagacactgagccaatgttactcccgctattctaagagatcctgtttgcccacattctggccaactcttgaggttaactagatttttggtttagtttttgccaatagggtgagagtgaaatggtatctcattctttttacatgactttcctcaatgtgtggcacgtcttttcatgttgattggcagatcagacttcttcccctgaattggctatttatagctcttgcctatt

SEQ ID NO: 144958 - DNA, 493 bp, Homo sapiens
gaccttctaaaattctccacaggcattgagtcagcatattttaatcactgatccttccccaaacaggtattattctctcttaaaggaaagagaaggaaccaagataagggccctactcgaagtttttcagtaacagggtcaagacaaaaaaagaaagctccctgtcaaggtctatcctttgtctaaaggccctgcttgcttctttaatcaggattcactgctaaggcctcaaataaataccatccataagagaggtaaaaaaagactccctttttacttgaaatttgctaagagagtagatcttaagtattctcacaatatacacatgaaagaaagaaggaaggaaggaagrtaactatgtaaggtgatggatatactaagtagcttgattgtggtgattatttcacaatttacatatacatcaaaacatcaagttgtacatcttaaatatatatagttttatttgtcaattatatctcagtaaggctaaaaa

SEQ ID NO: 144959 - DNA, 401 bp, Homo sapiens
gtggggccgttcctgtcagctctgcagatgcagaggtggacatgagctgggggcagcctccggacactcctgggcacgccatacgggaggtggcctgcacggggatccctgccggtrcccacaggccccgtgggtgggtgctgctgtgagcctgggctggtgggccctggtctccgggctctgagcctcagtttccccatctggaaagggggacagtgatggggctcccagcgggctgctgtgagggtgggaggatggaggagtgccctgagccccctgccatcccacacccgcccccaggagcctagacgtgtggatcggcttctcgactgtgcagggggtggaggtgggcccagcgccgcatggcgaggccttcagcctggagagctgccagaactggc

SEQ ID NO: 144960 - DNA, 401 bp, Homo sapiens
gtggggccgttcctgtcagctctgcagatgcagaggtggacatgagctgggggcagcctccggacactcctgggcacgccatacgggaggtggcctgcacggggatccctgccggtacccacaggccccgtgggtgggtgctgctgtgagcctgggctggtgggccctgstctccgggctctgagcctcagtttccccatctggaaagggggacagtgatggggctcccagcgggctgctgtgagggtgggaggatggaggagtgccctgagccccctgccatcccacacccgcccccaggagcctagacgtgtggatcggcttctcgactgtgcagggggtggaggtgggcccagcgccgcatggcgaggccttcagcctggagagctgccagaactggc

SEQ ID NO: 144961 - DNA, 401 bp, Homo sapiens
gtggggccgttcctgtcagctctgcagatgcagaggtggacatgagctgggggcagcctccggacactcctgggcacgccatacgggaggtggcctgcacggggatccctgccggtacccacaggccccgtgggtgggtgctgctgtgagcctgggctggtgggccctggtctccgggctctgagcctcagtttccccatctggaaagggggacagtgatggggctcccagcgggctgctgtgagggtgggaggatggaggagtgccctgagccccctgccatcccacacccgcccccaggagcctagacrtgtggatcggcttctcgactgtgcagggggtggaggtgggcccagcgccgcatggcgaggccttcagcctggagagctgccagaactggc

SEQ ID NO: 144962 - DNA, 554 bp, Homo sapiens
atgtgcttgtccccccatggggcctgtgtctattgcttccagccatggtaccatctcctctgtttgtttgctgtgcattgcctgtaagccctggaaccctctatgggggagtctgcagcctaggatgaggctttcctcccgagagggcctgcatgtgctctggcccagggcctctgctgtccaggcacccctggtgtgagctcaggagaggactccgcggccacttctcagccccaggccctgcttaccatttcccctgctctgcttggcacacttgaattcccatgmaggccccgggcagaggtgcaggagggctgcctctggtccttctgcgggggagctggtggggctcagctcaacatgggaaagctgggcgggcccagggccttccatcccttcactcagcaaggcctctaaccccacacctgagctgcctggacacagaatggcctctgcacagaggtggctgtcagtgctgaatgcgcctctctgggctcacggatgttggcacccatctctctcccctcccatcacctgctagttctggcgaagct

SEQ ID NO: 144963 - DNA, 602 bp, Homo sapiens
ttacagttttcttgaggtatagtggatataaaaaataactacatatatctaatgtatatcatttgatgagtttggacatacatatacacccttgatattctcaccactttgaagaatatagatatattcactatgtacaaacatttgtgtgtgtgtgcatgtgtgtattccttcactttgtgtgtttctgtgcatgtgtgataacaacacttaacataagatctacccttttaagatatttttaagcacaatgccatattgttatatataggaatacagcaaatagctagaatttatttattttgtgtaactgcagttttctacacattgaacaacagcttcccatttctcacctcccctatatcccggaaatccccattctattttctgcatttaagagtttaatgtaagcagaatcatgtagcatttgtcctyctatgactgacttattttatttagcataatgtcttccagatcaatctatattgttgcaaacatagagtaccccctttttaggccaaatataatatgtcattgtatatatatgccacattttctttattcattaatccactgctagacatttgggttgcttttatgtc

SEQ ID NO: 144964 - DNA, 602 bp, Homo sapiens
ttacagttttcttgaggtatagtggatataaaaaataactacatatatctaatgtatatcatttgatgagtttggacatacatatacacccttgatattctcaccactttgaagaatatagatatattcactatgtacaaacatttgtgtgtgtgtgcatgtgtgtattccttcactttgtgtgtttctgtgcatgtgtgataacaacacttaacataagatctacccttttaagatatttttaagcacaatgccatattgttatatataggaatacagcaaatagctagaatttatttattttgtgtaactgcagttttctacacattgaacaacagcttcccatttctcacctcccctatatcccggaaatccccattctattttctgcatttaagagtttaatgtaagcagaatcatgtagcatttgtccttctatgactgacttattttatttagcataatgtcttccagatcaatctatattgttgcaaacatagagtaccccctttttaggccaaatataatatgtcattgtatatatrtgccacattttctttattcattaatccactgctagacatttgggttgcttttatgtc

SEQ ID NO: 144965 - DNA, 435 bp, Homo sapiens
actccatttacattaccatacttttgactcatatcactagccacatgtgctagtttttcaagtacttttgaaaaactcagagacaaattagcttctttataagccagagggccaaattacatgaggaaactgttatggactccatacgtaaaggggtgttctcttagtaaaaatatgtaagcagcttccttggaagctacagctatkttctttgttaataacgtagaagtatgaattgttgtcacaaaaaatctgcataaaaaaacaaacacattgactcaatggcatataagaataatttattactgagttatagacctgaagatcaactagtgtggctctgttccatgtatgtcattatgaggattagattggaggagcagcagctactcatgacatattttaaggcagtggaaaaggctcaagagagtaagc

SEQ ID NO: 144966 - DNA, 435 bp, Homo sapiens
actccatttacattaccatacttttgactcatatcactagccacatgtgctagtttttcaagtacttttgaaaaactcagagacaaattagcttctttataagccagagggccaaattacatgaggaaactgttatggactccatacgtaaaggggtgttctcttagtaaaaatatgtaagcagcttccttggaagctacagctatgttytttgttaataacgtagaagtatgaattgttgtcacaaaaaatctgcataaaaaaacaaacacattgactcaatggcatataagaataatttattactgagttatagacctgaagatcaactagtgtggctctgttccatgtatgtcattatgaggattagattggaggagcagcagctactcatgacatattttaaggcagtggaaaaggctcaagagagtaagc

SEQ ID NO: 144967 - DNA, 435 bp, Homo sapiens
actccatttacattaccatacttttgactcatatcactagccacatgtgctagtttttcaagtacttttgaaaaactcagagacaaattagcttctttataagccagagggccaaattacatgaggaaactgttatggactccatacgtaaaggggtgttctcttagtaaaaatatgtaagcagcttccttggaagctacagctatgttctttgttaataacgtagaagtatgaattgttgtcacaaaaaatctgcataaaaaaacaaacacattgactcaatggcatataagaataatttattactgarttatagacctgaagatcaactagtgtggctctgttccatgtatgtcattatgaggattagattggaggagcagcagctactcatgacatattttaaggcagtggaaaaggctcaagagagtaagc

SEQ ID NO: 144968 - DNA, 507 bp, Homo sapiens
ttttcagcaacctaaggaaaatctgatatctctgagtcggcttcctcaactacagactgaacacaatggcacaagtattgcccccagtataaggttgttttaaagatatacagaggtcaatgctttaaaatattcaatctcttataacataaaaagagatgttaaaattgaaatatttgatggcattttggtctctccaaaatctgtgagtcatgagataatatctctcatgacattgtaaaaaaaaaaaaaaaaaaaaaaaaaaaaaaaaaaaaaaaaaccttaaaaaaaaaaaaagatgcaaatgttaataccaagcacatgaagccaacagtgatcttgttcataaattatattactaatttctgggtgcatacatacacactcacagaaatatatattctaaragaatgtatatctgtctatatatcaacatttacggtttttgtttcttattttataggactattttaagaatcaaaattacatttatgtaggctttagcaa

SEQ ID NO: 144969 - DNA, 482 bp, Homo sapiens
cagggatcttgttaacatgtagattgcgttactatacatctgaggtatgagctgagattccrcatttttagcaggttcctggctgatgcacatgctgctggtcctggacacattttgagcagcaagtgtgcatgggcagagtgcacattggctcagacttgcctttgaatcttagcttcattgtttccattattctcggggaaccttaggaaaattagcttccagggcagtggctccaatcctgggctgcacctgggatacttttaaagatctgataccctagttgcaccccagattaattaaatcagaatatctagaagtaggatcaaattattagtagttttaatcgctatctaggagatttcaatgtgtatccaagattctgagaacctttgtctcagcacagctgttctcaaactttagcatccattagaattgcctaaaagacttgttaaagcacaaattgctaggtcacagcacca

SEQ ID NO: 144970 - DNA, 597 bp, Homo sapiens
tttagggaatgaagtattagtatgtcagaaatattgtcagtaatggtgcaatgaggtaatttcaaattgcttttaagtggtttgtgggggcacaattagattcagttatctatttatactgctcacataatttcttcttctaaatataaacacaagtacatacatatgtatcggtgcacatatttctttacatgcccacctgcctcatagcataaattcataatagagagtctctaagaatgtcctaaaaaataataaacctcattttaaccacatgatcagtagagtagcaatgctttaaagtgaaatcagaaaatactctttgtggggattagtgctaaattatgctttataatgtctccttggactaaacaatgattatttctagttctttacatttcacactctgttgcagaaatgataaaatattcttcccagayagagattgtgttcgatgtcgccttatctcccaccagcagaggcctgattaagtggctgattagtatgcaggtcatgctgtcactagtaaaattttattatgactctgaagtgaaattttgatggcacaattcatgactgtgaatattttgtgaattc

SEQ ID NO: 144971 - DNA, 595 bp, Homo sapiens
cattgcatttttttttcctactggtattctggcatttttataattcacctgagttaccagggtggctgttcatcagcaattctcctgaaagcagtctttagattcatgatatctaaggatgctaaagtgaaaatatttcatactgtagaaaacttggaattaatttagatagtagatggtgtattgattgattccctcagtcttgcaataactctcaatttctgtaaggagcatgtttgtttgtgtgtgtgtttgtggtgtgtttgtgtgtgtaaagagcacttaataagrgatccactatcttataagatttataagtgcacaatatagtattattaacaataggtgcaacttctacagcacatctttagaacttatttattttgcataactaaaactttatgcctgttgattagcaatgccccattttctttttccccagtccctggcaaccacaatcctctctgattctttggatttgactattttggatacctcataaaagcagaatcatgcagtatttgtcctttcgtgactggattatatctcttagtagaatgtccttaacattcattcatgttgttgcgtattgcag

SEQ ID NO: 144972 - DNA, 642 bp, Homo sapiens
ctggacattttttagcttttttaagagtcagagtacacatgatatctgaagcaaaacacatgtctgtttagttattttacagttaaacttggaatatcattggttgaatcagccatcattattccccaggaaaatggcttttggtcttctttccataatacaatacattgaaacactttgcaataaacacatcctcatgttcaggattttgttgagagcamtgttaacttacctgtctctcagttcttaaattctctctgaatttcttcaattatcctggggattggggatgggagtgatttgtaaatgcctagtgtacaggtaaaagtcagtgtcttagtttttatttgtagtgaagtcattactaaatgggcagttattatttcatttcataatatattttttcaaatgatttctcaataaacaattgagaaattaagtcattttaactattattccaaatattttaattatgcttatctttggtgggcaggatttaacaagaagttctttttacaatgacttttgaatctagtataaatgatatgcataccttctctaatgaaaaagaaatagctaaaatgagaaggaaaaatccattaatatatctatctatacctatctagctatctaactagtaac

SEQ ID NO: 144973 - DNA, 588 bp, Homo sapiens
tacacatatctatatctctattcatctacctatcaagagtgaaaaagagagagaggtggkgggggggggtttagggaattcataaagagatattgtgttgatgaaaatcaaatatgtaccaaaactctttatagaagaatctcttggaattaaagtttaacttccaacgcctatgcctgctttagtgcaaaataaggagtaacaccctgggaaagaataacttgttagtttttttcccagatctatctttcgcgatagacactgtggttcttgaagcctacccactcaccagtgcatctattagtttattcatccatttgtttaaaacatttaatgtgcattgaaacataaatggaaggatggctgagaatctcatttagttagtaatcgctttattactatgcccttcatccatgcattctccaataaaatcactcatccacccatattcttccccttagttctcttatcaatcagttattgatccatctatctatccatccattcatccatccatccatccatccgtccatccttccactcttggagttattcacctaaatctcttttcagtaattgacccactat

SEQ ID NO: 144974 - DNA, 546 bp, Homo sapiens
tctgaagcttgacacagcaggatttcaattaaaaaaaattaaaacaatgaagggctcaaataggagattagcctaatttacttccattttagctatgtcattgatggcggcatgtataggatattatatttcgtgtcagttagtaaatattttttaaaaactctgtgaactcatagttcttgtaatgattgtgaaattaaacctttttcatctaagactctcattcctcagtagctcagtggctcagtggcttttcactttgtcacatttgaaatttgataggattttgtctctcacattggaaaagggagggtaaccccagctacacyattattatgttttaaagtcctggcttttaactagaaaagtaagctcattctagagggacaaaaaaaacgaacagccactgtaatgcttatatctctgttctcatgcatcttggccttaaatttatactttgttaaataaaaataaagtagcttgctctggagagcacagagtgtgtctcaaccaaaattctctcacctggagaatactgattgtatg

SEQ ID NO: 144975 - DNA, 630 bp, Homo sapiens
attttattattattttttgtcctctcctaatcttatgttgaaatgtgacctccaatgttggaagtgaggcctagtgagaggtgtttgggtcatggcggcagatcccttatgaatgatttggtgccctcccctcagtaatgagttaattctcattctattagttcatgcaagagctggttgtttaagggagcctggcacctccctctctctttcttgctccctgtcttgccatgtgacatgccttgctccctcttcaccttctgccatgagtaaaacttcctcaccaaaagccgggcagatgctggtgtcatgcttgtagagcttgcagaaccatgagccaaataaacctcttttctttgtaaattacccagtctcaggtattcctttatagcaacacaaaatggatagtrtataagtccacttgtacataattcttcattaagtacgcaatttttaagagcactaacactgtcttctagtcattcatgatattgaaaaaatatatgtcccattatttgcttttgatcttcacaaattaaggatatcactaatatcattacttttgttatttttgtttgtatttaatgaaacaaaatgtgatatttgtgataggacattttcacttagaag

SEQ ID NO: 144976 - DNA, 547 bp, Homo sapiens
agacacaaattataatgatagaaaagacttactatgtgtcaggggacagtagagctggtaaaaatatttggtaattgagatagctgggaatgaaccttgctagtccttagtttttcctttaccaaatggggtcaaggaaagaagtggccccatacagttcttatacaattaactttgctctctgtatgactttagtcaattcatttgagtttaaatctgacttgctatcaaagtggcattcttaataaccaggttttaccaactttacaaagtcatacttttaaagtctttcccttatggcataactgtacaagattgttattgatcagatattgataaactgattattgatgtgccacaggtcgtgttttttctcactatacgtaactttccttagttatcctgtaatagttagaagaaaggaacccaccctgacccatcaagtttcattttctatccacaagttatactaaattgcaataatcaaatactagartcatcataatgaaatctattctgagatcacatcattttctataacattgga

SEQ ID NO: 144977 - DNA, 624 bp, Homo sapiens
cagaaggagaagacacatgggccacactggagcccagctgttcaaagcagccattggttgattcaagggatcaatggtcctctggcttgamggaaaggcaggagttgggaaggaatttggaagatggcagaggcttgggtatattgtagtcttggagaacaggcctcagaggatacgatggtggggcacagtcggggatttacacattgaaaggtgatccgagtgttcttgaggctgttgtgttttgctcatcattgtctagcaccagagagctatggtactgattggactgagcagagatatttttttttcttctaagaacactgaaggaaaaaaagatggagagtaaatgtggatacattttgaaggagaaggaagataaattgaaacaggttatgcctggcaaccttcacttccccagtgaatagcagagggaaatatatgtgctgagaataaggagagcagctgggcgaggtggtttatgcctgtaatccaagcacttggggaggcagagacaggaaaatcacttgaaccaggagtttgagaccagccagggcattgtagcaagaccctctctctccaaacaatttagaaaattagccaggcaatgtggtgcacacctgt

SEQ ID NO: 144978 - DNA, 400 bp, Homo sapiens
tgctggttatcctctatggcactgatatcagaaaatggtggattcctcatgaagagattgtcttaktccattgtgctgctataacgaaatgcctgagacagggtaatttataaagaacaggaacaggccaggcgtggtggttcatgcctgtaatcccagcacttagggaggccgaggtgggcggattacttgaggtcaggagttcaagaccagcctgggccaacatggtgaaaccccgtctctactaaaaatagagaaagacattagctgggtttggtggcacatgcctgtagtcccagctacttgggaggctgaggcaggagaatcacttgaacccacgaagtggaggttgcagtgagatgagatggcaccactgtacaccagcctgagtgacaaagca

SEQ ID NO: 144979 - DNA, 400 bp, Homo sapiens
tgctggttatcctctatggcactgatatcagaaaatggtggattcctcatgaagagattgtcttagtccattgtgctgctataacgaaatgcctgagacagggtaatttataaagaacaggaacaggccaggcgtggtggttcatgcctgtaatcccagcacttakggaggccgaggtgggcggattacttgaggtcaggagttcaagaccagcctgggccaacatggtgaaaccccgtctctactaaaaatagagaaagacattagctgggtttggtggcacatgcctgtagtcccagctacttgggaggctgaggcaggagaatcacttgaacccacgaagtggaggttgcagtgagatgagatggcaccactgtacaccagcctgagtgacaaagca

SEQ ID NO: 144980 - DNA, 564 bp, Homo sapiens
aatggaataggtacatcttaaggtttcttgyatctttagaatcatgcagtactgggtactatttcctacaactttgttagtaagtcttaatcatgaattatttacataatcttcataactgcctgtgaagttcaacaatacaaaattaataatcatagaaagctaaaactcattctttcgatttttttcggagtgtttatgtttgtttattcgttttgcatttgtttcttctttctttgagctctattaaaatttcctatctaaattcttcaaccattttggtactaacttcattcaaaataataaaggctcaagactggccactagcattacttccagtgctaagaaacaacccgcatttgtgtttacagtagagagttataaattacattaaaatatcattcagttagagtcattctccaggattgtaagagatggatggtctccaggggagggttgtcataaaaaggaaaatcaaaccagctgaataataccataagtctctatataaagctagctcagccaagcagggatatgaaaggtggcagcctttgaggagatggc

SEQ ID NO: 144981 - DNA, 581 bp, Homo sapiens
atggtgacacacgactgtaatctcagttacttgggaagttgaaggaggacaatcgcttgaacccaagaggcagaggttgcagtgagccaagatggcgttgctgcactccagcctgggcaacagagtgagtgagactctgtcttaaaaaaaaatggcmactcctcattcattcaagttttatcatgaaattgtagcaatgcagtcacatctccaggttcctgttttaattctagttatcttgctatttctactacacgtgcaattatatccttcactgaagtcttgaacttctcaaagttatctatgagggttctaaatcaactttttcaaccttctgttattgttggtattttgacctcctcctatgaatcacaaatgctcttaataacatctaaaatagtcttttccagaaagttcttttatttattttgcccagattcatcaaaagaaacattatctatggcagccatagccttataaaatgcatttccagtacctggaagttgaaaatacttctcgttccataggctgcagaatggatgttgtgttaataggcatgaaaacatcattgctatccttat

SEQ ID NO: 144982 - DNA, 580 bp, Homo sapiens
atcagtgggttagtgtcttataaaagagatctcagaaggcttggtgtggtgactcgtgattcgagttgcagcactttgagaggatgaagcaggaagatggcataaagccgggagtttgataccagcctgggcaattatgcaaaactcccatctctacaaaaaaaaataataataataagattagctgaaaatggtggtgtgcacttgtagtcccagctaattagaaggcttacgtatgaggatcaaaggagcccaggagtttgaggctgcagtgagctatcatcacacctctgcactccagcctggatgacagagggagaccacatcactgaaagataataatagggttttttttgttgttttgytttgtttttgcaaccccagagtgtgtgctctctctctctctctctcttctgcttttctgatagcaaaacagtgactacacttaccaataatttatcgcattaaaaacaacgggaaaaaccgcagtacttttccaccaacctaatacattttaaaataaataaaagagtgtaattggattgtttgtaacatgaagaattaacgcttgaggtgatgg

SEQ ID NO: 144983 - DNA, 583 bp, Homo sapiens
actgttttcccaagtggctgtgcctctttataattctacaatcaaagyatgagggttttaatttttcagcattcttggtattccttgtaattgtctttttgttttaaccaccctgtgggtgtaaagtagtatctcattttggttttgatatgcattttcctaatggctaatgacattcactatcttttcatatacttattggctattagcatatcttcactggatatttttattttaaaagcagttttgaatttagctacttgtaacaaatcttggtcaacatacatctttacatattgaatttcatcaccataagttttttcttaagacataacttactaatgaatattcttcatctttcactagtgcttgtggggagctgacatttagtaataataagaaaaataaaatagaatttaaagacagagttttctactttgacaataatgagaatatttattatttatactttatcaagtttagctgagatagtagcattgtataatgatgggaagaaaaactaaaataatttttggcccttaatatttttctccctttaattcaactctagtaaatgttttta

SEQ ID NO: 144984 - DNA, 625 bp, Homo sapiens
attatttcattatatgtcacaatgtaataataatggaaataaagtgcaaaataaatgtaatgcacttgaatcatccagaaaccatcctccccagccccagtccatggaaaaattgtcttccatgaaaccaatgcctggtgacagaagggttggggaccattgctatacatctattaaatacactctgggtttaaaatgttttatcactgctcaaagtgcatyccacattcaagctatgctcaattaattggaaattctcaagtgtgctgtatacagttctctttaatttctgcatccttgcatcatattcctatcactgattagaatgttctttcccatgtccatctcctttttattgctggctaacttttccttattgtttaaacctctattcaattgtcacttcctccagaacaactcttcaaatttccaggatgatacggtgttttgggtcatcagagtcccttgatcttaattgtagccttattgtctaactttcgtattagaatttacatccttgaggttagggataaggtatgtgtgtgtggtgggtggggggccatgagagagagagaggaggtagaagagagacaaactgtagttcatgggaagatttgtcaaaggt

SEQ ID NO: 144985 - DNA, 625 bp, Homo sapiens
attatttcattatatgtcacaatgtaataataatggaaataaagtgcaaaataaatgtaatgcacttgaatcatccagaaaccatcctccccagccccagtccatggaaaaattgtcttccatgaaaccaatgcctggtgacagaagggttggggaccattgctatacatctattaaatacactctgggtttaaaatgttttatcactgctcaaagtgcattccacattcaagctatgctcaattaattggaaattctcaagtgtgctgtatacagttctctttaatttctgcatccttgcatcatattcctatcactgattagaatgttctttcccatgtccatctcctttttattgctggctaacttttccttattgtttaaacctctattcaattgtcacttcctccagaacaactcttcaaatttccaggatgatacggtgttttgggtcatcagagtcccttgatcttaawtgtagccttattgtctaactttcgtattagaatttacatccttgaggttagggataaggtatgtgtgtgtggtgggtggggggccatgagagagagagaggaggtagaagagagacaaactgtagttcatgggaagatttgtcaaaggt

SEQ ID NO: 144986 - DNA, 402 bp, Homo sapiens
aaatcaaccatgacagttggagattataataatctttgtcttttagtaattggtggagaggtaagagaaacaccaataaagatacagaaaatttgaacaacagtattttaaacttacgtgatrtttatagatatcatacccaacagctgctgaatacacagttttatcatgtggaaataacaaaagctgaaatacacttcgtgctgattcttcaaacaagttccaaatatttcaaataattaaaaccacagaatatattctctgaccatcacagtattaaagtacagatataaaagtagtaaagtacagatataaaagtacaaaaatttagaaagtcctcaaatacttgaatattaagcaatacacttaagtaatctatgtattaataaagaaataaaagta

SEQ ID NO: 144987 - DNA, 402 bp, Homo sapiens
aaatcaaccatgacagttggagattataataatctttgtcttttagtaattggtggagaggtaagagaaacaccaataaagatacagaaaatttgaacaacagtattttaaacttacgtgatgtttatagatatcatacccaacagctgctgaatacacagttttatcatgtggaaataacaaaagctgaaatacacttcgtgctgattcttcaaacaagttccaaatatttcaaataattaaaaccacagaatatattctctgaccatcacagtattaaagtacagatataaaagtagtaaagtacagatataaaagtayaaaaatttagaaagtcctcaaatacttgaatattaagcaatacacttaagtaatctatgtattaataaagaaataaaagta

SEQ ID NO: 144988 - DNA, 408 bp, Homo sapiens
aaattaggcttactctgataatggaagcatatagtcaattctgttaacatgtacagcaaaacagtatatcttcatgacggtgtttaacccattatacataataatgcagagtccaaaaattgagttcagaaattgctacaaaccaacttggttgtttcagaccaaaaacttaaattatctctatttattcatgccattacctttcaagtaggcagttktatttccttgaggatggagagcttaagaatagaagtgatgcccattgaatattgatgtgataaaaaaaatacagtccttcctcttatgtgatcttcctacctttcctaatcatactcaactgtgctgttcatgcctcacaagtcagttgaagcacttacttacagtggtttcatatcagcattgataata

SEQ ID NO: 144989 - DNA, 414 bp, Homo sapiens
aagcttcaaaaacactgacgcctgtgccttgcctcagaacaayggcacagcatccctgcgtgtggggcccggcactggtccttgaaaaagtcttcccagatgatgctaatagctgccagggtggcacattattggcctagattaaaattcaggtctagccaaggttgttatctttcagttgtagatttatgaggatggatggtgctggtccacagtattctggccggagttgcccaagcattgcattttcctcttggtgacagcacacattaaatgcctactcgatcacattgcatacctgtttcattttaccttctcatgaaataaagagtagcaggtgctcattttacaaacaaggctctgagatgggtgcacatttctcaagatccactgtttagtaagtggtgggaccag

SEQ ID NO: 144990 - DNA, 422 bp, Homo sapiens
ccctcatgttctcctccctgctccaatattacctctccctccaggctcttctcccaagctgctggagggattgcatgaacatggaaatagatcctgctgcttctgtgctcaaactcttccaatggttcccaactcagggtaaaactcaaactcttacagtggtctggctggccgtacgcagccctgtctcctgtggtctcyctgactctgtctcttactgtctccttcttgttcactctgctctggactccctggccacctggctgttcctcatacccctggcctgtttccttttcagcagctttgctgcccgccatgttctttcccagatatctgcatggcccactgcctcaccttctcagcaaaatcttttccggccatgctaactaaatccttcacacccctcaaatgtgtttttttca

SEQ ID NO: 144991 - DNA, 531 bp, Homo sapiens
taggtctggtttctgggaaccaattttcagtagtctttaacttttgcattatatcatcatacttctctgccactctattacatggtgtaacctcagaagtcgattataaggggattgttcctgcagctccaagctctttgttcttccatccactttgcatggatggatctggcatgcatgatagatctggcatggtttagtgagtgaaggtatgagaaaatccatcacctgatgacatcattaacatttctccaacatgacctgtctgagataaaagcacagcctggccttcttgtcattaatcaagggaaaagaccaaaaccattttggccacacagctccttagccccttctggtaatccatcttgctgcatcgacwctctctttccagtcagcatttaaattcagagggaatgaagattagcccagagcagtctcttcattagagaagagggtttatgaagagtgtttgcagcctttaaaactgttccctgtgtcggttgagcacacacaactttcacttattagtag

SEQ ID NO: 144992 - DNA, 298 bp, Homo sapiens
ctgctttagtgccacagctctcaagtgtttcaaacgttgcagagcctctcagttttgacttctgaaaattgcagtgaagttcctcttcttaacacagccacatgatgtttttcacatttttagatcactcttgtggacttctcagagactcttaaaatgtagaaagccccactttgcattcttgagcaatggccctckttaattttatcagatagtttcaccattaatatttacatctccactaaaaagaaaaagccgcaactctcccaaaacacatgcttggcctagattcacccag

SEQ ID NO: 144993 - DNA, 298 bp, Homo sapiens
ctgctttagtgccacagctctcaagtgtttcaaacgttgcagagcctctcagttttgacttctgaaaattgcagtgaagttcctcttcttaacacagccacatgatgtttttcacatttttagatcactcttgtggacttctcagagactcttaaaatgtagaaagccccactttgcattcttgagcaatggccctcgttaattttatcagatagtttcaccattaatatttacatctccactaaaaagaaaaagccgcaaytctcccaaaacacatgcttggcctagattcacccag

SEQ ID NO: 144994 - DNA, 413 bp, Homo sapiens
ggggccgcaccggtgcccagccagggctccagaacgcttcaggagcccgtacctcacyccaggatctgagcagctcaataaaacccaggtagatcctgtgaaacgccacccagacacccatgactccggaatgcgaatcccagcccctctctccggttccacctcacgaacctggctgccccgcccgcctgtcccgcaggcatctaaaacctccactcgctcctcctctgtcgtccggtttgacaaatggcatctccggcctcccagttcctcatgccagaagcaccgtgaccgctccccgacaccttcccctcacgcccggcccgaccgccgcacccgcctgcatcctcctcccgccaccgtctcctgggccgcgcagctcgccttcccctccgctcgctaccgccagggct

SEQ ID NO: 144995 - DNA, 463 bp, Homo sapiens
gcaggcatctaaaacctccactcgctcctcctctgtcgtccggtttgacaaatggcatctccggcctcccagttcctcatgccagaagcaccgtgaccgctccccgacaccttcccctcacscccggcccgaccgccgcacccgcctgcatcctcctcccgccaccgtctcctgggccgcgcagctcgccttcccctccgctcgctaccgccagggctcctcgtgaaacacaaatcttaaaacctgctcagcgctggccgctgttatggtataaaatgcaaaaggctgcgagggccaggtctgcgcttcccaggccacctgcctggcacctccctcgccagctccggggttcccgcctagccttccagggccgacccctgcgccgggctcgcggctggcaacgcccgctgggccccgggtggggttccagggaggccggggcggatcgcggcgcccggaccgc

SEQ ID NO: 144996 - DNA, 564 bp, Homo sapiens
aaatccttggatccaaaggctcacactacaggggagtaggaagtggtgggctgggaagggcagtgggttgggggtgaccaaggaatgtgtaccccttttgtacaccatgttccctataaagactttcctaatccccttgaccttatgtgtttgctccctcctttgcaaacgtagaatgttttatttgtaayttttatgagttaaaataaaaccacttgtcctttcttgccgctgtctttcatctatcagacattttgctctctggcctcccagccaggtggttcttctgagagtatttatagaaactgtatttgtgatggctccacttttaggaagtgggtgcgtatgttgtacttttgctttcggtcacaggatgaaacctcacttcaagtgggaaattaccaatgaagccagtggctgggctttcctgcgccccatttctgtgaacattcttggagttggcagcattttttccctgatatcctgagctgtacacagctatgaaccaaacctggctgctttgcatgtgcctgaaggcctcccagccaggtggttcttctggaa

SEQ ID NO: 144997 - DNA, 611 bp, Homo sapiens
agatgccccatctactcagcccaccaggccacacctggcttgcactctggcacaatcccatggctgctgcaactgcttgctcagctcctggcagaagtggatctgtgagccagcaagtgtaggatctggctggctgttccaagtgctggcacaggagcaggctccatgtgggtcttgcagctggaccaggtgtgtcacactgaggggaacacagtggygcccaagcaggggtgcctgagacccggaagccccagagggggtgttacagcaatctaatagctcttttggtctggccgtccacagcctgacaggtggtggcgtgttaatagctctgtcagtcctgtcgtcctgctccggccagcagctcgggctggctctgccctgcccctgcttcccgtcggggcagctgctctccgccagcagagagtggagggtcatggtgttgcagccttatttgtacccacgttcagtgggtcccaaattcttgtcctgcatccaagaagaatgaggttatgctgacaattgaagggtgaggagggtggagaagaattttactgagtgacttaacagctgtcaatggagaggggatgcgagggtggtcctccacccaa

SEQ ID NO: 144998 - DNA, 611 bp, Homo sapiens
agatgccccatctactcagcccaccaggccacacctggcttgcactctggcacaatcccatggctgctgcaactgcttgctcagctcctggcagaagtggatctgtgagccagcaagtgtaggatctggctggctgttccaagtgctggcacaggagcaggctccatgtgggtcttgcagctggaccaggtgtgtcacactgaggggaacacagtggtgcccaagcaggggtgcctgagacccggaagccccagagggggtgttacagcaatctaatagctcttttggtctggccgtccacagcctgacaggtggtggcgtgttaatagctctgtcagtcctgtcgtcctgctccggccagcagctcgggctggctctgccctgcccctgcttcccgtcggggcagctgctctcygccagcagagagtggagggtcatggtgttgcagccttatttgtacccacgttcagtgggtcccaaattcttgtcctgcatccaagaagaatgaggttatgctgacaattgaagggtgaggagggtggagaagaattttactgagtgacttaacagctgtcaatggagaggggatgcgagggtggtcctccacccaa

SEQ ID NO: 144999 - DNA, 545 bp, Homo sapiens
tcttgtgcagggtggttatgtgcatgtgtatgtgtgcgtatgtataataggcacagctgtgtggaagataacaggactcttgaagtgaatgagggcgggagtgtgtacctgttgttgcatggggaggacggcccctgaccaggagatgttttcggatgcagcccctgcccctaccaacagttctcagggccctctagtattctgtgagcttattgcgaggtgttacggaggtggcctcggctgsttgtagcatctctaggcagcggctgccatctcgtggtagaagtctcaggatgcttcctgcagaatgatggcttcaagggctgagccttttatctggcttctcagcaggccagattctgcttttcaaagagaattaggtgattgcaccagaaagcaatttaaaaattgtataaactgaacaaaggtagatgtattctggagtaaaatgtatgtcatgtttatttgtttatttttatttttattttttttgagatgggattttgcttttgtcccccaggctggagtgcaatggtgagatctca

SEQ ID NO: 145000 - DNA, 582 bp, Homo sapiens
tctcactctgtccttcaggctggagtgcagtggtacaatctcggctcactgcaacaatctcggctcactgcaacctccactcccaggttcaagtgattctcctgcctcagcctcccaagtagctgggattaaaggcatgtgccatcatgcccagctaatttttgtatttttagtagagaaggggtttcaccatgttggccaagctggtctcaatctactgacctcaagtgatcmacccgcctcagcctcccaaagtgctgggattaaaggtgtgagccaccgcgccctgcccaagcacttttcaaatatcttcaagcatcacatttgctgttgtcccattgaccaaagcaagccacgtggctaagcctggttgggtggagaaatagaccatatttctttatgggaggggataaaatgtagtgcagcaatttttgcagtctatcttggcgacccctagaactctgctatcttgggactatgaggggtactagcctgaggatggcagaagatgggaaggattctctatgatgacattgaaccactgaatttactaaccctgaagaggtgctaccttggaagttt

SEQ ID NO: 145001 - DNA, 583 bp, Homo sapiens
actattaagtctcagtcatagagaaggattaagctttgatgtaggtgaggaaagtttaaagcagtttatttatttaatcagctttttcaggttgaaagagtttaaagggtagtccttgtcatccttcaggatctgctccagttacatctctgcaagttctttatttcttcacaggtctcacaaaagtaaaataaaggtgtcagctggrcaggactcatctgaaagctctgggggcagactctgtctccaaacgcattcatatcattcatgggcagaattcattcctttagctcatgggtctgaagtctccattttcttgctggctgctggctgtttgctggggctggcactcagctcctagaggctgctctcaggttcttgcctcatggcccccccatctcagcaacagagaacatccctcaaggcaaatctctcatgctctgaatttctctgacttcctctttagcaaccagctggagaaaactgattagcaatcttaattacattgtaaaattacagtgcaaaattcttctgccatttaataggcatgaaagtaataccagggggtggggatcatggggcc

SEQ ID NO: 145002 - DNA, 530 bp, Homo sapiens
tttacattataaaatatgatagaacttattttaaatgcaaattaasaaaagaaagacaggtaataaaaaaaattgctgagattcctctgaatgtcttatagctgatttttatgaagaactgaaagaaaatataagggtgactatagttaacattaatctactatacatttgaaagaaaactaaggtgatgggtaccccaattaccctgatttgattatatgaatgtatcaaattatcacatttacttcaaaaatatgcacatctattatgtatcagtttttaaaaaggaaatttatatcctcacatctttgaatttagcaaagttatatcatatatttgatctagtaaaaccttgtttataaataatgcacagtgaaatctgttttaggccttatcagatttactatgaattcttaatttttgactcttgcttcttgtttaagttttctaacttagtgtttggcatatccatgacttaactaatttatcttactctttcatataatcttgagagccattttagatgtttc

SEQ ID NO: 145003 - DNA, 429 bp, Homo sapiens
tccagtttttgcctattgtcagtaaagctgctataaacgttcgggtacaggtttttgtgtgaacacagttttcattttttaaggagtaagtgacaatggatgcaattgtaggtcatatagtagttgcatgtttaggttttttttttttaaagaaaccgctaaaatgttttcagagtagttgtaccatcctactagcaatgtttgagtggtctagtttctccatgtcctcaaragcatttggtgttttgactattttttgttttagccattctgataagtgtgtagtgatatctcattgtggttttaattgtcatttccccagttgttaatgatgttgagcattttctcatatgcttatttgccacccttatatcctctttagtgaaatatctgtgacttttgccccattttctaattggattgtttgtt

SEQ ID NO: 145004 - DNA, 473 bp, Homo sapiens
cagcctactgaaagtttttaaatggagttataaagtgactagaactttgcattgggaaaattaatctcaaattccatgaggagagaaatctgtttcatcagtgatgcatcccaaacacttagcacagtgtctgtcatatagtaggcactccatacattttttgccaaataaatagaagacacacatgttctagaaaatagccagggaattagaaggattcacaatttatcctrcaaacatgtttttatgaaatctttgcgtagacatagtattaattttacttccatacttctgcattgggtaggtaaaataatcatagtctttcttcattcaaaaacagcacctagaaatatatatatgtatatatatatatatacatatataaaaatatctatcatatataaatatatatataatgcttaggaatgaaacaatggaaacatttatttaagaaatataattatgtttaattt

SEQ ID NO: 145005 - DNA, 601 bp, Homo sapiens
tcctgctgctccagtgtgtaggtcactagtgactaagtccccaaagttccgggttacacatcatcacttcaaacaacttggcctgggagtttttaaggcgaaggttgcaaagattatttatgtggccactggaatatttcagaaaaaggtgccagtggaaaatacaatttcaagtagtataaatatcaaattctctcagataaatttattgcaattattatgccctagaaacctaaaactcatgaaaatatcctgactctagtgttctgcttattcattttaaataattataaattattttgaaaggaccaaagtgaaactttttaaaatacaagacactttggatgaagaaagcagtaaattatagtctcttgctgtctcaaaaagagtattgcttatttggttgttagctgaagtttgtgtctctatctcctgccttctcactgtttttcttaagtrtggtttctttatctgaggtatctgcagtggaggaaagatgacccattagaatataagcttcaggagatagcatttttgtttgtctttttgttttgttattgttattatccccaacaggtagagttgttcctggcatgtggta

SEQ ID NO: 145006 - DNA, 601 bp, Homo sapiens
tcctgctgctccagtgtgtaggtcactagtgactaagtccccaaagttccgggttacacatcatcacttcaaacaacttggcctgggagtttttaaggcgaaggttgcaaagattatttatgtggccactggaatatttcagaaaaaggtgccagtggaaaatacaatttcaagtagtataaatatcaaattctctcagataaatttattgcaattattatgccctagaaacctaaaactcatgaaaatatcctgactctagtgttctgcttattcattttaaataattataaattattttgaaaggaccaaagtgaaactttttaaaatacaagacactttggatgaagaaagcagtaaattatagtctcttgctgtctcaaaaagagtattgcttatttggttgttagctgaagtttgtgtctctatctcctgccttctcactgtttttcttaagtatggtttctttatctgaggtatctgcagtggaggaaagatgacccattagaatataagcttcaggagatagcatttttgtttgtctttttgttttgttattgttattatccccaacaggtagarttgttcctggcatgtggta

SEQ ID NO: 145007 - DNA, 587 bp, Homo sapiens
tgacaaaattgcccttgtttgatgagaggaatgagcagagcattgatgtggtgaacaaggatctagtgagactttcccagcatgtttctaccaaagctttatctaagcttctcagaacactctcctaataagcagatgtttggcctttcagaaagtcaacaagcaaaatgccttgagtgtcccaaaacactgatgccatgatgtgggctcctgactggcctccttttcctttgactggaccgctgccacctcttggtagccatcgctttcatgatgctttgccttsgagatcatattggtgaagccatgttccaactgccgcttacaatttgtcagagggatgcgtcaggatcgtgatccctcctgtttaaaatttccactgatagctctcgtcgtaactgcagctgatctgggcacagtggttttcacagccactgcaggattcatcttccacatcttctcacctcttcttgaaacaagctatacattcgtaaagagttcatttcttcggggtagtgtccttacaagcttttcttaaaacgtcaatgatttcttccatcttccacccaagcttcaccatgaatttg

SEQ ID NO: 145008 - DNA, 579 bp, Homo sapiens
attgatgtggtgaacaaggatctagtgagactttcccagcatgtttctaccaaagctttatctaagcttctcagaacactctcctaataagcagatgtttggcctttcagaaagtcaacaagcaaaatgccttgagtgtcccaaaacactgatgccatgatgtgggctcctgactggcctccttttcctttgactggaccgctgccacctcttggtagccatcgctttcatgatgctttgccttggagatcatattggtgaagccatgttccaactgccscttacaatttgtcagagggatgcgtcaggatcgtgatccctcctgtttaaaatttccactgatagctctcgtcgtaactgcagctgatctgggcacagtggttttcacagccactgcaggattcatcttccacatcttctcacctcttcttgaaacaagctatacattcgtaaagagttcatttcttcggggtagtgtccttacaagcttttcttaaaacgtcaatgatttcttccatcttccacccaagcttcaccatgaatttgatgtttcctcttgctgcaattttcgtggaattc

SEQ ID NO: 145009 - DNA, 565 bp, Homo sapiens
aactgacaaaattgcccttgtttgatgagaggaatgagcagagcattgatgtggtgaacaaggatctagtgagactttcccagcatgtttctaccaaagctttatctaagcttctcagaacactctcctaataagcagatgtttggcctttcagaaagtcaacaagcaaaatgccttgagtgtcccaaaacactgatgccatgatgtgggctcctgactggcctccttttcctttgactggaccgctgccacctcttggtagccatcgctttcatgatgctttgccttggagatcatattggtgaagccatgttccaactgccgcttacaatttgtcagagggatgcgtcaggatcgtgatccctcctgtttaaaatttccactgatagctctcgtcgtaamtgcagctgatctgggcacagtggttttcacagccactgcaggattcatcttccacatcttctcacctcttcttgaaacaagctatacattcgtaaagagttcatttcttcggggtagtgtccttacaagcttttcttaaaacgtcaatgatttcttccatctt

SEQ ID NO: 145010 - DNA, 618 bp, Homo sapiens
acaaaattgcccttgtttgatgagaggaatgagcagagcattgatgtggtgaacaaggatctagtgagactttcccagcatgtttctaccaaagctttatctaagcttctcagaacactctcctaataagcagatgtttggcctttcagaaagtcaacaagcaaaatgccttgagtgtcccaaaacactgatgccatgatgtgggctcctgactggcctccttttcctttgactggaccgctgccacctcttggtagccatcgctttcatgatgctttgccttggagatcatattggtgaagccatgttccaactgccgcttacaatttgtcagagggatgcgtcaggatcgtgatccctcctgtttaaaatttccactgatagctctcgtcgtaactgcagctgatctgggcacagtggttttcrcagccactgcaggattcatcttccacatcttctcacctcttcttgaaacaagctatacattcgtaaagagttcatttcttcggggtagtgtccttacaagcttttcttaaaacgtcaatgatttcttccatcttccacccaagcttcaccatgaatttgatgtttcctcttgctgcaattttcgtggaattc

SEQ ID NO: 145011 - DNA, 587 bp, Homo sapiens
tgacaaaattgcccttgtttgatgagaggaatgagcagagcattgatgtggtgaacaaggatctagtgagactttcccagcatgtttctaccaaagctttatctaagcttctcagaacactctcctaataagcagatgtttggcctttcagaaagtcaacaagcaaaatgccttgagtgtcccaaaacactgatgccatgatgtgggctcctgactggcctccttttcctttgactggaccgctgccacctcttggtagccatcgctttcatgatgctttgccttggagatcatattggtgaagccatgttccaactgccgcttacaatttgtcagagggatgcgtcaggatcgtgatccctcctgtttaaaatttccactgatagctctcgtcgtaactgcagctgatctgggcacagtggttttcacagccactgmaggattcatcttccacatcttctcacctcttcttgaaacaagctatacattcgtaaagagttcatttcttcggggtagtgtccttacaagcttttcttaaaacgtcaatgatttcttccatcttccacccaagcttcaccatgaatttg

SEQ ID NO: 145012 - DNA, 565 bp, Homo sapiens
aactgacaaaattgcccttgtttgatgagaggaatgagcagagcattgatgtggtgaacaaggatctagtgagactttcccagcatgtttctaccaaagctttatctaagcttctcagaacactctcctaataagcagatgtttggcctttcagaaagtcaacaagcaaaatgccttgagtgtcccaaaacactgatgccatgatgtgggctcctgactggcctccttttcctttgactggaccgctgccacctcttggtagccatcgctttcatgatgctttgccttggagatcatattggtgaagccatgttccaactgccgcttacaatttgtcagagggatgcgtcaggatcgtgatccctcctgtttaaaatttccactgatagctctcgtcgtaactgcagctgatctgggcacagtggttttcacagccactgcaggattcatcttccacatcttctcwcctcttcttgaaacaagctatacattcgtaaagagttcatttcttcggggtagtgtccttacaagcttttcttaaaacgtcaatgatttcttccatctt

SEQ ID NO: 145013 - DNA, 618 bp, Homo sapiens
acaaaattgcccttgtttgatgagaggaatgagcagagcattgatgtggtgaacaaggatctagtgagactttcccagcatgtttctaccaaagctttatctaagcttctcagaacactctcctaataagcagatgtttggcctttcagaaagtcaacaagcaaaatgccttgagtgtcccaaaacactgatgccatgatgtgggctcctgactggcctccttttcctttgactggaccgctgccacctcttggtagccatcgctttcatgatgctttgccttggagatcatattggtgaagccatgttccaactgccgcttacaatttgtcagagggatgcgtcaggatcgtgatccctcctgtttaaaatttccactgatagctctcgtcgtaactgcagctgatctgggcacagtggttttcacagccactgcaggattcatcttccacatcttctcacctcttcttgaaacaagctatacattcgtaaagagttcatttcttcggggtagtgtccttacaagcttttcttaaaacgtcaatgatttcttcmatcttccacccaagcttcaccatgaatttgatgtttcctcttgctgcaattttcgtggaattc

SEQ ID NO: 145014 - DNA, 618 bp, Homo sapiens
acaaaattgcccttgtttgatgagaggaatgagcagagcattgatgtggtgaacaaggatctagtgagactttcccagcatgtttctaccaaagctttatctaagcttctcagaacactctcctaataagcagatgtttggcctttcagaaagtcaacaagcaaaatgccttgagtgtcccaaaacactgatgccatgatgtgggctcctgactggcctccttttcctttgactggaccgctgccacctcttggtagccatcgctttcatgatgctttgccttggagatcatattggtgaagccatgttccaactgccgcttacaatttgtcagagggatgcgtcaggatcgtgatccctcctgtttaaaatttccactgatagctctcgtcgtaactgcagctgatctgggcacagtggttttcacagccactgcaggattcatcttccacatcttctcacctcttcttgaaacaagctatacattcgtaaagagttcatttcttcggggtagtgtccttacaagcttttcttaaaacgtcaatgatttcttccatcttccacccaagcttcaccatraatttgatgtttcctcttgctgcaattttcgtggaattc

SEQ ID NO: 145015 - DNA, 563 bp, Homo sapiens
ctacaacctctgcctcccaggttgaagtgattctcctgcctcacctgagattagaggcatgtaccggcatgtccggctaattttgtgtttctagtagagatggggtttcaccatgttggccaggctggtcttgaactccaacaattctaattcaactaatttattttatagaaatatttatgtgtgagaaacaatatttycaagagtcaaagatttaaaactgcttaattgtacatcactaagtggctggctaataaattatagtacgttcatccttacggaagaatactttgcagctaaaacagaacgaaagagaggaaactcttcaaaatgttaactgggaatgacgttcaagacttattgttaaataaaacaaattgagaagaagagtcgtttattggtactaaatttgtgtcagtaaaaatggattctatacgtgggatggtttataagtatgtggaaaaattctttgatggtttttccttgaaaaagtgaaacctaaatccactccgtttggatgtgggactatttacggttgttgcttcctaaacatgaactacgtt

SEQ ID NO: 145016 - DNA, 534 bp, Homo sapiens
caacctctgcctcccaggttgaagtgattctcctgcctcacctgagattagaggcatgtaccggcatgtccggctaattttgtgtttctagtagagatggggtttcaccatgttggccaggctggtcttgaactccaacaattctaattcaactaatttattttatagaaatatttatgtgtgagaaacaatattttcaagagtcaaagatttaaaactgcttaattgtacatcactaagtggctggctaataaattatagtacgttcatccttacggaagaatactttgcagctaaaacagaacgaaagagaggaaactcttcaaaatgttaactgggaatgacgttcaagacttattgttaaataaaacaaattgagaagaagagtcgtttattggtactaaatttgtgtcagtaaaaatggattctatacgtgggatgstttataagtatgtggaaaaattctttgatggtttttccttgaaaaagtgaaacctaaatccactccgtttggatgtgggactatttacggtt

SEQ ID NO: 145017 - DNA, 474 bp, Homo sapiens
gatgtaattccatcatatatactctctgtgcctaccgcatttggaaccatgcgagtgatacctatttataaaataaaataaaccaagcaaaagtacgaacttagcaacactatattgagttaatagaacggtatcttgtatttcttctgtccaggtatacttataaatgcctgcagggatttcaccacctcagggtggagrgactgaatgcttgtgagggaattaggatggtggaatattggtgttaccagggaagggggcgggatgtttgaaaatgctatgtttactcgttcttgggttccaataaaggagaaacagggcacaggagtcggaaggactagtggcaatagtgatgaaaggacctccttatcatgctggcaatgttaattacccaggtgtaggaagccatacactgaggcggaagatcgcaagtcagagtggccggcaggcacaacctcctggcacaccagaggc

SEQ ID NO: 145018 - DNA, 474 bp, Homo sapiens
gatgtaattccatcatatatactctctgtgcctaccgcatttggaaccatgcgagtgatacctatttataaaataaaataaaccaagcaaaagtacgaacttagcaacactatattgagttaatagaacggtatcttgtatttcttctgtccaggtatacttataaatgcctgcagggatttcaccacctcagggtggagggactgaatgcttgtgagggaattaggatggtggaatattggtgttaccagggaagggggcgggatgtttgaaaatgctatgtttactcgttcttgggttccaataaaggagaaacagggcacaggagtcggaaggactagtggcaatagtgatgaaaggacctccttatcatgctggcwatgttaattacccaggtgtaggaagccatacactgaggcggaagatcgcaagtcagagtggccggcaggcacaacctcctggcacaccagaggc

SEQ ID NO: 145019 - DNA, 563 bp, Homo sapiens
caaaattgcccttgtttgatgagaggaatgagcagagcattgatgtggtgaacaaggatctagtgagactttcccagcatgtttctaccaaagctttatctaagcttctcagaacactctcctaataagcagatgtttggcctttcagaaagtcaacaagcaaaatgccttgagtgtcccaaaacactgatgccatgatgtgggctcctgactggcctccttttcctttgactggaccgctgccacctcttggtagccatcgctttcatgatgctttgccttggagatcatattggtgaagccatgttccaactgccgcttacaatttgtcagagggatgcgtcaggatcgtgatccctcctgtttaaaatttccactgatagctctcgtcgtaamtgcagctgatctgggcacagtggttttcacagccactgcaggattcatcttccacatcttctcacctcttcttgaaacaagctatacattcgtaaagagttcatttctttggggtagtgtccttacaagcttttcttaaaacgtcaatgatgtcttcaatcttccac

SEQ ID NO: 145020 - DNA, 305 bp, Homo sapiens
ctgccgcttacaatttgtcagagggatgcgtcaggatcgtgatccctcctgtttaaaatttccactgatagctctcgtcgtaaatgcagctgatctgggcacagtggttttcacagccactgcaggattcatcttccacatcttctcacctcttcttgaaacaagctatacattcgtaaagagttcatttctttggggtagtgtccttacaagcttttcttaaaacgtcaatgatktcttcaatcttccacccaagcttcaccataaatttgatgtttcctcttgctgcaattttcgtggaattc

SEQ ID NO: 145021 - DNA, 540 bp, Homo sapiens
agcgacctgctggccctgaagctcatccacagcaccgtggtggacacggccgtgctcttcccgcactacctgggtttcccctacaagcgctccctcaggaatctcgcggccgactacctggcacagatcatccaggacagccaggacggccacaactccagcgaggacgcaarcgcctgcctgcagctggtgatgtggaaggtccgacagcgcgcccagatccagccacgccaccggtccgcctctcccgccgccctggcctgtccttagccccaggcctcttccaaaaccgccatcagtcccgagagctcaccctgcccacctcgccgcaaagcgaaagaaactggagcagccggcggcaggagagggcaaaaagccaagagtaaccccaaccccccactcccggtcccccggaatccctgccgcggcccctcgggcctgtccacatccctctgcccctcccagacctctgtccttccaccaatcgcctcccgcagccccgagccgccactcccagtcccccgagtccctgccgcgcgc

SEQ ID NO: 145022 - DNA, 424 bp, Homo sapiens
acactcacacactgctgggatgtgtttgttcatacttgtgttacaggtaggtagaactggacatatcccagcggcgattcaggaacctggcccacgtgtaccattccatgtggcaccaattgtgctaatgccatgaggctggcttttgaagtcctctcatatctcaattgggacacaaaacaaccttggtaggttctcacttttaagttgcaaagaagaaactgagccctgagatgttcagggaactggccaggtcctacagtgttgagcagcaraggtctgaaagttaaccactctccaactcaagagtcttaggttccagcctccagccatgcccccgccagctctgtgcctactcaagctgtgacaaagttcaacactaaacaaacacgtgtttagtgtggggaggcaaagtattcccaaa

SEQ ID NO: 145023 - DNA, 614 bp, Homo sapiens
tgagggtttttgtaggtattttcttaytatgattgccagtttaatccttttgtgagcagagaataatacctgtatgatttgatcctttaaaatatattaagaattgttttatatcccatcatttggtctattttaatttatctaccatgcactcttgaaaagaatgtgtgttgtgcagttgttgaatgatgatctgaaaccagttagatcatggtacttgatagtgttgcccagatcttctattttcttattaattttgtctggttctatcaattcgtgagaaatcacaattgttaaaatctcctactctgattgtggaattttctgtgacactctttgttatatttttttctttttataatttgagactatattattaagtgcatgtacattgataatttttatgtctttctcataaattgtccttttgtcacattaaaatatttttttcttctggtattacctttttttctttgtccttattgtatctgatattaaaacagccactccagccttctagtgcttactttttcaaacatacatttttttctatccatttactttcaatacatcaattttacacacacacacaatataaaaacaaatgtgtttct

SEQ ID NO: 145024 - DNA, 614 bp, Homo sapiens
tgagggtttttgtaggtattttcttactatgattgccagtttaatccttttgtgagcagagaataatacctgtatgatttgatcctttaaaatatattaagaattgttttatatcccatcatttggtctattttaatttatctaccatgcactcttgaaaagaatgtgtgttgtgcagttgttgaatgatgatctgaaaccagttagatcatggtacttgatagtgttgcccagatcttctattttcttattaattttgtctggttctatcaattcgtgagaaatcacaattgttaaaatctcctactctgattgtggaattttctgtgacactctttgttatatttttttctttttataatttgagrctatattattaagtgcatgtacattgataatttttatgtctttctcataaattgtccttttgtcacattaaaatatttttttcttctggtattacctttttttctttgtccttattgtatctgatattaaaacagccactccagccttctagtgcttactttttcaaacatacatttttttctatccatttactttcaatacatcaattttacacacacacacaatataaaaacaaatgtgtttct

SEQ ID NO: 145025 - DNA, 605 bp, Homo sapiens
ttggtttctctgcacagagggagttcttccatctttggatctaaaaacaatatcttttcattttatctgcagcaatagtctagctctcagagacaaagtcagtgagaaacaaagaaaggccctsgccactcaattcagctcccagtacaaagaccagagtcacagtggtgtccacagcccgcatcggcataaatacagatggactgaaatacgcattttacctaaaataaaggctttataccatgcaagcaaaaatagaggtggttttttttccccccagaaagtaagaccttcaacaagccagaacaccactgtttattttaaagaatttttaaactctgattcagactatggacgccaggccaattgctgaatcccacgggggcatctgcatgctgaaatctctgcctggaaagtcagtttttaatggtgctgttacaaaactatgtgtcctcaagtagaactacaaaaactccaaagacatattaattccaattccacgacacaggcctaaagatagagtggaggaagtgcttggtcatgtacacacatcaaattcactggcctttctaataccttcagtgagattatactctttaacatct

SEQ ID NO: 145026 - DNA, 428 bp, Homo sapiens
ctaattctatatttttggttaatatctacattcatgggttgctatattaacacacgcatcacttcaacatacaaccgtttgccccatgctgatgcatggaggttgttctttgaagagtttctctgtagtcagttgacaacccagtctccctttctcacggaatttgtaatattcagacactcatacttaggagtttatccaaattcattaactcaataaaaacattcaagaaacatttattgggtacacattatataaagcacactggatgaattaatctcttagatgacttatacctgcttgtttaaccaaataaactcactggagggatgtgtaaaaatggttcaactaattccgcrtgtagaaacagtaatgtaatcaatacctgaagagacctagatgtttaatgtcagtagacataatgatct

SEQ ID NO: 145027 - DNA, 594 bp, Homo sapiens
tgagaatccatccacaaaaaaataaagtataaagttcttcagatagaagaaaaatgagtcttgatggaagcattgaaatgcagagaaaaatagtgctttgtgattaaacaaaaatgattatggactacaataatgtcttggtagattctaaacataggccttatttaaatatatgtcatctatgacacaacaacatctataatgcacataaaatgtgtacattaagttgaagtattctaagttctttgagtggtccaaaagttgttaaaagtactattttttattaagaatgaatgtagctatgtctaagtaatcatgaacaaaataataaaataatatatgagaaatatgctaacagagggaacatggaatattaaaaataatataaaagaaggcaaaaacagaaaacggagagaaaaactgagcagataagtaataagacataaatatacagcaaaacatarcagtaatactaataataaacgttccaaataaaagatgtttgtcaagccttaggaaaaaattctatatgttgtttaccagaaacacacgttaaatataagaaaacataagaaaataaaagaaaactagtgt

SEQ ID NO: 145028 - DNA, 599 bp, Homo sapiens
ggatgtatcaaagccaattcgttacaagaggctgtctgtggcactgttttgagaggcatcctgagtaccgtggtatctacggtatgctcagtgctcagcaggagagtgctgtgatcagttggccatgtctagctgggatgctatgatggaagtgaagacctaagtatcaggtgtttgacagcagcaatgaaggtgaagtgatagtcatgtaaacaacggtgtacaataaaatgcaaatatagaaaagcacaggaggtgctgtgggaacccaatagtggtagggtgggtcagggaaggttctaaaggggagatgatactagatttgagtctctaatggaatcaggtgtgcatcaggttgatgacggtgtgaaagccactcccagggaacacagtaatacacacagacagaaagatgagaaggagcayggagcgttcaaatactcacagcagtttagcatttctagaggagagcgggcaaaccgaagttcccatgtccagtctgtttccagttcctgttgactttaattcctaaatatttctcaaacttatttccttctctacatccaggccaccaccctggactcaaacttcacatttta

SEQ ID NO: 145029 - DNA, 594 bp, Homo sapiens
gattttggctcattgcagctttgacttctccccggctcaagtgatcctcctgcctcagccccccaagcagttgggacwataggcacatgccaccacacccagctaatttttgtattcttcttgtgtgtagagatggggtttgccacattgcccaggctggtcttgaactcctgggcacaagctatctgcctgcctcggcctcccaaagtgctggattactcgtgtcagtcacagtgccctgcccaacaacttttaattatctctcatgcttctctatcaattaggtcctcagctgagtcgttctgctatattgcatcagatgtcagctggttctgcagtcatctggaggctctgctggtagaactcccagcacacttcactcaaatggctggctgcagctggtgctagttatggtctgggatctcagatgaggctgctaagccgaatgtgttgttactcctttacatcgtctctccacatggcttgaacttctcacagcatgcctgctggattcgaagagatggcattcaagtgcttaaaaatgtaagcaaatctcttaatattcagtcttagtattacatagggcttctactg

SEQ ID NO: 145030 - DNA, 594 bp, Homo sapiens
gattttggctcattgcagctttgacttctccccggctcaagtgatcctcctgcctcagccccccaagcagttgggacaataggcacatgccaccacacccagctaatttttgtattcttcttgtgtgtagagatggggtttgccacattgcccaggctggtcttgaactcctgggcacaagctatctgcctgcctcggcctcccaaagtgctggattactcgtgtcagtcacagtgccctgcccaacaacttttaattatctctcatgcttctctatcaattaggwcctcagctgagtcgttctgctatattgcatcagatgtcagctggttctgcagtcatctggaggctctgctggtagaactcccagcacacttcactcaaatggctggctgcagctggtgctagttatggtctgggatctcagatgaggctgctaagccgaatgtgttgttactcctttacatcgtctctccacatggcttgaacttctcacagcatgcctgctggattcgaagagatggcattcaagtgcttaaaaatgtaagcaaatctcttaatattcagtcttagtattacatagggcttctactg

SEQ ID NO: 145031 - DNA, 594 bp, Homo sapiens
gattttggctcattgcagctttgacttctccccggctcaagtgatcctcctgcctcagccccccaagcagttgggacaataggcacatgccaccacacccagctaatttttgtattcttcttgtgtgtagagatggggtttgccacattgcccaggctggtcttgaactcctgggcacaagctatctgcctgcctcggcctcccaaagtgctggattactcgtgtcagtcacagtgccctgcccaacaacttttaattatctctcatgcttctctatcaattaggtcctcagctgagtcgttctgctatattgcatcagatgtcagctggttctgcagtcatctggaggctctgctggtagaacwcccagcacacttcactcaaatggctggctgcagctggtgctagttatggtctgggatctcagatgaggctgctaagccgaatgtgttgttactcctttacatcgtctctccacatggcttgaacttctcacagcatgcctgctggattcgaagagatggcattcaagtgcttaaaaatgtaagcaaatctcttaatattcagtcttagtattacatagggcttctactg

SEQ ID NO: 145032 - DNA, 594 bp, Homo sapiens
gattttggctcattgcagctttgacttctccccggctcaagtgatcctcctgcctcagccccccaagcagttgggacaataggcacatgccaccacacccagctaatttttgtattcttcttgtgtgtagagatggggtttgccacattgcccaggctggtcttgaactcctgggcacaagctatctgcctgcctcggcctcccaaagtgctggattactcgtgtcagtcacagtgccctgcccaacaacttttaattatctctcatgcttctctatcaattaggtcctcagctgagtcgttctgctatattgcatcagatgtcagctggttctgcagtcatctggaggctctgctggtagaactcccagcacacttcactcaaatggctggctgcagctggtgctagttatggtctgggatctcagatgaggctgctaagcygaatgtgttgttactcctttacatcgtctctccacatggcttgaacttctcacagcatgcctgctggattcgaagagatggcattcaagtgcttaaaaatgtaagcaaatctcttaatattcagtcttagtattacatagggcttctactg

SEQ ID NO: 145033 - DNA, 447 bp, Homo sapiens
aggctttgtatgggcatcatttggtttgattaaaattttccttgggatagaagagtcaataaaattgatcacaatgagcacaaatttacatatttttagacaaacaccaatgccaaatcagaattttaaaatattttatcactttaagktttcgttatttttaattttgttttcctaattgttgactcaccaagaagcacccagaaaaatgaccaattattcaaactaacctctctggctttttcaactccctttgaacaatagtttagtgtacatatttacatgtagaatatcatcttatgttcccttaatttgttgagaaaatttccagttgagaacaaaatgttcatttgaaagttaatttgccaaaacaggtagtttgtaagtcctctctagagtcagctatttcataggatttggtacattttaatagctttgccaaaaatt

SEQ ID NO: 145034 - DNA, 481 bp, Homo sapiens
cagtgtgccagtgatgtggcatgaattaaaaacaagaagtcttccaggagaaaagatttctttagagatgtaattaattgacctggcttgggtccctcctttcccggaggaaaaacttctccttttccggagtagttgtcagtgaagtgtttcaaatactgccctggttgtaattattrttcaagttcatgctgcaaaatcatcttcacttaataattctagcattcaccacccaaaaactcataagcaaggcttttgtattgccacacagtttgggattttttttctcagaattaggaagcaaatgtagccagcaattattttagatattgctttcagaaatgaatttttcccatatctgtcagatttggctcagagttctttttcaatttaatcattgttagcagcatgaaaaactgttaagttaaatgttcaggcataagcaagtcattactccatatttgaactctagagagctact

SEQ ID NO: 145035 - DNA, 481 bp, Homo sapiens
cagtgtgccagtgatgtggcatgaattaaaaacaagaagtcttccaggagaaaagatttctttagagatgtaattaattgacctggcttgggtccctcctttcccggaggaaaaacttctccttttccggagtagttgtcagtgaagtgtttcaaatactgccctggttgtaattattgttcaagttcatgctgcaaaatcatcttcacttaataattctagcattcaccacccaaaaactcataarcaaggcttttgtattgccacacagtttgggattttttttctcagaattaggaagcaaatgtagccagcaattattttagatattgctttcagaaatgaatttttcccatatctgtcagatttggctcagagttctttttcaatttaatcattgttagcagcatgaaaaactgttaagttaaatgttcaggcataagcaagtcattactccatatttgaactctagagagctact

SEQ ID NO: 145036 - DNA, 481 bp, Homo sapiens
cagtgtgccagtgatgtggcatgaattaaaaacaagaagtcttccaggagaaaagatttctttagagatgtaattaattgacctggcttgggtccctcctttcccggaggaaaaacttctccttttccggagtagttgtcagtgaagtgtttcaaatactgccctggttgtaattattgttcaagttcatgctgcaaaatcatcttcacttaataattctagcattcaccacccaaaaactcataagcaaggcttttgtattgccacacagtttggrattttttttctcagaattaggaagcaaatgtagccagcaattattttagatattgctttcagaaatgaatttttcccatatctgtcagatttggctcagagttctttttcaatttaatcattgttagcagcatgaaaaactgttaagttaaatgttcaggcataagcaagtcattactccatatttgaactctagagagctact

SEQ ID NO: 145037 - DNA, 533 bp, Homo sapiens
taaaaaatctagtgaaagaaagaaatatgcaagatgatttccacacaagaattacaataaataatgaaaagcagttctgggccttttggtttgctccctggaaggagataaaatagttaattaaagttttattgcttttgaaacattctccaatttaagaaaaggtttgagatttgttatatatggtgcttacatggaacacatgaaacctttatgagacttttttccctgtttgatagggaatgaaactttggttgaatttccagtgggatggggtgagtctggagataagctttatggtttctcctgctggtgtctccagatagcaaacacagcagcggcttccagtctgtggtgcaaasaaagaaatactattctctagtgcagataccatttcacctatctttttataaaataccagattttggtgaaggttcttaagatattcaaataattatctccaagtatctgctgggtggcatggcaggtgaaagcaaggagaattgagacaaatagatagacaggaagtcaaa

SEQ ID NO: 145038 - DNA, 569 bp, Homo sapiens
ttagctctgggtttttcataggtgcccttaagttgagggtttgtttgtttgtttgtttgttttatcatgaaggggtattgaattttataaaatgctttttctgtgtctcctatgatgatcatgttttttgttctattatgatgatgcattacattgatttttgtgtgttaaactaaccttgcattccttggatgaaatgtatatgttaattttgcctattcttgagtgtygtatacatttaatcattttatatgttctcttttgtttctgttctttaggtcagcataatatttttcaaactcatgcatgctcctgcatatatcaatagctcatttgtttttattgctgagtattattccatggaatgaaaatgacatgacatctgttcatccattcacttgttaatagacatttaatttgcttctaagttttggctagaataaatacaatttttatgaatatgcatgtgcaagcctttgtgtgaacagttatcttcatttatcttgggtaaatatccaggagtgcaattgctaagccatttggttcataaaaatttacttcaataagac

SEQ ID NO: 145039 - DNA, 507 bp, Homo sapiens
gtcaatagacagtgtgtagttgaatcttgttttttgcacaatctaacaattcctgtctttggttagattgttaaaaacatttgcatctaatgttattaatatggtttgacttatggctgtcattttgcttttcattttctataygtctcatggttcattcttctcttcctccttgactaaactgtcccttccaggcaaaaactgctgccttagactgggagatgagagtgaagtaagcttccttttcttggctgaatccattgagaatagggcttaaatcacactgagctggggatcaggcatgtctttaatataacagacttccatagttcttactcagacttagtattatagattttcttgaataaatatttctcaatttcctctatgttcttagaacagtttccagtgactaaatttttttttaacaattttcaacagttatagttctttcactggggagagggttcacagaggtcattacacacccatcccagaaatgtttct

SEQ ID NO: 145040 - DNA, 625 bp, Homo sapiens
gcaaccttagtttgttctcctaaacacatctttttattctttacatggcaggttgaattgaacattttcaaattttttactttctactttctttttaattacaaattccatctttaaatcatttttctcttctctcattttactataagtggtcaaaagaagccatgcagcattttgaacattttgctgtttagatagctcttctgccagatgttctagttcatcactcctaaattctgcttccataaaaccctaggaaattgacacaattcttccaagctmtttgcaactgtaaacaaggataacctttactcaagtttctgatactttattccacagttccatctgagacctcatcagatggactttactatccagatgtctaccagcatgttgaatacaaccatgtaagtcatctctaagaagttctagatattccctacagttctcatcttctgagccctcatcaaaatcatccttaatgctttatatatggtaactgaggctttttctaatttgctcctctaaaccctttcaacctctactcattgcttaattctaaagccacttccacattttcagatatagatgcttctcaacttctgatggggttatgtctggataa

SEQ ID NO: 145041 - DNA, 557 bp, Homo sapiens
attatttggagcaatattataccaattcagtcagtgaaattatatggagggggagaatatttattcatgtggatttctcccttatatatttttttcactggatcgttatccctacaataatttcactcataaaaattactaaataacacagtttaaggcctcttttaaagttgtctagtttctccagatcaaatgtcaacactaatacaatctaccaagtaatacttgaatcctatatcacttttccttagtaaggacagctagatattagaagatacacaaaggaataacatttcatttctttatttttaagatgtgtctaattaattcaaataacagtaaatgttttttattctttattttttgtttgtttgttttttgagtatcttctgtattatctgcactatctccctggatttcagattgaaagattgctggtataaggcaagcatcayagtgtacttagaactagtgagaaaaatattaacacccttaagcagcaataaactccaaagatgatttcgatattctaaaattcaactttgtatttattatat

SEQ ID NO: 145042 - DNA, 580 bp, Homo sapiens
aagtttgtttttacatacactccaccattcaattctatgctagtggaaattatttactctattacttggcatagtttatcaagacctccacracacctatggaaatatttcttccatatttttaattggttcagaatcgattttttcttaaaattaatataatcctgaaaataatgataatagtaatgtgttaagtgctttacaaacatgaactcttctaagcattggtgcgaagtaagcattttttaagaaaggaactatctcagttttttaaataaaaaaactaaagtttaaagagaataaagagcatgcccagagtctttctgttaatcagtacaaggcttgggttgatcttgaattcaggttgagctgactccaaaacctatactctttccattgcaccctgcaagctgcctgctcactgatacagcacaattgtattattgaaaaatggtacagagaactcctagtctggggtatatgagagactgtggtttgaactcactgttgactaggtgcccaagaagctcaagtgaattgaaggctttcactgcagtgactccacgcccagaatgaacat

SEQ ID NO: 145043 - DNA, 584 bp, Homo sapiens
taaagcaaactggcagaatagaaagctccactgattgtctaccctgcaaagacaccaagttaacaactatctatgcagataaaacaccctcataagaaccacaaagcaggtgagcattcatagttttaacttcatactgctgaaagaggcactgaaaacagagaaaaagcagtcctgaatcacagacgccagtccttccctatccccagcagcagaagttgggtgaggagagcttayctgtgagctgggggcgggggagggaaacacagcaattgtgagacattgaactcagtgctctgctgttacagcagaaaggaaaaccggctcaaactgagctgatgcctgcccatggaggcagtatttaaagcagccctagccagagggcaatcactgttctcagaggtcaaatttgagtgcctgcaatccttgccactgagggctacagtgatctgagtcttcatataaacttgaaaggcagtctaggccacaaggactgcaactcttagacaagtcctggtgctaaactaggtctggagataagggattgagggggcactcaacatactgaggtagtacatggggca

SEQ ID NO: 145044 - DNA, 475 bp, Homo sapiens
cttaaaaaaaagattaagggagggatcttaaaaaatgacatatacctaaataatagaaatacatatttatttttctaatctgtcataargtcttttttaaaaagataaattattagcatattgattaaagttttatctggtctttcatgcacaaacctcacacatgtaaagaagctactctgggctccttcaaagtggagtgaaaatttaaagactcttttagaaagcaatcagaatgtaataccgttttggatttttgtgattatttctcccgaacttttacagtttccttatccatgactaatttgacagtattttttctaagtatttgacttagttatttccaaggtatcaaagttatttttcatagaataaacagctttctttctttccttaactattacatttaagattaatgttattaggttatacaattatatgtataattatatgtatgtataattataaacacaat

SEQ ID NO: 145045 - DNA, 510 bp, Homo sapiens
tcaacaaatttgttctctgctggcttccacaaagggctgtgtggctcaagtttgagtcgttgtgcttggaggcaagacatataatactactttactttttamgcttctttggatttttatccagaaataatatggctgtttaatctgaagcctgataattgctttttcccttacttcagtatttgtacttctagtcataactctttaagcccttcatcattcaacagttatttctgtgttttaggttactagaatcagtcattcttcctgtccagcatctgtatttgctgctctatgtgtaactggtgaagaatatacaaccatctatcttgagttaatattatttttcctccacatatgagcatcagtggaaaactttaggggaaaacaaaaaggaactagagaggacaaggaatttccttaggctcatggccgactttgagagtgtaagtatatgtaagtatattaggtccttacttgctgcagtggttcgtgattgtcactgaattc

SEQ ID NO: 145046 - DNA, 659 bp, Homo sapiens
atcttagctcctccagagtgtgcttttggtcttctatgcaccttctcagcttaggggacaactctgcattcaaaaaaaacttttctgagagactactttttaaagaatagttttcagttcacagtcagaagaggaagatagagattttcctgattccccccaactcccacacatgcatagcattccccattatcaacacccccaccagaatgctgcatttgttagaactgtggaacctaccttgacatatcataatcacccaaaattcatagtttacattagggctcactcttggattgtacattttatgggtttgcccaaatgtgtactgaatgtatccatcattctagtatcatacagaagatttmactgccctaaaaatcttgtgctccacctgttcatccctttccctccagtccctggcaaccagtgatctttttactgtctctgtagtttgaccttttccagagtgtcatctacttgaatcacacagtgtgtagacttttcagataggcttctttcactgagtagcatacatttaagctccctccatgtcttctcatggctcagtagctcatttctttttagcaccgaataatactccattgtcaggatgtactacagtttattcattcaccttctgaggacatcttggctgc

SEQ ID NO: 145047 - DNA, 507 bp, Homo sapiens
tataatcgctcagcaccgagttttatggagacgtgtgagagagtgtgakagactccaaaaacataaaatgcaatacgttaaaatttttaatatattgtcatatgcagattctgtattgacatcttgcctgctatgaagagacctcacgaggtgttgcagcaatcctcagcaaagacagtgcatctctcttgggccaaggatgcaccttcagaatccatgaagcagttgttatggaaaaaaggcaggtctaactttagaatggcttaatcctgaatctagatgaacactttcagtgggtgatacttaaatcttccctcccaacttccctttcctacagtactctcaaacttttaaactttgttatttaacagcttgtcttctgtttttctttccttcatctctccaacatcctcaaaaaaaggtcagactatagtgtctccatctcctcatgctcactgtggttaagagcgtgggtatttaaaacacagtcttggaagcaagttgtag

SEQ ID NO: 145048 - DNA, 507 bp, Homo sapiens
tataatcgctcagcaccgagttttatggagacgtgtgagagagtgtgagakactccaaaaacataaaatgcaatacgttaaaatttttaatatattgtcatatgcagattctgtattgacatcttgcctgctatgaagagacctcacgaggtgttgcagcaatcctcagcaaagacagtgcatctctcttgggccaaggatgcaccttcagaatccatgaagcagttgttatggaaaaaaggcaggtctaactttagaatggcttaatcctgaatctagatgaacactttcagtgggtgatacttaaatcttccctcccaacttccctttcctacagtactctcaaacttttaaactttgttatttaacagcttgtcttctgtttttctttccttcatctctccaacatcctcaaaaaaaggtcagactatagtgtctccatctcctcatgctcactgtggttaagagcgtgggtatttaaaacacagtcttggaagcaagttgtag

SEQ ID NO: 145049 - DNA, 589 bp, Homo sapiens
ccactgtttgacctttccccatgcccatccccgcttcctccaagagctaaagccaatcctgaaaaagcagagggctgatgattaacttcatccarccaaacctgttacttctcaaaagagatgtcctgtatgggcttcttaatatccataacatggtgtggacattgagaaattcctgtgacagtggaatcactgtgggtgcccaaggtttctatccatcttgattatgagcttgaattgaggcttagccagagacagcaaagggtactccagaagaaggctggctcacgtcttaaaatgtacccaggttttgttttctttgagtgtgataaaatgacaggcacagagacaactgccttgggaagaagagtttattactcgcagttctaggaggaggaggcatgccatgaagcacaggtccatatgggaaggcaccagggtcagtcaggaggcagaaggagacaggggaaagcatggcacaagcctttattatggttttcagcagaaaaggccaatgcagggcagggtaaacagtttaggactggctggtttgagtaatttcagtgggctccagggtgtaagaaccatc

SEQ ID NO: 145050 - DNA, 442 bp, Homo sapiens
gtggaccaatgatacttatcaatgtccaaatgtgattcctaggtgacaaaatgccaatagttagctggatcacagccagctgaagagcagtaaggagcatttggcagcttttgaaaggctgctcataagactgtgagtagttayagcagtgaaacaggatcagcctgatcaaatgttcaaagcgcttgcaacctgctgttaaggaggtgtgaaaaattagaaatctgtttttaacattgtcttttttaagttcctcattattaacacttaagctaaaaaacagattcagagtgtcaaaatctctgccaatggaaccaaataacatgaatacccagcctttgttttaaacacacttataacgtattttttatattttcaatgagttttagagaaatagataactgacatactacatacagataatgaagatactgaactgagc

SEQ ID NO: 145051 - DNA, 604 bp, Homo sapiens
ggcctttctctctctctctttctgtctcaaaatataatggccgggctgagtggctcatgcctgtaatcctggcactttgggaggctgaggcgagtggatcacatgatgccaggagtttgagatcagcctgaccaacatagcaaaccctgtctctactaaaagaacaaaaattagctgggcatggtggtgaatgtctgcaatcccagtgatatggtttggctgtgtcctcatacaaatttcttctggaattgtagttcccataatccccacatgtcatgggagggamccagtgggaagtaattgaatcacggggtggttaccgtcatgctgttttatatatatttacataattttactgtattcacctactttcaaacctcagttgactgtagaaagtgcaagggcagataaggggggactactgtattgtatgaggagacaaatttgtgatgcagttattagctccatttgacaaatgggaaagctgaggagagaaagacactaatggaacaaggactaatgtaacaactagctaagaagtggagttggaaatttaaaagtatttcattatgaaatatacacacaaaagttaaacaaaaaacat

SEQ ID NO: 145052 - DNA, 604 bp, Homo sapiens
ggcctttctctctctctctttctgtctcaaaatataatggccgggctgagtggctcatgcctgtaatcctggcactttgggaggctgaggcgagtggatcacatgatgccaggagtttgagatcagcctgaccaacatagcaaaccctgtctctactaaaagaacaaaaattagctgggcatggtggtgaatgtctgcaatcccagtgatatggtttggctgtgtcctcatacaaatttcttctggaattgtagttcccataatccccacatgtcatgggagggacccagtgggaagtaattgaatcacggggtggttaccrtcatgctgttttatatatatttacataattttactgtattcacctactttcaaacctcagttgactgtagaaagtgcaagggcagataaggggggactactgtattgtatgaggagacaaatttgtgatgcagttattagctccatttgacaaatgggaaagctgaggagagaaagacactaatggaacaaggactaatgtaacaactagctaagaagtggagttggaaatttaaaagtatttcattatgaaatatacacacaaaagttaaacaaaaaacat

SEQ ID NO: 145053 - DNA, 544 bp, Homo sapiens
aatcaatacggaggctacccactccacattaccttcttttcaagggcctgtttcccttgcctccataactgttgtgggtgttgacagccaggcttctaaacctcttaaaactccccaactctggtgtcaacttagacaatactcttttatgcactcttttttagttatccccacctgcccagytcccttattaactcaagatattttaaccaaattatctgcttccctgactattcctggactacagccgcatctcattgctgccaacttagacaatactcttttaagcactccttttagttatccccacctgcccagttcccttattaggctgagacactttaactaaattatctgcttccctgactattcctggattacagctacatctcattgctgcccttcttcacaatccaaagcctcctttgcgtcctcctcttgtatccccccaccttaaccgacaactataagatacctctactccctccttggcgaccgatcatgcaccacttaccatctcattaaaacctaatcacccttaccc

SEQ ID NO: 145054 - DNA, 544 bp, Homo sapiens
aatcaatacggaggctacccactccacattaccttcttttcaagggcctgtttcccttgcctccataactgttgtgggtgttgacagccaggcttctaaacctcttaaaactccccaactctggtgtcaacttagacaatactcttttatgcactcttttttagttatccccacctgcccagttcccttattaactcaagatattttaaccaaattatctgcttccctgactattcctggactacagccgcatctcattgctgccaacttagacaatactcttttaagcactccttttagttatccccacctgcccagttcccttattaggcygagacactttaactaaattatctgcttccctgactattcctggattacagctacatctcattgctgcccttcttcacaatccaaagcctcctttgcgtcctcctcttgtatccccccaccttaaccgacaactataagatacctctactccctccttggcgaccgatcatgcaccacttaccatctcattaaaacctaatcacccttaccc

SEQ ID NO: 145055 - DNA, 604 bp, Homo sapiens
tatctttagaatgaaaacactgacattgattaacacttacattatgattgagagcacaccttctcatttaatgttgacaactgtaactccccaaggtacattaatacttcatttaacaggtttggaacctgaggccaagagagttcacagaactaatccaaagtctcagagctattaagtggcaggccaaaactggactccaaattcctcaccctctctactacacattgtcctcagcagctgtacaaatgttttgtttctttagaatgaattacgtcccttatttgctaaaaatgaacctcggatatcagctttttagtcgctgaaacaatccagctgctagtttctctacagccttaactctctaaaatatagctccaaatctggaaggaaatgaaagagattctcaaacatctgaaagtatggttacaaagccaagccattaagctctccttcagccagaactgatttaaaaggtaattaatagctaggttatctattccctcaagycatagaataaccagcaaactgaaaagaagaagagggaaaggatgaaattacaataggtatatactgatcaccatgacaagtgacaagccagtga

SEQ ID NO: 145056 - DNA, 544 bp, Homo sapiens
gtctcccctagtctccagaaggaatgcagccctgctgacaccttgattttagcctagtgagactcattttgtgcttctgctctctagaactatcagataatacatttgtattgtttaagcccttgtgtttgcagtgacttgttagagctgcaataggaaacaaatttaaaccattaaacataatttttaaaacataagagataaaaaatattctattatagttaccctattttttctcattccgttgttctttctttctttctaaagttctatgcctgctgytatcatttcctttgaagaatatccttagtcattctttaaaggtaggtcaactggtaattctcttagtttccttcgtctgagaagaaattaaatttaaatacccagtattgtaaccataataaaatcatttttattttatttttttaatttttttctttgtttttattattattattattactattattatactttaagtttcagggtacatgtgcacaatgtgcgggttagttacatatgtatacatgtgccatgctggtgt

SEQ ID NO: 145057 - DNA, 544 bp, Homo sapiens
gtctcccctagtctccagaaggaatgcagccctgctgacaccttgattttagcctagtgagactcattttgtgcttctgctctctagaactatcagataatacatttgtattgtttaagcccttgtgtttgcagtgacttgttagagctgcaataggaaacaaatttaaaccattaaacataatttttaaaacataagagataaaaaatattctattatagttaccctattttttctcattccgttgttctttctttctttctaaagttctatgcctgctgctatcatttcctttgaagaatatccttagtcattctttaaaggtaggtcaactggtaattctcttagtttccttcgtctgagaagaaattaaatttaratacccagtattgtaaccataataaaatcatttttattttatttttttaatttttttctttgtttttattattattattattactattattatactttaagtttcagggtacatgtgcacaatgtgcgggttagttacatatgtatacatgtgccatgctggtgt

SEQ ID NO: 145058 - DNA, 544 bp, Homo sapiens
gtctcccctagtctccagaaggaatgcagccctgctgacaccttgattttagcctagtgagactcattttgtgcttctgctctctagaactatcagataatacatttgtattgtttaagcccttgtgtttgcagtgacttgttagagctgcaataggaaacaaatttaaaccattaaacataatttttaaaacataagagataaaaaatattctattatagttaccctattttttctcattccgttgttctttctttctttctaaagttctatgcctgctgctatcatttcctttgaagaatatccttagtcattctttaaaggtaggtcaactggtaattctcttagtttccttcgtctgagaagaaattaaatttaaatacccagtattgtaaccataatamaatcatttttattttatttttttaatttttttctttgtttttattattattattattactattattatactttaagtttcagggtacatgtgcacaatgtgcgggttagttacatatgtatacatgtgccatgctggtgt

SEQ ID NO: 145059 - DNA, 521 bp, Homo sapiens
tcttcaatctactagagtttgaccaatttattcattcattaaacaaacatttattgaatttttactctataccaggcacagagttaggcactaggyatacggtatgatgaaaaaaatatataaggttttcttcctgataggacttatcctgggggagatttgaaagtcattagtaggaacaagataacactcatcagcctctgaaaccaacacaaacaaaaaccacctatataaagtccctggactggtgaatgagaaagggtagaggatacacacacacacacacacacacacacacctctctaaaaatgattaaaattcaaagtttaggcaggtgctagaatttgtactgactgcctcttttaggcaggtgctagaatttgtaccgactgcctcttttcttatcattccccataccttggctggtgtggcctaagaagggaagcattcagggtcacttcagtgacaaaaggtgacagtggggccagggctaatgctcccccatgacttccagaacagga

SEQ ID NO: 145060 - DNA, 521 bp, Homo sapiens
tcttcaatctactagagtttgaccaatttattcattcattaaacaaacatttattgaatttttactctataccaggcacagagttaggcactaggtatacggtatgatgaaaaaaatatataaggttttcttcctgataggacttatcctgggggagatttgaaagtcattagtaggaacaagataacactcatcagcctctgaaaccaacacaaacaaaaaccacctatataaagtccctggactggtgaatgagaaagggtagaggatacacacacacacacacacacacacacacctctctaaaaatgattaaaattcaaagtttaggcaggtgctagaatttgtacygactgcctcttttaggcaggtgctagaatttgtaccgactgcctcttttcttatcattccccataccttggctggtgtggcctaagaagggaagcattcagggtcacttcagtgacaaaaggtgacagtggggccagggctaatgctcccccatgacttccagaacagga

SEQ ID NO: 145061 - DNA, 596 bp, Homo sapiens
tctgaattgtctatcatcttattctgtccttttcaaatagaaaattgcaaaggggcgttgccttatgtactggtgagttggcaatccggctagtcttttcagagccactaccctttcaggccacagttccaagatttacttagaactgtgctrctgtgtacatttagatttggggaagtggtgtacttaacttggaaattataaaattaatttagattttgggaagtggtgtacttaacctggaaattataaaattaaagctacggatttgggatagcaaaagtagttctacttttaagggagtggccatataattgttattttcatagatgttttgtgagaatagttggcactgaagggggaggattcaaactgagagagctgagttctagaaagcacctttgaatttacctccttcccccaatctagaatagtgagaattaacttacgttcatttaaataaattacatttaaatatttgagttacatttaaatacttatttggtaacaagatactatctagcattgcattagcattaaccattaacatttgctcatcaagttaatagctactgtactgaataaacaaaatttaa

SEQ ID NO: 145062 - DNA, 388 bp, Homo sapiens
acaatatatctaattaaaaacagcaatgagaataggagaaaatgggtccagatgctttttaaattcagctggcatagtccctgtgttcccaaaccttccctttgtcataaaagccaaggccagccctgcacccagctaagctgcacagctgcacggtgcaacgtgaggcaaaagggtagtagtctgtcctaagactctcataccagccagcctgcctacctagagctcaagccaaaacctatgattacaagatggagyatcagtagagattctgtgaaggtgaaaattcgcatggaaaactaagctcattgctagagtatgacaagaccttaaaaaggtttgcacaaatttctgtgcatattggtttggagtacagaggttagaattc

SEQ ID NO: 145063 - DNA, 575 bp, Homo sapiens
gtcagtttgtgtcccctgagaagcatacatcaagacatgattacagataacaagattgtttaggggaacatctgtggaagrtataggaggagacatcagaaataggaagacagaatattcagacatcaatgcaagagtcacccctgaaagggagagaggaaaggaagtttggataggcagggcttccaactgtagcatagttctaagatagtctcagccaggttaatggggaatctccaagccaaagttgattattagaagaatcctgctactgcaggaatttctggtgctagtaccttcacgttacttagtcattagctgggagcagcctcaggaaagtggggcctggtctggatactccctcagtctcctctacctctaatggtttctttctcaaggtgtcaaaattggatatctttctctgattttgtttctctttgcatatgcattccatctctgttgtaaatgtgtgaatcgaaaaatgtggcaactgggactatcactatcagtgatgctccatgcagcaggtgatttagagggaagatctgtggttgattcttccatggatgccacac

SEQ ID NO: 145064 - DNA, 506 bp, Homo sapiens
ggtggtaaataatatggtcatcctgggatgcactgtatttttctggatatttcccagttgattttaatgtgtactcagggttgcaaaccgaacctttaatccaaatttcttatcttgttcaaggaaaaagcaaagtccctagaatttaaaaaaatctgactaaagtcacaagtagttagcagttcacactctaatatcacacttctgttaccaaaactccaggggtttggtttaggtcytgttgctcactgcacagaaaaccaatcactaagtcaaccaggattgtcagggaagaagactttaattggatgggtgctgcaactgaggagatgggaaatcagtcttaaatccatctatctcactaattgactaaagttcggagttaatgtagcagggacgaaatgtaaccatgtgtgggaagacaggaattcgggaggggcaaggaagaggagtttgtcaacagggagcaggtggttaggcagtcatgatgggtgaggggtttggca

SEQ ID NO: 145065 - DNA, 621 bp, Homo sapiens
tgagaatgactttcatttttagtatacttaagtacattttcaattttcaattatatgcagtgattttgtcctttaaaaaataggatggacttttttaaatataaggaagacattttctgtgaaacaataaattactcagtatatacttaaygtgcatgaagtatgaggtaggaatacatccactgacattcttgcatttgcataccacttccccaaatatgaactcacttctctgactttgctagggctgaggaatcatcattacaatatctgtaaaactggatttattaagtgcatccatattgtttatgagtcatagaaaatatgttcattttcctatccatgttaaaggctgcttggaggattgacggagcattgcttagaaaatgttctggaattcagatgaagctgtgttagtataaatcattactggttaccatatactcacacatacttaggggataaagatcagaaattacttaaatgtactttgtcttcttcaatctttccgtagcagcacatgggtcaaaatctcctgaaagttgagcaggggagctgtagaagaattcctccttttctcgcagatgaaatcttatgatatagcaggggttacctggccaa

SEQ ID NO: 145066 - DNA, 553 bp, Homo sapiens
catctgggctagcctgaactgtgggtctgttagtgctccttaaaactactattttgttcagggtgtatttaggaggactgagcactcagtggggaaagttgctagaggcaatactcagcttctcctcaactacccaarcaaatctgcgccagcaccaagctcacacactggttcaggaccaccagcactctgcaggaaaccctcttccccaaagatggttcagtgaccacttaatgttatttcagcatgacccttacatatgatgaccatgtgattaagtatccaacctgggatactttctagtgtcaaagggggtgctattacaacaggtatcaactgggactgtgtaggcaggaaaggattcgtagtcctagcaattcacaccctcacttactccactcccattccaggaagcttatgaaggaacttcttccaaaaacataaaatactgcctgagatgacttctggtaaaaacaactttgtctgagaccattttcagaaatagtttagcatgtcttacagatgtgaggtcctgtacaagttactgaccacc

SEQ ID NO: 145067 - DNA, 553 bp, Homo sapiens
catctgggctagcctgaactgtgggtctgttagtgctccttaaaactactattttgttcagggtgtatttaggaggactgagcactcagtggggaaagttgctagaggcaatactcagcttctcctcaactacccaaacaaatctgygccagcaccaagctcacacactggttcaggaccaccagcactctgcaggaaaccctcttccccaaagatggttcagtgaccacttaatgttatttcagcatgacccttacatatgatgaccatgtgattaagtatccaacctgggatactttctagtgtcaaagggggtgctattacaacaggtatcaactgggactgtgtaggcaggaaaggattcgtagtcctagcaattcacaccctcacttactccactcccattccaggaagcttatgaaggaacttcttccaaaaacataaaatactgcctgagatgacttctggtaaaaacaactttgtctgagaccattttcagaaatagtttagcatgtcttacagatgtgaggtcctgtacaagttactgaccacc

SEQ ID NO: 145068 - DNA, 553 bp, Homo sapiens
catctgggctagcctgaactgtgggtctgttagtgctccttaaaactactattttgttcagggtgtatttaggaggactgagcactcagtggggaaagttgctagaggcaatactcagcttctcctcaactacccaaacaaatctgcgccagcaccaagctcacacactggttcaggaccaccagcactctgcaggaaaccctcttccccaaagatggttcagtgaccacttaatgttatttcagcatgacccttacatatgatgaccatgtgattaagtatccaacctgggatactttctagtgtcaaagggggtgctattacaacaggtatcaactgggactgtgtaggcaggaaaggattcgtagtcctagcaattcacaccctcacttactccactcccattccaggaagcttatgaaggaacttcttccaaaaacataaaatactgcctgagatgacttstggtaaaaacaactttgtctgagaccattttcagaaatagtttagcatgtcttacagatgtgaggtcctgtacaagttactgaccacc

SEQ ID NO: 145069 - DNA, 480 bp, Homo sapiens
gggagactcataggcactagtgcaattattataagcataaagatgttgaaatgaggagagtgtccaatgtggaggggagaatgagatctggattccaagggaagacaggagaaggtgctgtaaggagacgtaaataagcccgtcctccaaggcaaaaagctggggccagtgaggcaacagagatcactctgactgagagttggttacagggatcagaggaaaggaagaggaaacagtggagggctctgaaatctggtctgttcagtctaggctcttgtttttgacagagcatatgtgcactttgcaatcagagattggaaaacccatttgaccaccattgyattaaaacaaatgagctgccccaaacataacaagaaaaaaagatgttttgtttagggcagaaaaatccatcatctgctgctgcaaattaaaatacaggaggtagttagtagataaaatgttcatcctttaaggaagaat

SEQ ID NO: 145070 - DNA, 587 bp, Homo sapiens
ttttttttaaggaaaccattgttcctgcagagtgctttcctttgcgtagctaagacctggcaacaatcaccatcatatattatcagcaaggatttcaggtgttaatttacattcctatctcatccacaaagataattaaatgagagatgcatgtctcatatttttatagatctatagggattttctgaataccataggattgcatcattggtagagaaattaacaatgacagaaatttttaaaggctcagggacaaattgcttaaaggatagtttccccttctagttccccagcccatcagaaactaaattggttctatgcaaacacgacttttcagggttactgctgtccatttgtaacatgagatgtytggaggattattaatgtatctttaaaggacttttttttttttttttttggcctttgtcaccttcccgtctcccataaaatccttgtgaacacactgctgttcccgatgccttcctccctttctccttaaatactaagcggggaaggcagtgcctgggaagaacattcccatggactggcaaatggccaacactgggtagggcacagcttccatctat

SEQ ID NO: 145071 - DNA, 565 bp, Homo sapiens
gcacaagttgaaaatcattaattgaattttagtcaagcttattttgggttgcctttgagtcacccaaacagaggtgtccagtaggcagtttaatgtacatgactaaaagactagagagttatttgtcctggagataaggggggagggatakcattaggagatatacctaatgtaaatgacgagttaatgggtgcagcacaccaacacggcacatatatacatatataacaaacctgcacattgtgcacatgtactctagaacttaaagtataaaaaaaaaattctgaattcaccagcatatggatgttagctagagacatataaatgttcagacagagactattacagaaaaggaggcttggagaaggacacagaaaaagatcaacttcaatgccaggacagagaaagatgactagaaagcaggataaggaatggtcaaagagttggggggaaaatggaaaatgtgaagttacacaagtcaagataagaaaacttttcaagcatgacagagtggccaaattaacaatgtaaaatactacaaaatgtctaagaaacttaagtcctg

SEQ ID NO: 145072 - DNA, 565 bp, Homo sapiens
gcacaagttgaaaatcattaattgaattttagtcaagcttattttgggttgcctttgagtcacccaaacagaggtgtccagtaggcagtttaatgtacatgactaaaagactagagagttatttgtcctggagataaggggggagggatatcattaggagatatacctaatgtaaatgacgagttaatgggtgcagcacaccaacacggcacatatatacatatataacaaacctgcacrttgtgcacatgtactctagaacttaaagtataaaaaaaaaattctgaattcaccagcatatggatgttagctagagacatataaatgttcagacagagactattacagaaaaggaggcttggagaaggacacagaaaaagatcaacttcaatgccaggacagagaaagatgactagaaagcaggataaggaatggtcaaagagttggggggaaaatggaaaatgtgaagttacacaagtcaagataagaaaacttttcaagcatgacagagtggccaaattaacaatgtaaaatactacaaaatgtctaagaaacttaagtcctg

SEQ ID NO: 145073 - DNA, 409 bp, Homo sapiens
aaaaaaaattctgaattcaccagcatatggatgttagctagagacatataaatgttcagacagagactattacagaaaaggaggcttggagaaggacacagaaaaagatcaacttcaatgccaggacagagaaagatgactagaaagcaggataaggaatggtcaaagagttggggggaaaatggaaaatgtgaagttacacaagtcaagataagaaaacttttcaagmatgacagagtggccaaattaacaatgtaaaatactacaaaatgtctaagaaacttaagtcctgaaaaatgcctattcaatataatatagaagtcattggtgatcttagggtaggaagttttagttggttagtggaggcagaagccaaatttcagtaagttaagaagtgagtgcaaggtga

SEQ ID NO: 145074 - DNA, 569 bp, Homo sapiens
tatgcgtttacctaaaagacatgaaaagacttgtataagaatgttaatagtagctttattcataatagcttgaatttggaaataatccaaatttccttcaacataagaatgattaaagtagtgtattcatatggtataataattttcagcaaaataataaaawtaaaaaaaggaatattgatagccacaaaaatatgtataaagctcagagccatcatgctgtgctaaagaagctaggcataaaagttacctatgtgtgattttattgatatgaaattctatattaggtatagttaattgatatttttgtaaaaatcggaaagtgggttgtctttgcggtggcaagaatacctgggaaatgggaatgcataacttttctggctaatggaaatgttctatatctcgaagtgtgaatcataacaagtggatgcatacaattatgaaattgtacacttttgatttatacgcactttgttgtatataaattttactttaaaaaatgcccttaatattgaaacctagttggtaggtttactttttgcagtaatagaagatggcaattctgaaac

SEQ ID NO: 145075 - DNA, 569 bp, Homo sapiens
tatgcgtttacctaaaagacatgaaaagacttgtataagaatgttaatagtagctttattcataatagcttgaatttggaaataatccaaatttccttcaacataagaatgattaaagtagtgtattcatatggtataataattttcagcaaaataataaaaataaaaaaaggaatattgatagccacaaaaatatgtataaagctcagagccatcatgctgtgctaaagaagctaggcataaaagttacctatgtgtgattttattgatatgaaattctatattaggtatagttaattgatatttttgtaaaaatcggaaagtgggttgtctttgcggtggcaagaatacctgggaaatgggaatgcrtaacttttctggctaatggaaatgttctatatctcgaagtgtgaatcataacaagtggatgcatacaattatgaaattgtacacttttgatttatacgcactttgttgtatataaattttactttaaaaaatgcccttaatattgaaacctagttggtaggtttactttttgcagtaatagaagatggcaattctgaaac

SEQ ID NO: 145076 - DNA, 490 bp, Homo sapiens
ccagtcatcttggattagggtcccacccatatgaactcatttaaccttaattgcctttttaaggtcctgtctccaaatacagtcacagtgggagttagaacttcaatatatgaattttgggggcatataattccatctataacrtataattatggggtattttacttttataagaaactgccaaactattttcgagtatggctatgccattttgcattctcactagtattctacaagtgattcagtttctctgcatccaaacatccttggtattgtcactatttttaattttacccaatttgtaatctcaagttgtattttcctgatgggatatatgtctatgcttaacatcttttcatgtccttatttatcatctgtgtatcatcttcagtaaaatgtccgttcacttcatttgcctattttctaattggattgttgaatttttattgctcagttttcagggttctttatatattctagataccaggcc

SEQ ID NO: 145077 - DNA, 471 bp, Homo sapiens
actacatatcttgataactggagctatatagcaagctttccatttcaggtagattaatttttcccactttatttttctttgtcaagattgttttagttactctagagcctgtggttttccatataatttaaaaaataagctcatctatatctacaaaacttcttcccgattttttttacaggaattgcattaaacttacagatcartttgggagaactcatatttttactgtgatgaatcatcatccaatccatgagcatagtatgtctgtcaatttagatttttaaaatatatttcatgacaattttgtaattttcaacatatgtaatgtacatagtttgataagtatatacctacataattcattttttgagtaactgttaatgttattgtttttaattttgtcgtatcttcattgtcagtatgtgattttcttttgtgtgttgatcttatatcttacctccttgatga

SEQ ID NO: 145078 - DNA, 485 bp, Homo sapiens
gtgtctcaggaccaaagaggcatccaagaccaagccaattgttgtgactgagtccctcctgctgcttccactcattgtttccagtatctcttggaggggaagagaatctcaatcaagtgggaaaggggagtgcttcatggctgatttaaattgatgggattacttgttgattgatcctccttttattggtgtcagacttgtccagtgttctcagaggtactcttaattgatctcagaagagaaattagaatatgtgggctgccttctgttgctaggttggratcagcaaatgcctggtctgacttcattttctcctcttggttggggtaaatgtaagacattccccgctactctgtttttcctccaaccctgggatcccaaaccggtctgttctcttgtcaccttccagagttcttctttggttgttggttgcattatttccagcttacagctgtgcttagcagggaggagcaagaagaagcagg

SEQ ID NO: 145079 - DNA, 532 bp, Homo sapiens
ataagaaacataacagtttggggttacttgttcagtgtagtcaaactgtatatttatgagctattatccaaactttaaattagaaaccactgaagaacatrtgcatattgaacctgtgttcattttacaatatttgctggcataattttagtggggaaaattattcagacttatataattctaataactttggttttatgacattgttgggtatatatatatatgatttatttgatgccaaaacattggttaggaaggcaatagctaattataactttttcatggtaaatcactttcatttatatggcatggtttctactagcaaactatgaaaagtagaaactactactaataaatgcttctgtgcataaacacattcactgagcaactgaaacaaattgctcaggatcaaaatttggtcgaatcataggactctggaagaatcacgttatatattgccaattttgaatcattatcactaccactctttttcccaatttaccacagtaagtatttggtccagaatctcttc

SEQ ID NO: 145080 - DNA, 532 bp, Homo sapiens
ataagaaacataacagtttggggttacttgttcagtgtagtcaaactgtatatttatgagctattatccaaactttaaattagaaaccactgaagaacatgtgcatattgaacytgtgttcattttacaatatttgctggcataattttagtggggaaaattattcagacttatataattctaataactttggttttatgacattgttgggtatatatatatatgatttatttgatgccaaaacattggttaggaaggcaatagctaattataactttttcatggtaaatcactttcatttatatggcatggtttctactagcaaactatgaaaagtagaaactactactaataaatgcttctgtgcataaacacattcactgagcaactgaaacaaattgctcaggatcaaaatttggtcgaatcataggactctggaagaatcacgttatatattgccaattttgaatcattatcactaccactctttttcccaatttaccacagtaagtatttggtccagaatctcttc

SEQ ID NO: 145081 - DNA, 532 bp, Homo sapiens
ataagaaacataacagtttggggttacttgttcagtgtagtcaaactgtatatttatgagctattatccaaactttaaattagaaaccactgaagaacatgtgcatattgaacctgtgttcattttacaatatttgctggcataattttagtggggaaaattattcagacttatataattctaataactttggttttatgacattgttgggtatatatatatatgatttatttgatgccaaaacattggttaggaaggcaatagctaattataactttttcatggtaaatcactttcatttatatggcatggtttctactagcaaactatgaaaagtagaaactactactaataaatgcttctgtgcataaacacattcactgagcaactgaaacaaattgctcaggatcaaaatttggtcgaatcatakgactctggaagaatcacgttatatattgccaattttgaatcattatcactaccactctttttcccaatttaccacagtaagtatttggtccagaatctcttc

SEQ ID NO: 145082 - DNA, 593 bp, Homo sapiens
aaggaatgggactattacaaactaacgccatactatattttttaaaaagtcttacgctccctttctgttgattttccctttcatttttgaacaacatgtatctttaccagcaaaagaaataaattaaaaaatccaccctcagttccttyttggaaatctttcagaaaaggcagttggtgaaagccaattttacctaagtgtaacttcattttctctcttcttgaccaatatattcagtttttctcctttcagtagaactatatatttactttatttactctttatttgtggagcctttaacatgtgttcagtgctgagtgtaataggtaagtttgctatgtttggttctcatataacatttatcataactaactttggttcattcatagttaaattgaggaaagaagagattatagtcaaatctattgcatgtttttaattatgtggccactagaaagtacttcactttcctcatttctttttacatttgtgtcaggcaccctagttcaaatactacatatcttccagaagactatagaatgttcagttctggactctaaaagatcatgaaaatcataactagccagttacag

SEQ ID NO: 145083 - DNA, 592 bp, Homo sapiens
cagcagtttcaagaaagtccaagtcagagttaaatctatttgcctgttctcctaaaatctttacacttcttgggcaaatcttgtacttagcagattttaattctcacatacttaaaaccccatgtctcaaatttttattctgyaaataaacatacatttacccctagtaaccttgattttattatactagcaataaagtatacacaaaatatgctagtaaaaatgaatgctatatattcaatattgcaatgagggcttctctcctctgtgcagtcgttttaatatattagtttcctcttaactgtaccatgttattacgttttctttatatatgccctcccacaacccttctaatgacttttggtggaatattaactgtttctaatatcagtatgcccatgtaataacaaaattaccacgactatttcctttgactttgcctctttgaagaagacctaagtcactgacggatgtttaaagagagaggaaggaatattggcaaaaatccagggcactgctgccccctagaaggaagtttgagcagcacatttgacaaacacaaatcttgagagaaacagactttgaggaagat

SEQ ID NO: 145084 - DNA, 592 bp, Homo sapiens
cagcagtttcaagaaagtccaagtcagagttaaatctatttgcctgttctcctaaaatctttacacttcttgggcaaatcttgtacttagcagattttaattctcacatacttaaaaccccatgtctcaaatttttattctgcaaataaacatacatttacccctagtaaccttgattttattatactagcaataaagtatacacaaaatatgctagtaaaaatgaatgctayatattcaatattgcaatgagggcttctctcctctgtgcagtcgttttaatatattagtttcctcttaactgtaccatgttattacgttttctttatatatgccctcccacaacccttctaatgacttttggtggaatattaactgtttctaatatcagtatgcccatgtaataacaaaattaccacgactatttcctttgactttgcctctttgaagaagacctaagtcactgacggatgtttaaagagagaggaaggaatattggcaaaaatccagggcactgctgccccctagaaggaagtttgagcagcacatttgacaaacacaaatcttgagagaaacagactttgaggaagat

SEQ ID NO: 145085 - DNA, 592 bp, Homo sapiens
cagcagtttcaagaaagtccaagtcagagttaaatctatttgcctgttctcctaaaatctttacacttcttgggcaaatcttgtacttagcagattttaattctcacatacttaaaaccccatgtctcaaatttttattctgcaaataaacatacatttacccctagtaaccttgattttattatactagcaataaagtatacacaaaatatgctagtaaaaatgaatgctatatattcaatattgcaatgagggcttctctcctctgtgcagtcgttttaatatattagtttcctcttaactgtaccatgttattaygttttctttatatatgccctcccacaacccttctaatgacttttggtggaatattaactgtttctaatatcagtatgcccatgtaataacaaaattaccacgactatttcctttgactttgcctctttgaagaagacctaagtcactgacggatgtttaaagagagaggaaggaatattggcaaaaatccagggcactgctgccccctagaaggaagtttgagcagcacatttgacaaacacaaatcttgagagaaacagactttgaggaagat

SEQ ID NO: 145086 - DNA, 364 bp, Homo sapiens
ccatcaatgatctttatttcctggtattatgcccttgagcaatcccttctcatactgaatcaaggctggctgtgtggtcaatagactatggtagatatgaccatgtatgaagttcaactctggctcataaagctactggagcttttggcttagtctctgatcacttgctccaggtaaattcagccaccatcttgtgaagacactcaaaaagccctgtggagagkctcacatggagaggatgcaccttgttagcaccaacttaccagccatatagtgggatccctggggaatggatcctgcagccccagtcaagccttcagatgactgccagcccagctgacctctaactacacctcatgaaaaa

SEQ ID NO: 145087 - DNA, 364 bp, Homo sapiens
ccatcaatgatctttatttcctggtattatgcccttgagcaatcccttctcatactgaatcaaggctggctgtgtggtcaatagactatggtagatatgaccatgtatgaagttcaactctggctcataaagctactggagcttttggcttagtctctgatcacttgctccaggtaaattcagccaccatcttgtgaagacactcaaaaagccctgtggagaggctcacatggagaggatgcaccttgttagcaccaacttaccagccatatagtgggatccctggggaatggatcctgcagccccagtcaagccttcagatgactgycagcccagctgacctctaactacacctcatgaaaaa

SEQ ID NO: 145088 - DNA, 567 bp, Homo sapiens
ccactttcagtcatggatataccaactaggcagaagataagcaaaaaaaaaaaaaaaaaaaaagacatcaacaacactataaactaactagacctaaaagacatctacagaacactcagtccaacaactgtgcaatacacattcttctgaagcacacatggaacatcatccrggacacatcatattctagtcataaaacaacattcctaaagagaatgaggcaatgaaagcaaaagagaaattagaaaatattttgaaatgaataaaaacaaaaacacaacataccaaaatgtatagaatccaactaaaacagtgcttagaggaaaacttgtaaatgcttacagggtaaaagaaaaaaatcaatatcctaaccttccacttcaagaaatcagaaaagaagagtaaactaaatcaaaaacaggaaaaaggaggagataacaaatattatagcagaaacattgataatcagtagagaaagccaatgaaaccagaagtttttcccagaaaagatcaacaaaaatgacacatctttagctagttgaccaagaaaatgaagaaagaagactt

SEQ ID NO: 145089 - DNA, 422 bp, Homo sapiens
ttcaggttactcacgttttgaaagcaagattccaactggaaacgttggtcttgagagcctaagttctcaaccactacatctagccctatatattgggagcagatagtttcaatttcaatacagttaatctatttttagataatgttaatctgtttttaaaaacctatcagttgcaaacagctaaaggtcatcctatgccatttgcatttttatacagggtcaccgagtgagatatatatgatatatatattacatatayatgtgagatctatatataaaagattcatattttgtgatgtatttgacatatgaatatatgtcaaatatatttgagatatatatatttatatatgatatatacatttatctcatatatgagatctatatataaaagatttggcctgacgcggtggctcacccct

SEQ ID NO: 145090 - DNA, 541 bp, Homo sapiens
agagtggaatcccacaattaaaattttgtttacctattttgtccctagattaattcctgtttacactaaaaatagtaataagtgggggagtcttcagatttcttaaatattcctggagagatgaatacaaaactttggaattgttgttagcaaatctgttttgtttttatttttattctgtttttagaattttcttttccttggatttataatattttattagtctatttaagatatttgccttttcttgtatttctgctggtctctcaatctgaaacaattttgtttagttgtttttccagctcagagatttttttctctctattattttatattatattccttytgtatgtattttccaagtagacaactgttgaaaatcttagacaaatgttggaactcctggctctattcttcatctttccatgtttttcatcattttgttcttttagttcatgttctggaagaaatgctcagttccatcttctaagttagttgtttaatcttctgtcatgtatcccccactccctgctattttacc

SEQ ID NO: 145091 - DNA, 584 bp, Homo sapiens
attgacactcactgagaaaaaaaaataaatgtgagactcatgatactgattttgaacaaaatttgctgcatcttggagcaatagaggcttacacttgctatgagtttatcagaaacattgtcatcagaacaaacctaaattaactcctattttaagaagtctaaaccagtcagtccagcttatgcagaaatatattatcatagcaattatattaaatgattggtctaaagtatttttaaaagcagatatttgtgtcattttactcaattattttgggggaacatctaaaatatattttatggctcaaaatgggtttccaatattrtaatcttaatatatgatgttgtaattgtgggaaacagggtttaacttgaggtttactgatttacgactatcatccaagaaataataaaataattagataatatattggtttctttgaagagaaagtatgggtggtgaatgatgtattcttacaaacaatacaggaggaattcataggcagtggtttgtctaaacaaagaagggttgtagtaacccgcagtttttcttacaatcaatatgaacctgggaaatggcactac

SEQ ID NO: 145092 - DNA, 584 bp, Homo sapiens
attgacactcactgagaaaaaaaaataaatgtgagactcatgatactgattttgaacaaaatttgctgcatcttggagcaatagaggcttacacttgctatgagtttatcagaaacattgtcatcagaacaaacctaaattaactcctattttaagaagtctaaaccagtcagtccagcttatgcagaaatatattatcatagcaattatattaaatgattggtctaaagtatttttaaaagcagatatttgtgtcattttactcaattattttgggggaacatctaaaatatattttatggctcaaaatgggtttccaatattgtaatcttaatatatgatgttgtaattgtgggaaacagggtttaacttgaggtttactgatttacractatcatccaagaaataataaaataattagataatatattggtttctttgaagagaaagtatgggtggtgaatgatgtattcttacaaacaatacaggaggaattcataggcagtggtttgtctaaacaaagaagggttgtagtaacccgcagtttttcttacaatcaatatgaacctgggaaatggcactac

SEQ ID NO: 145093 - DNA, 537 bp, Homo sapiens
ttgtctgaaaaatcaagtatatctactatttattttctgcttggccttttttagcttttatttttttacaaatgtatgtttatgatactctctggccttcttactgttgctgccctcactttcacaccctcatgtcaggtggaagccctgccatccttccacttgctgagactgtgtggaacacytctgtgcagctgtggaattctaatggggaaagtaaaccatgaggagtgtatccagtttggactatggccttctttcaactccagctctcatattttcaagttaaatggatcaaatctcctctacttgctcccttgcttgccttcttaagcaaaggagacaaaagacatcttttggacccaattgcactgcagtatggtaattatttctcatgacattttttcggaatgtgaatagcacctattgatatttttatgtacagattcttacttttatgttatattgataattttctttggactctggaaagggtgggaagtgaggtgggttagaagacaaggttcaactggctat

SEQ ID NO: 145094 - DNA, 477 bp, Homo sapiens
cttaaatatatgagaacatattactcctttcactactctatgtgcaatttttcaagatatacaaatatcattgaaatatttaagcgctttgtgaacatatcattgaaaggccttaaacatctttgcaaatattattgtgaaaacacttgtaggatcaggaataaactcttctgataaacaaatcagctcagtcactgtgtaatactaactctagtagaacatggctaaatataattagatcctcttaaaagaataagccctaaataatacttcttgtcatttctttcaaattgtttaagtatttgagagattaaatattctaatggattattttcaagttttgaatcttatttttagtagtaagactttaagtattattggcaaggaaaactaagtgaaagtcgctccttatctgggaatgacagttaccaaattgayaaaacagagtttgactgtgaaggataattgtttttatgt

SEQ ID NO: 145095 - DNA, 415 bp, Homo sapiens
gatataaagacaacacaaacatttcaattttaggagtttattcaaaaaatcttaattatatgctcttattcacatttagaacatttgcagttattaaaacacaacaatgctaaatgtgctttatatctttctatgtcatttctcrtacattgtaaaggttttttttcaaaataagttaaaccaatattataaatagaaatgttaatacacaccttaataaagacataaaatatattcaaaagtagtatattaaactagtatttatttgacattattatcttccaattaattgtgtactttagtaaaagagccaaaagcctctccttattacttaggataatcaggtatgttggcagattcatgttatattaaaagcttcctttttattttatggaaaattaattttatgaaatag

SEQ ID NO: 145096 - DNA, 608 bp, Homo sapiens
ttggccagtcttaggagagagattaacaaacctctaaatcgacacgtttaacggtacagatccaatgccaagtatatcaaattaagacccaagatcttgttataagtgattgtgtctatcgctctgtgtgtgtgtgtatgtgtgtgtgtgtatgtgtgtgtgtgcacgtacttggctttgtttttctatacagctatcattcattgacgaatgaggaactcagtaaaacacagaagtactctaagtgtttaagaatgtkaagggcaaactccctacttctctctctattaataaagtggtttcatttgtttcactagtttgaagtctatggtttaccagtaatattaccaataaaaattttcaagcagctgtcacaaaaaatatgaccttccaccacagcttctgatgctagtgcttaaaagttatgaacccatgaatggaacactgtgtgtgttcaacttctgggttggttggatttaggtaatgagaatccagaaatctttcattgttataggaagacattcatttggatataaacatacaatagactacatcactttaatgacatgatgacctctttctagcatatacagagcaggggaaatcag

SEQ ID NO: 145097 - DNA, 608 bp, Homo sapiens
ttggccagtcttaggagagagattaacaaacctctaaatcgacacgtttaacggtacagatccaatgccaagtatatcaaattaagacccaagatcttgttataagtgattgtgtctatcgctctgtgtgtgtgtgtatgtgtgtgtgtgtatgtgtgtgtgtgcacgtacttggctttgtttttctatacagctatcattcattgacgaatgaggaactcagtaaaacacagaagtactctaagtgtttaagaatgtgaagggcaaactccctayttctctctctattaataaagtggtttcatttgtttcactagtttgaagtctatggtttaccagtaatattaccaataaaaattttcaagcagctgtcacaaaaaatatgaccttccaccacagcttctgatgctagtgcttaaaagttatgaacccatgaatggaacactgtgtgtgttcaacttctgggttggttggatttaggtaatgagaatccagaaatctttcattgttataggaagacattcatttggatataaacatacaatagactacatcactttaatgacatgatgacctctttctagcatatacagagcaggggaaatcag

SEQ ID NO: 145098 - DNA, 608 bp, Homo sapiens
ttggccagtcttaggagagagattaacaaacctctaaatcgacacgtttaacggtacagatccaatgccaagtatatcaaattaagacccaagatcttgttataagtgattgtgtctatcgctctgtgtgtgtgtgtatgtgtgtgtgtgtatgtgtgtgtgtgcacgtacttggctttgtttttctatacagctatcattcattgacgaatgaggaactcagtaaaacacagaagtactctaagtgtttaagaatgtgaagggcaaactccctacttctctctctattaataaagtggtttcatttgtttcactagtttgaagtctatggtttaccagtaatattaccaataaaaattttcaagcagctgtcacaaaaaatatgaccttccaccacagcttctgatgctrgtgcttaaaagttatgaacccatgaatggaacactgtgtgtgttcaacttctgggttggttggatttaggtaatgagaatccagaaatctttcattgttataggaagacattcatttggatataaacatacaatagactacatcactttaatgacatgatgacctctttctagcatatacagagcaggggaaatcag

SEQ ID NO: 145099 - DNA, 472 bp, Homo sapiens
aaaagcagaagataagaacagggaaaagttaatcaggtcactgcataggtatacagccatttctggttatgcaaggttctgccatgagtttgtgcraaaaatgaagcagctccacttacgcatatatatctgcaacataatgagtatggagagagaagaaccagctgcaatagaaaacatcactcacttattgaaccaacaaatatttatcatgtactttttagatgtcaatttctgttgtgttgttcaatatggtagccatgacctgtgttgtccaatatggtagccatcagccaagtgtggttattaaaattaaattaaaaatccagtttctcagtattactaactgcatttcaagtgctcaattggcacatgtagctaatgctgccttattggaaagcacatacatagaacattatgatcattgcagacttctattggacagtcctagtctccaaatagggatacagca

SEQ ID NO: 145100 - DNA, 472 bp, Homo sapiens
aaaagcagaagataagaacagggaaaagttaatcaggtcactgcataggtatacagccatttctggttatgcaaggttctgccatgagtttgtgcgaaaaatgaagcagctccacttacgcatatatatctgcaacataatgagtatggagagagaagmaccagctgcaatagaaaacatcactcacttattgaaccaacaaatatttatcatgtactttttagatgtcaatttctgttgtgttgttcaatatggtagccatgacctgtgttgtccaatatggtagccatcagccaagtgtggttattaaaattaaattaaaaatccagtttctcagtattactaactgcatttcaagtgctcaattggcacatgtagctaatgctgccttattggaaagcacatacatagaacattatgatcattgcagacttctattggacagtcctagtctccaaatagggatacagca

SEQ ID NO: 145101 - DNA, 472 bp, Homo sapiens
aaaagcagaagataagaacagggaaaagttaatcaggtcactgcataggtatacagccatttctggttatgcaaggttctgccatgagtttgtgcgaaaaatgaagcagctccacttacgcatatatatctgcaacataatgagtatggagagagaagaaccagctgcaatagaaaacatcactcacttattgaaccracaaatatttatcatgtactttttagatgtcaatttctgttgtgttgttcaatatggtagccatgacctgtgttgtccaatatggtagccatcagccaagtgtggttattaaaattaaattaaaaatccagtttctcagtattactaactgcatttcaagtgctcaattggcacatgtagctaatgctgccttattggaaagcacatacatagaacattatgatcattgcagacttctattggacagtcctagtctccaaatagggatacagca

SEQ ID NO: 145102 - DNA, 472 bp, Homo sapiens
aaaagcagaagataagaacagggaaaagttaatcaggtcactgcataggtatacagccatttctggttatgcaaggttctgccatgagtttgtgcgaaaaatgaagcagctccacttacgcatatatatctgcaacataatgagtatggagagagaagaaccagctgcaatagaaaacatcactcacttattgaaccaacaaatatttatcatgtactttttagatgycaatttctgttgtgttgttcaatatggtagccatgacctgtgttgtccaatatggtagccatcagccaagtgtggttattaaaattaaattaaaaatccagtttctcagtattactaactgcatttcaagtgctcaattggcacatgtagctaatgctgccttattggaaagcacatacatagaacattatgatcattgcagacttctattggacagtcctagtctccaaatagggatacagca

SEQ ID NO: 145103 - DNA, 606 bp, Homo sapiens
gtgataactcttaagacaagaggcacaggactttctcaaaggtaggaaagatctgcttgcatatatctcaaaatatttagcaatgtggaatagaaatagggatgatacgaaaggttttgcttgcatgtaactgcaataataacttagtcaacttttattgctctcagataagtagattttacaaggaaggtgtggtaacaaccacactgcccagagaattgcctactggggtacacctcacatgtctctaaaacaattgctccatccttattgtagggtcttgtattcagagcatatccctgagtttatttgtgcattgcatatatttctatatgataagcctataaaatagagcatcccagccagatcaaaagaaatgtagttgagtaaactaatggtagcycaaaatctgatggaatctcaggaactaaggtaattaaactatgtggggaataagtcttgagctctcggcattatcaagagcttgggaactcagatcagaagatacaattagctgcctttgcaaacacattgttagaaggcaaagaataatagacttaaatcagttttgtattctgaattacaatcttgctcttacattaatgg

SEQ ID NO: 145104 - DNA, 531 bp, Homo sapiens
ggccctggagatgacaggtccgttacagacttctgcttctaaatgtactgaacatggcagaagcaataacaactttggtggcttaattctgtgatatgattttgaaagttgatcatggaattatcacagctgtacttctctgttctttcctgatattatgtaaagtcacaggcacccatgaagctgactgaggtaaataaaagcatttaaaaaatcaattatctttaaagaaatttcattatatgcagaaatttaagaattattaaataagtagaagtgcatcaaatcawaaagcaacctatggaatgggagaaaatatttgaaaccatatatccaataagaggttagtatccaatgtatgtaagaaattcgtacaactgaatagcaaaaactcagtccaattaaaaatgagcaaaagacgtgaatagacgactttataaagaagaacatacaaaaggccaagagttgtatgaaaacacgctcaacatcactaataatcagggaaatgcaaattaaaaccacaatgagata

SEQ ID NO: 145105 - DNA, 531 bp, Homo sapiens
ggccctggagatgacaggtccgttacagacttctgcttctaaatgtactgaacatggcagaagcaataacaactttggtggcttaattctgtgatatgattttgaaagttgatcatggaattatcacagctgtacttctctgttctttcctgatattatgtaaagtcacaggcacccatgaagctgactgaggtaaataaaagcatttaaaaaatcaattatctttaaagaaatttcattatatgcagaaatttaagaattattaaataagtagaagtgcatcaaatcaaaaagcaacctatggaatgggagaaaatrtttgaaaccatatatccaataagaggttagtatccaatgtatgtaagaaattcgtacaactgaatagcaaaaactcagtccaattaaaaatgagcaaaagacgtgaatagacgactttataaagaagaacatacaaaaggccaagagttgtatgaaaacacgctcaacatcactaataatcagggaaatgcaaattaaaaccacaatgagata

SEQ ID NO: 145106 - DNA, 531 bp, Homo sapiens
ggccctggagatgacaggtccgttacagacttctgcttctaaatgtactgaacatggcagaagcaataacaactttggtggcttaattctgtgatatgattttgaaagttgatcatggaattatcacagctgtacttctctgttctttcctgatattatgtaaagtcacaggcacccatgaagctgactgaggtaaataaaagcatttaaaaaatcaattatctttaaagaaatttcattatatgcagaaatttaagaattattaaataagtagaagtgcatcaaatcaaaaagcaacctatggaatgggagaaaatatttgaaaccatatatccaataagaggttagtatccaatgtatgtaagaaattcgtacaactgaatagcaaaaactcagtccaattaaaaatgagcaaaagacgtgaatagacgactttataaagaagaacatacaaaaggccaagagttgtatgaaaacasgctcaacatcactaataatcagggaaatgcaaattaaaaccacaatgagata

SEQ ID NO: 145107 - DNA, 536 bp, Homo sapiens
acaaagacatggaagaagcagtgccagaagcaagttgctataagttaatctagcagaggggttctcatttttcaagatgtttttgacttcttttacaacatggatccttgtatgatacaaaactaaagcatatggtggaaggaagattagtactgtatagaaatattttcagagaaatgaaaaagtaaaaagtcatatattatgatgaatttcyataaagttaccccaactgtgcctggctcctctgcctccccttctacctcctccatctcatctaactcttgccactcctgaaacagggagacaaactctcctctttctcctcctcctcctcagcctacttaacatgaagatgacgagaatgaagacatttatggtgatccattttaacttgatgaatagtaaatacattttcgcttccttatgattttgtaacaacattttctttagtttacagtatataatgcatatattgtaacaatacaatatataatagatacacaaaatacgtgttaattgactatgttattggtcag

SEQ ID NO: 145108 - DNA, 647 bp, Homo sapiens
aagcaattcccctgcctcgacctcctgagtagctgggattacaggtgcacaccaccatgcctggctaaaatttttggatttttgtagagaygtgttttcaccatgttggccaggctggccttgaactcttgacctcaggagatctgcctaacttggcctcccaaagtgctgggattacaggcgagagccaccacacccggcctttggtgtggtatttaaacaacatttatgggagaaaaagaatcaggcattcgcatcagagagttcactccccacaccaaaatggctagagacaacaaaaaacaaaacaaaacaaaatggctgcaggggcactgagttgggatcaaagcctcatgttgacattttcatcttaaatcacaagtagaagaatggtgatagggagaaaggagagcgcagttgagtgcagtacaggaccatttagcagaaaaatctgttgaagagacggtcctgcttccatagctccaatcccctacttctggatggctgaggtcctgtatattctgtattccattgcatgcaggtgaacaactggggtttgtctagaacggtttcaaaaatttaattcatttccttattgaccactataatctactaacttaggaaatagggcagatggcatagagaga

SEQ ID NO: 145109 - DNA, 647 bp, Homo sapiens
aagcaattcccctgcctcgacctcctgagtagctgggattacaggtgcacaccaccatgcctggctaaaatttttggatttttgtagagacgtgttttcaccatgttggccaggctggccttgaactcttgacctcaggagatctgcctaacttggcctcccaaagtgctgggattacaggygagagccaccacacccggcctttggtgtggtatttaaacaacatttatgggagaaaaagaatcaggcattcgcatcagagagttcactccccacaccaaaatggctagagacaacaaaaaacaaaacaaaacaaaatggctgcaggggcactgagttgggatcaaagcctcatgttgacattttcatcttaaatcacaagtagaagaatggtgatagggagaaaggagagcgcagttgagtgcagtacaggaccatttagcagaaaaatctgttgaagagacggtcctgcttccatagctccaatcccctacttctggatggctgaggtcctgtatattctgtattccattgcatgcaggtgaacaactggggtttgtctagaacggtttcaaaaatttaattcatttccttattgaccactataatctactaacttaggaaatagggcagatggcatagagaga

SEQ ID NO: 145110 - DNA, 609 bp, Homo sapiens
taaataacttaatttggaactgttatgtctctcataaaatggtaaaaggaaatcaatttatgtggaaagcattgggataataayatagatcaccttgaagacagagcagacaacccaaggaggatcttcattcaatgagcagtttcaaaaactgggccttggtaactccagtcaattggcagcccttgctaagatgcaagtttggtctaacaggagggaatagggctgactgttggaaccagcggtaaaataagtaagtgaagggcatggactcaatctggtttccaggaagttttcaaagcatgaagctggagagcaggcaccaattggctttcacagggcataggagaaaaacccagtaggcccccgcaaaatctcagccttcttcctccaaatctaaacagagggcccaatctcttaaattaagagaacaattaacattttcaaacatttcggtggaaactaataactgttttctggacaccgttttctctaactaggtgagtagaagcttttaccaaaaaaatgttttgtattattaacaataatggtaataatttgtaacatgattgaacagcaactgtatgtcaagtttgtcataactactat

SEQ ID NO: 145111 - DNA, 609 bp, Homo sapiens
taaataacttaatttggaactgttatgtctctcataaaatggtaaaaggaaatcaatttatgtggaaagcattgggataataatatagatcaccttgaagacagagcagacaacccaaggaggatcttcattcaatgagcagtttcaaaaactgggccttggtaactccagtcaattggcagcccttgctaagatgcaagtttggtctaacaggagggartagggctgactgttggaaccagcggtaaaataagtaagtgaagggcatggactcaatctggtttccaggaagttttcaaagcatgaagctggagagcaggcaccaattggctttcacagggcataggagaaaaacccagtaggcccccgcaaaatctcagccttcttcctccaaatctaaacagagggcccaatctcttaaattaagagaacaattaacattttcaaacatttcggtggaaactaataactgttttctggacaccgttttctctaactaggtgagtagaagcttttaccaaaaaaatgttttgtattattaacaataatggtaataatttgtaacatgattgaacagcaactgtatgtcaagtttgtcataactactat

SEQ ID NO: 145112 - DNA, 609 bp, Homo sapiens
taaataacttaatttggaactgttatgtctctcataaaatggtaaaaggaaatcaatttatgtggaaagcattgggataataatatagatcaccttgaagacagagcagacaacccaaggaggatcttcattcaatgagcagtttcaaaaactgggccttggtaactccagtcaattggcagcccttgctaagatgcaagtttggtctaacaggagggaatagggctgactgttggaaccagcrgtaaaataagtaagtgaagggcatggactcaatctggtttccaggaagttttcaaagcatgaagctggagagcaggcaccaattggctttcacagggcataggagaaaaacccagtaggcccccgcaaaatctcagccttcttcctccaaatctaaacagagggcccaatctcttaaattaagagaacaattaacattttcaaacatttcggtggaaactaataactgttttctggacaccgttttctctaactaggtgagtagaagcttttaccaaaaaaatgttttgtattattaacaataatggtaataatttgtaacatgattgaacagcaactgtatgtcaagtttgtcataactactat

SEQ ID NO: 145113 - DNA, 521 bp, Homo sapiens
tttcatttggttcattttttttcaaggattgaattccatatcagtttttcactcmcttgaggagcatctctggggactgtgagaatgtgccttgcagacctccccacttcagggagaggacttaaccaagggtcccaaactgcatttggaaatccatcacctcatttgagctgaggatgtgcctgctacagctgctcacaagcagtgaatgagcatggcagggatactaaggccaatctgttcctggaggacccgagctatccccgacagctgactttggcttaaagacaacacagaggctttggcaaactgaaccttccttagactgcagggcagtttaggatatgtcccctctattgtcatctctaccttcccttcatccagtattaaacttgcacggtgatctgatcactctcctagacttattcagctgctccaggcttaactggctccttctctctttgctttcatgcaggtattcctcctaatatagatactaggatatttatttatttgtacat

SEQ ID NO: 145114 - DNA, 481 bp, Homo sapiens
cagtttttcactcacttgaggagcatctctggggactgtgagaatgtgccttgcaracctccccacttcagggagaggacttaaccaagggtcccaaactgcatttggaaatccatcacctcatttgagctgaggatgtgcctgctacagctgctcacaagcagtgaatgagcatggcagggatactaaggccaatctgttcctggaggacccgagctatccccgacagctgactttggcttaaagacaacacagaggctttggcaaactgaaccttccttagactgcagggcagtttaggatatgtcccctctattgtcatctctaccttcccttcatccagtattaaacttgcacggtgatctgatcactctcctagacttattcagctgctccaggcttaactggctccttctctctttgctttcatgcaggtattcctcctaatatagatactaggatatttatttatttgtacata

SEQ ID NO: 145115 - DNA, 521 bp, Homo sapiens
tttcatttggttcattttttttcaaggattgaattccatatcagtttttcactcacttgaggagcatctctggggactgtgagaatgtgccttgcagacctccccacttcagggagaggacttaaccaagggtcccaaactgcatttggaaatccatcacctcatttgagctgaggatgtgcctgctacagctgctcacaagcagtgaatgagcatggcagggatactaaggccaatctgttcctggaggacccgagctatccccgacagctgactttggcttaaagacaacacaraggctttggcaaactgaaccttccttagactgcagggcagtttaggatatgtcccctctattgtcatctctaccttcccttcatccagtattaaacttgcacggtgatctgatcactctcctagacttattcagctgctccaggcttaactggctccttctctctttgctttcatgcaggtattcctcctaatatagatactaggatatttatttatttgtacat

SEQ ID NO: 145116 - DNA, 578 bp, Homo sapiens
accgaactattaaccagtcaatcacaagattttgcttcccatatgcttagaaatagcaaatgacacactyatggaatcacctctttttgtagcagatgtcttaacatgataaaatccatagattatattagcaatggatataaaacattattattcttaaaagtactttaaatcctatgggaacatggttaaacatagctcaccaatctaatgaaattattatccatgatacaattttcaacagaaaattgtagaatacaaatcaaatgtcaacccaagagggaaaaccatgcaaataaattgctgaagaaacactgcgatggttaattttgtgtgtcaatttgagccacgagatgcctacatatctaatcaaaccaaactgggtgtttctgtgagggtgttaaccagaagagaatagcatttgaataaaacagatggccctccccaatgggggtgggtatcaaccaatccacttagggcccgaatagaacaaaaaagcagaaggttagactcattctccctctgcctaactgctggagctgagctatcaaacttttgctttgtatgctttattctca

SEQ ID NO: 145117 - DNA, 578 bp, Homo sapiens
accgaactattaaccagtcaatcacaagattttgcttcccatatgcttagaaatagcaaatgacacacttatggaatcacctctttttgtagcagatgtcttaacatgataaaatccatagattatattagcaatggatataaaacattattattcttaaaagtactttaaatcctatgggaacatggttaaacatagctcrccaatctaatgaaattattatccatgatacaattttcaacagaaaattgtagaatacaaatcaaatgtcaacccaagagggaaaaccatgcaaataaattgctgaagaaacactgcgatggttaattttgtgtgtcaatttgagccacgagatgcctacatatctaatcaaaccaaactgggtgtttctgtgagggtgttaaccagaagagaatagcatttgaataaaacagatggccctccccaatgggggtgggtatcaaccaatccacttagggcccgaatagaacaaaaaagcagaaggttagactcattctccctctgcctaactgctggagctgagctatcaaacttttgctttgtatgctttattctca

SEQ ID NO: 145118 - DNA, 586 bp, Homo sapiens
cccttggtatacataggggatttgttccaggacttcctgcacataccaaaatctgcatatactaatgtcctgcattcaaccctgtggagcccctaagatataaaaagttggccatctaaatcgacgggttttacattccatgaatactgtattttcaattgcatttggttgctaatgtcaaatctgtagatagtggagggcaaactatatattaaaaaaaaaatctgcatataagtgaacccatacagttcaaacccatgttgttcaagggtcaactgtagtaggaaatggagatattcaatttggaaacctaaatgcaataggagtaatkctattctgggagtaataaaagtaattggatgtaagtggaggcaggcactcaatggccaaaggcaaggtgggcacgcttactgtaagggacagcaaaggcaaagcagcaattggatagtctgacttgtgcagacctatgacattgatttattgattatggtgttcctacaataatcaattagtcagatagataggaagcctactaaagtcttacttgatctctatatgcaaaaatgttctaagtcaagtgaacaaa

SEQ ID NO: 145119 - DNA, 602 bp, Homo sapiens
tccattgaaaaagtctagtgcttactgtctctcttcacattgttactaggtttctgttcttccctctcagactgttttctttccaattatttcatccctcactcaccctggctagaacaactttggttttctacctctcattttctatcacaaarttctgtaaaatctacctttccaaaattaaaattttgaccctgcttttccctctgtattcccaaggaattaatttgtatccacttactcgaattattataattttctgtttctgtccatttatatgagatgtccactaggcagatatatatagaaaaagttatattggggtgggaggaaagggagataaggtgaatatggctaatgggtacaagacatatttttgaagtgatgaaaatgtgcaaaaattagattgtggtgatggttgcataactctgtgaatacactaaaatccttttaattttaccctctataatggtgaattatatcccaataaagctaattaaataaaacccaagggatagaaaaaggtagtctgagatttcacactacttgcaagtaaaccagttagcctgccacagactcaaggatgatggcaaaagatacag

SEQ ID NO: 145120 - DNA, 602 bp, Homo sapiens
tccattgaaaaagtctagtgcttactgtctctcttcacattgttactaggtttctgttcttccctctcagactgttttctttccaattatttcatccctcactcaccctggctagaacaactttggttttctacctctcattttctatcacaaagttctgtaaaatctacctttccaaaattaaaattttgmccctgcttttccctctgtattcccaaggaattaatttgtatccacttactcgaattattataattttctgtttctgtccatttatatgagatgtccactaggcagatatatatagaaaaagttatattggggtgggaggaaagggagataaggtgaatatggctaatgggtacaagacatatttttgaagtgatgaaaatgtgcaaaaattagattgtggtgatggttgcataactctgtgaatacactaaaatccttttaattttaccctctataatggtgaattatatcccaataaagctaattaaataaaacccaagggatagaaaaaggtagtctgagatttcacactacttgcaagtaaaccagttagcctgccacagactcaaggatgatggcaaaagatacag

SEQ ID NO: 145121 - DNA, 602 bp, Homo sapiens
tccattgaaaaagtctagtgcttactgtctctcttcacattgttactaggtttctgttcttccctctcagactgttttctttccaattatttcatccctcactcaccctggctagaacaactttggttttctacctctcattttctatcacaaagttctgtaaaatctacctttccaaaattaaaattttgaccctgcttttccctctgtattcccaaggaattaatttgtatccacttactcgaattattataattttctgtttctgtccatttatatgagrtgtccactaggcagatatatatagaaaaagttatattggggtgggaggaaagggagataaggtgaatatggctaatgggtacaagacatatttttgaagtgatgaaaatgtgcaaaaattagattgtggtgatggttgcataactctgtgaatacactaaaatccttttaattttaccctctataatggtgaattatatcccaataaagctaattaaataaaacccaagggatagaaaaaggtagtctgagatttcacactacttgcaagtaaaccagttagcctgccacagactcaaggatgatggcaaaagatacag

SEQ ID NO: 145122 - DNA, 369 bp, Homo sapiens
attccaataaaactttataaaaaacaggcaacagaaaggatttggtccacgagttgtttactgtccctggtctacatcattctaaatactgacgaaataaatacttttctaagaagttcttctccaatttggaaaactttttaaagctaaacagatgacagttttcaaactttataggtatacctacctagtggtatatattttattagtacgacttatacaattaagccattcmtgatagaaatacacaagtttttaaaagagggaaacttacttataatcttcatttgctgctgtaaaaatgaaagcttccatagggttccaacagattgtatttgttctcatatctaagataacctgagaaaggaa

SEQ ID NO: 145123 - DNA, 322 bp, Homo sapiens
aaaacagaaatcaaactctactacaatgaataccaaaaaaaaaaaaaaytgttaaaattctttagcatcaaaggactttagctgcattaaatattgcgtaaatgggtcaacaattacagcctaaagtctttcgtttcttatctgcatcttcttccccatcttaggaaattataactataaaataattttaaataaaagaatgttaataggcaagctattagtcaatttacttttgtacctttcctaatattgtatgtaatggctcttcctcgtctccatagcctggcccatccattttccactgcttcacagttttgtcatc

SEQ ID NO: 145124 - DNA, 549 bp, Homo sapiens
tgctacttgcctagggcacagcattgtctcattagaaatcctcagctctaaagacgtgggtgtgcccaccttcatacacccatttgacataagacatgactgaatttcagaggtgttttgccctacaagcacttactagagacataattgattattatagaataccaacagatttggagcaattaatttcttctaccttatttactctaacttaagcaaaacatgattagtaaaagtattttaagatatgtatttcctctagaaaatatttcacatttttttctcataaaatgaatcatagtgatttgaaagtcccagatggataaayaggaaacttgttacagctgaaattgaattcattcattataaatcagattggataatgctattcaaagcttcatatttcacctggaaagaaatctaattaacaagattgctttttacaaattaatttcctgactattttcttatagagttgaaactaaactcaaatatatttgttctaattacttaatacttatattcgagcttgaaactcttatatttggg

SEQ ID NO: 145125 - DNA, 660 bp, Homo sapiens
  misc_feature (1)...(660): n = A,T,C or G
nnnnnnnnnnnnnnnnnntattttcattcctcttctctatgtccattatcatgttataggaaatgtgtwttttctgtgctgcttccaattcttttctatttctttccagagttttggcagtaattcatgttttgcctccttgtatcttttccccatgtcatctccaagctcttatattgtgtatttcttttacagtgttgattgtttcactgatttctaaaacttgtaaaaatgatacgttttgtcaaacatgttatctaccctatagcaatattttctgggagggattctgtgtcatttgtttgtcttgtttctcttcttttctttttcttgtagctttattgtataggtcctcagttccactttaaaattgctattcattttttgatgagttgaattgcttctgaaccaactattgtgtaagagttcatgtaagtgagaagccagagtattgttccagcgtaacaggaattcttattttgacacaggattgtgcatacgacctctttcaatcttttctctaactaattatcaacacagggctaagaagaaagcagagcctcttctttttcactttatttacaaatagatttaccaaatacctctgtagtttgtctgagtgaatgctcatttagttatacctccccctgatttttgaga

SEQ ID NO: 145126 - DNA, 660 bp, Homo sapiens
  misc_feature (1)...(660): n = A,T,C or G
nnnnnnnnnnnnnnnnnntattttcattcctcttctctatgtccattatcatgttataggaaatgtgttttttctgtgctgcttccaattcttttctatttctttccagagttttggcagtaattcatgttttgcctccttgtatcttttccccatgtcatctccaagctcttatattgtgtatttcttttacagtgttgattgtttcactgatttctaaaacttgtaaaaatgatacgttttgtcaaacatgttatctaccctatagcaatattttctgggagggattctgtgtcatttgtttgtcttgtttctcttcttttctttttcttgtagctttattgtataggtcctcagttccactttaaaattgctattcattttttgatgagttgaattgcttctgaaccaactattgtgtaagagttcatgtaagtgagaagccagagtattgttccagcgtaacaggaattcttattttgacacaggattgtgcatacgacctctttcaatcttttctctaactaattatcaacacagggctaagaagaaagcagagcctcttctttttcactttatttacaaatagatttaccaaatacctctgtagtttgtctgagtgartgctcatttagttatacctccccctgatttttgaga

SEQ ID NO: 145127 - DNA, 454 bp, Homo sapiens
tctgataccatccctccccagccccagacccagaatgaccactcagaatagcccatcttgcagaccatgtgattagtttcaaataggtatgtgacccaaagtgggccagattcttccttaaaatttaatacatggctgggagcagtggctcacatctgtaatcccaggatytggggaggccaagatgggtggatcacttgagtccaggagttggagaccagcctgggcaacatggcaaaaccccctctctgcaaaaaatacacacaaaaaaatagctgggtatggtggtgtgcatttgtatccccagctactcaggaggctgaggggggaggatcacctgggcctgggaggtggaggttgcagtgagcagtgatcaggccactgcactccaaactaggtgatagagtaagactctgtctcaaaaaaaattaatatagatgctggaagagtgagg

SEQ ID NO: 145128 - DNA, 497 bp, Homo sapiens
agaattagcacccaggccctttgattccaaagacggtgcccttaaccactgtgcatcctgcctgtctccttgaagtaagcacagtaaaatgtgtgtgcgtgcatgcctggagaatgaggtccagtgtttagaagcagccaccttacccgagccagacgcagaagcrtagtcatcgtcatcaataggatacactcctgaagcttcttcaatggagctgttgtcaaggtacatgtctttatcagatgtcagctctgctctctgagaaaggaaagacaagggagtcaggatgttgagagattaagaaacacacttgtatatctgattgttcaggtacatactgcagtgactacccctcccactcccacagtagtctgaatccacatctctggccacagtcttcctcaggcaccctgacaacttaacagcaatttgagaggtgagcacggactaataacctgcaagggaagcctacacagcttaaaccagtagaatgaaaa

SEQ ID NO: 145129 - DNA, 582 bp, Homo sapiens
atcaggttacatgaaggtagaatcacatttgggtggaaagtgggaggcacaaggatgactgggctggtcataaagatgtcaggtaataggcaactttggagaaattcctctagttccatgaagcttctgaaatgacccaaggtctgggagatgacagaattcctactgtaattattcacagtccttgaagtctgaaccacttacttggaaggtgccactgatgttggctgttcctgttggatgcctcttatagagtggggctcttcttataccactgagaaagcgagttccttgaagatgcccaagacccaggcctgagcctgatctttctgcgtcctctcccttgaccacygttgtgttctaggaaccaatatatggtaaaggctccacagaaagtagaagaaacccttttttctaaggggctgaatccaagctttacgccatttggtgaaaggaaataaccaagccctttaaagaaactacctggttaccccacaactgagaaaaacagatcaatgttctcttacatggtctcttttttaaaaagctggaattcggccttattctgaggggaactgccag

SEQ ID NO: 145130 - DNA, 594 bp, Homo sapiens
tccaccctggtagcagaagacaaagggcatataatcttgggagttctatggccccacccaccactggtccctcctccacactgatgctttctggaaaatgccacctcctggcaggaggccaactagcacaacaatagagcattaaaccaccaaagctaaagaccctcatggagtccattgcactctgccacctccactagaacaggtgctggtatccacagctgagagacccatagacagtttacatcataggattctgtggagataacaccagtaccagcccagagctgggtagacttgttggggggctagacccagaagagagacaacaatcatggcagttcagctcacaggaagccacatccataggaaaagggggtgtgtactacattaaggaaatgcctcatcagacaaaagaatctgaacarcagccttcagccctagactttccctttgacagaatctacacaaatgagaaggaaccagaaaaccaaccctggtaatatcacaaaacaagtctctttgacacccccaaattcaccagcaatggatcaaaaccaagaagaaatccctgatttacctgaaaaagaattc

SEQ ID NO: 145131 - DNA, 556 bp, Homo sapiens
attttatacatattgatggtccaatatgtattagatgtgtcagataatattctaggttatttctcatcttgaaccacttggtgagttagacatcgttaactatgtttttatcatctaaaaataactgaacatcaaagaacttaaatatgccaacatattcaaaattctgccatctttttattttaagttccaggatacatgtgcagaatgtgcagctttgtcacataggtatacatgtgccatggtgatttcctacacctatcaacctgtcatcaaggttttatggcccrcatgcattaggtatttgtcctaatgctctccctccccttgccctcacatcccccaacaagccccagtatgtgttgatcccctccctgtgtccatgtgttctcattgttcaactcccacttataagtgagaacatgcagtgtttggttttctgttcctgtgttagtttgctgaggataatgtcttccagctccatccatgtccctgcaaaggacatgatctcatttctttttatggctgcatggcattgcatggtatatatgcacca

SEQ ID NO: 145132 - DNA, 612 bp, Homo sapiens
ttaggaagttataatactgtgcatggttagtccaataattctttcacctaaaagttcccctctctagatgtcaaatgtatagatatttgctagtattaaattgctatgaaaataatcacaatattaactaggcatggtgactcatgcctacagtcccagcactttgggagtccaatgtaggaggatcacttgaggtcataagtttgagaccaggttgtgcaatataacaaaattcgtttctataaacaaaatttaaaaattatccaggcatggtggcacatgcttgtactctcagctactcaggaagctgaggtgggaggatcatttgagcccaggagtccaaggttacagtgagctatgatccagccactgcactccagcctgagagacrgagcaagaccttacctctaaaaaataaaaaataatgatcacaatattctatcaggcaaaatactggtaatgcccaagaacttaatttataacttacctctaaaaaataaaaaataatgatcacaatattctatcaggcaaaatactggtaatgcccaagaacttaatttataactggaaattagcccttcagattttttggccacagggatcataaagctt

SEQ ID NO: 145133 - DNA, 342 bp, Homo sapiens
ttaatttataactggaaattagcccttcagattttttggccacagggatcataaagctttatattgctccatttctgcaaatggaaattagtgtaaataaacagtgtacctaagaacatgatttaacccaaggtgcaacaaacaaataaacaacaatagtaacaacaaaatctctagcaatttsaaacttttagccaggactctggagagaatggtcatgaaaaagcaactggcatatatatatatatatatatatatatatatatatatatatatacacacacacacacacacacacacacacacacacactccactgcactccagcttgggcagcatagc

SEQ ID NO: 145134 - DNA, 342 bp, Homo sapiens
ttaatttataactggaaattagcccttcagattttttggccacagggatcataaagctttatattgctccatttctgcaaatggaaattagtgtaaataaacagtgtacctaagaacatgatttaacccaaggtgcaacaaacaaataaacaacaatagtaacaacaaaatctctagcaatttcaaacttttagccaggactctggagagaatggtcatgaaaaagcaactggcatatatatatatatatatatatatatatatatatatatatayacacacacacacacacacacacacacacacacacactccactgcactccagcttgggcagcatagc

SEQ ID NO: 145135 - DNA, 453 bp, Homo sapiens
ctcctcttagccacgatgttggctgccatgcaggtgtaatttcctgagtccgagagccgtgcctgcytgatgatcaggttatggtcagccctggtgtcaatgttctcgtcttgttcagagtcaatgggctcttcatttttcagccattccacctacaggaagaaaggaatgtttacaagtcactaaaaaaatcagaactcttttctggaattgaaaagtgagcagattcgggtgtgggagagagatgtatctaaaatatagagcaacagcaatgattggtttctttattccatatcctgtcccttttatttggtaaatttggttatattcaggaaatggatactcaagctaataagttgggagcaggaaaagaacacaaatatcctacattgactttgacccattttctaaaaatgcagtggaggagagaaaagaggtgactgcaattaggcc

SEQ ID NO: 145136 - DNA, 480 bp, Homo sapiens
tctcatgtaaaaatatcttaagcaacaacaatacagcaacatcaagactggtgtttgaccaaacaactaggcaccatgcctagtcaagatgacacataagattaaccatcataaagttagttacaagacagactcagtagctgctatcatgaaacttacaatctagtgrgcataattgcacctgcctagacagttttatttatttatttttttgtgagagttaattgaactattctacataaaattagtagcatcgtaattggtacagagaaaacctacagcaaatgtcagtttccacccttttatcttactgcccaatttttgtagttaaattagggtgaggaacaaggttaatactgctgctaagaggggtttctaaaaattcataaaatgataatagtacaaatggtaataaaaatatatgttatttataaagtgctctcagtgtaccagttactgttctaattgcttcatataaat

SEQ ID NO: 145137 - DNA, 497 bp, Homo sapiens
ttactgcccaatttttgtagttaaattagggtgaggaacaaggttaatactgctgctaagaggggtttctaaaaattcataaaatgataatagtacaaatggtaataaaaatatatgttatttataaagtgctctcagtgtaccagttactgttctaattgcttcatataaattaacacatttaattttcaaaatgaccctctgaactcatcttcatttgaaagttttaaaaactgaggcaaaatgaagttaagtcactgrcccaatttcacacagctagtaagagatagagttgggatttgaactacaacgtccagcttctctggtttatggtgaaggattcagagggaaagatgtggcctagatgaagctgttgtttcttttggcaacttcgatggcttagtactttccatccttcaagtctcaacttattttcacttcttttgttttccccttaatactcttactaccaatttgaatgacgttgcttatttatt

SEQ ID NO: 145138 - DNA, 497 bp, Homo sapiens
ttactgcccaatttttgtagttaaattagggtgaggaacaaggttaatactgctgctaagaggggtttctaaaaattcataaaatgataatagtacaaatggtaataaaaatatatgttatttataaagtgctctcagtgtaccagttactgttctaattgcttcatataaattaacacatttaattttcaaaatgaccctctgaactcatcttcatttgaaagttttaaaaactgaggcaaaatgaagttaagtcactggcccaatttcacacagctagtaagagatagagttgggatttgaactacaacgtccagcttctctggtttatggtgaaggattcagagggaaagatgtggcctagatgaagctgttgtttcttttggcaacttcratggcttagtactttccatccttcaagtctcaacttattttcacttcttttgttttccccttaatactcttactaccaatttgaatgacgttgcttatttatt

SEQ ID NO: 145139 - DNA, 510 bp, Homo sapiens
gatacaagttccataaaggcagataacttattcaccttattcatcattttaaacccagcatctagtacattgcatgggacacagtagatatgcattaaatatttagtaatgaataaactaaaaatgaattatcaagagaaaaggaaaatttgtacaatatataaataataagccactgaaaatttaggttctgctttacaaattttcatgccatgttcacaaattttaggacaacaaaatggagttgtgccrcttagcaactttcctgttctgtgcagttcctgtaagtgtaattaaagatcaatgaagcaagtgcttaaaatgcagccaacttaattgccacaattgtatgatttagattaataataaatttgctaatgatagtatagcattaaatattcaacatggttatcaaaagtcaattaagaaataattgtaagtcagtaagccacaagtaatgagaagaatcctcccttttttgaaaagttgttggcaggaaaaaggaatgag

SEQ ID NO: 145140 - DNA, 669 bp, Homo sapiens
tggtcatcattctgtttgtcatattcaaggaattcacaattgcagccttgtagtaatgtgccctgatgcaattttggtgtagtacattaagtgacctgggtggtaccctgggcttaaattttacctstattacatactatgtgattcagaacaaatcaaaatttccaaacctgttttctaatctttcaatttagttttataacatctagttttatgaattttgtgtgtaccatgtgattttttttttcagacagtgtcttgctctgttgcccaggctggagtgcagtggcacattcttggctcactacaacctctgcctcccaggctgaaatgatcctcctgcctcagcctcccaagtagctgggatgacaggcacacaccaccacacccagccattttttgtgtgttttttgtagagacagagtttcaccatgttgcccaggctaatctccaactgctgagctcaagggatctgcctgcttaagcctcccaactgcgccctgccccatgtgataattttaaaaaagtaaaatctaacatctgacacacagctggaccatagtaagcattgagtattaattatttgcagatttttgcataaatacattgtgaattgttttagttttactcacatagggcaattttaattttttcctatttgaataacac

SEQ ID NO: 145141 - DNA, 669 bp, Homo sapiens
tggtcatcattctgtttgtcatattcaaggaattcacaattgcagccttgtagtaatgtgccctgatgcaattttggtgtagtacattaagtgacctgggtggtaccctgggcttaaattttacctgtattacatactatgtgattcagaacaaatcaaaatttccaaacctgttttctaatctttcaatttagttttataacatctagttttatgaattttgtgtgtaccatgtgattttttttttcagacagtgtcttgctctgttgcccaggctggagtgcagtggcacattcttggctcactrcaacctctgcctcccaggctgaaatgatcctcctgcctcagcctcccaagtagctgggatgacaggcacacaccaccacacccagccattttttgtgtgttttttgtagagacagagtttcaccatgttgcccaggctaatctccaactgctgagctcaagggatctgcctgcttaagcctcccaactgcgccctgccccatgtgataattttaaaaaagtaaaatctaacatctgacacacagctggaccatagtaagcattgagtattaattatttgcagatttttgcataaatacattgtgaattgttttagttttactcacatagggcaattttaattttttcctatttgaataacac

SEQ ID NO: 145142 - DNA, 669 bp, Homo sapiens
tggtcatcattctgtttgtcatattcaaggaattcacaattgcagccttgtagtaatgtgccctgatgcaattttggtgtagtacattaagtgacctgggtggtaccctgggcttaaattttacctgtattacatactatgtgattcagaacaaatcaaaatttccaaacctgttttctaatctttcaatttagttttataacatctagttttatgaattttgtgtgtaccatgtgattttttttttcagacagtgtcttgctctgttgcccaggctggagtgcagtggcacattcttggctcactacaacctctgcctcccaggctgaaatgatcctcctgcctcagcctcccaagtagctgggatgacaggcacacaccaccacacccagccattttttgtgtgttttttgtagaracagagtttcaccatgttgcccaggctaatctccaactgctgagctcaagggatctgcctgcttaagcctcccaactgcgccctgccccatgtgataattttaaaaaagtaaaatctaacatctgacacacagctggaccatagtaagcattgagtattaattatttgcagatttttgcataaatacattgtgaattgttttagttttactcacatagggcaattttaattttttcctatttgaataacac

SEQ ID NO: 145143 - DNA, 669 bp, Homo sapiens
tggtcatcattctgtttgtcatattcaaggaattcacaattgcagccttgtagtaatgtgccctgatgcaattttggtgtagtacattaagtgacctgggtggtaccctgggcttaaattttacctgtattacatactatgtgattcagaacaaatcaaaatttccaaacctgttttctaatctttcaatttagttttataacatctagttttatgaattttgtgtgtaccatgtgattttttttttcagacagtgtcttgctctgttgcccaggctggagtgcagtggcacattcttggctcactacaacctctgcctcccaggctgaaatgatcctcctgcctcagcctcccaagtagctgggatgacaggcacacaccaccacacccagccattttttgtgtgttttttgtagagacagagtttcaccatgttgcccaggctaatctccaactgctgagctcaagggatctgcctgcttaagcctcccaactgcgccctgccccatgtgataattttaaaaaagtaaaatctaacatctgacacacagctggaccatagtaagcattgagtattaattatttgcagatttttgcataaatacattgtgaattgttttmgttttactcacatagggcaattttaattttttcctatttgaataacac

SEQ ID NO: 145144 - DNA, 580 bp, Homo sapiens
ctgtaaaagcaaatgggaaattttcaagatcaccttaaaatgtcagaatacctttagaaataaaatctgacaaatagcacacaaaaagacaaacctaaagaacaatgctttacatgtatatagataaccaatttaagtaaagtatcataaaatagataargtatcataaaatacaattcattcccatcttaataagaataatatgctgtggaaatgtggggttattgcaggaaacataattcaataccaggaatctgtcttcatcattataacaaccaattaaagaagaaaacaatttggttgtatgagtagatactgcaaatgaattttatattatttagctgttattttaaataatactttaagtaaaatataaatggaagtaactactacagtcttataattactacttttcaaactccatgccattcattgaacaatggtgaaacactgaatctatatcaataaaactataaagagctcacctgctgtcaccattattatttaacattgccttatgaatgtaatgagtcaaaagtgtaaaagctattataaaaattgaaaaaggaatgtaacatat

SEQ ID NO: 145145 - DNA, 514 bp, Homo sapiens
aatgtgaattgcttcaatttattagaaggtaaacaaggaacatctaataaaattataaataaatatcttcctcaagtgttaattctcatcagactatatctcatacaataagtcatgatagatatataaatataaacttatgccacattacatgtcaaagaaaacaaaaacctaaaaaataaaatataaatggaaacatagtaagtacctcttatctactgaatatctgagttaagcaacacamcatggaaaattgcagaatcattagaaacgatgaactagaactctcccagtacatttgtatgaagtgttattgaattcttttagccaaaaagcaggaaaaataaatataattgtgtctatttttataaaaaacaatggtaagtaaactttttatagatgcaaatgtatatattattatatgagtatgtgaacctacaggaaaacatgaaaatgtgtaaattatgttgttaagacttttgaagaatgaggaaaaatagggaggaagcaaata

SEQ ID NO: 145146 - DNA, 586 bp, Homo sapiens
tggtattgactgattagaacacagttggggccaagccaaacaaaacagattctctttgtcctggattcttaaggggtttaaaacagggattccatgtaatattgtgtcaaggataaccatatgtccaccaaaggggagaaagtaacctcttgagacaaggaaaagaatgaagcagacatgcaaagagaagcagagataagaaaccatgtactctcaaaaacacagaggaggtaaccattggggtgctgtcttcaggcatatgggagattcgtctttctcttggaacctgtgctttarcccatatgtatatttccttttgttccccatttaagtaatcattccaccacaccaggcctctaatctcttcatcctaccacctttttattacctctcaactatcttggtttcctctcatttcactctctgttctgcataaatttcaaggtcaatcattaaaagtgaactcctggcttatttctcacagggtctttcacctctccaactttgcctttctctaactttgccaaacaaattttgctgaaacttaagccctatttaaatccaattatttagctattccatgttt

SEQ ID NO: 145147 - DNA, 622 bp, Homo sapiens
atagactcttctaggaatgtcaggaaacagatgtgaggtgcatgttctggttcaaatggaaaggcagaaattataaaagacactgaaactaaagaaagaccatgaatatctgtataaaattggatggaaggaatctttggaagaatacttccccggagtcctgtrttatcaccatgggatagagatcttttgcactcattgccattcactctctttattttagttgatctgtgaattagtgatgaacgtgtcttgaatgtacacatgatgacaagggaatcatatattttgtaattggctctgaaaatttgctgaagcatgcacaatttaaactagccagccagccgttctctcctgctgattcgatggtatcaaggacacagcatctaaccctcacattttacttggctgcaaacctccctctgaacagggtccacggagcatggatcgtggtcttatgaaacaaatctttcctccttaaatgtcagtgtctcattagacctttgctttggttcattttagtagtgtttctccctgctctctagtgaaatgaagtgacgtggttaacagtctctgcagtcttaaatgtacaaggctgtaatttgactctaggtagactgtg

SEQ ID NO: 145148 - DNA, 512 bp, Homo sapiens
acctcggcctcccaaagtgctgggattacaggcgtgagcaactgcacctggcccctctctgtcttttttaactgttgttgctttagagtctgttttgtctgatataagagtagcaactcctgctctcttttggtttctccaaaaggagccctcaaaactatacaaacacatggaaattaaataatctgctccagaattatccttggggcagaaatgaactcaagatagaaattaaaaaaatatttgaactgaaagataatggtgacacaaccgatcaaaatctcttggatacagccaaataggtgtgtattagtctgtctcacgctgctaataaagacatacccaagactggataatttataaaagaamgaggtttaataaactcacagttccacatggcttgggaggcctcacaatcatggtggaagacaaaggaagagcaaagggacatcttgcatgatgtcaagcaagagagctgtgcaggggagctcccatttattaaaccatcagat

SEQ ID NO: 145149 - DNA, 570 bp, Homo sapiens
ctggcatgcaatcttgatatgtgaaatatgaggcagaaaacctggaggtctgctgttctgaaggctggaagacatttctctctactgaaccccactgtccaagtagcggtcacccaggcctttggcctctctgagcctctctgagcctgccctgatccttgccccacatttctgtcttttgaattcttccttacctgaattttattatcattcccttccccatctcaatacctcaccatggctcaggtcagtttaggtctagagtgacagaatgtagagaattattttagtcacagattctgagattggtggagatgacaaggagccaactatttcaactagtaggtttgcaggaagagctggagggagacacaaatcaagaggcaatgagagattgtagcccctgggaagtaagagtcatcaactgaaaattagtaccaatccttgtatctaatatgtcagtgaagttaacccygcagctctgctttgggctaaagtctcctttttttgtggtctaataaaatagtatcctgtgtttcagtctatgttgacagtgccttatagtgataa

SEQ ID NO: 145150 - DNA, 580 bp, Homo sapiens
cacagaatgggaaattgctggccagcagaaattcacactactcaaagtatgacagatcattttttagctataaatggaaaaagttacttttaaaataggaaaagcatgtagcagataccaccttaattaaaagatcaaattgatgtttccatttatgggagaaactgatattatgtatgcattggactgagaaggacacctctgtctttatagtattgctgctaaagaaagataagaataattagaakagtgttcctgttgcatctgggttttctttaagccattaaggatcttatttggccaactggtttttttttaattgcctttctgaatgtaatatttttattgtgatcatgtaggagaataatccttgtccttaggagatacatactgaaatatttagggggaagtgttatgatgtcttcaacattctctaaagtggttccaaaataatagtctaaacctatatgaatgaatggtaaagtgaatgagagatataaaacaagtaatttgttaatgattagcaaaactaagcaaataatatacatactgctgttcattgaactattatattcaatcc

SEQ ID NO: 145151 - DNA, 579 bp, Homo sapiens
gagagattacaaattgtgttatttgagtgcatttagtagacctatgtctaagcatgtccttgagtaaaattttactataagcaaaaattgctttataccttcccccttgatttagttattttgatgtaggaattggagacaaaataatactatatctagtttattctgtcattgttagagtctcttttatgcatatgttgatgatatatacrtatacataattaccattaatgtgatttttaaatattccatattcttgctgcttgtttgtctattagcaattaatgaaggttttataatatttccatcataactgtgaatttgtctgtttctcattttaatttttttatacatattgaatctgtgtgattgtgcatacctacctagaattatgacacatttctattggattgtcacccttattgtaatgaaatatcactatttttgtcttagaaattagttttgcattattctactttgatattagtatatatacatatatatattagtacatcttataagcagaagataaatttttggtagcttgtttttatttgttctatttgtaaatctagtctg

SEQ ID NO: 145152 - DNA, 616 bp, Homo sapiens
gcaactttgcaggccccttgtgtggctgggtgttatggtgggcttgaaaaaaactcagtagacttaaaacataaatgtaaactaagttaattttattacccatatattcatcaatttttaaataatgaatcaaaatggccagcagaaaacatgagcccttttgactattcataacccttgatattataattcttttacatatttaacattattttatctgttgctcgccatgattattattttaatgcagagattattcatggctctttcaatggtaacattatctgaatatttcattgggttttactgatcctgaattgtgtaggtctttctgagcttacattaagtaatgtgtttctaagacaatgaaatgtcttacaatataatgttagtgtcggggtacacacacacatgcacacacatagagacttttccatatctagcttagagaagaaataaaattttatttctttttttttagaacatactatttaagcatgcctgtagaagtctgagaaagtttattgtccgtgaatacttattaaatattccttatgtgtacatgtattatttgtrtgtgtattaaagtacttcattctttagtgttatgtttttg

SEQ ID NO: 145153 - DNA, 429 bp, Homo sapiens
aacatacaaaaatcagtgatatttctatatactaacaacgagccatctgaaaacaaaattaagaaaacaatcccatttacaacagcaacaaaacgaatgaaatatttagaagttaaagacrtgtatactgaaaactaaaacattgatgcacgaaactgaagatgacacagataaatgaaaaaacatcatgtgttcatagattagaagaattaatctgggagtgatggcttgtgcctgtaatcccagctattcaggaggctaaagcagcaagatgcttgaggccaggagttctgggtaagcttgggcaacatagcaagatcccatctcaataacactaaattaaaaaattagctggtcattgtggcgtttgcctttatttccagctgctaggaaggctgaggtagaaacatcatgtgagcccaggaattc

SEQ ID NO: 145154 - DNA, 606 bp, Homo sapiens
tattttcagcaagttttaaataattgttttactccctagatttttttgggggggagggtggggactcctrtataggtacattgtattttcttaccttcaatctttgtcattctctctcaaatcctttttgcttcttcatcttgtgtttggtttttaaaaatccccccttttattattccttataaggaattatttgttgtgtttggggaacatacgtgtgtgcacatatgttttgttttatattttttctggtttattcattaattctttcttttgtgagctgtaatcagctcatttctgaatttttctaattctgatttatgttgtttttaacgtctcatattgttttcttaacatcatttagttcattttaaaatgatttgcatatgttgagtatgtctttctagtgtggtttcattgtctacaggattattttgtttttatagccatcttttcttgtagttacttgcatggtatttcacttcagtagtttttctgtgttcatttttatgtgcatttaaaagaaccacatagcatttttagaattggaaaatacttatctgaaatgaaaaatatactgaatagtactaacagcagaatagatac

SEQ ID NO: 145155 - DNA, 606 bp, Homo sapiens
tattttcagcaagttttaaataattgttttactccctagatttttttgggggggagggtggggactcctatataggtacattgtatyttcttaccttcaatctttgtcattctctctcaaatcctttttgcttcttcatcttgtgtttggtttttaaaaatccccccttttattattccttataaggaattatttgttgtgtttggggaacatacgtgtgtgcacatatgttttgttttatattttttctggtttattcattaattctttcttttgtgagctgtaatcagctcatttctgaatttttctaattctgatttatgttgtttttaacgtctcatattgttttcttaacatcatttagttcattttaaaatgatttgcatatgttgagtatgtctttctagtgtggtttcattgtctacaggattattttgtttttatagccatcttttcttgtagttacttgcatggtatttcacttcagtagtttttctgtgttcatttttatgtgcatttaaaagaaccacatagcatttttagaattggaaaatacttatctgaaatgaaaaatatactgaatagtactaacagcagaatagatac

SEQ ID NO: 145156 - DNA, 606 bp, Homo sapiens
tattttcagcaagttttaaataattgttttactccctagatttttttgggggggagggtggggactcctatataggtacattgtattttcttaccttcaatctttgtcattctctctcaaatcctttttgcttcttcatcttgtgtttggtttttaaaaatccccccttttattattccttataaggaattatttgttgtgtttggggaacatacgtgtgtgcacatatgttttgttttatattttttctggtttattcattaattctttcttttgtgagctgtaatcagctcatttctgaatttttctaattctgatttatgttgtttttaacgtctcatattgttttcttaacatcatttagttcattttaaaatgatttgcatatgttgagtatgtctttctagtgtggtttcattgtctacaggattattttgtttttatrgccatcttttcttgtagttacttgcatggtatttcacttcagtagtttttctgtgttcatttttatgtgcatttaaaagaaccacatagcatttttagaattggaaaatacttatctgaaatgaaaaatatactgaatagtactaacagcagaatagatac

SEQ ID NO: 145157 - DNA, 547 bp, Homo sapiens
aatttttacaaactgaaaacacctgtataaccaatataatgctcragaagcagaacttgaatgggatcccagaaactctttgtgcaccctccactcactacatgcctcctgtattgccaaagataactgctatccttatttcaaattaccgattttgtactttatataaatggaatcataaggtattctattgtgtctgactttttcttaacatgttgagattcatccatattttatagtggtagaccattttcattgtattgtattccactgtgtggaattttggtgtctttattaatgaactttaatgaacatttgaatagtcttcagttttttgctattatgaatagtgttctatgaacattctaatttatgtctgctggtaaatgaatgcatgcattttcttgtggataaacacttagaagtggaattgctgagccatggggtatgaatatgttcatctttagtagatactgccaaacagctgtccaaagtggttgtaccaattcagactcccaccagcaatgtatgagaggtgtgattgctc

SEQ ID NO: 145158 - DNA, 547 bp, Homo sapiens
aatttttacaaactgaaaacacctgtataaccaatataatgctcgagaagcagaacttgaatgggatcccagaaactctttgtgcaccctccactcactacatgcctcctgtattgccaaagataactgctatccttatttcaaattaccgattttgtactttatataaatggaatcataaggtattctattgtgtctgactttttcttaacatgttgagattcatccatattttatagtggtagaccattttcattgtattgtattccactgtgtggaattttrgtgtctttattaatgaactttaatgaacatttgaatagtcttcagttttttgctattatgaatagtgttctatgaacattctaatttatgtctgctggtaaatgaatgcatgcattttcttgtggataaacacttagaagtggaattgctgagccatggggtatgaatatgttcatctttagtagatactgccaaacagctgtccaaagtggttgtaccaattcagactcccaccagcaatgtatgagaggtgtgattgctc

SEQ ID NO: 145159 - DNA, 605 bp, Homo sapiens
gtgggtgggttcaaacctgagctcagaaattcttgagaatgggaaaagcaagtattgacactcagggtgcttacattrtatgaaagatggccccaacttgaacctttcttccagtggaagggaatgtcatagcaaatgtacttatctttgattctttgaagtcaaggaatacagaagtcaagccataccaagacagaagtaaaatattgcagaaggctgtttcaaatctgtttggtgttacatatttaaaatctgagcatctaggatttaaatatttatgatgtacataaaatgatgtttatgtatactttaaattaacttgcctatatgtgtaatgcatcagtatgaaagattacaccagacctaaagtaaaacaaataccacttaagaaataacaacttaaggcagggatcaaaatgcttcaaagtattattcatcgcttatttaccctataaggtcatcaaaaacttagagttataaaacttgtatgtgattttgcagacttttccgtgtaagtctgaatcctgaaactgatttccattgcattgtaacctccctaacttagatttcaaggaatcttgtgctttaaatcagggtttctcaac

SEQ ID NO: 145160 - DNA, 528 bp, Homo sapiens
ttggtacacatctattaatctggcttgaaaaatgcttttttcttcttctccatatcaatttgraaggttgaccaggagcagctcattttctcttgtcagagctatcagtgtattgtatgtataaacatagtatatgaggtatcaacacagtatatgatatgcttctatattataaaaggtatgggagtgttcataccttatgtaatatgcttatacatactcaggaccttgattagtacctttcacagaacatcacatttgtccatgacttagatgctgattgaatctggttagggggaatagaaagaatatcctaaatgattaggaagtcatttgtgtgtacagagtaagagataaaatgaaatttcaggcttctgcctttagagaagtttctaagggcatataggtgcattccttttagtgtgaaagacaagtgttgcaatatgcacaatatctcactcaaaaggagaaacaagtcttggtgagcaaaattttttaatataaatagatatatgttcaaaattggat

SEQ ID NO: 145161 - DNA, 528 bp, Homo sapiens
ttggtacacatctattaatctggcttgaaaaatgcttttttcttcttctccatatcaatttgaaaggttgaccaggagcagctcattttctcttgtcagagctatcagtgtattgtatgtataaacatagtatatgaggtatcaacacagtatatgatatgcttctatattataaaaggtatgggagtgttcataccttatrtaatatgcttatacatactcaggaccttgattagtacctttcacagaacatcacatttgtccatgacttagatgctgattgaatctggttagggggaatagaaagaatatcctaaatgattaggaagtcatttgtgtgtacagagtaagagataaaatgaaatttcaggcttctgcctttagagaagtttctaagggcatataggtgcattccttttagtgtgaaagacaagtgttgcaatatgcacaatatctcactcaaaaggagaaacaagtcttggtgagcaaaattttttaatataaatagatatatgttcaaaattggat

SEQ ID NO: 145162 - DNA, 306 bp, Homo sapiens
ttctgcctttagagaagtttctaagggcatataggtgcattccttttagtgtgaaagacaagtgttgcaatatgcacaatatctcactcaaaaggagaaacaagtcttggtgagcaaaattttttaatataaatagatatatgttcaaaattggatttgacttatcaatgcatctagcttctagtactatcatccaagcaattatagaatgccttacttacaagttatggtatcccacacagcattgcttctaacctagaaacataaaagattggcaattaattcrtatctatgtactagctgatc

SEQ ID NO: 145163 - DNA, 511 bp, Homo sapiens
tggacaagcaaactttaagactgcaaagattctaagatttgtaattctttgaaatattctagaaacctatttacattttgatttctcctaaattagcttggttctgacattcacactgagataatacgtaaagtataatgaatattgaagtactatcttgaaactgctttgcaattttcagaagaaagttcttgtagaaagaagaattgtataattaatcatggaaacccagatggcacaaaataaacagaaacattctggtgttgtagcatcctgttgtagttgaaagatattttgaaaaataaaaataaaatcagtgctaatggttttgaaaggactgacttctttttgtgcttatggctgaactttctgactattatctatgccrttatgattgacagaattattccaaatagaatattagcaatccagccccaaatagtgtcaaaacctccatgtccagaatgagtatcaaactctcaacataatccacaattaccagactctcttg

SEQ ID NO: 145164 - DNA, 600 bp, Homo sapiens
gtatctaatttgaaactaaataagctgtctcttttagcagtatttaggttcagatattctcctcctacttcacctgctatgaagttaagcttttcagacagagaaaagggaatgttcacatgtctttgtggtggctgttagttttgtattattttaatttcgtgagaggtacaatggggaggactcctccgacctttggttctttgctggatatgcacttgctgatatttttaatgtcactcttgtccactttgtagttgggcctcgtacatgcttcctaaactaaagtttgaggttttaaacttagggctgtaatcaagtccttccagaagcatagccctctcccacctggttagctcagcttacccaagttttagctggcaaagatatacagttctcttccgttcatctctctggccttgacaagagtgtgacttatgccacttcgggaggctgctcacagatctggtgacctcctccatggtctccctgccatcaaagaatgrcaggagctagagggtgcccactgtgctcctcttttcccacgccactccaccttgtctactaaactggctgcctcatgttagtgcagggcgcagt

SEQ ID NO: 145165 - DNA, 446 bp, Homo sapiens
  misc_feature (1)...(446): n = A,T,C or G
tttgagctttaactgccttcacctcgaataaaagttttattccaggtttgactgttagactgatacattcaaaaacacatagcattcagtttggtgctcttggaaagattatggtgtacgcaaagaagcaggcatttctctcattgttttcatcaactaccagtattcctgaaaagaagcaacaaatggataaagtntgtttatataactgtttgttaacataactattggggaagtagtgatagaagaaaaaccgtctgatgaagcagctgaaagttttgttwtgtcatgtcactgatataaaagaggattgccagctaagattgagttagcaatctctattccattccaaattatgacagccttgagaagtaactgacaaccaagcaaacttaaaaccaagaggaaaaatgtttatgaatagaaaaatattctgaatgattgct

SEQ ID NO: 145166 - DNA, 446 bp, Homo sapiens
  misc_feature (1)...(446): n = A,T,C or G
tttgagctttaactgccttcacctcgaataaaagttttattccaggtttgactgttagactgatacattcaaaaacacatagcattcagtttggtgctcttggaaagattatggtgtacgcaaagaagcaggcatttctctcattgttttcatcaactaccagtattcctgaaaagaagcaacaaatggataaagtntgtttatataactgtttgttaacataactattggggaagtagtgatagaagaaaaaccgtctgatgaagcagctgaaagttttgttttgtcatgtcactgatataaaagaggattgccagctaagattgagttagcaatctctattccattccaaattatgacagccttgaraagtaactgacaaccaagcaaacttaaaaccaagaggaaaaatgtttatgaatagaaaaatattctgaatgattgct

SEQ ID NO: 145167 - DNA, 568 bp, Homo sapiens
gtgagataactgcttcagacaagataggaaaggatttgtcctctgactcaaggaagaaggggctgcttcctccaggacacacagtgggacttagaggttcaagtttaacagatttatctgtcagctgaaatatgccacatccagctccctgtgtcttattccctttattcaatgcaaaaaaaattcaaataagagacctattaatattctgaattcaatttacattgtaatttttcaaacccacagagttaaattttgtatctggtctttgccatattggccatcctatctcttgtaaataagagagaagagattattttagggyggtaattgaaatactctggttctctgctcataactcgacaagaagaatttaaagcactgaactcaaaattttctttatgtcattttccagtgtagccagggtccaccacagagccctggcagtcattcactcgatggctactttgtctaaatgctatgtatgactgacatcccattttatactggaatcgaggtcataattttgatcaaacccatccaggacagaaaatctctcccaggttcc

SEQ ID NO: 145168 - DNA, 615 bp, Homo sapiens
aattttctttatgtcattttccagtgtagccagggtccaccacagagccctggcagtcattcactcgatggctactttgtctaaatgctatgtatgactgacatcccattttatactggartcgaggtcataattttgatcaaacccatccaggacagaaaatctctcccaggttcccatctttgcaggacaatttcttggaactactactggacaaagaaaaatactgtattagtcagagttcagtcaggggaaaaaaatcaatctatatatttcaaaccgatttaatccaagatcagttgtttgaaataatgttggtgagggtagagaagtcactgtaaggactgggaatgctatctagaaattacaaaactgcaagaagtcgatgccaaaatttcacccacaaagcaggacagggccactggagtttggattttaagaagcgttccactgccaccactccaggagtctgagctgctgcactactgcaggagaaataatgaattataactcttttccttctgaatctttgtcagtgcctgcaataggcagagtctaaagcacagacttgctggtgaggggcttggggataaaccacagtacagggaagatggc

SEQ ID NO: 145169 - DNA, 590 bp, Homo sapiens
cagaattatgcccctccccaaagatgtccacattctaattcctggaactcttgaatgttctgttacttagaaaaggggagttaagactgcagatggaattaaggcttgctaatgagaggattttaagaagataagcctgattctttggacgggcccaatgtaatcattatgaggtgggcctcctcatataagggaggcaagggacagaggagtctcccatactgatgcaaagaaagaaaaatgactctgcaggccattgctagttttgaaaatagaggggaattgaatcatcagccwaggaatgcagacagcctttagaagctgaaaaaggcgagaaaatgggttttcctaaagtctccagaaagatcacagccctgctgacacatgtgagccctgtttttgtacttctgatttgcagaaccataagttactaaatttaccttatttaaagccactaagtttgtggtaattggttacagtaacaatagaacccaaatacaatggtaggatggtgaaggagacgctggaagaggttttgggtgagcaattcccctttgccctacaatttcctatggggaaagccaccacag

SEQ ID NO: 145170 - DNA, 528 bp, Homo sapiens
atattctacattctacaatatatcataacatcacattgtacacccttaagtgtataccattattatttgtaattaaaatgaagtttaaaaaaatacaggttagtctaacaaatgttcagataacatcacctcatcatttaactatgtgctgttaaaatgttaattatttttaaaatattagcaaagaatatgtacttaactgtataatagggttatctgtcttcacaaatgacagaccttgagttcattgcatactttgagtttgttgtttgtttctttgctagttttcctcatagtaatgacagatctgggctaatgtaaccacattgtctctctcggcctctgacaagtggaatacattcacatgaagtctggcctgrgtatgagtacagttctgtccatggaatggaacaaagctaagtaggccaaggggattaaacccttgatcttggcatcattagcactgtgttctaacccaccaggctaactaaccacagacaaagaccaattggactaataaatcacagc

SEQ ID NO: 145171 - DNA, 605 bp, Homo sapiens
ttacacctgtgatctatgaatattgtgggattgttaatctacaaatgttcttgctttggtctctttcaacaccaaataagaagaacagagatgctaagaatttttatgtgaacattatacaagaaatatatgttgcattattttttagcttaattgcctaatttacttttatgagtaacttatgtcttcaagtagatgtctctttgaaaaaaatatctacagaataatgtcaaaatgttgaatgtgatgggcaatacttttgaagttttttattttctaagaattctaactacagcagttttgttagtatagtacaattacagtaaaactgaaaaatataaaataaattatttcagaagctgtgcatcaccttcagtaactataaatactagcatctcatcttcacatgtttgtatcttgaggccttgcaaaatcaagttcatcttggtggtatagtaagggacagatttcctgaaattatctaaccataacataaacttgatgaatataaaggaataaagtaacagcaataacagcaatagtaataatgatgataacagttaacctttagartgcctacaatattgtaggcaggtcttaagtgc

SEQ ID NO: 145172 - DNA, 353 bp, Homo sapiens
tgaaaacatgcaatatttgtcttcctgtgcctggctaattttgtttaacataatgactcctagttgtgtccatgttgctgcaaatgacaaaattgtattcttttttatagctgaatagtattccattgtgtatatataccacattttctgtagcaattcatccgttgatagacatgaaggttgatttcttattttggctattgyggctagtgctacaataaacatgagcatgcagatatctcttgaatatattgatttcctttcctttggatatatacccagcagtaaaatttctgagtcatacagtagttttatttttagtcttttgaggaaactccatactgttctccaag

SEQ ID NO: 145173 - DNA, 426 bp, Homo sapiens
gactgtactactttaaatttctaccaagagtatatgagagcattcttctttctccccactctcattcatctgttattaattttttctttctgtaattgttttccttttgatygcagccattttaactgggtgaaatggtatctcattgtggttttgatttgcatgtctctgatgattagtggtgctgagcattttttttttctcgttgactgtatgtcttcttttgagaaatgtctattcaggtcctttgtccatttttaaatgggattatttggttttactgctattgagctatttgagcagattatatactctacatatcaatcctttgtcagatggatagtgtgcaaatgttctctcccattctgtaagccatctcttcacattgttgattcttttgctgtggagaagctttccagttttatg

SEQ ID NO: 145174 - DNA, 573 bp, Homo sapiens
tttgtcctaagactggacaatgcctacaattgcatctttaggcacataattttgtcagaaagttgataattttcagtttactatttccycatgtacttaaaaaaataatgttttgatatattcaagatgtatcattttacgaagatagtaaaaaaagaagatttatgcataaacattcatatggtagtaatttttaaaatgatattatcttctgtaactatgtaaatcaaacctggcagctgatgcttggcagttgaagaagacccacagaattattcttgcaaattatgatgagtaactgaacccaaagcgacccctggcacaactggataacaaattagtcaaagaaagaattactagcaattatattttctgattgcctacaagcagacaacaaaattttgtatagtctcatgtatgtctattttcttagctagcttcttggtctggcccctgaaagcatcatagacaaaagaaaccgatctattttttttttgataatcagaatgtatgtttgccttaaaatacctccctaccccctcccattttagcatatgactataagttctgtaa

SEQ ID NO: 145175 - DNA, 542 bp, Homo sapiens
tcattaatcaagcaagataagtactatggggaggagatatgaagagatgaccggttgactattagaaagaggtacttgaatctctggagagatttctgcactaaaagtagattaggaaaattccataacctcaaactcataatgatggtttgggaaatttatatagacttccatatgttcagtctctcccatgaattgtctccttctctgtcatcttccgccttcaaccttgaatcaagcagcaaaatctgatgtcatcaatgctgctcaaatttgacatcatttgtgactctgactttatatttggtcccaggttgccttttattgcactagccttctattgatytaattttggaatcttgaacttaattcctttgactcttgcctcagaatgatttgaaatgaccccttatccttctttagagttggaaataggtcatgaactataccagcaaaacaggaaaataatggagtaagaggccatgtatttccatacactgtagacagaaagtcactttgccaatagaccaagctgccataca

SEQ ID NO: 145176 - DNA, 578 bp, Homo sapiens
caaactatctgctactaaaagcactgggagtttttgtttgtttgtttgtttgtttgtttgttttttggtgtgtgtgtgtgtgtttttcagacatgaaactttactaaatgaatgggcaaatttggacttttrcaatctctattgatgtaggagataaatggatggttaagcatgaggaaaagttaacacctaaatctactagttacaaatactactaggaagaaaagattaggtttttgtttaagaagagagtggtgtgttaaagacaatgaggtctaaaagcagagggcagaggggactgagtgtgaaagagagtccaaggggtggttggaaggttggaaagagaaagaaagagtgagagagagaaaggaagagacagagagacaaaaagaaagagagagagagatcaagacacgtttgatctgagtaattatattccaaacatgatgaattgttttatgaaagtattaatggatgggaaatttttcatcaagctgaaaaaaaagaaaatatgctagaggtggtgcaggggacattcaatatgaaagaaagaacatcaatatatttgtaattagaga

SEQ ID NO: 145177 - DNA, 578 bp, Homo sapiens
caaactatctgctactaaaagcactgggagtttttgtttgtttgtttgtttgtttgtttgttttttggtgtgtgtgtgtgtgtttttcagacatgaaactttactaaatgaatgggcaaatttggacttttacaatctctattgatgtaggagataaatggatggttaagcatgaggaaaagttaacacctaaatctactagttacaaatactactaggaagaaaagattaggtttttgtttaagaagagagtggtgtgttaaagacaatgaggtctaaaagcagagggcagaggggactgagtgtgaaagagagtccaaggggtggttggaaggttggaaagagaaagaaagagtgagagagagaaaggaagagayagagagacaaaaagaaagagagagagagatcaagacacgtttgatctgagtaattatattccaaacatgatgaattgttttatgaaagtattaatggatgggaaatttttcatcaagctgaaaaaaaagaaaatatgctagaggtggtgcaggggacattcaatatgaaagaaagaacatcaatatatttgtaattagaga

SEQ ID NO: 145178 - DNA, 508 bp, Homo sapiens
taagttaagtgaaccaaggagagaacatggatggactcagtgtggaatagagccattttatgtctgtgtctaagacctccacttagtgaaagttacataatgatgaaggagcagaggttgaaggcccaacattcttgacatatgatatatcttaaattttttctttaccaactttcaagctgatatttaaactctgcacaagaatcacttaatccattactatgcccaagccaccttttgcatagaactcagggattaartcacctaacaatttaatttaaagagaaggaatttaaaattaatacttataaaaggggttcaaagtaataactaattgacataatgtttatgtggttacagtggaaagcactgggtgatctgataatatcgaaagttatcaatggaataaaatggcgagtgtagtgcaaacctttataagtcctcaaagaaaatatgattttggagatgtttttgtcactggaaacatatccattaaattgatctaagg

SEQ ID NO: 145179 - DNA, 508 bp, Homo sapiens
taagttaagtgaaccaaggagagaacatggatggactcagtgtggaatagagccattttatgtctgtgtctaagacctccacttagtgaaagttacataatgatgaaggagcagaggttgaaggcccaacattcttgacatatgatatatcttaaattttttctttaccaactttcaagctgatatttaaactctgcacaagaatcacttaatccattactatgcccaagccaccttttgcatagaactcagggattaagtcacctaacaatttaatttaaagagaargaatttaaaattaatacttataaaaggggttcaaagtaataactaattgacataatgtttatgtggttacagtggaaagcactgggtgatctgataatatcgaaagttatcaatggaataaaatggcgagtgtagtgcaaacctttataagtcctcaaagaaaatatgattttggagatgtttttgtcactggaaacatatccattaaattgatctaagg

SEQ ID NO: 145180 - DNA, 447 bp, Homo sapiens
acagggcgctgcccatgcaaactctggactttccattcaaattcattattagtctttgctgtcaatgagttgaaccctttttttcctgaacgccgtgagtcacctcccataactagccttccataaaggtatttaacttgagtgtataaattgagtctatctcagggcaaccacaattgtataaggctgtgtgctgtgtttccaggagaatctttgggtccttatgtctttccaatagggttggttccaccktcactttaatgttcctcaagaacaaagacaatgtgttctacttccacaataatttgcataaatacatatgcaatatcttttgcaatatgaaccctcaggatgtcaattcaggtatttttcttttttgtattctgacttctctaggaaactaaagtgacacatttcaggtaagtaaggccaagacttaagtgatat

SEQ ID NO: 145181 - DNA, 403 bp, Homo sapiens
tatttattgacggaataaagaggaaaccaaagagaacatatccatttcctcttaactttacaatatgcacctcaagcagggatcatcatcacattagaattagttggggctggagagcaatggtgccatctcggctcacttcaacctctgcctcctgggttcaagcaaatctcgtgtctcagccatctggtagctgggattaaaagcatgcgccaccacgcccaactaatttttttatttttatttttaatakatacagggtttcatcatgttggacaggctggtctcaaactcctgacctcaagtgatcggcctgccttcgtctcccaaatttaattaggtctttagagagcctttgaatatgactattgcaaaagcccttttattttgtgaagtattatat

SEQ ID NO: 145182 - DNA, 403 bp, Homo sapiens
tatttattgacggaataaagaggaaaccaaagagaacatatccatttcctcttaactttacaatatgcacctcaagcagggatcatcatcacattagaattagttggggctggagagcaatggtgccatctcggctcacttcaacctctgcctcctgggttcaagcaaatctcgtgtctcagccatctggtagctgggattaaaagcatgcgccaccacgcccaactaatttttttatttttatttttaatatatacagggtttcatcatgttggacaggctggtctcaaactcctgacctcaagtgatcggcctgccttsgtctcccaaatttaattaggtctttagagagcctttgaatatgactattgcaaaagcccttttattttgtgaagtattatat

SEQ ID NO: 145183 - DNA, 602 bp, Homo sapiens
gctccatcatacctggggaatggtctactgtttctgtgcttcrgttttctcatctgtaagatggaaacaataaataatagtacctccatcacagagttgcaggaaagcttaaattagctgatagaagtagggagcccacaagtctggcacatagtaagtagtcaggatcttttgatgtttccatgtattactgattccctcttcttcgggtctcaattaaaataccatcttcttaaattaaccttaactgaccactccctaaaatagcctcccccaggctctttcatatttctccagttttgtaaaaatagcccttctcagtagctaacgtgtttctgatttacttgcatatctgcacatttacagaccatctcctcccattataaagtaaactctgagaggagagggattctattttgatccccactgaaacactgactataaaatgttcccgtgctgacaagagtgcctgacacacagtggatagccaataagtatgtgttttgcagatcccccacacagagctgacacacaggaggtgcttagtgaggatttgctcaaataaatgacatcgagtcttttacagagtgcttttccacctc

SEQ ID NO: 145184 - DNA, 543 bp, Homo sapiens
atccatctgcctcgacctcccaaagtgttgggattacaggcaagagccaccccagctggcccatttaagtctttaatccatgttaagayggtttttatatatggtgtgagaaaggggcttttctagttcttttacatgcattactaagttatcggctggaagttttctaatttttggatataggtgcttatggctatgcattgacctcttagtattgctttcactgtattccataggttttcatatgttgtagttccattttcatttgtttcaagaaatttttaaattttcttcttaatttcttcatcgacccactggtcattcaggagcatattgtttaatttctgtgtatttgtagagtttccaaaattcctcttgttttattccattgtagtcagggaagatacttgacgttatttcaagtttttttaatttttaaagacccattttgtggcttaacgtacggtctttcctttagagtgatctacctgctgagaagaatgtgtattctgcaagtattggatgaaatgatctataaatatc

SEQ ID NO: 145185 - DNA, 543 bp, Homo sapiens
atccatctgcctcgacctcccaaagtgttgggattacaggcaagagccaccccagctggcccatttaagtctttaatccatgttaagacggtttttatatatggtgtgagaaaggggcttttctagttcttttacatgcattactaagttatcggctggaagttttctaatttttggatrtaggtgcttatggctatgcattgacctcttagtattgctttcactgtattccataggttttcatatgttgtagttccattttcatttgtttcaagaaatttttaaattttcttcttaatttcttcatcgacccactggtcattcaggagcatattgtttaatttctgtgtatttgtagagtttccaaaattcctcttgttttattccattgtagtcagggaagatacttgacgttatttcaagtttttttaatttttaaagacccattttgtggcttaacgtacggtctttcctttagagtgatctacctgctgagaagaatgtgtattctgcaagtattggatgaaatgatctataaatatc

SEQ ID NO: 145186 - DNA, 543 bp, Homo sapiens
atccatctgcctcgacctcccaaagtgttgggattacaggcaagagccaccccagctggcccatttaagtctttaatccatgttaagacggtttttatatatggtgtgagaaaggggcttttctagttcttttacatgcattactaagttatcggctggaagttttctaatttttggatataggtgcttatggctatgcattgacctcttagtattgctttcactgtattccataggttttcatatgttgtagttccattttcatttgtttcaagaaatttttaaattttcttcttaatttcttcatcgacccactggtcattcaggagcatattgtttaatttctgtgtatttgtagagtttccaaaattcctcttgttttattccattgtagtcagggaagatacttgacrttatttcaagtttttttaatttttaaagacccattttgtggcttaacgtacggtctttcctttagagtgatctacctgctgagaagaatgtgtattctgcaagtattggatgaaatgatctataaatatc

SEQ ID NO: 145187 - DNA, 651 bp, Homo sapiens
ttagggggcattagcagactaccttctattttaccattttggtgacatcagtccttctatgattctctttatcatatttataagattatctcatttgtccaacaaatttaatctcaccgtatctgagagacccactgttggttgccatggaggttctatgttgaaaataataccaaaaaaagatgaatataaatttgaactatcaaattctatggacaactcaataaaaatgttttattcatttcttagttattgagcaggaagtcttaaagtatcgaattatctattattaagacagtatatatttaaaatattttattaaaatttgatttgaatgatcaataattcaaaattaatcattaaaataactatgtactcattgttattactctcaactaaaactgaataaattgaaaattacagaggattaatgacctcatcaaggtcatagaggtagtaaatggaagggtacttaatcatgaggctatttaagtgtcatggtgaattcacaaactggttacagaaagagttgagatggttcatgtcaargtaggtggctccctattcttacaactatagctggcattactgtttatcaacactgacaagcttgtcacataatctaacactggtgtaagttcatgacaaaag

SEQ ID NO: 145188 - DNA, 537 bp, Homo sapiens
caggctcttatcatgtgaggggctgatttgcaatgaaagatgcatgcacagcctcgccaggtgtttactgttaaagtgagggcattgactggaaaataatggaaccatgaaacttgggatggggatgtgtgggaggaccctgatggagctggggacaataagatttgtaaacyctgatgaacatttttagccagaaggaacagcttccccatctccagtagtggcaacatcccctccccgacccatgctgccatcagcctttccatctttatctgaggagataaaccctgcactgcctgacacaacagtgatggcctcacctgaggcagttgccaggcaagataatattgattttcctcaggagccacccccaacatatctgtttgtctctagacctataactaaactaaagtcccagcgggcccctagtggtgaggttcagagtgtgacccataaggaggtggactacacttgaaaagaaatgtttgagttctctaattaatgtaaacagaaatctggggaacaggcatgggaatg

SEQ ID NO: 145189 - DNA, 575 bp, Homo sapiens
gggcccctagtggtgaggttcagagtgtgacccataaggaggtggactacacttgaaaagaaatgtttgagttctctaattaatgtaaacagaaatctggggaacaggcatgggaatggatattaagggtatgggaaaatggtggaaggaacacagaattggatcaggctgaatttattgatttgggcccactaagtagggactctgcatagaaagagcctgtgtagccaaagcaagaccaagcaaaaagaacaaatctggaggcatcacactacctgatttcaaactatactataaggccacagtcaccaaaacagcatggtactggtataaaaatagacacatagaccaatggaacagcatagagaagccagaaataaacccaaacacttacagccaactgatcttcaacaaagcaaacaaaaacatagagtgggaaaaggacacctgtttcaacaaatgatgctgggataattggctagtcacatgtaggagaatgaaactggatgctcatctctcatctaataataaaattaactcaagatggattaargacttaaatctaaaacctgaaa

SEQ ID NO: 145190 - DNA, 639 bp, Homo sapiens
gccaaatgttaatcaccaagacaatggggaaaatgtctccaggatatatcagagacctttgtggcagccccacccatcacaggcctgtagscttaggaggaaaaagtggttttgtgggctaggccagggtccctgtgctgtgtgcagcctagggacttggtgcactgcatcccagccgctcccgccatggctgaaatgggccaatgtagagctgaggccatggcttcagagagtgcaagcctcaaattttggcagcttccatgtggtgttgagcctgtgagtgcatagaagtcaagaattgaggttcaagaacctctgcctagatttcagaggatgtatagaaaaacctggatgtccaggcagaagtttgctgcagagatggggctgtcatggagtacctctgctagggcaatgtggaaggaaaatatggggttggagcccccacacagagtccctactggggcactgcctagtggagctgtgagaagagggccactatctaccagaccccagaatgatagatccaccaagagtttgcatcatgtgcctcgaaaagccacagacactcaatgccagcctgtgaaaacagctgggagggaggctgtactctgcaaagtcatggaggtggagctgtgcaag

SEQ ID NO: 145191 - DNA, 372 bp, Homo sapiens
attactattatagataatacttctcgagcgtgtcctccctcttccatgttggggcagggtggtttttgtaacctggttcctgccagactttgcagcctcaggctctaacattccctcatatacaccttacagtccacttatcctaaaatattttgagtccttcaaatgcaccttgcctgtcatattttagtacttttgcacaagttgtkctttttttttttttttgtgagacaaagtctctctcttgtcacccaggctggagggcagtggcgcgatcttggctcactgcaacctccacctccaaggctcaagcagtccttctgcctcagcctcccgagtagctgggattacaggcacctgccaccacaccca

SEQ ID NO: 145192 - DNA, 556 bp, Homo sapiens
tgataagaaatgcagattaaaattaaaataagatatttatttgtttttaaagtttgtaatattaggagtgtatgatactataggaaaataggcaccctcaaatactcttgtacagtaatgaattggtgaagcatttttggaaggcagttcaacagaaactataaaattttaaaatccacttatttttgacatagcaattctacttctggaatcaatcttaaggaaatattcacatatgtgcacaaagatgtatgctcmttgcttgcattatatttaataatagtgaaaaaatggaaaatacacttaagtaaaataactttctttacttgctttccaaaacaatattttcctgactttcttcaatggccactcatactgagtctcttttcttggttcctgttcatctcccccacctcctgttacagttccccaaggctcagttctcatatctttgtctatacttattccttggtgacatcatttggtcttttggttctatgattcagcgttctctattcaccacttgactcactctatgctgatgacaccccagttg

SEQ ID NO: 145193 - DNA, 372 bp, Homo sapiens
attactattatagataatacttctcgagcgtgtcctccctcttccatgttggggcagggtggtttttgtaacctggttcctgccagactttgcagcctcaggctctaacattccctcatatacaccttacagtccacttatcctaaaatattttgagtccttcaaatgcaccttgcctgtcatattttagtacttttgcacaagttgttctttttttttttttttgtgagacaaagtctctctcttgtcacccaggctggagggcagtggcgcgatcttggctcactgcaacctccacctccaaggctcaagcagtccttctgcctcagcctcccsagtagctgggattacaggcacctgccaccacaccca

SEQ ID NO: 145194 - DNA, 453 bp, Homo sapiens
gtacagtgataagatggctgtttgcaagccagaaagtggggcctcaacaggaatcaaatcagcctgcaccttgattttgtwcttccagcatccagaattatgagaaataaatgtctgttgtttaagtacccagcacgagaagactaagacaaatactcagagcagaattttcaagagaagcaaagcattcctgtcctttgaagttcccatctgtttcccagctatataaacaccgcagagtgcatgataagtatgtttgctgcgtgaatgcaagaaccctcctctgggaaaagtcacaaacaagctacttcacccattgcctgacacaaaggcagcttcccccttgaataatctgggattgaaaatgagttcattcagctataagctcaccgaacgaacaccaaattcagcaactgtgagcagtgcactctgtccctgcccttaataagtgaa

SEQ ID NO: 145195 - DNA, 613 bp, Homo sapiens
tttttgttcaactgtacatggatatttctagagacattgacgatcttcttgtaacacttgttgttataaagttctctatgtttaatctgctacttttgggataccagaatttttgtgaaagtgagtagatgttcctcatagccaccctgacaagggtttctttgctctgtttattttgtagatttctgtgtggttttattgcctgtcagcacatttaagaaatgaggacagacctctctgttttggtctcttttcttttctgttctgccaaaactaattgctttctcatctcttttggatgcttaagaatgggatagaaacacracttttcttaatgcttctgggcaagatatttttacaatagaatgcaaattctatttcagctctggggaatatttttaggtgttgtcttatttctaacttcacacatctcttccttgagacaatacacacagatttgaaaatctgtttggtattggaaagggaaaaagagaactaggtgaacatctccaaattttatctcattatatcagtatatttagtttaggctaacaaatattacctgtcagttaggtgttgggcacttactcaggtccaggataaagaataaaac

SEQ ID NO: 145196 - DNA, 592 bp, Homo sapiens
ctttgtaaatagcaatatgtggaatcaccattaatgatacaaatattctagggtaggatattccagagacttaagctgtttggaatatcaaagataatgagattaggtaaattcagccaggataactttgtatttctggaacagtttattcatgacagagacaatgtttttcagaatacattttctagcatgcagtttctacacattatgtataaatttaattatgagagaagtgatgcatacttagaaaatacagggttaaacgaatataaagttgtctttttcaactttaggatgtatcagagcctataatatgtgtccagtgaatatctaacgactaatagagtatgaaaaatttaacaaattttttyctttttttcaagcccagaaaatcattttcttggaaattattgtggggctagggtttcctgtagtatgcaataacattttggaagaaatgctgactatgagacagttttcatctcagtgtctctttatggacattggtgtagaaattttaaattaataattattaaaatgccttgatactggaatttgtactaattcacagtcatttagaaatactaatgaa

SEQ ID NO: 145197 - DNA, 592 bp, Homo sapiens
ctttgtaaatagcaatatgtggaatcaccattaatgatacaaatattctagggtaggatattccagagacttaagctgtttggaatatcaaagataatgagattaggtaaattcagccaggataactttgtatttctggaacagtttattcatgacagagacaatgtttttcagaatacattttctagcatgcagtttctacacattatgtataaatttaattatgagagaagtgatgcatacttagaaaatacagggttaaacgaatataaagttgtctttttcaactttaggatgtatcagagcctataatatgtgtccagtgaatatctaacgactaatagagtatgaaaaatttaacaaatttttttctttttttcaagcccagaaaatcattttcttggaaattattgtggggctagggtttcctgtagtatgcaataacattttggaagaaatgctgactatgagacagttttcatctcagtgtctctttatggacattggtgtagaaattttaaattaataattattaaaatgccttgatactggaattkgtactaattcacagtcatttagaaatactaatgaa

SEQ ID NO: 145198 - DNA, 538 bp, Homo sapiens
tctaactatatgctgtcaacaagagactttagatttaaggacacaaatagttagaaactgaagcaatgaaaaaacatatttcatgcaaatgatagccaaaagaaaacacaggtggctatcatggcagaaatcaggatccctaaaaaatgttggcactcttttattcattgcagcacaattcataataagagagaggtggagacaacatgaatgtcccttatcaaatgaataaagaaaatattatgtgtgtgtgtrtatatatatatatatatatatatatatatatatatatataatggaatattatgtcttaaaaatatgaaaatcctgccaaatgcaacagcatgaatgaaccttaatattataataattgaaataagccagtcactgatacacaaatagtgtatgattctactcatatgagatgtctaaaaaagtcaaacatttataagcagagagtagaatggcagttgccagggggtgggggaaagggaaaattgggagttaccatttaacaggtatacagtttcagttatgc

SEQ ID NO: 145199 - DNA, 596 bp, Homo sapiens
gctggctccacttaaagctggccccagttaaagtagccactgtttgccatacatgaagctaagtgttaagtgttttaaaaacattgtttaattaacatcttaatatgttttcagtataaaacctgccgagtaagtctgagtctcagtttatggatagaagtgttcaacattacattcatgggttgaatttttccaaaattaattaatytggtctttcactcagaattaaacaagcatttcttcatcagttcagtttctttctgtcctaccctaacagatgtttttgaattacatagttaaagtgtccacacatagcatgttaaccagaatctttatctattactatgtctcctagcttccttagtagtggtccaaactccttcacacagatattgccacgtttttcactattttttctttttcccacgtgcgaatccctatattttagtgaaaaaatttaaggagttgccgtggaagcaaaatatacagttaatgattttatgctaatgtattaatgtttcatgtaaattgatgtgttactcttcccaagagtaatagcatttagaaagggaagaaaaatcttttttattctaagc

SEQ ID NO: 145200 - DNA, 464 bp, Homo sapiens
gagagaatcactgtcacctccaattaaaagtggaattaaaattgtcccacaatttttgcttccaaatgcttatgatcaatgtgattttctcctgggtacatgccattttggcccttataaaggtttatctactattcctggcagtatagtttctatgaatttgttcttagttaagtaatgtttaaagctatatttttatactgaataagaaaaatcacatacatttctctcacagaatattatcatttctcttgaccttcttgatctaataaggcagtaagtgacattgtttcaaaactagcastattttactgagtataaaaaagtaatatttcagtaagcttatattcaaaagtaataaagttagcataaattgatttgtaaaaatgcttagagttatagtgttgggaagattagaatatatttttgcttgttttacttacagataatcattgaagaaaacc

SEQ ID NO: 145201 - DNA, 423 bp, Homo sapiens
gtaatgtaactccataaaaacagtagatctatgtgctgctagacaattttatgggctgcaatccaaagataaaattattggatacttaagtttgaactcaagaagrtatctggaaatctatttctcagacttcatactctgtatcttcatagaactaagttgactcagtgtaatcctccgtctaggagcaacttgaaacagttgggatagtgaggcaccaaaaatttacagctagtgtacaagatgttttccaaatgcatctgcaaaattatggttatttactctgtaagtatatgaagtcatgtgtacctgatgaaaagaggttttcctggcctcaacttttttttaactcagtttaccactttcttgtctttactagcattggctatatgttaatccacatagtttggttctctaatcttg

SEQ ID NO: 145202 - DNA, 423 bp, Homo sapiens
gtaatgtaactccataaaaacagtagatctatgtgctgctagacaattttatgggctgcaatccaaagataaaattattggatacttaagtttgaactcaagaaggtatctggaaatctatttctcagacttcatactctgtatcttcatagaactaagttgactcagtgtaatcctccgtctaggagcaacttgaaacagttgggatagtgaggcaccaaaaatttacagctagtgtacaagatgttttccaaatgcatctgcaaaattatggytatttactctgtaagtatatgaagtcatgtgtacctgatgaaaagaggttttcctggcctcaacttttttttaactcagtttaccactttcttgtctttactagcattggctatatgttaatccacatagtttggttctctaatcttg

SEQ ID NO: 145203 - DNA, 548 bp, Homo sapiens
ttcttcataccataaggcacagggcataaatattttttatatgcaaaagatatggtttaattattatgaactggtattcattaagataatttttcatataattttaatactgcttattatttaaagaaatatttgtttgttctggaagacattatcaaaagtttagtaggccagaattaaatcctatatagcaagcatattcatcacttttctgggatcatatattatagttaaatcatcctgagaaatgagctagaaaatctctgaaaattaaaaaatttataggacttccattaaatattttartaatatgatgataatagataatttcagtaaattaaaatttttctctctctttgtcccttttatattcacatgtatatacattcttgtaccaagcttattgttagaagatcactggtaagattcatgtgggtattatggataaatcctaattcaccatggtgttctctaagaatacatacacaagagaaaaggtgaaaattacaaagaattttattaatatgtaagcaagtgtctaatattct

SEQ ID NO: 145204 - DNA, 598 bp, Homo sapiens
ctttgtcccttttatattcacatgtatatacattcttgtaccaagcttattgttagaagatcactggtaagattcatgtgggtattatggataaatcctaattcaccatggtgttctctaagaatacatacacaagagaaaaggtgaaaattacaaagaattttattaatatgtaagcaagtgtctaatattctgtaatttatgactttccagtaaatttaaattgagaaaagagcttagactcttaagcrtcagagcttctacttattacccttagtcaaacagtgaaaccacacactcggacaaagggaagagaggaatggttagacactcttagtggccccaaaattcccgcttttctagccatatgaattgtaaaagaagaatggtgactacctgacccaacaggccagcacttgcctatatctgagtcagaaagttcaaaggagagagaggattgctggattcccgcctttcagatatagtaacccttaacattaatgcaatattacactatgaatgtctttggctttgatacattaaaataggagttcctcttccctattgaatgagttaggaatagttgtaggaattaccc

SEQ ID NO: 145205 - DNA, 559 bp, Homo sapiens
ttagtcgttctaatagttttgtgtatctgattgtgtgtaaattctttaggattttttatacacaagattgtcacagatgaacaaaaattgttttatttcttgaatagcagtataaatatccttgartcctatttcttgaattaagtattgatatccttgtgttgattctgagctcatgagaaacacatttagccttccatctttaggtataatattaattgtagtcttggattcatgccctttatcagattgagatagtttcctccttatagtttgttaattatttttaatcatgaaagggtgaaatggtgttgaattttgtcaaatgcttttttacatgtctattgagatgattatgtgggttttgtccttcattgtaataatacagtcttacactgattaagttttacacaagcaactttgcatttctgggataaacagttccctgaacatggtccacattcttttttatttgttgggaattcatttttctagtattttgttgggcatttttctggtctatactcagaagggatattggtctgcagtttcgtttctt

SEQ ID NO: 145206 - DNA, 559 bp, Homo sapiens
tgatacaggtagatggcagcagagtctgactcagtcaaatgagtcttagatttaaaaatagaattagtgcttatgtatgtcctgtaaaaggctcttaggtcctccaacaaacctgcattactttcttgttgatggctgaaattctggcattaatgatttactcatttagattaagattctattacggttcaaattgccagtgtaaactaatatttaaaatcattttagtgtggtgttaaaatgctttatagtagattttgcctgtggtagacagtaataatgaggaaacaagtcatctcatggaatggaggaggaccctgactaaaggacaaagaaaatagcatgcacagtgtggtaatgtagaatgaatggtaagagatgacagastttatctacacagcagtttgctccagaatcaattcttgttggagcagtgagtaaaatggtgacactgaaatccatgaattgccaagtaatctcacgtgtattacttctgtaagtctaaaatcagagcatattcacccccaggcatcagctaatctttgcttaaatgtaccac

SEQ ID NO: 145207 - DNA, 516 bp, Homo sapiens
aaatgggagtttctctgcacaagctctctctttgcctgctgccatccatgtaacatgtaacttgctcctcctcractttcaccatgatagtgaggcctccctagccatgtggaaatgtaagcccaataaacctctttctttcgtccagtctcaggtatgtctcaggtatgtcttgccagtctcaggtatgtctttatcagcagtatgaaaacagactaatacaaggcttataggcagaaagggacttgccttgtctcagatgagactttggactttggactgtggatgttgagttaatgctgaaatgagttaagactttgggggactgtttgaaggcatgattggttttgaaatctgatgacatgggatttgggaggagccagggagggaatgatatggtttgtctctgtccccacccaaatctcgaattgtagctgccttgtgttgtgggagggacctcgtgggaggcaatcaaatcatggggttggtctttcctcttctgttctcatgatagtg

SEQ ID NO: 145208 - DNA, 598 bp, Homo sapiens
tctatatctatatattactttttaaaattgttatctatttattttatttttgagacagggtctcactctgtcacccgggctggagtgcggtggtgccatcacagctcattgcacccttgacctcctgggctcaagtgatcctcccaccttagcctcctaaatagctgggactacaggcacgtgccatcacttatggctaatttttgtatttttggtaaagatggggtttcaccatgttgcccaggccggtctcgaactcccaagatcaagcaatcggcccacttcggcctctctaagtgggatgagattatatgtgtgagccaccgcacatggccttcaattctaattttaagaatagaatagttggctcctatctgyttccccttttcagtcttatcacacttacatgttccttattagtctcgtgctatctctttgctgtaagttgggcatattttattaattctgttcgtcagatgggaaaactgaagttacagagataggccaagtatcggccaaaggctttcagtggtgatgagcccaaggatgggaggaccgggaagagagctagaggctgcaggttccttagacgcccacc

SEQ ID NO: 145209 - DNA, 568 bp, Homo sapiens
ccttctaaactaaattaggaacatatgaattacttcttatttatccttttctctgataaagtacaagatacgatgctaagcatattgttgattctcaattaaattggtttagttgcactcgattagacaacatggtctttataaaatgcttctgaaaaattcttatagttaggacagaaacagcatgaatgttttggttccttttggctcagggattaatctgtgtgtcagatctgatgagtcaaagtattttattcccttggccactgtgatatgttgagggaagatcaggagaaccaatttaagcttagaagacacaaagagatcttttctggggttgcttgaaaaacgattctgtttttttttcccctgccktttgaagattgagtaattttaggggctggagataatgagacaatgatacttcatgttaccaaaaaaaaaccaaggctaaagccagcacaaggtaaagaaaagctgataaatcaacatatgtgaagttctaatattatcattgagttctgaaatccaaatatgcctaaagaaattaattcccacccagacactc

SEQ ID NO: 145210 - DNA, 594 bp, Homo sapiens
ataatataatcatatttctattcttataactcccctttctaccttataatgcattttatatatatctaagtctttttttwaaaaaaaagaaagtcatgatattttctctttaaagtcatcgcatacttctcattataaatggacacttttttttttagaattggattataacattttcatactagggcccaccttttcttcctatcttcagtttcacccattactcaatctgtgccctatgctccagcaactgaacttctcaccaatgctgtgaatgagttgcatctttttttaatgctttcttagaatctctgccctcctttctcaatgggaaaaacataaaccaagtccttcaagatcagctcacacattaactcttctgtaaagccttctcctccccaattgctctttcatgacctcttttgtttataccttttgtaaaacatatcgtttaaaagcaaatgaatatgtatctatctttactattagtttggatccctggagttctgagattaactatctccaggtcctagcacagcatctgattaaaggtgaatattttagaaattgtcaggggattgcattgaacaaatc

SEQ ID NO: 145211 - DNA, 518 bp, Homo sapiens
aagcaaatgaatatgtatctatctttactattagtttggatccctggagttctgagattaactatctccaggtcctagcacagcatctgattaaaggtgaatattttagaaattgtcaggggattgcattgaacaaatcactctgattatcaacttataaaagatggataaagttgagtaatttagccttaagattttgtactcaatgccattttccacttttttctatttttactttttttttttttccttgagatggagtttcgctcttgttgcccaggctggagtgcaatggcacaatctctcaccgcaacctgcatctcccggattcaagcgattctcctgcctctgcctccagagtagctggrattataggcatatgccaccatgctcggctaattttgtattttttttagtagagatggggtttcttcatgttggtcaggttggtctcgaactccggacttcaggtgatcctgcccgcctcagcctcccaaagtgctgagattacaggcatg

SEQ ID NO: 145212 - DNA, 518 bp, Homo sapiens
aagcaaatgaatatgtatctatctttactattagtttggatccctggagttctgagattaactatctccaggtcctagcacagcatctgattaaaggtgaatattttagaaattgtcaggggattgcattgaacaaatcactctgattatcaacttataaaagatggataaagttgagtaatttagccttaagattttgtactcaatgccattttccacttttttctatttttactttttttttttttccttgagatggagtttcgctcttgttgcccaggctggagtgcaatggcacaatctctcaccgcaacctgcatctcccggattcaagcgattctcctgcctctgcctccagagtagctgggattataggcatatgccaccatgctcggctaattttgtattttttttagtagagatggkgtttcttcatgttggtcaggttggtctcgaactccggacttcaggtgatcctgcccgcctcagcctcccaaagtgctgagattacaggcatg

SEQ ID NO: 145213 - DNA, 528 bp, Homo sapiens
aaactaataatcaatgaagtgtgttcacataaaaatctctaaagaattctgataaagcagyacattttactgcttgcctgtcttgagagaagctttagaaatgaagccaattgctttctcccctgggagttctaaacagtagagatcaagggagagggtaatatttaccatctcacaaattaaagactacatggtaactttagtgtcagaaagcttcaattattttttcctgctttgtagtttggatagtttaatccaggtttcgctgcagctgacaacttggagtgaaaaaccaagcagaatgacagcatttactgaagcagataatgtagctcaaaaatgcaggacctattttctggaatgctagacaaggttttgcatccctttatccacacgactgggtgaaaacgctaatattcctctaacgcagagaacatcagcaatgatacaattttccaaacatttgattgaaatagaaaagatctaaaatatcttgacataaaatatgcaatataagttaagcatgta

SEQ ID NO: 145214 - DNA, 524 bp, Homo sapiens
aatgacagtctttaactttactgatgttaccagtatacagttacatatcattgcggttttaatttgtatctatctgataaattatgaacatcttttttatttctacattgatcatttcagtattatctttggtgaactgtcttttccaatcttgtgccaagttttctatttagttgtgcttcttttactttttgcattttgtggtgaacttttaatcttttttttttttcrctatgagttttgttggctaattatgcttaaattacctctgtccatttcatggctttttaaaaaatctcttttaccagtatattttatgaatataaattcttaattctaatagagacaagtctgtcaatgttttcatatttgtatattatttaataattcactccctaacttgaagtcatgaaaatattatgccattttgtataaagtttactattttattttatttattattatttttaaaatttttatttttaagttccaggctacatgtacaggatgtacaggtttgttac

SEQ ID NO: 145215 - DNA, 623 bp, Homo sapiens
tgtagtatatttttcaagagcatactgtgctccttcagtggattcaagtctttctttactgcagaaatattttattctattgtatcttgaaatttgttttattttcagtttgtatggcttttttcttcaggcaacaaaattgattgcattcacgatcatgttgttcaatgtgtttttgatcttattcatttgttacttctaaagaagatttcaccacagtaaaattttgctttgttttattttattatgtgtcttgttttgggttgggttattcactattaaatattttaaaatcaaacaagacaactaaatgggtcatttcctttctcttttttgtctacatgcagacagttggtgttattttctgcccctttactattcttacattttatgttcttacmaaaaaaaaaataaaaagaaagaaaaaacctcatcattttaaagaaaaaccttataatgaggcaggggaactgaatttttaagattcaaataatcttccctctaattgggttaacttgtacctcctcctgcagccagatgtatgcccattactaatgagttacagtagtctgtggattatgaagcaccctatccccaatcccacactatgctcaactccagat

SEQ ID NO: 145216 - DNA, 468 bp, Homo sapiens
tgttctactttttctggacctgctgctgatgataaatggttgagaagttcttgtttgttgacattgtragaaacttccataagcttctgcctctccaagaggaaaactaagaagtcctgtgcattatgggttaaatttcacaccataatagcttggttaacattttgcaatgtggattcttttaagtgacaattttcctacataagatgatgaaatttctagctcagagaaaaagaaattggttatcatagaactttaatgagactggtgggggtaagtaactaatgtacaatgtatcatcatgttcttctaaagtagcacttaatctaaaaactatatatagaatgggactcataagtctttaatataaaagtcaatgactattgttacttagggggaaaaaaggcattggcttcaaaatgccaatgatttaatgtctgtgttagtgagatactaaagaaaatattg

SEQ ID NO: 145217 - DNA, 468 bp, Homo sapiens
tgttctactttttctggacctgctgctgatgataaatggttgagaagttcttgtttgttgacattgtgagaaacttccataagcttctgcctctccaagaggaaaactaagaagtcctgtgcattatgggttaaatttcacaccataatakcttggttaacattttgcaatgtggattcttttaagtgacaattttcctacataagatgatgaaatttctagctcagagaaaaagaaattggttatcatagaactttaatgagactggtgggggtaagtaactaatgtacaatgtatcatcatgttcttctaaagtagcacttaatctaaaaactatatatagaatgggactcataagtctttaatataaaagtcaatgactattgttacttagggggaaaaaaggcattggcttcaaaatgccaatgatttaatgtctgtgttagtgagatactaaagaaaatattg

SEQ ID NO: 145218 - DNA, 468 bp, Homo sapiens
tgttctactttttctggacctgctgctgatgataaatggttgagaagttcttgtttgttgacattgtgagaaacttccataagcttctgcctctccaagaggaaaactaagaagtcctgtgcattatgggttaaatttcacaccataatagcttggttaacattttgcaatgtggattcttttaagtgacaattttcctacataagatgatgaaatttctagctcagagaaaaagaaattggttatcatagaactttaatgagactggtgggggtaagtaactaatgtacaatgtatcatcatgttcttctaaagtagcacttaatctaaaaactatatatagaatgggactcataagtctttaatataaaagtcaatgastattgttacttagggggaaaaaaggcattggcttcaaaatgccaatgatttaatgtctgtgttagtgagatactaaagaaaatattg

SEQ ID NO: 145219 - DNA, 583 bp, Homo sapiens
ctacaaccattttaagacggacctaacctaaaaccttattcatcacttgacctatgtagtaaccccctactctgactgagtgagcccagtgacgttttgmggctataggaattagagtcagaacagagccagtatttggcaactcctggaaagtctatgttcctccaaccaatgtacagttaccctggtagatggtgtaagtctttttggggaagtctaaaaaaaggactaatcatataatattttagcagagtaatggggtcctcccttaaaaaggcccaacctcctctgtattcaaggtattctgagttaataaactagtttatatctagaaattgactggaggggttttgactctgtttttgttattctagttaaacttatgtccactcaacctacaactccctatctgtacagatcatgtaagaatttaatagacggcctacgtatatatttttatggatactatgatcatctggccaattctataggtatctgtgagtcaaactattctgacaactgctttgtgttcactgttcattatgataagcacacccttgtctttgttaattaagtggcacta

SEQ ID NO: 145220 - DNA, 583 bp, Homo sapiens
ctacaaccattttaagacggacctaacctaaaaccttattcatcacttgacctatgtagtaaccccctactctgactgagtgagcccagtgacgttttgaggctataggaattagagtcagaacagagccagtatttggcaactcctggaaagtctatgttcctccaaccaatgtacagtyaccctggtagatggtgtaagtctttttggggaagtctaaaaaaaggactaatcatataatattttagcagagtaatggggtcctcccttaaaaaggcccaacctcctctgtattcaaggtattctgagttaataaactagtttatatctagaaattgactggaggggttttgactctgtttttgttattctagttaaacttatgtccactcaacctacaactccctatctgtacagatcatgtaagaatttaatagacggcctacgtatatatttttatggatactatgatcatctggccaattctataggtatctgtgagtcaaactattctgacaactgctttgtgttcactgttcattatgataagcacacccttgtctttgttaattaagtggcacta

SEQ ID NO: 145221 - DNA, 583 bp, Homo sapiens
ctacaaccattttaagacggacctaacctaaaaccttattcatcacttgacctatgtagtaaccccctactctgactgagtgagcccagtgacgttttgaggctataggaattagagtcagaacagagccagtatttggcaactcctggaaagtctatgttcctccaaccaatgtacagttaccctggtagatggtgtaagtctttttggggaagtctaaaaaaaggactaatcatataatattttagcagagtaatggggtcctcccttaaaaaggcccaacctcctctgtattcaaggtattctgagttaataaactagtttatatctagaaattgactggaggggttttgactctgtttttgttattctagttaaacttatgtccactcaacctacaactccctatctgtacagatcatgtaagaatttaatagacggcctacgtatatatttttatggatactatgatcatctggycaattctataggtatctgtgagtcaaactattctgacaactgctttgtgttcactgttcattatgataagcacacccttgtctttgttaattaagtggcacta

SEQ ID NO: 145222 - DNA, 590 bp, Homo sapiens
attcatagttattttgtgtacttgaagttattgtaaaagaaattagtttcttgatttcttttcagatatttactgctggcatatataaatgctacwgatttttgttatgttgattttgtatcctgcaacgttactaaattcattgaccagttctaacagtttttttgaatttttaggtttttctaaatgtaagaccatgttgcctgcttacaaatttaatttgacttattcttttccagtttgaatgctctttatttctctgtcttgcctagtaactctgttaagttgttaactctattaagttgaatagagttaacttgcctagttaactctattaagttgaataaaaatggtaaattttagctttcttgccttgtttcagattttagataaggttttctatttttccctattcaatatgatgttggctgtgggtttgttttgtcatatatggccttcattgtcttgaggtatgttctttttaaatccagtttgctaagtatttttattataccaatatgttgaattttatcagctgctttttcagcatctattgaagcaatcttttttttgttgttctttgctctgtt

SEQ ID NO: 145223 - DNA, 590 bp, Homo sapiens
attcatagttattttgtgtacttgaagttattgtaaaagaaattagtttcttgatttcttttcagatatttactgctggcatatataaatgctactgatttttgttatgttgattttgtatcctgcaacgttactaaattcattgaccagttctaacagtttttttgaatttttaggtttttctaaatgtaagaccatgttgcctgcttacaaatttaatttgacttattcttttccagtttgaatgctctttatttctctgtcttgcctagtaactctgttaagttgttaactctattaagttgaatagagttaacttgcctagttaactctattaagttgaataaaaatggtaaatttwagctttcttgccttgtttcagattttagataaggttttctatttttccctattcaatatgatgttggctgtgggtttgttttgtcatatatggccttcattgtcttgaggtatgttctttttaaatccagtttgctaagtatttttattataccaatatgttgaattttatcagctgctttttcagcatctattgaagcaatcttttttttgttgttctttgctctgtt

SEQ ID NO: 145224 - DNA, 505 bp, Homo sapiens
atatgtcattattggtttattgacgtttttctatttcttcatggttcgatattgataggttgtatgtccaggaatttatcagtttcatccaggtattttaatttgttgatgtaaaattgttagtcatagtctctaatgattctttatatttctgaggtctcagttataaagtcctctttttcttgattttatttatttgggttttctctcttttttttcttagtctagctaaaggtttgtccattttctttctcttaaaaaaacaagttttcatttcattgttcttctgaaaatgattccttyattttcgagtgagatatttttaggggtgaatctccatgacacagtagtgacagctgatatcttggtactgtttagtgcaggggtcctgaatgtgttgatgtcaaattcattttagtgctccataaaatatagcatttcaaaaaacacaattctataaaatgtgtgaattatttattttaatatgtgtgttttcaaaggaaaa

SEQ ID NO: 145225 - DNA, 242 bp, Homo sapiens
aagatcactgattgattgaaaagtgcatctctctgtcaatggacagggagatgaagaagctgtattctcatgtccaaccaatttctctgtggggatctccraactgattggtgtcagctgttttgctggaatttgatgtctgaaaaacatcttaggcaatccttaaacaaaagctttatgattctattgtcaaagagccagtctataagaacaacggggatgaaaatcaatttttaaaccgt

SEQ ID NO: 145226 - DNA, 453 bp, Homo sapiens
ggttatatggttagaagaatgttaatagtttctatccaatacaaagttgctttgctatttatacaaaaagataaaagttattaaattttaagttattatagtttttcattctcttccaatcataacaaacatttgacttctgaatcaaggatggatgagggcacaagtaaaaagacaaaagccaaagactatacttgctttacataagaaagagctaagccacagggaatgagtgaaagattggagcacaatacagtctggagattgggagtaaataaagactggaattggtctttcaattactctttcttatcagacttattttayaagcctgctgcttagaatagatactataatatgaggagttcggacttcagactacaccattcaaaccctatttctctttcatattcttacccttccagtcaacgtggaaatatggaaaggggagaa

SEQ ID NO: 145227 - DNA, 510 bp, Homo sapiens
agaaaattagcttttattggttctcattcttcttttttacatagatcttcttcaagattttagaatattggtaattcttcactgcttaatttgcctgctgctatttttattattcatacagaagaggctctctctgcctacactgtcctatcatctttcttctgtctagttaatatctacttattctatgaaattatcctcataccgcatgctaattcccctcttctcctatagcagtttacttttatttttcaatacacttctcttttccattaaacttaaaatattcaagggcatggctttttcatcttgtttcttcaatacctgactggagtagccagcaaatcctcacactggcatttaattacttcagaatatgtcactattttaaatttccaaacttaccattcaattatctgtcatayagactctgactcattcaggctagtccatttaccatgcaaagtgtatctgaatataattatttaaaaaaatttcctagtcaaaata

SEQ ID NO: 145228 - DNA, 266 bp, Homo sapiens
cattcaattatctgtcatacagactctgactcattcaggctagtccatttaccatgcaaagtgtatcwgaatataattatttaaaaaaatttcctagtcaaaataatccacgttctaaatcacttctctattacattcactattctttccaagacggcatttttattcctttcccaccttttcatataccactgacttttttcagtgctaaagggaagtctcaccttctccataaccttccgcttttattccagattatattgacc

SEQ ID NO: 145229 - DNA, 583 bp, Homo sapiens
aatttacagtaaaaatagattataaatattatttgcatctcattgaattaattctagtaaagttagacaattagtatagacatactatgaaactcatacaaactacaagaatcacagaattttatgtttctcacaaaaaatagcagtctcatttatttaataggtaatgatgcaaaaattattgaataataggtgagaaagtgagaggtaaatgtaacagcaaaaaaatacataacacagcaagaattatrtaggctaattaagttaactaggattgatcaacattaatccacagtccacatcctggatgtaacatttgaaataccaaaatgttactacatcacttctctaagcaactagctatctaacaattggatcactgtgagtaaactcaaatgaaatgctcaagtcagaaagatactaaatgactgaggcacaattctacttaatagaatatcaacaggttcaagttaaatatcatctgattctttggcaagtgtaatttggggtgggtgggtggaagggaaatcagataatctaaatgaaactgttttattgtatgaatttctcctctcagctgtca

SEQ ID NO: 145230 - DNA, 405 bp, Homo sapiens
attcaattaatggttttcttttttaaaataaaagcagaaatatttgtaagatacaaaaaatggaaaatagaacataatgtagatttacttaggcattacamatttttgaatacccatgaagtattgaaggggttaaaactgtaattgatttaaactttctgttatatttctgtagctgtaatagttttcaatatttcaaaaataaaatcatactaattttgttatgtgttattctattgtacaccagtttctgagagaaaacatgattgtatagccaaaggcctttaaaattaattcatccaggtaaattttctttgtatatcatattaaatatgtaatttgcagcaaaggacaggtccttttgggtttaatctgaactttgaattttgaatctcagaataaaat

SEQ ID NO: 145231 - DNA, 579 bp, Homo sapiens
cttagtgtttatttttctttttgtaagtcttctccttttttctgctccgccatctttaggtgttcttgcctaatcctagagctatactaatttatgataataaataacaaattttctgctttagattaggcctgtatcctgcaggtcagacatayatacatatataaacacttatccaatatctctacttagaaatccaacagatatctcacaatgtaatgtatataatttaactgaagttcttgattttcccctacaaatgcatttctcttccaaactcctataacaaagtaaatggtactatctaattgcttattctaaaatcttagagttattattgattcctctattttattcgccatactcatactatcttaaaaatatgattctaatctgtttaattttctccatcttccctttaccttctagtctaaactagcactacatctcactaagattactgtaatactctcctatctgatttttccattttctctcttgcccctcaacaatccattttctgaccaataaccagagttattattttaaggaacaaatatgatcatgtcactccctata

SEQ ID NO: 145232 - DNA, 531 bp, Homo sapiens
acctcattcttctttgagcttttgtcatacagtactggcatctttgttgcagcagctggtatctgcatcctaattactactctccagtccagaaataaacaaaatgagaatgcaaaagctgctgctttgtttggtttgtttgttttgcaaagatcgtagcagagatgtccagtttagacagtagatttctctattattgtttgtcgcacagaagaacgttcayatttgcagttaaagcagtcaagcttagttcttggtttagaactatttggcattctcaatttcctcttgagacctcatttgcagtgttttattagtatgttttgttttgtttctggaagcttagtctcaatctagtaattcaacctttccaagaattctgaattagccagtacactttttctatttattcagtcaaagtcagcttctattgcttacaactgagagtcctgatgcagacaccctgcctggaattgtggctaaaacgggtctctccagtactctccattccattatccagtttatttattt

SEQ ID NO: 145233 - DNA, 580 bp, Homo sapiens
aaagagacatagaaagactttttaaaatgaagatagatattacagcatgtgtgaatgttgactggactgggcagccactaaaatggaaaaaaaaataatgctgaaaaataaaggtgttatacaggaacaaatgacctggctatagtagagtagatgagaacaaatgcacaagttgagtagcctttttttactgccatctattgctacgtaacaaatcactccaaatttactggcttagaaaagagtgtattgtatctcataattttgtgaatcagaaatttgagcaaggctgggatggatagtttttttgccctaggagattttaacttakgtcatttcaaaaatgtttttaccttgtgattggtacctaagtagacatgactggaaggctaggtttagccagaccattgactgaacagcattcacgtagtctatctaatgtatcaatctcatagcagtcaacaattttgcatgcgactcaggggcatcaaggaaagagcatcaagagtccagacataatctgcaatgtattttatgacatacctcaaaatgtacagaacatcgcttctgccacaatata

SEQ ID NO: 145234 - DNA, 580 bp, Homo sapiens
aaagagacatagaaagactttttaaaatgaagatagatattacagcatgtgtgaatgttgactggactgggcagccactaaaatggaaaaaaaaataatgctgaaaaataaaggtgttatacaggaacaaatgacctggctatagtagagtagatgagaacaaatgcacaagttgagtagcctttttttactgccatctattgctacgtaacaaatcactccaaatttactggcttagaaaagagtgtattgtatctcataattttgtgaatcagaaatttgagcaaggctgggatggatagtttttttgccctaggagattttaacttaggtcatttcaaaaatgtttttaccttgtgattggtacctaagtagacatgactggaaggctaggtttagccagaccattgactgaasagcattcacgtagtctatctaatgtatcaatctcatagcagtcaacaattttgcatgcgactcaggggcatcaaggaaagagcatcaagagtccagacataatctgcaatgtattttatgacatacctcaaaatgtacagaacatcgcttctgccacaatata

SEQ ID NO: 145235 - DNA, 374 bp, Homo sapiens
agattcactgacagcttgtactgtgggcctggaaaagctgcaggcactcaatgccagcacatgaaaacagccatggggtctgtaccctgcagagccacaggggcagagcttcctaaggccttgggagccaacccctagcatcagcatgacctggatgtgagacaaggagtcaaaggagattattttggagctctaagacttgatgactgccctgctatattttggacttgcatgaggcctgtggcccctttgttttggctgacttctccctwttggaaagggagtatttaaccaatgcctgtacccacattgtaccttgaaaattactaacttatttttgattttacaggcttataggtggaaaggacttgtct

SEQ ID NO: 145236 - DNA, 547 bp, Homo sapiens
gttctgtaaagtcactgcaaacactgagttaggaagcaataaaccattgctcctaggggaaatacagggttaggtttctgacagcctctggtcacatttttgtcaaccagtcaatatgtaacctgttgtatgcatatttctatttaaaaacactttgtttaatatatattgttgactctaactttgaactattcgtcaacaacattataactcrtgcctcaataaaatttatctaacaccttactttccttctccataaagcacatcacagcctttttatgtttaggaaagcaagacagcatttcatccctatgttttgggaccattttaaactttgaaatctccaacaaaaagcacaaaaatgcagagaaaataaaaacagccaaaaaaaccatggcactaaatagactgccaaaaacacttgtttctagtgtgaatgctgaagcaagagggttagagcactgccttgtttgaacacagttgggaatgtgctttacaggtgacccaatttttttgatgccctatgtatgtctttgaataaccatgt

SEQ ID NO: 145237 - DNA, 573 bp, Homo sapiens
tttaaaggtgcctgcacaaggtagacccttaatcattattgggtctcactgctctctctgttgcatgcaagttttgttacatattgaaatttgttcaaaataacagcaacagcagcagcagcagcaacaacaacaataacaacaacaacacgaaagcatcatttctgctttcaagaaaatccatatcatgtttaaggggagaaagactataattcgtcactaccttttrtaaaaaccatcaacactcgaagcacagtctttatttgtttaaagcatcttttgcctcatagagcttgctccctaatcacccctaaggtaacttacagagttgccctaaatatggaaacaaatattttccttaatcctaggtcagatcaggttattctttctaaacagttcatcactgaagcctcagggataacctagtagagataaatactaagttgcaattttagtgtctcattccaggcggctgctttctggaacatattgcctcatccttacttgtggttctcaaatcacatcaaaatcatgtgtagtacatgttgtaaagctagatgctagtgttaccaa

SEQ ID NO: 145238 - DNA, 602 bp, Homo sapiens
gactcactctttgtttccatattgctacatatgctcaaacctaattccactcctggcttttaagatctggcctctcctgtactctccccaagacatttgggctcataattttgtatgaatggagggctaacctagttagaaagtaaacttcagtccgttcaattaaaacacaaaacaaaacaaaacaaaaaacagccgggcacagtggcttacgcctataatcccaacactttgggaggccaaggtgggaggactgcttgarcccaggagtttgagagaccaacctgggcaatgcagggagaccccatctctacacaaaatttaaaaattagctgggagtggtggcacacacctgtagtcccagctactcaggaggctgatgaaggaggattgcttgagcccagaagacggaggctgcagtgagctgcgaccatgccattacattccagcctgggcaagagcaagaccttatctaaaaaaataaaaaataaaaataaataaataaaataaataaaataaatcaggacacccctccaaaaaatggtatctcaaaattaaatagcaaaaaaaaaaaaaaaaaaaagtacttggatatcacactg

SEQ ID NO: 145239 - DNA, 602 bp, Homo sapiens
gactcactctttgtttccatattgctacatatgctcaaacctaattccactcctggcttttaagatctggcctctcctgtactctccccaagacatttgggctcataattttgtatgaatggagggctaacctagttagaaagtaaacttcagtccgttcaattaaaacacaaaacaaaacaaaacaaaaaacagccgggcacagtggcttacgcctataatcccaacactttgggaggccaaggtgggaggactgcttgaacccaggagtttgagagaccaacctgggcaatgcagggagaccccatctctacacaaaatttaaaaattagctgggagtggtggcacacacctgtagtcccagctactcaggaggctgatgaaggaggattgcttgagcccagaagacggaggctgcagtgagctgcgaccatgccattacattccagcctgggcaagagcaagaccttatctaaaaaaataaaaaataaaaataaataaataaaataaataaaataaatcaggacacccctccaaaaaayggtatctcaaaattaaatagcaaaaaaaaaaaaaaaaaaaagtacttggatatcacactg

SEQ ID NO: 145240 - DNA, 388 bp, Homo sapiens
ttatgggcatacaggtatttgggtgccatctttataatttacaattagtttgaaagatagaaattgcaaccgtatggttgggagcctggtatgtaaggcatttgctggtgggcatgttttgaacatgtattgggcctttatacatactgtcacttaactgttcccatcaccattggacaggtatttctccctgtgctggcaacacaggcacacccctcaccaaggtagagctgccacaggtagtctaactccagagaacaacaaacccctttgctggggggaagggatgggaggaggaacaagacktgagaggcggctgggcagaggacacagaaacctccgttctactgtgaggcccgaggaatgcaaatggaaagtaggactccca

SEQ ID NO: 145241 - DNA, 388 bp, Homo sapiens
ttatgggcatacaggtatttgggtgccatctttataatttacaattagtttgaaagatagaaattgcaaccgtatggttgggagcctggtatgtaaggcatttgctggtgggcatgttttgaacatgtattgggcctttatacatactgtcacttaactgttcccatcaccattggacaggtatttctccctgtgctggcaacacaggcacacccctcaccaaggtagagctgccacaggtagtctaactccagagaacaacaaacccctttgctggggggaagggatgggaggaggaacaagacttgagaggsggctgggcagaggacacagaaacctccgttctactgtgaggcccgaggaatgcaaatggaaagtaggactccca

SEQ ID NO: 145242 - DNA, 585 bp, Homo sapiens
cataacttaagtcatttctcatcaaaatatgtctctactgcatattctggttgataaattttccagttttttgtttatgaagattatccaattcatttctttgtagataaagcctaagaatagaaaaaaaattgttacattttattttggrgttaactgaaaagccatgtagtaggcacccttgttagagcttgaagaaacaaacaaaaaaaagacttgctcaccatgaatagaacctcagccccttttttgtgtctcagttggctccttctaccttttcggtgagacttaaaaatatcttaatcttcagcaacacatcagtaacacatgctactgattcttttaacgttgctttttatggaattaatgacatctaggtttaatacagtatctaaatttctatatgtgacagaaatcagtctgattagacatgtatcaaaacccaataataaaatactatatctcttttaatttatgcctgaggttgcaattttttgaatttttgcaatcagcccttggcgatgaccttgagcagtaggatataaataaatcccacatgcttagcattccaataatggaacacta

SEQ ID NO: 145243 - DNA, 585 bp, Homo sapiens
cataacttaagtcatttctcatcaaaatatgtctctactgcatattctggttgataaattttccagttttttgtttatgaagattatccaattcatttctttgtagataaagcctaagaatagaaaaaaaattgttacattttattttggagytaactgaaaagccatgtagtaggcacccttgttagagcttgaagaaacaaacaaaaaaaagacttgctcaccatgaatagaacctcagccccttttttgtgtctcagttggctccttctaccttttcggtgagacttaaaaatatcttaatcttcagcaacacatcagtaacacatgctactgattcttttaacgttgctttttatggaattaatgacatctaggtttaatacagtatctaaatttctatatgtgacagaaatcagtctgattagacatgtatcaaaacccaataataaaatactatatctcttttaatttatgcctgaggttgcaattttttgaatttttgcaatcagcccttggcgatgaccttgagcagtaggatataaataaatcccacatgcttagcattccaataatggaacacta

SEQ ID NO: 145244 - DNA, 556 bp, Homo sapiens
gattctttcggaatttctgtgatcaaaatcttgcaatccacgaataaagatggtttaacttctctgtaacctttataccttttatttttatttatttttgccttttgttgctggctagtgtttccactattgaataaaaacagtgataatggacttccttgtcttggtcataacatcaggaggaaagcattgaatatcaactgctttttctgcctttattgaaatgttcatttgtattttttaatgttactgtgaattaccttggttarttttcaaatgttatctaaatggccaattgtccttctggaccccactgactccagttgggatggcactgtaagaagagaggcagagtcagtgaaggagacaaggtttattcaggatttacatacaagggtggtccggtggtggagggctgacctggagaactgctaccatttgtaaaaagcacgtagtctatatagcattttcacttagcactctccttctagcaacctccatttaaccccaaagggccttgatctgtacagcgtaagatacgggccagggatgtgga

SEQ ID NO: 145245 - DNA, 593 bp, Homo sapiens
tagcattacaaactctaaagccctgaaccttcagaatgtactgcaaatattcataactgctcacaataaatctgtgatcagagaccagccagaaatatcctgcatttatgttagataaactctgacatagagattggtacttaactaaagtttgttagaataattaacttttaatcatcaccagtgattgagatgggagaaacatctttggggtatgggacaggatgttacagcaatgacrcacatataaggatttgtcatgttacctgttcttgtttctccagccacttgcccaccattgggtgactggcactcagagacgagcgagcattgtctctctgaaattggttagaccagttactagtatcccgcgggaggcttctgtagttttcatctttctattcaaaaagaaacaaaaaggtgtcttgtaaaaaaccagaccttgcaaatcagtaatgcacctggtttttcaaaagtagcagaaaaatgattctacatatttaaaacatctttccaatcctatacaaaatagctgattgaggacattccacccagattagacctcggaattataaccatgtgccgaggacagg

SEQ ID NO: 145246 - DNA, 538 bp, Homo sapiens
aacagttaactgttctgtaataatgtgtaatctaacataacttactcccaagtcaaaagcaaaaacttaaaaattcaaatagtcattatattgagccacagaaaatacaccaagtcactgcctaagtcatgtccaatattagacaactaaattaccaaaaagtttcacagattgctcaatggaaaaaccttttaaaaataacaaatacattattttatttgaatcaagacctatttttcttggccaacctacaaaaatatgtttctytttctaagagttcaggacattaataccaaagtctcagccagaagtttatgaaagtattactgaactggatctgtttatgattataatacaaagttctcaggaaaattagtcccccaagggacttaaaatatgagtaattcaaaaagcccagatttctgctgatataatcaaactaacattccttgccctcccctcaaactttctccaatttaatctagaggagattcttgaaaagttaatcattcaatgtaaaaaaatatatactatctat

SEQ ID NO: 145247 - DNA, 492 bp, Homo sapiens
ttaaggaaagacattcatataaatatgtggccttatcaacaaaatgaatcatgaaacacaactgcctgattcatctaaaagttcacctaaaaggttccccacctctaactgtcctgactaatataacattgcataaagaaggtaattttgctttggcctcggatgaataaaacatgatcktctcacctatgatttgctacgtttctggggcccatggcctatttcagcattattaataatctgatgtaatttgtgttcattacagtaattagaaataataggagcttctcatttaaggtaatttggtcacattatggccactccttatctcaaattttagcaaaactgatgcattttaaaatatgataaaactttctaatcccataatcttctgatttatttaatatatagattttcaaagtatatcctctgaaatattaaaaagaaaattcaaagacaaggatcttcaataattaagctgctgcatgaagc

SEQ ID NO: 145248 - DNA, 192 bp, Homo sapiens
gaaaacacctgaagctggtgattagcagtagcccagtaagatctcaggtgttgggtgagtaggcttaagcatgcaaactgagaggcaaaatggcagtttaactggtatatgacgttcctttaggaacacttgactagtaagggaaaaatgcctcaaatgagcatacacmcagcttcagtaaatacgctgtgc

SEQ ID NO: 145249 - DNA, 590 bp, Homo sapiens
agttatttcaacctatagttggataactctttattttatttcacttctcacaccttcacttgtggtgtaccctttatatttaaagaaagcccttaaaggaaacatatgaagaaacagagccgcagagtgaccaaattgcttttacaaaattacctaattgtctagagactcacacagcaagaatccagttcttctgcctttcagtttaggaatttaaaaggctttctgggttttcaaggagagtcaatctttaaactcagccagaggtgacatgagggagattccacaacacacatagaaayacaatttttagggacgtagcgtagttcctgcagcaatctatcccagctgaaatgaatgtgtcacttaacttgagcaaactggaaaaaaaatgtggttggttcccactgcaggacttgcatgacaataaaggaggattgctgctaacagagaaatagctttcatctatcaccagaggaatgaacacgacccttctcagatgagctactgattttcaccttccatcatccatctcactaatggtggataccaagatgtttcagcagatgcagtgatattggtagattatt

SEQ ID NO: 145250 - DNA, 605 bp, Homo sapiens
aagttctcataagaccccctaaactttaccggtgaaggctcttctctttcccctggacaacgtatgttctggaaacatttctgagaagacatgtagatactaccattgtgacatgtttaaccagtcccagtgtccctttccataacctcagctgaagacaatcatctcagctactcctataaaaattggaaatacccagcaacttagttaatatatttgagttaaaatcatttctacttgttcaacaatttttctctatctaattactaagtgtacagggaactcaactcaccgttctgccacttgagtgccattgggcaagttacttcatcatctctttgagcctagtgatatcacctatataatatgttttacagtttaattcccatttttataactgatccttccttctcaatccttgtctcaacttttcaccctcacccattggtttattttgaagtagaggcagcaatacatgacttgtcaggggaggcaggggtaagtataaggctgrgtggaagacatactctttaaaaagagtcttggggaaggacaggagcccacaaaacagcctgggagtcaattaccctctgttgtcaagacag

SEQ ID NO: 145251 - DNA, 605 bp, Homo sapiens
aagttctcataagaccccctaaactttaccggtgaaggctcttctctttcccctggacaacgtatgttctggaaacatttctgagaagacatgtagatactaccattgtgacatgtttaaccagtcccagtgtccctttccataacctcagctgaagacaatcatctcagctactcctataaaaattggaaatacccagcaacttagttaatatatttgagttaaaatcatttctacttgttcaacaatttttctctatctaattactaagtgtacagggaactcaactcaccgttctgccacttgagtgccattgggcaagttacttcatcatctctttgagcctagtgatatcacctatataatatgttttacagtttaattcccatttttataactgatccttccttctcaatccttgtctcaacttttcaccctcacccattggtttattttgaagtagaggcagcaatacatgacttgtcaggggaggcaggggtaagtataaggctgggtggaagacataytctttaaaaagagtcttggggaaggacaggagcccacaaaacagcctgggagtcaattaccctctgttgtcaagacag

SEQ ID NO: 145252 - DNA, 587 bp, Homo sapiens
ggagataaaaatttagtcactaacttgcaatgaactcttaggcaatttgtaatttattgaacctcagttttcgtaactgtaccaaaagtaaatatatgtttgctaacattcctttcagattttatactcaagttctctgactaaacagtaatcaaacaaaccaatccaccaacagaaggtgaggataaagctgagtctgttgatcttatgacattagaatatgattcttctctaatatctatgtgatcctctaaagaatctgaggacctcagcattattcttattttcttaataactttcttagaaaaataactttatttttctgacacatttattggatttattggaagtattaaagtgtaaaaatgtggcagaaaaaaatccaaaagttagaaataagacagaatgataaggatgatgattgttaataytatgacagagcactttctgatagttccatcgtattaattctttttactctcctgaggaaatgtaactttgtatgacatactatccataaatgattcaggcctaagcgttttaacagccctgtaaagttagaggttaacttatagaaaactgataag

SEQ ID NO: 145253 - DNA, 546 bp, Homo sapiens
cgcatttaaatggctgggcacggtggctcacacctgtaatcccaacattttgggaggccgaggcaggtggatcacctgaggtcaggagttcaagascagcctggccaccatggtgaaagccagactctactaaaaatacaaaattagcttgtgtggtgctgcatgcctgtaatcccaactacttgggaggctgaaggcatgaggatcacctgaacccaggaggtggaggttgcagtgaactgagattgcaccactgcgctccagcctgggcaacagagtgagactctgtcaaaaaaaaatgcatttatatgtgggaaggggaaatcaagagattgatattttgaagtgtacatttaggaattttaacctagatcattatatagctggtaggagcttttagggacatagtaaagcaaatactataatggaaagatagaagtcctctcaggcttcctctctttctacctgctaaagaaaattccatttaaggatcacctggacctttcttagttcagataagagatgtgtaagtggagaaaaggaatg

SEQ ID NO: 145254 - DNA, 546 bp, Homo sapiens
cgcatttaaatggctgggcacggtggctcacacctgtaatcccaacattttgggaggccgaggcaggtggatcacctgaggtcaggagttcaagaccagcctggccaccatggtgaaagccagactctactaaaaatacaaaattagcttgtgtggtgctgcrtgcctgtaatcccaactacttgggaggctgaaggcatgaggatcacctgaacccaggaggtggaggttgcagtgaactgagattgcaccactgcgctccagcctgggcaacagagtgagactctgtcaaaaaaaaatgcatttatatgtgggaaggggaaatcaagagattgatattttgaagtgtacatttaggaattttaacctagatcattatatagctggtaggagcttttagggacatagtaaagcaaatactataatggaaagatagaagtcctctcaggcttcctctctttctacctgctaaagaaaattccatttaaggatcacctggacctttcttagttcagataagagatgtgtaagtggagaaaaggaatg

SEQ ID NO: 145255 - DNA, 546 bp, Homo sapiens
cgcatttaaatggctgggcacggtggctcacacctgtaatcccaacattttgggaggccgaggcaggtggatcacctgaggtcaggagttcaagaccagcctggccaccatggtgaaagccagactctactaaaaatacaaaattagcttgtgtggtgctgcatgcctgtaatcccaactacttgggaggctgaaggcatgaggatcacctgaacccaggaggtggaggttgcagtgaactgagattgcaccactgcrctccagcctgggcaacagagtgagactctgtcaaaaaaaaatgcatttatatgtgggaaggggaaatcaagagattgatattttgaagtgtacatttaggaattttaacctagatcattatatagctggtaggagcttttagggacatagtaaagcaaatactataatggaaagatagaagtcctctcaggcttcctctctttctacctgctaaagaaaattccatttaaggatcacctggacctttcttagttcagataagagatgtgtaagtggagaaaaggaatg

SEQ ID NO: 145256 - DNA, 534 bp, Homo sapiens
atcacccttttgtaatctggaagcagaacacaaaatactgaatgcctactacagagtaggcaaccacctaatcttttaaacaacttttatctacattttatagataaaattgatgtagacactgaaaggctaaatacctgttacaaatcaaacagtaaatgacagagtcttgcttggaccttgagttttccatctcaaaagatgaggctctttgattctgtatcccacactacccttactgaggctgtccaaaaaagactagagaaaagtttcctaacccctttggccttgtctccatggtatctgagtataccagctcyaaaattctaaaacatcaccttagttaggactgatgattcacatcggggcacataaagtgctgtctctttaaggttcaccctcaattcaaaatttctttaaagaaagagctattctgtgtttgtaggccacatgtaagttgttctgctaccaggcatctttattctcatatgaacaaaaggatagaatttcatgcaaggtctacatctggaagta

SEQ ID NO: 145257 - DNA, 513 bp, Homo sapiens
tattgacattatatcacccttttgtaatctggaagcagaacacaaaatactgaatgcctactacagagtaggcaaccacctaatcttttaaacaacttttatctacattttatagataaaattgatgtagacactgaaaggctaaatacctgttacaaatcaaacagtaaatgacagagtcttgcttggaccttgagttttccatctcaaaagatgaggctctttgattctgtatcccacactacccttactgaggctgtccaaaaaagactagagaaaagtttcctaacccctttggccttgtctccatggtatctgagtataccagctccaaaattytaaaacatcaccttagttaggactgatgattcacatcggggcacataaagtgctgtctctttaaggttcaccctcaattcaaaatttctttaaagaaagagctattctgtgtttgtaggccacatgtaagttgttctgctaccaggcatctttattctcatatgaacaaaagga

SEQ ID NO: 145258 - DNA, 513 bp, Homo sapiens
tattgacattatatcacccttttgtaatctggaagcagaacacaaaatactgaatgcctactacagagtaggcaaccacctaatcttttaaacaacttttatctacattttatagataaaattgatgtagacactgaaaggctaaatacctgttacaaatcaaacagtaaatgacagagtcttgcttggaccttgagttttccatctcaaaagatgaggctctttgattctgtatcccacactacccttactgaggctgtccaaaaaagactagagaaaagtttcctaacccctttggccttgtctccatggtatctgagtataccagctccaaaattctaaaacatcmccttagttaggactgatgattcacatcggggcacataaagtgctgtctctttaaggttcaccctcaattcaaaatttctttaaagaaagagctattctgtgtttgtaggccacatgtaagttgttctgctaccaggcatctttattctcatatgaacaaaagga

SEQ ID NO: 145259 - DNA, 534 bp, Homo sapiens
atcacccttttgtaatctggaagcagaacacaaaatactgaatgcctactacagagtaggcaaccacctaatcttttaaacaacttttatctacattttatagataaaattgatgtagacactgaaaggctaaatacctgttacaaatcaaacagtaaatgacagagtcttgcttggaccttgagttttccatctcaaaagatgaggctctttgattctgtatcccacactacccttactgaggctgtccaaaaaagactagagaaaagtttcctaacccctttggccttgtctccatggtatctgagtataccagctccaaaattctaaaacatcaccttagttaggactgatgattcacatcggggcacataaagtgctgtctctttaaggttcaccctcaattcaaaatttctttaaagaaagagctattctgtgtttgtaggccacatgtaagttgttctgctaccaggcatctttattctcatatgaayaaaaggatagaatttcatgcaaggtctacatctggaagta

SEQ ID NO: 145260 - DNA, 450 bp, Homo sapiens
aagttttatacatgcttcaagtttaggaagtagagctaggcaaaagaaggagtcaagtcaatgcccttcccaatttttaaaattaataccaagagttgaaaccatgaatcccagccacctttctataatcgtagaaagattagcatgttagtttaatttctgcacaccacttcagaccacctgcatccccaaatagtgtcagataacaggcctttcttcatamattaattttacattaccctctctcccaggcagctagggagctaacaagcagtccctgtggctcaatctgaacagaactggcatgcattcaggcagcacaactacagctgttgcataatagcatttctcatgtgaggaagccatatcaacacaaatactaatagtcaaaatgatttaagaagggaaaaaatgctttgagatactttgaatttgcaaggataggaattc

SEQ ID NO: 145261 - DNA, 567 bp, Homo sapiens
tatagactgagtcctgagccctaactgaatccctgatcctgactccagacagccctgactgtggtcatagactaagctctaactccagtcccaagctgagccctggtcccggatgctgccagaccacacaccaagttctcagattctattttcacaaggcctcccttttcaaagtataagcctgtctcctgaagaagaaccaagtcagcctgttagtgctcattccttggtcaagaaagagatgctcttgaaggaatggatcatggaacagcttagccttgaggggtaggagtcagagagaagcagagacagttacttccaaacatgagaagctgagctggacaagtagcccaccagagaaatagaaaagtggagaagaggaaatatggtattgggggaaagagcagcagactgctctrctaaggacagtagctggaagttttttaatatgccctattgagagtcattcattcattcagcaaacactgagcaccaagcactgagcaccaccaatgagcctagtgttcgtccattccactgtgcattcagtaagcatgtattatatgc

SEQ ID NO: 145262 - DNA, 381 bp, Homo sapiens
ggtaaagactgaaaataacaaaatgtcacgtctgtaaaagggctgagtgccagctctcatcagggacaagaatgggtcagcagttgtgctttgcatggcgctaggaaagccaactgatttggatttgccagatctaatgagagaagggagtttcagcacaagaacaaatctatagacatgacctcaggtccctgaatctcaactccagcaaatatgaaatatgtcataggtgttcctgagtgaagtsaggcctgagccagccagggcctcaccttctctggatttgggggtccagctttataccttgtgtgttcagaagccttattagcttctgtctttggaaaatgagaaggacaatgcaggctgtccagaacagaattc

SEQ ID NO: 145263 - DNA, 614 bp, Homo sapiens
gttcactgaggctatgtcctctggcagtgttaatacaatataaccaatcccaacaagacagcaacacaataatggctatttcagtgctttcagtatccttatagcttattaacatggagatcagttctgccaaagaactgtcaaagttggcgggaaatgtcttctgggatttcaggatagatttagaagacatagaaaagaaacttggcaatattgtgacttaaaattttctcaggtgagggtaattttacttataaaaatggctgggaatttttttttaggggaacttagagaatacctatcttctttcaaaacccttctttttactcaaggcctcatgcaaacatctttttgtttgggtggtgttccctggcccttctctgaatgctttctctcttctctgccccccactccaaaagcatgttgttgcatttcttrcatagtaataatccctctttactttgttttacgttttttttttttttcctgaacttttagaaaaccttgctatgttgtcagttctttgaggcaggagtcttggctcatccttctttctatcccaagctcctgatgcaggccctgaaacaccataggcactcaatcaatgcttgttg

SEQ ID NO: 145264 - DNA, 591 bp, Homo sapiens
aacaacccatgctattagtcgcagaaataaggaaattattgttatatcatcataaatattcttaatgcaaaacatcctctgcatgcaaaaaaaaagcatgtctctaaacttcatgttcaatttaactcagraaatatttgttgagcaggtactatgtacctcagaggttagaagttatttataaaactaagatactgtcattcttcctcaaatcattcccagttcaattgcttagacagaaatacataaaactaaatagaatgctgtccaacctgtggtaaattctgtaacatgtgtgacaacaaaagagaagggttcaacccagtgtggaagataaagtgtcacagaagaatgttcacaggctttagagtcgagtttaagaactgaggaacaggcaaacataaggaccatggttgcgtagtcactagacacagaactattaatgcgcatttcacaaaaattaaagagggaagagtttaatatgagtgtgcaccctgggtaagtaatcaatagtgagaagcaaggtgggattgagattatcaaaggtgctaagttatgttgagatatttgaactttgttctgaagcaagag

SEQ ID NO: 145265 - DNA, 574 bp, Homo sapiens
ttggatatacaagaagaaaaaaaaggcagaaattaaattcaaagtattctttcctcatgtcttttgtcagtttttttttattgttttttagagagtctatataaatcctttggttccctaaaggacaaaattcctttgataattttacaaattcttttctaaatagtatctctgtattgtagattaaaaaaattaatacctaggaaaggtcaggtcacttctttcagtcaaggaatgactcattcatgaaactggaaagaaaacttctttttcactcaccccaatacttgatagctatcttaaattgaatatgtctttaacagtatatttgatattatcagtgtattttgatttatatatatatatcgtatatattatatatctgtgatatatatctatatatcatttatatatctgtgatatatatctatatatcatttatatatctgtgatatatatctatatatcatttatatatctgtgatatatatctatatatcatttatatatctgtgatatatatctatatatcatatatattatatgtctgtgatrtatatctatatatcatata

SEQ ID NO: 145266 - DNA, 560 bp, Homo sapiens
catagtaccattgtttcacactgatggaagcttacttgacattaaatttcattcctctttgagacaaatatcaagaagacttttaatatagaaactcttttaagaaactcattactgaaaattgaaatgggctcttttagcacagccaaaaagaatgaaagaaaaaagttacagttttattagtttgtcttatgtttactatgatattaattattccagccatctcattttaattaaacttttggcaaatgcactagatatatttgaggtaatggagagaattctaataatcagagtgaattattatctctgctattgaagttattcctgtactattacaaattttccaagaaaaaataaatggatgcctatttgatacyatattaagcaatcaacaatcttgttatgcttcttacttcacaaagtaccctagttcatagatgacaatgaaaatgttaatgatttatttcaattggattgctgtgaaatgctgttacatgatttgcatagtagagcacttcccttcatcccaattggttaatacaactagaactacaatt

SEQ ID NO: 145267 - DNA, 455 bp, Homo sapiens
atttatataatatactcttcagtgaagacagcatgcactaaaatgatagggcattagcaaacattgccaaaaaatatctaagactaatgagcatttccatctaaagaagcaaaatctaattaatcaagaaaaatgcaccraagtgtaatgtgatgttttgaaactgaagactgtcctgctagtttatgataattaagtgctattaattgggtttgaaaaattatattaggaatagaaaacataatcttgtcaagctgttaactgctaatgaaatatagatatacatttcagatatagatttctgaaatatgaatatcaaaagctgatattgatgtaattttaaataccattcttatgaagctgtatcacatgaaactattttatcctaacagatgaggtaaactcaaccttttaattgattactttttggggagcagtgttgccatattgtggca

SEQ ID NO: 145268 - DNA, 455 bp, Homo sapiens
atttatataatatactcttcagtgaagacagcatgcactaaaatgatagggcattagcaaacattgccaaaaaatatctaagactaatgagcatttccatctaaagaagcaaaatctaattaatcaagaaaaatgcaccaaagtgtaatgtgatgttttgaaactgaagactgtcctgctagtttatgataattaagtgctattaattgggtttgaaaaattatattaggaatagaaaayataatcttgtcaagctgttaactgctaatgaaatatagatatacatttcagatatagatttctgaaatatgaatatcaaaagctgatattgatgtaattttaaataccattcttatgaagctgtatcacatgaaactattttatcctaacagatgaggtaaactcaaccttttaattgattactttttggggagcagtgttgccatattgtggca

SEQ ID NO: 145269 - DNA, 490 bp, Homo sapiens
ctctcctggctgtgggttactggttgtataacaggtatggattaggagagtggactctggagctgtactctgggttcatggtcaaaccccagcactgttacttaaatagtaagctacttcaccttcctgcatctcagcttcctcagcaataaaatgggggtaataatcgcacccagcttagagagctgttgagaggattaagtccaataaaccaggcaaagtgcttatctcagtgtctgacacacaggaagtgctcaataagtttaggatgtgattacatataagcccctggattccctgggagaagatgccagggcagtgtgggagaggctggagctgaaaaagagagaagccgggtacagtggctggggagggcagatggccccaggagccagaacatgggatgcaccctggctctgccaggcaggcggcatcccttagacctacactgctcttgttgatmcagggagcggtctgttgctttgaattc

SEQ ID NO: 145270 - DNA, 473 bp, Homo sapiens
agtctttgcatgacacttatcacaactggctgtctttccccsctttgtttactgtctatcttccctactagaaggtacgctccatgcaagcagggagcctctctgactcattcattagtatagacccagtacctggcagagagccattgctcaataaatacttgttgaatgaactgacaaatgagcaatgaaaccatgtatacagagcactttgcatgctgcctggcaagacgttgtactagatggcagtcattattattatcatcattgtcatcataatgattaccctgggcctcctgcctcattgatctgcaaggctagacctcgctttaagatttgggacaagatcaataagtgtccaggactttctgtgtcatcaaaggagctggaattcatcaaaggggctgtgagtgaacaagtttcatgccttataggtctgtgtgttcaggcttaatgtcaatgagttctacaca

SEQ ID NO: 145271 - DNA, 593 bp, Homo sapiens
aagctgaggctgttgctacaacaatcatgaggctgttgctatgtcagccatgaggctgctgacactccctatcttgaaagttctgaaacccagagtgaccaaaggtctgagatgtggttctgtgctgccccgagatctggagaaccatgttgataagcctccacttccgagggtgatctatgcatgtctcttctttgcaatcttaaagagccaaactaatatagaattacctaggaataaatagtaatatagcaaattgggcctttattgaatggttctcatttaaggctgttagcacatcaaacagtgatatgaaaaaagacataccaattgaccttgggaataaaagagtaaatgtaagcaacgtttgtcacactgacaggcttggcaaatagtgttttgatttgccagcagccctactccagacagcagccactagttagatacataaaccattaagctaaaaacagaactatcattacaggcatcatctagtaatttgcaggtaattgatggacattagtcataatcacacaccatacayacacacacacacacacacacacacacacacacccctacaaacacaggtt

SEQ ID NO: 145272 - DNA, 521 bp, Homo sapiens
tgctgatttcactcctatgtgactcaaccctagtctctcccctacatcccattcccatggccattatcctagctcacgtctcatcatctcttatctggaccaaggcaatgttttcctaagtgggctcccagcctccagtcttgcatccttgcaatccattctcccttcagcagccagagtgatcttttgaaatgtctaattgtgtcacctccttgcttctaagagcccttcagtggctctccattgtctacaggacaatgttcagatccttaatattcatacaggtctgtctgctgtagagccttccttgccttctgataytattcccagagactgaatcacatgcagctttccaccactctatgtgggccttggcctccagtctttgctcagtctttcctctttctgtctggaatcccttcctctccacttcttcatccttcccttagttcactgaccctcttcctgtaagactcagccacagtggtgccacctccaggaagcagggcctgtaagggagt

SEQ ID NO: 145273 - DNA, 410 bp, Homo sapiens
ttttacaaacaacatattcattacatrtaagtaaatattatatacatgaatattatacataataaatattatatataatgaattaatgtctattccatcttgggaactgctttttcaagtgagtttgtattcacgtgtctaaagacattttaatcacattccactatatttatatgtcatagcttgtcaacttattctttaagtatttaatcctgaagttgtttcctattattcattagtataaataaggcttctgtaagcatagagtctttcttggattacttcccttttctaaaagtagtactaaaggtgaggcatagtggttgtacacctgcaatcctagtgctttgggaggctgaggcaggaaggtggcttgagaccaggtgttcaaaactagcctgggcaacata

SEQ ID NO: 145274 - DNA, 413 bp, Homo sapiens
ttgtttattttttattttttgtttgtttgtttttttgagaccgagtctcgctctgtcacccaggctggagtgcaatggcactatcttggctcactgcaacctctgcctcccaggttcaagcgattctcctgcctcagcctcccaagtaactgagactacagaagtgcaccaccatgcctggcttatttttgtgtttttagagagayggggtttcgccaagttggccaggtttatgtccaactcctgacttcaggtaatctgcctgccttggcctttagtttagtttaactttgaagcaaggatggtaatagtccctccctaaaactggtctgctccctgttgggggatgaaaaccacctttgtaagactaatgaaaggccacaagattagaattttgggagaggcctgaattc

SEQ ID NO: 145275 - DNA, 604 bp, Homo sapiens
gttcagggccaactttacctaaatctcaaaaaagcaagggaggataagttactatttccaccaaatatgctactaaaacagaacaagtttataaatttgctaaatcaagtcttcagaatgtaacaatggtgttaggaataagaatctagtcagacaaatgaaaytcatgcaaagtagctcaataaagaggtaataacacattgagctatttacaaattcaaacgttaaagtccaaacataatatggtgaggcaatccaaatggaaaacttggcattatcaaagtttgggatgacagagggggatagaacagtaggaaccgggactgtagaaagggcctatgcagtaaaagctcaagccagggaggggacttggcttccgctggttactctgcccctatcagattcaaggagaaagggggtgaaataacctggttgctgccttcttttcactctatagtcttccaccaggcctctcattggccaactgtacccagcatctaaatagttaaggaacctgggatacttcttttgctgggttagcttcctgagagaagaaacaaggcaagaaggtgaaagaagtggatgagttattaagtatgcaaat

SEQ ID NO: 145276 - DNA, 565 bp, Homo sapiens
atatagtttcataaagtggcggtaataaaatgaaatcactcaagtgctgtgctgcttagacacagttcaacaaatttgtaaatattcaagcctgctagctctgcytgcctgtcagtcatcaaccgtctgtgcacctctgttctttcatctgaaaaatggggatgagaaacattcctgcctcaaaaggttatcgagaggagcaatgaagttaattcagataaagtgcttagcattatgtctggcacatcttaagcacacagtaagtgtaggatattattaggcactcaaggggttgacatttggaaagcagatgtaggtaattcaggacaatttttctataattcaaggtgatgagggctacggcagcataggcacatgctaacatggagtattagaccttcccatcaggactcagtaccatggaagctgcaggtgaccccattccctgagaccaagccaatggctcatggtggagacaaacagctaatatgcttttgcctctgatggtcacattccatttctccatgcctatgctttctaccattagcacatatgcttaagagtt

SEQ ID NO: 145277 - DNA, 565 bp, Homo sapiens
atatagtttcataaagtggcggtaataaaatgaaatcactcaagtgctgtgctgcttagacacagttcaacaaatttgtaaatattcaagcctgctagctctgcctgcctgtcagtcatcaaccgtctgtgcacctctgttctttcatctgaaaaatggggatgagaaacattcctgcctcaaaaggttatcgagaggagcaatgaagttaattcagataaagtgcttagcattatgtctggcacatcttaagcacacagtaagtgtaggatattattaggcactcaaggggttgacatttggaaagsagatgtaggtaattcaggacaatttttctataattcaaggtgatgagggctacggcagcataggcacatgctaacatggagtattagaccttcccatcaggactcagtaccatggaagctgcaggtgaccccattccctgagaccaagccaatggctcatggtggagacaaacagctaatatgcttttgcctctgatggtcacattccatttctccatgcctatgctttctaccattagcacatatgcttaagagtt

SEQ ID NO: 145278 - DNA, 261 bp, Homo sapiens
gtgtgccacggggtagagcaagtgtctacacagcggtkggcacccacgatagcagtgtgtttggaaggggcagagctgtcccagaccagcccctgcccctctgtagtggctgggatcaccagttgcactcctgccagtgaggaacatggagagtgagtggtgggcaggcaagcctggtttctgcagaagctgcagggactggatacaggacaggcaggcaagtgagtggctggggagatgcccaggtcaggacagcttact

SEQ ID NO: 145279 - DNA, 569 bp, Homo sapiens
tagagcaagtgtctacacagcggttggcacccacgatagcagtgtgtttggaaggggcagagctgtcccagaccagcccctgcccctctgtagtggctgggatcaccagttgcrctcctgccagtgaggaacatggagagtgagtggtgggcaggcaagcctggtttctgcagaagctgcagggactggatacaggacaggcaggcaagtgagtggctggggagatgcccaggtcaggacagcttactgccaagtgttcagaactgtccactctgcaaaaccatccccaaattacttattgaactgttttcactgctgagaggcagagccaatagaactcgccttgcattggggagcctgacctctagcaagatcagcatgcctccccctgggctccattcaatgttcccagtgaccaccagacctcaagcagagggctgatggtgagtcctggaattctccacaaataaagaagctgtgaaacagcgacaaacacaacatctaatcacccaaatccatcctatttttttcatctttttatccattcatctatccatccatccatccgt

SEQ ID NO: 145280 - DNA, 517 bp, Homo sapiens
gttgcagtaatataaaacatgctataattcttatgtcaaattaaaaaacagtgacaaactatgcatataaaataaagaccaggcagaaatacacaaaaatccatagttgttgagctagttggaactatagatcatcctcccttccatttactgaaatttatgaagtttttttatggcttctataaatttaaaaccaaacaaaatgaaaacaaatgaatagcagtgcacctttctagcttttttttttttctagcccccactgaccagtaaaaatgattctggatttgttgacatttttgtcctctctcccaccctccaaggagggtcttctatttttttctggcttctaagatggaaaataagatagtggagtaaaggagaaggtgccaagaaataatgttcaagaaatacaaataaaagtttcaaattattttgaaattcctttagcattaatgaatgayattcttttaaacaagactgtgtcctaaggatgaatcacatgagtgacaattgataa

SEQ ID NO: 145281 - DNA, 533 bp, Homo sapiens
gcatttattcatacctgaattacttatttatatatttatttattcaatccttctgtctgaatacagtcaccaggagggtgctgcctcacgggctggttcaccctggatgtagcatctagaacagaggttggtgtaggtgaatattcagaaacatttgctgactgctgcaagtgagtcacataactcaggaggatgtcccctgtccacactcatcttcccaatccaaactccctccccagagatgatyattgctaacattttcatgtatttccttctagtcctttctctgagtatttacatatatagcacacaatcatgtatggacacacacacagacacactatttgtctctatttttgctcctttttggttttcttggcagatgagatctttctagccataccgtcctgcagcttgctcttatcacttaggaatgtgcctagagggaagttttcacttcactttagcacatagagattgacttcattttaggttaaaaaaaaaaaaaaaaaaaaagcaagcctggtcttctg

SEQ ID NO: 145282 - DNA, 447 bp, Homo sapiens
ttggtgtaggtgaatattcagaaacatttgctgactgctgcaagtgagtcacataactcaggaggatgtcccctgtccacactcatcttcccaatccaaactccctccccagagatgatcattgctaacattttcatgtatttccttctagtcctttctctgagtatttacatatatakcacacaatcatgtatggacacacacacagacacactatttgtctctatttttgctcctttttggttttcttggcagatgagatctttctagccataccgtcctgcagcttgctcttatcacttaggaatgtgcctagagggaagttttcacttcactttagcacatagagattgacttcattttaggttaaaaaaaaaaaaaaaaaaaaagcaagcctggtcttctgcaattaggtaactatgtgattatcaggggacacatgggcct

SEQ ID NO: 145283 - DNA, 533 bp, Homo sapiens
gcatttattcatacctgaattacttatttatatatttatttattcaatccttctgtctgaatacagtcaccaggagggtgctgcctcacgggctggttcaccctggatgtagcatctagaacagaggttggtgtaggtgaatattcagaaacatttgctgactgctgcaagtgagtcacataactcaggaggatgtcccctgtccacactcatcttcccaatccaaactccctccccagagatgatcattgctaacattttcatgtatttccttctagtcctttctctgagtatttacatatatagcacacaatcatgtatggacacacacacagacacackatttgtctctatttttgctcctttttggttttcttggcagatgagatctttctagccataccgtcctgcagcttgctcttatcacttaggaatgtgcctagagggaagttttcacttcactttagcacatagagattgacttcattttaggttaaaaaaaaaaaaaaaaaaaaagcaagcctggtcttctg

SEQ ID NO: 145284 - DNA, 540 bp, Homo sapiens
tttgccacatcctatgaaatgtattaaaattcctgtatcagtcagctcaggctgccataacgaaacaccacaaagtggttgcctttaccaagagaaatttatttcttacagttctggargctggaggtctgaggtcagggtgcccacattcttggtttctggtgagggccctcttcctgacttgccaatggctgccttctcactggatcctcatatggcagaggcaaagccagtaagctctctggtatctgttttcataaggatactaatctcatcctgagggcctcatcctcatgatttcatctgaacctaattacctcccaaagaccccatctcccaatgccatcacattgagggttacaccttccatatatgtattcaaggtggcacaattcagcccatagcaatgctctgctagagccttagaggtgagatgtggttggttagttgacataatgtaatattttgtagacacttattaaacatttagtaatattaatttgcactttttatttccacattatgaagccagcaaaatga

SEQ ID NO: 145285 - DNA, 489 bp, Homo sapiens
tgtggtttgatttcagaggggaccatttctgcccttgcaggtgggtggcagaaaattgggatgcttctgtggacaagagtggccagaaagagatgccaccctcaactgccaccccagcttccccctaagggagatycatgctgcaacagggtcccaattaccagacccgttagtcaggcaactttctgtaggatgagcacggatgaattatttgcttttagttcaggactggtgaacaagcaacccaccaggaagaaaaatgggacgtccttgaaacttcctgcagaagaggatctggaggcgcattcggcccactgcaaagccacacacgtcggtgagaccaaagaatttgtcacctcagattctttcgttaacagacagattcattatgtaaacaagacacaaaaatattttcataagatgtcagaatggatttcctctccttccccagcaacaatgtgattcttgtttgtgggactgtggggcttc

SEQ ID NO: 145286 - DNA, 393 bp, Homo sapiens
cagcccccacagtccccacagtcccagctcagagcaagacagcaggcagggacctttccaccgcagtggcagatcaggagacttcagaaggaatttttcacttttggaatgcrcagcaacccatttgaattagcgcctttagcaggaaaagcaaatcggctgtgagtggaatccatgctagggttctgttccacagcagagagaggctaaaattattacagacaggtgaaggtgaatttatactgcaaacaaggtcactgtgtttataaaactaaacatatggggggaggatgtgtgtgaaaggattcttgattgttaatgggagtctctgcagtagcgttttatggcaggagtgaagctttcatatcaaagaagctactgccatgtaccatg

SEQ ID NO: 145287 - DNA, 393 bp, Homo sapiens
cagcccccacagtccccacagtcccagctcagagcaagacagcaggcagggacctttccaccgcagtggcagatcaggagacttcagaaggaatttttcacttttggaatgcgcagcaacccatttgaattagcgcctttagcaggaaaagcaaatcggctgtgagtggaatccaygctagggttctgttccacagcagagagaggctaaaattattacagacaggtgaaggtgaatttatactgcaaacaaggtcactgtgtttataaaactaaacatatggggggaggatgtgtgtgaaaggattcttgattgttaatgggagtctctgcagtagcgttttatggcaggagtgaagctttcatatcaaagaagctactgccatgtaccatg

SEQ ID NO: 145288 - DNA, 410 bp, Homo sapiens
tgagaaacccaaagctgggaagttgcagatgccaccttgggcgtcagcatgtcagctaagccccacaggcttagcaagtgagaggcctagaaggagtggagtaaaggtgttggaaaccctgccccagtgtgctcactcactttctgtgcttggttgattagggcaggggacagggmcccatgcagcacctcccacccccactggacagtaggtcctgggctgccccacactttggtgactggccttcctggggagtggggaaagctggcatgatgctccctttgctaaagattaagttctgtagactcactccttttcaaagtttgggttagggttaggacacttggccactccaacagcagcttctggtagatagggtacactgtcattaggtcaaaagaggaagaatt

SEQ ID NO: 145289 - DNA, 410 bp, Homo sapiens
tgagaaacccaaagctgggaagttgcagatgccaccttgggcgtcagcatgtcagctaagccccacaggcttagcaagtgagaggcctagaaggagtggagtaaaggtgttggaaaccctgccccagtgtgctcactcactttctgtgcttggttgattagggcaggggacagggacycatgcagcacctcccacccccactggacagtaggtcctgggctgccccacactttggtgactggccttcctggggagtggggaaagctggcatgatgctccctttgctaaagattaagttctgtagactcactccttttcaaagtttgggttagggttaggacacttggccactccaacagcagcttctggtagatagggtacactgtcattaggtcaaaagaggaagaatt

SEQ ID NO: 145290 - DNA, 410 bp, Homo sapiens
tgagaaacccaaagctgggaagttgcagatgccaccttgggcgtcagcatgtcagctaagccccacaggcttagcaagtgagaggcctagaaggagtggagtaaaggtgttggaaaccctgccccagtgtgctcactcactttctgtgcttggttgattagggcaggggacagggacccatgcagcacctcccacccccactggacagtaggtcctgggctgccccacacttyggtgactggccttcctggggagtggggaaagctggcatgatgctccctttgctaaagattaagttctgtagactcactccttttcaaagtttgggttagggttaggacacttggccactccaacagcagcttctggtagatagggtacactgtcattaggtcaaaagaggaagaatt

SEQ ID NO: 145291 - DNA, 410 bp, Homo sapiens
tgagaaacccaaagctgggaagttgcagatgccaccttgggcgtcagcatgtcagctaagccccacaggcttagcaagtgagaggcctagaaggagtggagtaaaggtgttggaaaccctgccccagtgtgctcactcactttctgtgcttggttgattagggcaggggacagggacccatgcagcacctcccacccccactggacagtaggtcctgggctgccccacactttggtgactggccttcctggggagtggggaaagctggcatgatgctccctttgctaaagattaagttctgtagactcactccttttcaaagtttgsgttagggttaggacacttggccactccaacagcagcttctggtagatagggtacactgtcattaggtcaaaagaggaagaatt

SEQ ID NO: 145292 - DNA, 523 bp, Homo sapiens
aaaaacagcaatacaacaataaaacataatgcaaatgaataatattgtataacaattatttacagagcatttacattgtgttaggtattagaggtaatctagggggatttaaagtagatgggaggatgcatgtaggttatatgcaaatactagaccattttattacatacaagggacttgagaatccttggattctggcatccacaaagggttcctggagccaatccttcccctactccaggataccgaggacaactgtattctcatggttttcatatcaacattaagaaaatctgaccactctacaaggctggcatttggaagaaagtgaagggattctagcagtttttaggcttgactctgccagttgtggaaagagtgcaatgtgctcccactgtcttcgggtgggggacagctagcagtgtgtggggaaagtgctrgtctcatcccagatgcacagcagtcacctgctccctgctgccaagcctcctgtgggcctgtggagggctgccctgcacacctg

SEQ ID NO: 145293 - DNA, 575 bp, Homo sapiens
agatctctgactcgagtcctgtttccctcattccctagactaagcactcactgtacacagggcagacaatgtggcaactttgcacaagaaaggggacatcctcttaggtggatgcaaccctgcaggtcctttgtgtaaaagaaacaatgcctcttcctctggccagatayatcttagagcaatgccggtggctttgagcagtgtgtaggatagatttcaacctgctccttgacctcagtgggtatcattgtgcattaggcaacttgcacacctacatgtgccatcccaattacatgtgcttggttctatactaggtaccaaggactcagaaaagagtaagacctgggtcctgcccaccaggaactctcattttgaggacacgccccccctccctgacgccaaccattcctcacacactcaccatttccacctccacctccacctttgacacagagctgcgtgaagcggagctcgctgtcatggtcccgcagcatgaagtgaaaatcctcccatgtcagctcctccttgtcctggaatcccgactcccggaacatagactccaccacctcggccag

SEQ ID NO: 145294 - DNA, 395 bp, Homo sapiens
gaattcccctgcaccgctgccatcccagtccctggctttgrcgctggggtagggataaagaagagcgcagctgtgggaaccccggtgggctgggagaagcccgctcacagcgggtccccccactccccggcagggtggcgttctgcttctggctcctctccaacgtgctgctctccacgccggccccgctctacggaggcctggcactgctgaccaccggagccttcgcgctcttcggggtcttcgccttggcctccatctctagcgtgccgctctgcccgctccgcctaggctcctccgcgctcaccactcagtacggcgccgccttctgggtcacgctggcaaccggtgaggaccgagagaatgggccccgggggctaagggtggagacagga

SEQ ID NO: 145295 - DNA, 525 bp, Homo sapiens
gattcctggctctagtgtttagaaacacacttgagagagccaggttgaaagctctccctgggtgcgtgaccacacttaggtggtgaaggtggggacgcctgcatgggtgctggggggstcatgcacagctggccaccctcatccctggtttgtcagcgcagacccctgggaagcctcctcgcctgctgtggtctctcttctaagcatcttcagtggtgcagtggctcaggctctcactgtgctcaagatgcaggctgaacgtcacactcaggctaaggccaagccccccacctccccacaccacccacccctgtctagtgaggacgtgctactctagctaagtccctaccatcctcctcgtccaccatggctggcagaatcacatctcagaactaaaatgtagaagttgattttcagcataaagagcttgtttccacacatctcaagattaggaagtgacttgtacttggagagataaatgttgacttttcatggagaaaatggacaaggtcctctcctactggc

SEQ ID NO: 145296 - DNA, 230 bp, Homo sapiens
gtctagtgaggacgtgctactctagctaagtccctaccatcctcctcgtccaccatggctggcagaatcacatctcagaactaaaatgtagaagttgattttcagcataaagagcttgtttccacacakctcaagattaggaagtgacttgtacttggagagataaatgttgacttttcatggagaaaatggacaaggtcctctcctactggcctggccctaggctagtt

SEQ ID NO: 145297 - DNA, 484 bp, Homo sapiens
cccattttttttcctttagaacagccttccccattcctcaaaatggaattgaggaaatcagcattccttagtagattcctggcttcagtttttatccacggctgggaaaggagtgacctgcaaggctgctttaaacaccctttggcgtggcctgaaatcaaagccgcacccacactggagtgcagttgtctcaaatgagaactcactccctcaggcaggcacatccaggaagtgctaagacacttaaaagttcctagtgctggccaggtgcggtggctcaagcctgtaatcccagcaccttgggaggctgaggtgggcggatcatgaggtcaggagatcgagaccattctggctaacatggtgaaaccctgtctctactaaaaatacaaaaaaaaaaaaaaaaaaaaattagccaggcatggtggcaggygcctgtagtcccagctactcgggaggctgaggcaggagaacggtgtgaacccgg

SEQ ID NO: 145298 - DNA, 580 bp, Homo sapiens
tgggtatcctactttcacaattcccatcacctgtacaccattctcctctcttttcattgaatcagtcattgactttgccactttgggcacgtactcaagggagataactcagactgcatgaagtgactagtgggaagacatccctcrccaaatttacaccattcacttttttctctaagtcagtttctaatgaactgtgaacttctctttcaaaatggccctgacctttattttattgttcgttttaaatgcttctacagttcctaatataatcagctttcctcccctgaaactgagtcttcaggcttattttctaaaatagaagatagcctgatctgatacagacttgttcagcatgacactggattataaaacaagatgtgggaaaagatggaattttgtaaattccattatcccctctttagctgatggagggctatacttggtaggtagagtagcaaaaagttttatgtaaggtgatcaggcaggaagaggaagtttgagaaaggctcctctcatggcattagagagaaggcagataaaaagaggcaaaagaagagagacctaaaattattttcct

SEQ ID NO: 145299 - DNA, 542 bp, Homo sapiens
tccttgcctgcatttctctgttattgatagttttctgaatcccaaaggcagctctcaaactgggaagttctcaaactcatttttgtgtagtaactaatatgtataacatatttgatacttagctgttgcatgtctgagtctcctactccatagtgacctccttaagatcagggatcacttatgttattgagctttagagcaaagaaatgctcatttgactaacacatgtatttaaaatgtctaacatatgtctgagtatataatatatgtttattaaatatttgtggaataaatgaatatacaaagttttggattacctgacacctatcagtgatgacaatagattcaaagaatatatgtggaaagaagagagcaaaaggtagaagaaaacaaaggaagggaggggagggaaacatgctgggttgttcaacagaacgtctctatttcaaaggtcatatttagtaatattttggtytgaagtcataactaataccattatttaagtaaaatagcaaataagcccacatcacagtcagagactt

SEQ ID NO: 145300 - DNA, 600 bp, Homo sapiens
tttgcaaaaagtggtggcaggaaaattggatatccatatgcagaagaatgacttaaatataatacccaaaactataaaactactagggaaaaacagggaaaatgctttaagacattggcattggcaaatatttcatggctaatactgcaaaagsgcagacagctataacaaaaatagacaaataggactatattaaactaaaagccttcttcacagcaaaggaaaaaatgcacagagtaaagaaacaacctgttgaatgggagaaacttctacgaactatttatctgacaagggacgaattaatatccagaatatacaaggaactaaagcaactcaaccaccaatatcaaataatcccattaaaaagtgtgttaaggacatgaatacaatttttaataagacatacaaatggctatcaggtatatgaaaaaatactcaacatcactaatcattagggaaatgcaaatcaaaaccacaatgcaataccattttatcccagttagaatggctattacttaaaaaacaagcaacaaaaaagcacaggtactgtcaaggatgagtagaaaagggaactcttgtacactgttgggaatgtaattt

SEQ ID NO: 145301 - DNA, 560 bp, Homo sapiens
cctggaatgcattaaaatgcactattatattctcattttacatatgagaaactgaggcaccgagaggcaaagttattcaaagtcatgaaaagttgaagtcaaacctaggctatccaaggctttgctatactaaaccacgttccagatttctagtttgggttacggggtagctggggatggattaattcagatgaggactataagaaaataatgctttgctmtccctcccctagcccccaaacgcctgacaggccccgctgtgtgatgttcccttccctgtgtccatgtgttttcattgttcaactcccacttatgagtgagaacacgtggtgttttggttttctattcctgtgttagtaactttttaatctgtaaatacacacacacacagaaagagagagaggggaaaacgctttaaaaagtaaacactttcccttaccaatcttctcaataaattagttatattattcctgatactcctggtataggccagggtttatttacacacatagacacacatttgctgctggtcagaatctgcaggccaacaaggacaacac

SEQ ID NO: 145302 - DNA, 315 bp, Homo sapiens
gaagtggcctgtaagtcaattagtaaggaaataaataataaaatctatcccagcacttaggaataggtggacattttytgactttatgaaggcaccataaactgatcaattttatgaaacgagctaaaagacactcttatggcaggcaggttatgacgttagagtcttaaagagaatagaagataactggacaagataattctgaggacaaatatctgctatagctgaacaaatctctgctataatagtgttatgtagcactaattcagttggggttctcattttcaaaaacgcgtcttccaaactagagagtgc

SEQ ID NO: 145303 - DNA, 315 bp, Homo sapiens
gaagtggcctgtaagtcaattagtaaggaaataaataataaaatctatcccagcacttaggaataggtggacattttctgactttatgaaggcaccataaactgatcaattttatgaaacgagctaaaagacactcttatggcaggcaggttatgacgttagagtcttaaagagaatagaagataactggrcaagataattctgaggacaaatatctgctatagctgaacaaatctctgctataatagtgttatgtagcactaattcagttggggttctcattttcaaaaacgcgtcttccaaactagagagtgc

SEQ ID NO: 145304 - DNA, 315 bp, Homo sapiens
gaagtggcctgtaagtcaattagtaaggaaataaataataaaatctatcccagcacttaggaataggtggacattttctgactttatgaaggcaccataaactgatcaattttatgaaacgagctaaaagacactcttatggcaggcaggttatgacgttagagtcttaaagagaatagaagataactggacaagataattctgaggacaaatatctgctatagctgaacaaatctctgctataatagtgttatgtagcactaattcagttggggttctcattttcaaaaaygcgtcttccaaactagagagtgc

SEQ ID NO: 145305 - DNA, 453 bp, Homo sapiens
aagtgcttaattggtggtgagagctgggggagttgtatccgatatcattaccactaaacctactatttgtagatttcagaatatttgggataaggaggtttsgctgcaccatcagagcatgcagtgatgtcactggtccttggtaaaccagcaatataaataaacttttctttaaagatggtgacattttctctttccaaacaaacccaccagaaacctgagtgccagatctaaatcaacagtgtattgcacagctgctagataggatggctcttcccaaaacctctacatgtaatcattattctaatactgataattatatttccatatcaactgtactaccctctccttttgattccatgtacaccgcctttatttgggcctccatcacctctcccaggcactctaattaaagctctctaagtagtttctttgccttcagtctctcctttc

SEQ ID NO: 145306 - DNA, 479 bp, Homo sapiens
ctcacatgaaaacacccaccatactcccaacccacccctccatctgcacgctggctggcaaaggaaaaatgcaaactgaaaactctctttgaggccctgtttgcatccagctttctgagtaaaaatgctggttcttgtgctatggtttgaatgcttgtgtccccgcaaatgcctatgctgaaacctaattygcaaggtaatgttattaagaggttgggcatttggggagttgattaggtcatgagagctcagccctcatgaatgggactagtgccattataaaagaggtccaaaggagctcctttgcccttttcaccatgtgatgacacagctagaagtcccatatatgaatcaggaaactgatgcttaccaaacaccaaatctactagcaccttgatcttggatttctcagcctacggaaactatgagaaataaatttctattgtttttaagctgcctattttatggtattattttta

SEQ ID NO: 145307 - DNA, 592 bp, Homo sapiens
gtgtaaatttgtacagatatgatgggaatagacaatgcatagttctgagcatatgctcttttttttgtccatttttacacaaaaggatacaaccaacaccagtagttagtatatgggataaccttttgagaataatgaaagcaacaargagtattttttaagtaagtctagagcttagctttctcacctttaaagtgacagactggcccaggcgatacttccttaaatacacgagcctagcttcatcactctgtgcttctgctagtctcagagatgactgagtcagaaaagaagattaagggctaactaccatttaacaggatgagagtttcaccataactttggttgttctgttcaaaaagcactatagccaggcatggtgacatgtgcctgtaattacatcctctcaggaggctgaggcaggaggattgcgtgagcccaggacaatagtgagaccctatctcaaaaaaaaaaaaaaaatggaaaagcattattgcattaatcccagtgcaaatattatgtgttaagtgacttttcctacctttgcccctaaccctcatcatagcttatcttcccccaaccccacaaccca

SEQ ID NO: 145308 - DNA, 539 bp, Homo sapiens
tgaaggtgcctggcctcccccctcatccttatcagcagtggtggcatcagtttcagggtaggatgcagtcctttaggggcttggctctcagaatggtgccatgctgaagctgctcatggctcaaatgcctgtgggactcagcatgagttccttccctgaagcaatgcctctgtgcatctctaggcagctctcttgttatccttgaggcccctgtaggttgagggactctcctgtagctagaattgtagaagtccatgacaggaatrtggagccctgggggctgcttacttaccctttattcatgtctgggagtttctcctagctcccaactattctcagctaagcaggatgccatgtgatatggtttggctgtgtccccacccaaatctcatctcgaattgtaactcccacaattcccatatgtcatggggagaacccggtgacaggtaattgaatcataggggcaggaatttaccatgctgttctcatgatagtgaataagttttacaagatgtgatggttttaaaaatgggaatttc

SEQ ID NO: 145309 - DNA, 539 bp, Homo sapiens
tgaaggtgcctggcctcccccctcatccttatcagcagtggtggcatcagtttcagggtaggatgcagtcctttaggggcttggctctcagaatggtgccatgctgaagctgctcatggctcaaatgcctgtgggactcagcatgagttccttccctgaagcaatgcctctgtgcatctctaggcagctctcttgttatccttgaggcccctgtaggttgagggactctcctgtagctagaattgtagaagtccatgacaggaatgtggagccctgggggctgcttacttaccctttattcatgtctgggagtttctcctagctcccaactattctcagctaagcaggatgccatgtgatatggtttggctgtgtccccacccaaatctcatctcgaattgtaactcccacaattcccatatgtcatggggagaaccyggtgacaggtaattgaatcataggggcaggaatttaccatgctgttctcatgatagtgaataagttttacaagatgtgatggttttaaaaatgggaatttc

SEQ ID NO: 145310 - DNA, 341 bp, Homo sapiens
cagcaggcccagtcaggggctcakagataaaactcccatctctctgggacagagcaccttggggaaggggcggctgtgggcgcaacttcaacagacttaaacgttcctgcctgccagctttgaagagagcagtagatctcccagcacagggctcgagctctactaagggaaagactgcctcctcaagtgggtccctgaaccctgtgcctcctgactgggagatacctcccagcaggggccgacagacacctcatgtaagagagctccagctggcgtctggcaggtgaccctctgggacaaagcttccagaggaaggaacaggcagcaatccttgctgttat

SEQ ID NO: 145311 - DNA, 372 bp, Homo sapiens
ttctctgggcaaggatccctgaaagaaaggcagcaggcccagtcaggggctcagagataaaactcccatctctctgggacagagcaccttggggaaggggcrgctgtgggcgcaacttcaacagacttaaacgttcctgcctgccagctttgaagagagcagtagatctcccagcacagggctcgagctctactaagggaaagactgcctcctcaagtgggtccctgaaccctgtgcctcctgactgggagatacctcccagcaggggccgacagacacctcatgtaagagagctccagctggcgtctggcaggtgaccctctgggacaaagcttccagaggaaggaacaggcagcaatccttgctgttatg

SEQ ID NO: 145312 - DNA, 341 bp, Homo sapiens
cagcaggcccagtcaggggctcagagataaaactcccatctctctgggacagagcaccttggggaaggggcggctgtgggcgcarcttcaacagacttaaacgttcctgcctgccagctttgaagagagcagtagatctcccagcacagggctcgagctctactaagggaaagactgcctcctcaagtgggtccctgaaccctgtgcctcctgactgggagatacctcccagcaggggccgacagacacctcatgtaagagagctccagctggcgtctggcaggtgaccctctgggacaaagcttccagaggaaggaacaggcagcaatccttgctgttat

SEQ ID NO: 145313 - DNA, 399 bp, Homo sapiens
ggcaaggatccctgaaagaaaggcagcaggcccagtcaggggctcagagataaaactcccatctctctgggacagagcaccttggggaaggggcggctgtgggcgcaacttcaacagacttaaaygttcctgcctgccagctttgaagagagcagtagatctcccagcacagggctcgagctctactaagggaaagactgcctcctcaagtgggtccctgaaccctgtgcctcctgactgggagatacctcccagcaggggccgacagacacctcatgtaagagagctccagctggcgtctggcaggtgaccctctgggacaaagcttccagaggaaggaacaggcagcaatccttgctgttatgcagccttcactggtgatacccaggcaaagagggt

SEQ ID NO: 145314 - DNA, 372 bp, Homo sapiens
ttctctgggcaaggatccctgaaagaaaggcagcaggcccagtcaggggctcagagataaaactcccatctctctgggacagagcaccttggggaaggggcggctgtgggcgcaacttcaacagacttaaacgttcctgcctgccagctttgaagagagcagtagatctcccagcacagggctcgagctctactaagggaaagactgcctcctcaagtgggtccctgaaccctgtgcctcctgactgggagatacctcccagcaggggccracagacacctcatgtaagagagctccagctggcgtctggcaggtgaccctctgggacaaagcttccagaggaaggaacaggcagcaatccttgctgttatg

SEQ ID NO: 145315 - DNA, 372 bp, Homo sapiens
ttctctgggcaaggatccctgaaagaaaggcagcaggcccagtcaggggctcagagataaaactcccatctctctgggacagagcaccttggggaaggggcggctgtgggcgcaacttcaacagacttaaacgttcctgcctgccagctttgaagagagcagtagatctcccagcacagggctcgagctctactaagggaaagactgcctcctcaagtgggtccctgaaccctgtgcctcctgactgggagatacctcccagcaggggccgacagacacctcatgtaagagagctccagctggcgtctggcaggtgaccctmtgggacaaagcttccagaggaaggaacaggcagcaatccttgctgttatg

SEQ ID NO: 145316 - DNA, 578 bp, Homo sapiens
aagctttgttcttttgctctttgcaataaatcttgctgctcactctttgggtctacactgcctttttgagctataacactcacagcaaaggtccacagcttcactcctgaagccagcgagaccatgaacctactgggaggaatgaacaactccagatgtgccgcctttatgagctgtaacactcaccgygaaggtctgcaacttcactcctgaaggcagtgagaccaggaaaccaccagaaggaagaaactccggacatgtccaaacatcagaaggcacaaactccggacacaccatctttaagaactgtaacactcaccgtgagggtccacggcttcattcttgaagtcagcgagaccaggaacccaccaattccagacacactagttttgttaggataaaggaccatactgtcatctgctgaaaatttgccataataaaatataaaaatctgtaatgtctgccatatgaatggtgcttgtgagatgtggcatcttttgtactaattatatatatggaaacaatataaggttaatagcaatctggaaacaatataaggttaatagcaatgaagagga

SEQ ID NO: 145317 - DNA, 578 bp, Homo sapiens
aagctttgttcttttgctctttgcaataaatcttgctgctcactctttgggtctacactgcctttttgagctataacactcacagcaaaggtccacagcttcactcctgaagccagcgagaccatgaacctactgggaggaatgaacaactccagatgtgccgcctttatgagctgtaacactcaccgcgaaggtctgcaacttcactcctgaaggcagtgagaccaggaaaccaccagaaggaagaaactccggacatgtccaaacatcagaaggcacaaactccggacacaccatctttaagaactgtaacactcaccgtgagggtccacggcttcattcttgaagtcagcgagaccaggaacccaccamttccagacacactagttttgttaggataaaggaccatactgtcatctgctgaaaatttgccataataaaatataaaaatctgtaatgtctgccatatgaatggtgcttgtgagatgtggcatcttttgtactaattatatatatggaaacaatataaggttaatagcaatctggaaacaatataaggttaatagcaatgaagagga

SEQ ID NO: 145318 - DNA, 532 bp, Homo sapiens
agatctcaggaagccccatccctagggaaagggagagaacaccacatcaagggatcactccatgggaccaaaaaaacctaaataccagcctttgagttccagatctttcctctgacacagtctacccaaatgagaaggaaccagataaataattctggtaatatgacaaaacaaggttctataacagcctgaaagatcacactagctcaccagcaatgaatccaaaccaaraaggaatctctgaattgccaaaaaaaaaaaaaaaaaaaaaaaaaaaagaattcagaaggttgattattaagttactcaaggaggcaccagagaaaggggaaaaataacttaaaataataataaaaatacagtatatggacaaaaatatctccagagtaatagataaaaaaactgaaacttctggaaatgacagacacacttagagaaatacaaaatacactgaaaagtttcaacaatagaatcgaacaagtaaaaaaaagaactccggagctcaaagaaaaggctttcatattaacaaaat

SEQ ID NO: 145319 - DNA, 532 bp, Homo sapiens
agatctcaggaagccccatccctagggaaagggagagaacaccacatcaagggatcactccatgggaccaaaaaaacctaaataccagcctttgagttccagatctttcctctgacacagtctacccaaatgagaaggaaccagataaataattctggtaatatgacaaaacaaggttctataacagcctgaaagatcacactagctcaccagcaatgaatccaaaccaagaaggaatctctgaattgccaaaaaaaaaaaaaaaaaaaaaaaaaaaagaattcagaaggttgattattaagttactcaaggaggcaccagagaaaggkgaaaaataacttaaaataataataaaaatacagtatatggacaaaaatatctccagagtaatagataaaaaaactgaaacttctggaaatgacagacacacttagagaaatacaaaatacactgaaaagtttcaacaatagaatcgaacaagtaaaaaaaagaactccggagctcaaagaaaaggctttcatattaacaaaat

SEQ ID NO: 145320 - DNA, 532 bp, Homo sapiens
agatctcaggaagccccatccctagggaaagggagagaacaccacatcaagggatcactccatgggaccaaaaaaacctaaataccagcctttgagttccagatctttcctctgacacagtctacccaaatgagaaggaaccagataaataattctggtaatatgacaaaacaaggttctataacagcctgaaagatcacactagctcaccagcaatgaatccaaaccaagaaggaatctctgaattgccaaaaaaaaaaaaaaaaaaaaaaaaaaaagaattcagaaggttgattattaagttactcaaggaggcaccagagaaaggggaaaaataacttaaaataataataawaatacagtatatggacaaaaatatctccagagtaatagataaaaaaactgaaacttctggaaatgacagacacacttagagaaatacaaaatacactgaaaagtttcaacaatagaatcgaacaagtaaaaaaaagaactccggagctcaaagaaaaggctttcatattaacaaaat

SEQ ID NO: 145321 - DNA, 543 bp, Homo sapiens
ttaccaaccaattgtcttccatcttcaagtgactcacctaacacataaggagtcatataaacttaagctaaaggggtggaaaagaaatttatgcaaatcgacaccaaaagtgaraaaaaaaaaaacagacttgaaagcaacaacagttaaaaaagacaaagagagacattatataatgatgaaagaactagtccagcagaaagatataataatcttaaatataaatgcacctaacactgaagctcccaaatttataaaagaattactgctagacctaagaaatgagaaagacagcagcacaatcctagagggggacttcaatactccactgacatcactagagaggtcatcaagacagaaagtcaacaaagaaacaatgggcttaatctataccctagaacaaatgcatttaacagatatttacagaacattctactcaacaattgcagaatctacgttctattcatcagcacatgcagcattctccaagatagatcatataatagtccacaaaacaaatgtcaacaaatttaagaaaattga

SEQ ID NO: 145322 - DNA, 444 bp, Homo sapiens
gactacagcagcgacggaagcggtgtgggccgccatcttgggtaagggcagcgactgtggctgaggctgggtactgctagctgaatggggttcggccacgccttacatctgttgagttgacccgcgtacccctgccctgggccccaggctccctcgaaaacccctgctgatctcctcgcccggactccgactcgtggtgcaggagttctggggtcagccaagacaacaggttaggcaggaagggcgggcggccgcaggcaaggctcaaagaggtttcttttttcttctttcattcgcgtgggcaacggayccaacctttgaaagcccacctgctgatcctccacctgaccggagcccgccgtgcataggctgataggagacgtgcggggtggacggactgcgggacatctgaaggaagggctcaaggcgcgccaagctcaaagc

SEQ ID NO: 145323 - DNA, 628 bp, Homo sapiens
gggatataaggaggcagaaagccctagccacaaaaagctgatactacagtcatgtgtggctgggtgtggtggctcatgtctataatcccagcacttcgggaggctgaagagggaggattgcttgagcccaggagtttggtaccagcctgggcaacatagcaaaacctgtctctacaaaaattagccaggcatggtggtgcacaactgtggtcccagttactgggaggtgagaggtgggaagtcagaggattgcttgagcccaggaggcagagatcgcagtaagccaagatcacacaactgcactccagcctgggtgacagaatgagaacctgtctcaacaaaacgaaacaatacagtcacatgtcacttaacgataggggtacattctcagaaatgtatccttaggtgatttcatcattgcacaaacaccatagagtgtacaaatctagctctataacctactacatacctaggtcatatggcatagcctatcattcctggactataaacctgtactkcatgttactgtactgaatcctgtaggcaactctaggtcaatggtatttgtgtatccagatatgagaaagctatgtaaaaatatgttattataatcttatgagaccaccac

SEQ ID NO: 145324 - DNA, 537 bp, Homo sapiens
atagtctaataaagtttttaaaacttaagacttttaaaaatggcatgcagtaaaaattcttaatttttaccragggtttaaccctaagaaactaaagctaaaaagttcagaggtaaataccatgttgtggagtatttttcttcatcaaaaacaaaactaatcaggcttataagagtaaatgaaccttttttacattttaacctcaaaagttaatagaaaaaagtggattttgtttataatatgcctttttgatcatatgcaatgtctgaaaattattcattaccatctcattaccttacctctcatgtacaaatgtccgtacagactcaaagtataaaaaaactgttgaagtcactgtagttaagagaacctgcagagaaagaatgctgtagacttttctcagaaaggctaaaagagaaaaaaaattacattactattttcttaaccatttatcatagaacagtaaaatcaaatttcctctttaaaaaattgttttttacacgtattctttcctaattttcctcctaataatgtaat

SEQ ID NO: 145325 - DNA, 612 bp, Homo sapiens
ataatcaataattcagctataataaacattgccgaataaattaacaaagggaggataatgactccttatgatgatggatagaaacactgaagaaaaccattttcagaggatttactgaatyttcctctccaaggagcttgtaatagaagggtaaacctctagtttcttgtccagcagaggaataggctcatgtcttttgttttattttatttttttggtgagtcagtatggttgggttaatcatattcacattagattccatgttgaagaacaactaatcaaagaagaaaatcatcaggaatcagggtgagattaacagaccaaggtcagaaacatggagttacaattttccaaaaaagcacgaagtgagattaaaaccacagtaagtcttagtctgactgacaggctttatacaggccctcggtaagcagttgggagaacccatgcccaccactgctctgtacggtatctggctgctcagagctctctgattcacaaaagagatcatcaagaattgactctgtgttaaactgtttttcacttggaatatggacccccacaaatacattcaatgaagggtcattaaggaagctcgttttacccccaagccca

SEQ ID NO: 145326 - DNA, 585 bp, Homo sapiens
gactaaggcagatgcagctttctcctcttagaatgtactatcagaaatgggattgggagagaagcccctaagtaaacagacaatttcaataatctaatttaagtgataagatgaggaaatacagagcacagaggaggraatgataacttgggggatgagcagcagaataggtttcttgatagaaataatatctaagctgagacctgaaggatgaggtttctttagtttaatattaaggaaattaccttaaacagaattgtaaactccatagaatgtggcttctgattccttttttccctcctttctcgagggaaggggaaaaagctaataatttttgtggacctggcttttggcttaaccttttatttcattttcataagaaccttggaaaatagatgttttaattactgattacagttaaaggaacaggctcagagcgattaaataacttgcccaagttaacacagctgttaaaaagaccagagattcaatcccaggttagttgttcaaatctgtttaccacaccatggggtctgcatcattttgtctgaacaaggcactcagaacatttgctgaagtgatttt

SEQ ID NO: 145327 - DNA, 585 bp, Homo sapiens
gactaaggcagatgcagctttctcctcttagaatgtactatcagaaatgggattgggagagaagcccctaagtaaacagacaatttcaataatctaatttaagtgataagatgaggaaatacagagcacagaggaggaaatgataacttgggggatgagcagcagaataggtttcttgatagaaataatatctaagctgagacctgaaggatgaggtttctttagtttaatattaaggraattaccttaaacagaattgtaaactccatagaatgtggcttctgattccttttttccctcctttctcgagggaaggggaaaaagctaataatttttgtggacctggcttttggcttaaccttttatttcattttcataagaaccttggaaaatagatgttttaattactgattacagttaaaggaacaggctcagagcgattaaataacttgcccaagttaacacagctgttaaaaagaccagagattcaatcccaggttagttgttcaaatctgtttaccacaccatggggtctgcatcattttgtctgaacaaggcactcagaacatttgctgaagtgatttt

SEQ ID NO: 145328 - DNA, 585 bp, Homo sapiens
gactaaggcagatgcagctttctcctcttagaatgtactatcagaaatgggattgggagagaagcccctaagtaaacagacaatttcaataatctaatttaagtgataagatgaggaaatacagagcacagaggaggaaatgataacttgggggatgagcagcagaataggtttcttgatagaaataatatctaagctgagacctgaaggatgaggtttctttagtttaatattaaggaaattaccttaaacagaattgtaaactccatagaatgtggcttctgattccttttttccctcctttctcgagggaaggggaaaaagctaataatttttgtggacctggcttttggcttaaccttttatttcattttcataagaaccttggaaaatagatgttttaattactgattacagttaaaggaacaggctcagagcgattaaataacttgcccaagttaacacagctgttaaaaagaccagagattcaatcccaggttagttgttcaaatctgtttaccacaccatggggtctgcatcattttgtctgaacaaggcacycagaacatttgctgaagtgatttt

SEQ ID NO: 145329 - DNA, 429 bp, Homo sapiens
aggaaaatagctaacattcctgtttctttattatgtagaacattttggctaccctttgctcaatcccatctatccatcataatccaggaccctctctttccattccaaaactttcctaaatacagaaccctgggccaggygcaatgacccacacctgtaatcctagaaccttgggagtcagaggcaggtggatcacttgagctcaggagttcacgaccaacctgggaaacatggaaaaaccctgtctctactaaaaatacagaaaattagccaggcatggtggcgtgcacctgttatcccagctacttgggaggctgaggtgggaggatcacctgagcctgggaggtcaaggctgcagtgagccaaaactatgccactgcgctccagcctttgcgataggagtgagactctgtctaaacaaacaaacaa

SEQ ID NO: 145330 - DNA, 409 bp, Homo sapiens
aagtttcttgggctgcaaaggaaaatagctaacattcctgtttctttattatgtagaacattttggctaccctttgctcaatcccatctatccatcataatccaggaccctctctttccattccaaaactttcctaaatacagaaccctgggccaggcgcaatgacccacacctgtaatcctagaaccttgggagtcmgaggcaggtggatcacttgagctcaggagttcacgaccaacctgggaaacatggaaaaaccctgtctctactaaaaatacagaaaattagccaggcatggtggcgtgcacctgttatcccagctacttgggaggctgaggtgggaggatcacctgagcctgggaggtcaaggctgcagtgagccaaaactatgccactgcgctccagcctt

SEQ ID NO: 145331 - DNA, 539 bp, Homo sapiens
atttaaagggtaaaatgatcaaaggatttcagttctatcaatgtttacctgtctgatcacttacgtatcagacacaatgctaagcctaggacgattgtcttagctcacgaataacacttactgtacaactatttctactggcataggctttggaaccatataggtctgtgttgtactcttgcttccaacacttgtgaacgatatgggtgagtaattaatgtcataagggcctgaatttccttgtccctaaagtgaacataatacaacctaattgatgctgtaagagttcaacaaatggtaccctttttacattatagtttcaaaagtatagctacacagtactatttgtaagcaatgtttctagagatttacgacatatacccaaaaaacatgtctttaatkatggcctggtaaactcctgctggttgccagaaaaaggggttctgaggcaatctatgggtaccttttttctttaaatttgtgtcctttatgaaaccatgcatagtatggaaattactgaattcagaatatagcaaggt

SEQ ID NO: 145332 - DNA, 463 bp, Homo sapiens
gggtcaggtagtgctagcctgccctgattttcttggatttttaggatgagccgggtcctctccaggcagcctcacaggctaagccacagtttggcatttggtactgctttataaattgtcttctatcacaactcagaagggtggaaggaggaggctttcgagtaggaacaacaaaccaacaaacagagtaggaggtcagaagacagttgattgactgcagccaatgaagcaaaaagggaattccaggatcaagctcaggagtcagtcagagataggtccacacacaaayacagaagagctgctcttcgttttcttcatagttggtcaacaataagtaaacatttactaaactcttatatggactgggtgctgagcatgtagagatgaataaggcatagttctgtcctcaaggagctcacagtctctctggtgaaatagccaggaaaacaaaagattaaactgt

SEQ ID NO: 145333 - DNA, 380 bp, Homo sapiens
tcttccacttgatctattcagctattgatagttgtgtatgcttctcaaagttctcgtgctatgtttttcagctccatcaggtcatttatgtttctctgtaaactgcttattctagtaagcagttcctgtaaccttttattaaggttcttaacttccttgcattgggttagaacatgctgctttagttcagaggagtttgttatcaccygccttctgaagcctacttctgttaatttgtaaaacttattccccatccagttttgtgcccttgctggagaggagttgcaatcatttggaggagaagaggcattctggattttgaaattttcagcatttttgtgctgactttccctcatcttcatggatttatctgcctttga

SEQ ID NO: 145334 - DNA, 588 bp, Homo sapiens
tcactgctttatgaggcaggagtttgatgtccttgaagaacattattaaattcctattctacttttgtcttttttgagttgaataatctcaacttttttctgtgtagaaatacatttttcaatcgatgaaatatctttgtagcagttatcctgtgaactattacttatccttttaaaattgttgtcaccaagctagatataatacagtgttttcttgattctatgatgcacattttttttttttcagattttaacatttctgaaactgagatatactttccaaatcaatggtgttttaccattgctttcmgccagttgacctggttgtcattgccttaaccaatttatttcagttttatttttctttttacaaatgcctaaaagtgatatattataaaaatctatgtctgaataagtctaaaagagctctttcaataaaaagaagataaaaattctaagtaataagaaaccgtgtcatagtttaattggcagcatttttctttcttagtgcttgataaaataatggtgcatcttagagctgatagatttcaggtttcaaggaagcagtatatatttcaatttggtttg

SEQ ID NO: 145335 - DNA, 414 bp, Homo sapiens
tactaaaatctacagatcctcaagtcctttgcacatccttctgtatactttaaatcatctctggatttcctataatacctaatgcaatgtaaatgctgtggaaatagttgttacactgtattttaaaatgtgtgttactttttcttgtattgttatttttatttttttttctgaatatttttgatctttggttggtcagatgcacagatgtggaacccatggataggcagggctgactgtccttagatgtgcccaagtacagggagcctggaccatggagaaatggtaggaaatgagggtaaagggtagtttgggatgaaatcctatagggctttatactgtggttatttyttatttgtttggctttgcaaataatttatgctctttaaaatcagacagtatcctctacttgaa

SEQ ID NO: 145336 - DNA, 363 bp, Homo sapiens
tcttaacagccttatgatttttaatgttgatgggataaaagggatttgaaaacacacagtattgaaacaagttctttcatgctcatggggctcaggaggtttagaaacatctttcattttccctaagaaatgctctctgacataagacttttcaaaatgtatcactaaaaatgtataaagacattcattcatttaataaattttataagtgccagaaatcttacctagaactttgatatatcagtattatacatmacccaacacacatgcttagactgttaagtcatttcctaggtaatctagtccaacctgcacctaatgtaggaatcacttccatcttctctctgacgttgaactgagcct

SEQ ID NO: 145337 - DNA, 456 bp, Homo sapiens
tgcttttgggacatgagaaatttttgaaatagaaaatcaatgtgagttaaatttgtttttctgatgagaggtgtagattttccagctgtctggtcccaaccaaggtcagtgctacggatttcccttccacctttggagtcaccaagagatcggcttgtcaagggtgcatgtgtgtgctgagctggcagtgtggagagtgtcctcaggtgaagagagatgaggagccctggasaaagtgtgagcagtggtggtaggaagctcctgccatggcaacagagggccagctggctcagctgctcagtgtgggtggcacaatatgcccatgtgactggcagatcacagtctgcagggcttggcttggtgcccactgatgttctttgtcatgaaagttcttagcatccccatgcagccacctctccaatgaatttatccagtgccccagttaaggtgccactg

SEQ ID NO: 145338 - DNA, 546 bp, Homo sapiens
tggagctctgataagcaattagatcaaagcaaggcaacaaagctgggcaacatagcaagacactgtctctacaaataataataataagataaaatagcccagtgtggtggcactcacctgtagtgctacgtattcaggaggctaaaggaggaggatcacttgagcccaggagttcaaggctacagtgagctgtgattgaaccactgtgcctgggagatggagcaaaagcctatttggaaatcaatccatcaaaaatacatctacactcctatgttttttgcagcactattcacaatagccaaaatatagattaacttragtgtccatcaacagatggataaaaaagatgcagtaaatatacacaatggaatattattcagccataaaaataacaaaatcttgtcatttgtcgttaccttaagtgaaataagagaggcacagaaagacatatatcgcatgtactcactcatatgtgggagctaaaaaagtcattctcatggaggtagagagttgattggtggttaccagagactgaaaagggaagag

SEQ ID NO: 145339 - DNA, 418 bp, Homo sapiens
ttaataaactggtgatcatatcgtattctacagccaaataggaacttctaaaagattttcacactcattggttattaaagtttccaaagatctaaatactcataacatcctgagcctgtgattttcaacaacaaggctttaaattcttctgacatttaacggaattttctgtggtgttagaacagtgttytacacaaaatgcattatagaacatttgatttctctctggaaaaaaaaaaggtagcaataatgaactcttgagaaaggaaatccagttcaattggatttgaaatatgcatgttaaaaatagactgtgtatccatgagctgttggatgatacttaatcaacagtaattgttgttcaagcaaagcgtgccctttccatcctgggcttagcactcccttggattagcaggat

SEQ ID NO: 145340 - DNA, 534 bp, Homo sapiens
gcaggactgctttcagtggggggaaatgatagagaattgatttcaattcattccagggaagaagaatgktctcacaattacagctgtccagtgactgaatgggctgcctcacagtgtactaatgagaaccatggcctacctgaaaaaatttaattaccaggaagtgctcaagtgttcaattttggttctaatccccttttaagaacttaaaaatagtattgagccatgttgtctgcaatattattagataacagtgcctttcttacattatgtgattggttttcatattactttttaagttattttcttccttagaggcagaaacaatgttctttctgttgatttatgcataattgtactgaatatttcccctggaggaacatgagcatttatgtgtgtttacatcttgaaaaaagtagggtcattgctaaatgcttccttcttgtcatgaaagttgacattgagagtggagatgacgagattctctaacatgtatctgctgctgcactgtggttttctgttgacttgtatgtc

SEQ ID NO: 145341 - DNA, 622 bp, Homo sapiens
ctaagattgtgtggttatgtcctcagctccattctagatgcttgcgtgtgacggggattccaaggaaaataaagatgtttgtggaaggggcaacagagcaaacaaagagtggggcagcgctagagaggactttgtggaagatgtgagcagtgagctgggtaaaacaagtgtagaatttgggctggcagagagtactggggaagccaaaatagcttaagtggattgcatggaattagaaaggagcgggttacatgtccataaaaagctgtggcttctagagcaatccacttaggaccagtgctgaaagatctggattacagtggggccagggagggagtgggattgaagctggaggagaaaatccaatggatgtygccagggctcccaagagtactagaaactgacatatccattttgaaaaaagaaactggttttcatgcacactgcattatccatatggagaaagtagtgtggtttgcagagtgaagaaatacataattaaaataggtaaatatatgaggctgtctgttctgatttagaattgtgcgttgagcactaaatcagaaacaaatctcccttcctacttgaccctcaccccactttggctgtacctgaggacaag

SEQ ID NO: 145342 - DNA, 545 bp, Homo sapiens
ggccaacagtggcagatgggacctgacacttgaacttggggagctttcctccaacaggatgaatccatggaagataccaggcacattctcaaaagaacagaagtttagctggtggaaatgagagtagggtggatgtaagttaaaattgttgataagtaaataccctgattgggtattcctgtcacgtgctgctgtaaaaaacctcttaaaacactgggtgaagtggataaatggattccatttaacagagcatttactggggtctattagctgactattaccttaatgattatattataggcggcaatggggctgtcatcataaaaggtgaaaatgatcaaggagaaagaagtatgagctcagaagaggatgcagcaatgtgatgagacagagttgtgcctgttggcctccttcagtgagaaggctgcatctgaaattatcactgaagcaggaaaaacagtgtccttattctttttgtttattcaaaaatgcaatagcrcactgatgcatatggaacctggggctatgagaattgtaaaaattga

SEQ ID NO: 145343 - DNA, 532 bp, Homo sapiens
ttcttctctcttgccgccgccatgtaagaagtgcctttcaccttattatgtttttgagacagagtctcactctgttacccagactatagtgcagtgacacaatcatagytcactgcagcctcaacctcctaggctcaagcgatcctcccatcttagcctcccaagtagttaggactacaggtataggccaccacacctggctaattattttattttttagtttttcgtagatgggggttttactttgtttgtaatgttgttcagttcattcctgaatggaatcttacagatcgccttcccttttttttttttttttgctttcctagagagacttatacttgttttttaccaaccaaattttataattttatgttataataatttttatcttttcacttgaattcatttgtaaagaaaaaagacttgaaggaaatgcactatactatgttattagtgattatccctgaagggttagcatgatggtggcctctccagtcttctgtattgtttaaattgtcatcatagaacactt

SEQ ID NO: 145344 - DNA, 532 bp, Homo sapiens
ttcttctctcttgccgccgccatgtaagaagtgcctttcaccttattatgtttttgagacagagtctcactctgttacccagactatagtgcagtgacacaatcatagctcactgcagcctcaacctcctaggctcaagcgatcctcccatcttagcctcccaagtagttaggactacaggtataggccaccacacctggctaattattttattttttagtttttcrtagatgggggttttactttgtttgtaatgttgttcagttcattcctgaatggaatcttacagatcgccttcccttttttttttttttttgctttcctagagagacttatacttgttttttaccaaccaaattttataattttatgttataataatttttatcttttcacttgaattcatttgtaaagaaaaaagacttgaaggaaatgcactatactatgttattagtgattatccctgaagggttagcatgatggtggcctctccagtcttctgtattgtttaaattgtcatcatagaacactt

SEQ ID NO: 145345 - DNA, 535 bp, Homo sapiens
cttcttctctcttgccgccgccatgtaagaagtgcctttcaccttattatgtttttgagacagagtctcactctgttacccagactatagtgcagtgacacaatcatagctcactgcagcctcaacctcctaggctcaagcgatcctcccatcttagcctcccaagtagttaggactacaggtataggccaccacacctggctaattattttattttttagtttttcgtagatgggggttttactttgtttgtaatgttgttcagttcattcctgaatggaatcttacagatygccttcccttttttttttttttttgctttcctagagagacttatacttgttttttaccaaccaaattttataattttatgttataataatttttatcttttcacttgaattcatttgtaaagaaaaaagacttgaaggaaatgcactatactatgttattagtgattatccctgaagggttagcatgatggtggcctctccagtcttctgtattgtttaaattgtcatcatagaacacttac

SEQ ID NO: 145346 - DNA, 535 bp, Homo sapiens
cttcttctctcttgccgccgccatgtaagaagtgcctttcaccttattatgtttttgagacagagtctcactctgttacccagactatagtgcagtgacacaatcatagctcactgcagcctcaacctcctaggctcaagcgatcctcccatcttagcctcccaagtagttaggactacaggtataggccaccacacctggctaattattttattttttagtttttcgtagatgggggttttactttgtttgtaatgttgttcagttcattcctgaatggaatcttacagatcgccttcccttttttttttttttttgctttcctagagagacttatacytgttttttaccaaccaaattttataattttatgttataataatttttatcttttcacttgaattcatttgtaaagaaaaaagacttgaaggaaatgcactatactatgttattagtgattatccctgaagggttagcatgatggtggcctctccagtcttctgtattgtttaaattgtcatcatagaacacttac

SEQ ID NO: 145347 - DNA, 285 bp, Homo sapiens
atattagagtgatagtatactggaggtgaagggaagttagttaatatttagtcaaatctccttattttacgattttaaggaaaaggttgagagttaagcaaatggaaaaagattgccaaaattagcacatgatataaaactgaagaaatttaggaaagtattmaaaaattaaagaaagtgtttcttgagaaaatttttcagaaaaagaacagaaaaaaacattttaatatcctggttggtgctttggtggggggttatttaagaaatctttttatttcccaagat

SEQ ID NO: 145348 - DNA, 392 bp, Homo sapiens
gatccaacgtatgtcccctagaagatcccttggagcaaaaatgctttctgggtaggatgatgacgattggttcagaggctggtccagttgctcagaaaaagaattatctagcataaaactgaacaagagtttttatatatactgaagaatgtttccatacatgggctgatatttatcatatttattaaaatatagattataccatggtacttgcatggactttgcacacctacgtaaggttgatatggtttgaytgtccccacccaaatctcatcttgtacctcccataattcccacgtgttgtaggagggacccagtgggagacgattgaatcatgggggcaggtctttcccgtgctgttcttgtgatagtgaatgggtctcatgagatct

SEQ ID NO: 145349 - DNA, 598 bp, Homo sapiens
tacccatagctctagtaacagattctgaattcacgtgttctcatcacaagaagatatttagccccattaacaagtagtttaatcaaagaggggaaaaccctagaagctagaaattctcctgtcaggcacaatactgataaacaaaagtcacatttcaaagttagaagctcagatgaaaaaggctcagagaacaattcacaatgtggcctgaaaacttgctgacctgcaggtacgggttgagcgtccctaatcaaaaaatctgaaatctgaaaygctccaaaatcccaaactttttgagcaccaacatgacactcaaaggtcatgctcaaaagagcattttggatttcatattttcagattaggaatgctcaactggcaagaataaggcagatattccaagattaaaaaataaatcaaaacctgaaatacttctcgtccccagcatttcagacaagggatactaaacctgtaaaagaaatttacttctttgttacttgtcacagatataaataaacacgtaaggtttaatccagaagcagaagcaatttacatctgactaagctgtgtctgtggccactgctgccctttgggctgcccg

SEQ ID NO: 145350 - DNA, 474 bp, Homo sapiens
aggggatcaggaggcaagaaaggcacacagggtcttggttggtctcttaartgtagaagaatatcactgcttattttgcagaaaatcattctccagaattagtccaaaagagttcactacagtttgtagcaggtcatgtcaatgaatgctataataatagtgacgagaaaagagagtaaccagggtgccctcctgccctgggttgagatttgggagtcagcagcatcgcgatggtagaacatttattcctggtgacagcgtcagaaccagaaagaaaacagcttgatttccaggttccaggttgagcccgccaggctggcaggaaactctattgctttctcaacgaaggaaatttgattcctaagtcactgagagagagaaaatcaactccttttatgtcacttttattatatggtactctaataattctgacatctgtttctctcatttctagattttaagactttacttcga

SEQ ID NO: 145351 - DNA, 502 bp, Homo sapiens
gattatgatgtgggcatatctttggagacaccattcaacccactacaccatctgtattagggttctctagaggaacagaactaataggagacacacacacacacacacacatatatatatgcatttattaagtattaacttacacaatcacaaggttccagagggaggaatgctgcctgtaagcttgaggctgcttggctgttggcaaacttgagcaagaagtcagtctgagtctcagaattgaagaacttggagtccratgttcaagggcaggaagcatccagcatgggagaaatctgtgggctgggaggctaggccactctctccttttcacgtttttctgcctgctttatatttgctgccagctgattggatggcgcccactcgattaagggtgggtctacctttcccagtccactgactcaaatgttaatctcctttggcaacaccctcatagacacacccaggattaatactttgtatcctttaatccaatcacatt

SEQ ID NO: 145352 - DNA, 448 bp, Homo sapiens
cttttcaaaggtgcaggtgctgctctcacaaatctattgcacaaggcattggtcccttccagctgggatgagtctgtctaaagtgactaatccactccaccatcccaatccccttaaacctttggatcccttcctctacattaaaccaagggagatcaggcatttctagctcactcacagtgggccatcttttaatccgcatttcagctaaccaagcaaataaactattagaacttttttaactccccaagctgcaacattaaatgcagattccctacttagtgggccccaatcaataaattcagcctgatccaactctatgttgcttccaccattatcccatacccttaatatccattcccatgcctgttgtccagattcctgtttatataaattcraaaactcggttcttttccagtgttgtgcgcctcctcatgggtcacactat

SEQ ID NO: 145353 - DNA, 432 bp, Homo sapiens
ggcttttcaaaggtgcaggtgctgctctcacaaatctattgcacaaggcattggtcccttccagctgggatgagtctgtctaaagtgactaatccactccaccatcccaatccccttaaacctttggatcccttcctctacattaaaccaagggagatcaggcatttctagctcactcacagtgggccatcttttaatccgcatttcagctaaccaagcaaataaactattagaacttttttaactccccaagctgcaacattaaatgcagattccctacttagtgggccccaatcaataaattcagcctgatccaactctatgttgcttccaccattatcccatacccttaatatccattcccatgcctgttgtccagattcctgtttatataaattcgaaaactcrgttcttttccagtgttgtgcgcct

SEQ ID NO: 145354 - DNA, 452 bp, Homo sapiens
gcttttcaaaggtgcaggtgctgctctcacaaatctattgcacaaggcattggtcccttccagctgggatgagtctgtctaaagtgactaatccactccaccatcccaatccccttaaacctttggatcccttcctctacattaaaccaagggagatcaggcatttctagctcactcacagtgggccatcttttaatccgcatttcagctaaccaagcaaataaactattagaacttttttaactccccaagctgcaacattaaatgcagattccctacttagtgggccccaatcaataaattcagcctgatccaactctatgttgcttccaccattatcccatacccttaatatccattcccatgcctgttgtccagattcctgtttatataaattcgaaaactcggttcttttccagtgttgtgcrcctcctcatgggtcacactatcaa

SEQ ID NO: 145355 - DNA, 622 bp, Homo sapiens
ctagctccttttattgctatgtgacgtgggacacagtaggaaagatactgcaattttatgctttttgtattttgaaccatatgaatgtactactgattaaaaaaacattatttttctaaagagacaagagattggatattttgaaaaaaaagaacttggatttttatctcacactataaagacrcattttaaataaattgaatatttaaatgtaaaatttgaagctaggaaatattagaaaattattggtaagctaactgatttggttatgcacaggatcatttaaactatatagttatagtcatttgaaaaagtcttaaaattttatatatgtaattgtctacattaaaaattgttttctatgcatttaaaaaattataaattgaatggcaaaaaagactagaaaaatgtttttaaaaattatagaacagtgctattattcttatatgtcaggaactcataaatcagtaaaataaatatttaacattctttagataatatggtaaagaacaagaaaaaaacaatttactacagaaaaaagaaaacagaacatatgggaaatagttgaccacatattaaatcgaagatatgcaaccctaagtaaaaaagatgacatttttag

SEQ ID NO: 145356 - DNA, 622 bp, Homo sapiens
ctagctccttttattgctatgtgacgtgggacacagtaggaaagatactgcaattttatgctttttgtattttgaaccatatgaatgtactactgattaaaaaaacattatttttctaaagagacaagagattggatattttgaaaaaaaagaacttggatttttatctcacactataaagacacattttaaataaattgaatatttaaatgtaaaatttgaagctaggaaatattagaaaattattggtaagctaactgatttggttatgcacaggatcatttaaactatatagttatagtcatttgaaaaagtcttaaaattttatatatgtaattgtctacattaaaaattgttttctatgcatttaaaaaattataaattgaatggcaaaaaagactagaaaaatgtttttaaaaattatagaacagtgctaytattcttatatgtcaggaactcataaatcagtaaaataaatatttaacattctttagataatatggtaaagaacaagaaaaaaacaatttactacagaaaaaagaaaacagaacatatgggaaatagttgaccacatattaaatcgaagatatgcaaccctaagtaaaaaagatgacatttttag

SEQ ID NO: 145357 - DNA, 578 bp, Homo sapiens
ttacaataaagtaagctagggaaaataaaatattattgaggaaagttataagaaagagaaaatacagttactattcatttagtgaaagtggwtcatcataaagatcttcatcctcattgcctccacattgagtaggctgaggagaaggcagaggacaaaggaggtgcaggggtagaagatgtggaggaggtgaaaggggaggcagtacaggcaggtacatggtgtcactttatgaaaacatataatttctctctaacatttttctaaaaatgtttctgcatggcaccaatccttttaccatttgctttagatttagtgccagtgtcatagaagggtctgtgctgtaaaagacgtcaaaggcagttttgaataatcagaacccttctgctagattgtctaatgtcaaattgttttatagtgctgcttctttttttacatcttctttcacatcatctgcactggtttggaagtattcatctctatcagggcatcatctgtttatttttctggtgtgatgtctgttcactcttgattttctccaagattcatatcttgaaactcttcaccctgtcccccaa

SEQ ID NO: 145358 - DNA, 578 bp, Homo sapiens
ttacaataaagtaagctagggaaaataaaatattattgaggaaagttataagaaagagaaaatacagttactattcatttagtgaaagtggatcatcataaagatcttcatcctcattgcctccacattgagtaggctgaggagaaggcagaggacaaaggaggtgcaggggtagaagatgtggaggaggtgaaaggggaggcagtacaggcaggtacatggtgtcactttatgaaaacatataatttctctctaacatttttctaaaaatgtttctgcatggcaccaatccttttaccatttgctttagatttagtgccagtgtcatagaagggtctgtgctgtaaaagacrtcaaaggcagttttgaataatcagaacccttctgctagattgtctaatgtcaaattgttttatagtgctgcttctttttttacatcttctttcacatcatctgcactggtttggaagtattcatctctatcagggcatcatctgtttatttttctggtgtgatgtctgttcactcttgattttctccaagattcatatcttgaaactcttcaccctgtcccccaa

SEQ ID NO: 145359 - DNA, 578 bp, Homo sapiens
ttacaataaagtaagctagggaaaataaaatattattgaggaaagttataagaaagagaaaatacagttactattcatttagtgaaagtggatcatcataaagatcttcatcctcattgcctccacattgagtaggctgaggagaaggcagaggacaaaggaggtgcaggggtagaagatgtggaggaggtgaaaggggaggcagtacaggcaggtacatggtgtcactttatgaaaacatataatttctctctaacatttttctaaaaatgtttctgcatggcaccaatccttttaccatttgctttagatttagtgccagtgtcatagaagggtctgtgctgtaaaagacgtcaaaggcagttttgaataatcagaacccttctgctagattgtctaatgtcaawttgttttatagtgctgcttctttttttacatcttctttcacatcatctgcactggtttggaagtattcatctctatcagggcatcatctgtttatttttctggtgtgatgtctgttcactcttgattttctccaagattcatatcttgaaactcttcaccctgtcccccaa

SEQ ID NO: 145360 - DNA, 582 bp, Homo sapiens
gcctcagcctcctaaagtgccgggattacaggtgtaagttattgtgactggccccaaatttttatttatttatttagtataaacttggggatacaagtgtaattttgttacatgcatacattgtgtagtggtgaagtcagggtttttagtatatccatcacttgattaatgtacattatgcccatttagtaattactcatcatccactctctctcctctccctcatccttcggagtctctattatctgtcactccacactctacatccatgtatacacattatttaatctcacttatgagtgagaatatatgatatatatatatatctgtgtatatatgtatataggtgtgtatctatatgtatatatacatataaatcacatgcatattcatgatctatacatgtatacatatacatatgtatatgtatatatgtatatataacattttcttaatctaatcatatgttgatagacacttaggytgaatccatatctttgcaattgtgaatagcactataataaacatacagattaagatgtctttttgatataaggatttattttcctttggggatatagc

SEQ ID NO: 145361 - DNA, 524 bp, Homo sapiens
aaaccttcacatatctgatcaactaatctttgacaagggcactaagaatatgcaatggagcaaggataatctcttcagtaaatggtgctgagaaacctggttatgtgcatgcaaaaaaataaaattgaattcatatcttacaccatacacaaaagtcaactcaaaatggattaaagacttaattgtaagacataaaatcataaacttctagaagaatacatagaaaaaacactccttgacattcctagcaatgattttctggattcaacaccaaaagtacaggcaataaaagcaaaaaataaacaaatgtgattacatccatctaaaaagcttcttcacagcaaaggaatcaacagagtgaagagacaacctacagaatgggataaagtgttcacaaaccacacatctgatgatgagttaatattaaaaatatgtatggaagtcatacaacccaawagcaaacataccaaataacctgattttaaaatgaacaaagaatctgaatagaaacttatctaaagaag

SEQ ID NO: 145362 - DNA, 504 bp, Homo sapiens
aagttttcatttcacaacattatccccctttccaaatacaaaacacagcatgataaacattaagaaaagtatactatcatgagaacaactgatgttgtagttgtaagaaccttgcagacgatcatggtaaagtgatcagatgtcttargtttcattgtcatcagctgctgtggtgactaagtgttcaaaactgttggtcctcctctagaacaaaataaccttttttcacacatgctattttagatctttccgttaaatactgcttgtgaaatgacttattatcagatactccagatgtaattcctttcctgaccacacatagtttactctgaaaaatgctgtaaagagcaaattcattgaatctatatttcttcagttgaaaaaaccaagctgttacaatttctcagtgatgtgtggtggttgcatctgtaacagttcataaccaaaggaaaatttggcagctcagtggttgcacaattcatacttaaccattggataaattaa

SEQ ID NO: 145363 - DNA, 410 bp, Homo sapiens
ttgactattttagatacttcatatgagtggaatcatgcagtctttgtatttcggtggctggtttatttattttgctaaatgttctcaaggttcatgcatattattgcrtcttaaagaatttccttcttgttaaaggctgaatggtattatattatgtgtatataccacattttctttatctactcatttgtcaatggacttttggatagtttccacatcttggctactgtgaatggtgctgcagtgaacacaggagtgctaatatctctttgaaatactaatttcaattcttttggataaatacccagaagtgagatcactggatcctatggtagttctattttttattttttgagaatcctccatactgttttctatagtggctgcaccactttgcattcccatcaaca

SEQ ID NO: 145364 - DNA, 410 bp, Homo sapiens
ttgactattttagatacttcatatgagtggaatcatgcagtctttgtatttcggtggctggtttatttattttgctaaatgttctcaaggttcatgcatattattgcatcttaaagaatttccttcttgttaaaggctgaatggtattatattatgtgtatataccacattttctttatctactcatttgtcaatggacttttggatagtttccacatcttggctactgtgaatggtgctgcagtgaacacaggagtgctaatatctctttgaaatmctaatttcaattcttttggataaatacccagaagtgagatcactggatcctatggtagttctattttttattttttgagaatcctccatactgttttctatagtggctgcaccactttgcattcccatcaaca

SEQ ID NO: 145365 - DNA, 512 bp, Homo sapiens
tagataggtatatttctaaatatatatatgtgtatagtataaaacaataatctcattaaatcctatacaaataataatcctgcttctgaagcctgtagacccaacctgctagcttcagaaatagaacattactggtaacttaaaaaccagtttctagtcattccccactgccttctcctctctaggccccaatgattaccactatctggaattttctgtatgttatctttaagctttactttacaattttaaaacatacrcttacaaccctgagaaagtatttttaaattttatatggtttcattactatagaggtggaaacatgttttctaaatgttgtcaattagaatattgcctttcacacttaaatctttaatctgcctggaatttatttttgtgtgtggtatgaagcagagattaaattttatttctgctaactgcatatcaaattagcatcattgattgaaaagttatctcattaaccagaagacgtatctccaggaaagctgcct

SEQ ID NO: 145366 - DNA, 532 bp, Homo sapiens
agggctcaacattaaaagaagaagaaatataagcagagcctttctcagggttctgcttgtggaaaaacaaggcagcagtgtgaagcagagtgaagaaccacttattctaggcagtattagaagaagagaatgaaaatggaggggagaaggaaatacaagaaacttgccgaatacctaactctctaaataaagcaggaagaacaggaagagatcaggaaaataatgcactataatcctcagcactttgggaacttgcaacctccccagagctgagggtgttcacaggattcccccatcgcacacccsacactactcctttttatctatcatgccccatcaaacctcaccaacacagtgtctcatttcctcagggctttatgcaaatataatatcataaacagtcaaaatagatacaggggacataatatctccttgctcagagttaggcaggctatccaacaaaattgttctatattttcaggaggcccagacacataggaccacactgtggtatgtgtatgaactgtttttc

SEQ ID NO: 145367 - DNA, 532 bp, Homo sapiens
agggctcaacattaaaagaagaagaaatataagcagagcctttctcagggttctgcttgtggaaaaacaaggcagcagtgtgaagcagagtgaagaaccacttattctaggcagtattagaagaagagaatgaaaatggaggggagaaggaaatacaagaaacttgccgaatacctaactctctaaataaagcaggaagaacaggaagagatcaggaaaataatgcactataatcctcagcactttgggaacttgcaacctccccagagctgagggtgttcacaggattcccccatcgcacacccgacactactcctttwtatctatcatgccccatcaaacctcaccaacacagtgtctcatttcctcagggctttatgcaaatataatatcataaacagtcaaaatagatacaggggacataatatctccttgctcagagttaggcaggctatccaacaaaattgttctatattttcaggaggcccagacacataggaccacactgtggtatgtgtatgaactgtttttc

SEQ ID NO: 145368 - DNA, 344 bp, Homo sapiens
aataattcctgtaatccagaagacagaytggggtggtatgtcactagtccaccatagtatatatgtataaaatctaacactcatctttttaataaaagtcatagaaattagggaatataacacaaaaactaaacacaatcaatattattcaaaaattattaaacattttggagctgggaataaagcacttgatcagagttacagtacctattagttccttaacatatctggaaaaagaagaaatttaaacccattaaattcccatgaaaaataaatgaaataaccacttctgggaagaaaagaatattccaatataattattcaaaacatgaaaattaaaagat

SEQ ID NO: 145369 - DNA, 490 bp, Homo sapiens
aattcaagtagtaatatttcatgtcatttccattaactagttacacattacatatttcatctactaaaaacytaatgccgttccccaaaacacacacatatgcacacacgccaatctggaacctaacaggaggttagtaaatgttacatcagaaggtagtggcaattcctgctagtagcttatattaaaaccaattgatacaggcctaaaagtaggaaaaagagttatttctttaactgatcatctgaaatgtgtcactctaaaacaattttttgagagacaagcacttaaacacagttcactagctcagttctaagaccagagcgatgttcatgaaaatgtgacagaaccacatataaaaggtgattttggaatagagtatgataagactaaatgcctcattaagacaaaaagtcctgagcactttacctgtttgttaaattttgccatgacctccactttacagatggtaaatcaaagcttagaagag

SEQ ID NO: 145370 - DNA, 490 bp, Homo sapiens
aattcaagtagtaatatttcatgtcatttccattaactagttacacattacatatttcatctactaaaaacctaatgccgttccccaaaacacacacatatgcacacacgccaatctggaacytaacaggaggttagtaaatgttacatcagaaggtagtggcaattcctgctagtagcttatattaaaaccaattgatacaggcctaaaagtaggaaaaagagttatttctttaactgatcatctgaaatgtgtcactctaaaacaattttttgagagacaagcacttaaacacagttcactagctcagttctaagaccagagcgatgttcatgaaaatgtgacagaaccacatataaaaggtgattttggaatagagtatgataagactaaatgcctcattaagacaaaaagtcctgagcactttacctgtttgttaaattttgccatgacctccactttacagatggtaaatcaaagcttagaagag

SEQ ID NO: 145371 - DNA, 502 bp, Homo sapiens
gattatgatgtgggcatatctttggagacaccattcaacccactacaccatctgtattagggttctctagaggaacagaactaataggagacacacacacacacacacacatatatatatgcatttattaagtattaacttacacaatcacaaggttccagagggaggaatgctgcctgyaagcttgaggctgcttggctgttggcaaacttgagcaagaagtcagtctgagtctcagaattgaagaacttggagtccaatgttcaagggcaggaagcatccagcatgggagaaatctgtgggctgggaggctaggccactctctccttttcacgtttttctgcctgctttatatttgctgccagctgattggatggcgcccactcgattaagggtgggtctacctttcccagtccactgactcaaatgttaatctcctttggcaacaccctcatagacacacccaggattaatactttgtatcctttaatccaatcacatt

SEQ ID NO: 145372 - DNA, 580 bp, Homo sapiens
ataaatacagtgtaactatggatcacatttgaatatattttaaaaaccaggacagaataaggtgagtgtcttaatacaataagggagaacattttacagacttctttttcactaaaatcagatcagtatatcactgttatttttaaactaattcttttagwaacaatataatgcatatctactgtaaaatattttaagaataaaaaacctggagaagaaaatgaaaatcactcattattccattacatacagaaagccactgttaacattaagtataaataattttttcaggctttttctatgatcataatctgtagatctgaactgtatttttcttttggtcttgaagcaatcaatgcttctgtatcaatgtctgtgatggacagcagggatcacccccctgctcatatagttgggaaagagagatgagcttaaagggccctcatgaaaattgtagatactgaaggtcacttcacgtgatcaactgattattgcagagcttaccaagcccttctataaccaaagtgtgtaaaactgtgaaggagcaatttcagattcctttctgaaccaaagtgcagag

SEQ ID NO: 145373 - DNA, 575 bp, Homo sapiens
gagaatttcaaaagctattccctgcaggatctgtgcctaagactacattttatcattccgtagttcacactctgtctaatacaggcaaaaaaaaaaaaaattaaaatgactatttattattattatttttattttttgagagggagtctcactctgaagcccaggctggagtgaagtgacacgatctccactcactacaacctccccctcccctgttcaagtgattttcctgccttagccttctgagtagctgagattacaggcacccaccaccatgcccggctaatgtctgtattttagtagagatggggtttcaccatgttggtcaggctggtctcaaactcctgacctcaaatgatctgcctgcctcggcctctcaaagtgctgggattacaggcatgagccaccrtgcccagcctaataaaataacttaaaacacagcaagacacttgaaaagatgttgggcgttgctccctaatgcggccctaggaaatgtaggggaaagaaagtcattttacagattttctggactttgcttcatcattactggtgattatatcagaaaaaaagataaa

SEQ ID NO: 145374 - DNA, 518 bp, Homo sapiens
tcccagtacatggcatagtacctgagacaaaataggccaaataatacatttctgaataaaaaagattaaattacaactatgtagatggacaaaaaagcgctaggtgagcatrgcggccaaagactacatgtgagatgagacaaactggattttaaccaacaatttggctttagcagggatagtttagttttaaaggcaaataggtgaacatatagctattgaaatatagcccatttatgtaattctttagcaaatctgctttgccatctgtctttgtctctaaataacttggagttcaagagtttacaggaggttgcactgaagctcaactttttggtaaatggttatggagcactgaactcactctcaaaagaacaaacatacaaaacagtgctgacttcctgtccactgcaattcatctctctctgcaattgccatgacagtctctgattactgatattattatccccagaagatggttcatggaaattctcatcccctgctaggctgtcccagtt

SEQ ID NO: 145375 - DNA, 518 bp, Homo sapiens
tcccagtacatggcatagtacctgagacaaaataggccaaataatacatttctgaataaaaaagattaaattacaactatgtagatggacaaaaaagcgctaggtgagcatagmggccaaagactacatgtgagatgagacaaactggattttaaccaacaatttggctttagcagggatagtttagttttaaaggcaaataggtgaacatatagctattgaaatatagcccatttatgtaattctttagcaaatctgctttgccatctgtctttgtctctaaataacttggagttcaagagtttacaggaggttgcactgaagctcaactttttggtaaatggttatggagcactgaactcactctcaaaagaacaaacatacaaaacagtgctgacttcctgtccactgcaattcatctctctctgcaattgccatgacagtctctgattactgatattattatccccagaagatggttcatggaaattctcatcccctgctaggctgtcccagtt

SEQ ID NO: 145376 - DNA, 518 bp, Homo sapiens
tcccagtacatggcatagtacctgagacaaaataggccaaataatacatttctgaataaaaaagattaaattacaactatgtagatggacaaaaaagcgctaggtgagcatagcggccaaagactacatgtgagatgagacaaactggattttaaccaacaatttggctttagcagggatagtttagttttaaaggcaaataggtgaacatatagctattgaaatatagcccatttatgtaattctttagcaaatctgctttgccatctgtctttgtctctaaataacttggagttcaagagtttacaggaggttgcactgaagctcaactttttggtaaatggttatggagcactgaactcactctcaaaagaacaaacawacaaaacagtgctgacttcctgtccactgcaattcatctctctctgcaattgccatgacagtctctgattactgatattattatccccagaagatggttcatggaaattctcatcccctgctaggctgtcccagtt

SEQ ID NO: 145377 - DNA, 656 bp, Homo sapiens
gcacatatcatccaaaagtgagaaggaaaaaaccaatcaattgaaacagaccccaaagtgacccagatgttagaaatagcagacaaaggccakgtgcagtggctcatgcctgtaatcccaacactttggcaggccaaggtggacagatcacttgaggccaggagttcgagaccagcctggccaacagggtgaaactccgtctccactaaaaatataaaaacttagctggcaatggtggcacatgtctgtaatcccagctattcatgaggctgagacagaagaattgcttaaacctgggaggcagtgttgcagtgaggcaagatcgtgccactgtgctccagcctgagtgacagagcgagactctgtcaaaactaaataaatacatacataaaataagaaaaaggaaaaaatagcagacaaagacattaaaacaattattataactatattttatatgtccccaaattggaggcaagggagatttataagcctacagattagtgaagctctgcagatcctcaaataagaaacataaagaaaatgacaccagggcatatcataacctagttgttcagaatgactgataaagtataaaatcttaaaagtagccagagacagaagacattacatggagacctgaaggtaaataaaataga

SEQ ID NO: 145378 - DNA, 656 bp, Homo sapiens
gcacatatcatccaaaagtgagaaggaaaaaaccaatcaattgaaacagaccccaaagtgacccagatgttagaaatagcagacaaaggccatgtgcagtggctcatgcctgtaatcccaacactttggcaggccaaggtggacagatcacttgaggccaggagttcgagaccagcctggccaacagggtgaaactccgtctccactaaaaatataaaaacttagctggcaatggtggcacatgtctgtaatcccagctattcatgaggctgagacagaagaattgcttaaacctgggaggcagtgttgcagtgaggcaagatcgtgccactgtgctccagcctgagtgacagagcgagactctgtcaaaactaaataaatacatacataaaataagaaaaaggaaaaaatagcagacaaagacattaaaacaattattataactatattttatatgtccccaaattggaggcaagggagatttataagcctacagattagtgaagctctgcagatcctcaaataagaaacataaagaaaatgacaccagggcatatcataacctagttgttcagaatgactgataaagtataaaatcttaaaagtagccagagacagaagacaytacatggagacctgaaggtaaataaaataga

SEQ ID NO: 145379 - DNA, 561 bp, Homo sapiens
tgtaacctactttgtaaaaagtctgcagccacaactatttgaaaaaattctcttcaacccttttaaattgttaatcttacaaaagacagctccccacaggtcatctttcctcagggtggaagccatggcactgtaagctrtggtcaaggttcgtggctcaggaccccatcagcctgctttttagctctctgttgcctttcatgaggaattcctcatctccagcccactctctcagattctcttgatgaccaggggatctttggactctcagcaccaacccactgggctatctttaagccaaaatttgccagtcctaaatcagtgactcccgtcttccccatagtcacagctattagacatcagcacatttatttaaatatgaaatggcagttttaatattctaaaaattggagatttctatggaaaaagttgtatttttttttttgatacggagtcttgctgtgttgcccaggctggagtgcggtggcacgatcttggcttatggcaagctccacctcccaggttcacgccattctcctgcctcagcctccccagtagctg

SEQ ID NO: 145380 - DNA, 522 bp, Homo sapiens
ctactcgttaaggccaaactcatgcctcattcctacaaaaatcccttcttagaacctctagcctgtaaccatcttcgtcccttttttttaaaaaaaaaactccttttcctctatttgaccttccaattgawgtcatgggtttctgaagatactttccttgttgtgtaattcatttttatttttgaattgctagagtaagcctagtatgaataatctctgagtagacgtgtcccttaggtaggaacaaccagctgaacacaactgggatcttcttccctaccctgctgcagccaacctgaactatatgcatccacttcattttacatttcacttgagacaatgcactgtcctgtagggtcacctggagctgcaacagggaattttctctccgtatacctaactggccagagcttaaaacaattccagatctcctgatctatttggctggataacataagaatgctattttggtgaaggtgaggtgatgttcatttaaactgatagctactgtctactatttta

SEQ ID NO: 145381 - DNA, 522 bp, Homo sapiens
ctactcgttaaggccaaactcatgcctcattcctacaaaaatcccttcttagaacctctagcctgtaaccatcttcgtcccttttttttaaaaaaaaaactccttttcctctatttgaccttccaattgaagtcatgggtttctgaagatactttccttgttgtgtaattcatttttatttttgaattgctagagtaagcctagtatgaataatctctgagtagacgtgtcccttaggtaggaacaaccagctgaacacaactgggatcttcttccctaccctgctgcagccaacctgaactatatgcatccacttcattttacatttcacttgagacaatgcactgtcctgtagggtcacctggagctgcaacagggaattttctctccgtatacctaactgrccagagcttaaaacaattccagatctcctgatctatttggctggataacataagaatgctattttggtgaaggtgaggtgatgttcatttaaactgatagctactgtctactatttta

SEQ ID NO: 145382 - DNA, 414 bp, Homo sapiens
tgccactctatatttagtcttcacaaattcaataatattggctactttctgatgcaaactctgacggagraagcttttctgtgaggacaaaatatttttaaaataagagatttcttcattaagttggccaagatccttgagtctagcactttgccaatcattttccttccactttaacgctggaaacatggaaagttagaaaggaaaaggaagggaaataaataagagaagaagacataaatgaaaaattaagagaaaagaaatatgatggaaagaaacaggaaggttaataaagaaggagcacatgatctccattcattcaaagtcagaatactattaatgcacccaaaatcaaatgcagtgcaagttcttcttggtttatcatccctttccctggagaatgaaagaaggcta

SEQ ID NO: 145383 - DNA, 378 bp, Homo sapiens
ttagtcttcacaaattcaataatattggctactttctgatgcaaactctgacggagaaagcttttctgtgaggacaaaatatttttaaaataagagatttcttcattaagttggccaagatccttgagtctagcactttgccaatcattttccttccactttaacgctggaaacatggaaagttagaaaggaaaaggaagggaaataaataagagaagaagacataaatgaaaaattaagagaaaagaaatatgatggaaagaaacaggaaggttaataaagaaggagcacatgatctccattcattcaaagtcagaayactattaatgcacccaaaatcaaatgcagtgcaagttcttcttggtttatcatcccttt

SEQ ID NO: 145384 - DNA, 378 bp, Homo sapiens
ttagtcttcacaaattcaataatattggctactttctgatgcaaactctgacggagaaagcttttctgtgaggacaaaatatttttaaaataagagatttcttcattaagttggccaagatccttgagtctagcactttgccaatcattttccttccactttaacgctggaaacatggaaagttagaaaggaaaaggaagggaaataaataagagaagaagacataaatgaaaaattaagagaaaagaaatatgatggaaagaaacaggaaggttaataaagaaggagcacatgatctccattcattcaaagtcagaatactattartgcacccaaaatcaaatgcagtgcaagttcttcttggtttatcatcccttt

SEQ ID NO: 145385 - DNA, 491 bp, Homo sapiens
gaattcgtgttgtatatatggtctacatcccctaaggcagatccctcagatatctatctacggacttctcttaaatttgatgcatccttttgcgtatgtctgcattttgcagaggtaatgttccttggtgctcaccagaacctctggagtgaataaagtcaccctggagagttttctacctcccactagagatagaaagtcactaggcattccttttattatgcataaattgaaaccaattttatttaagctttatttgacaaagtagcacttgtttttcgcagaaaacaaatttccgggaaggagaagaaatgcggacaaatagtgaaaattcagagtaccagtaaggatccagtgaaaactaccttgtccttattatccttaatgttgaaaaaattcttatacacasaagtgttatgttatattctgtggtcgatcatcaaacaaggatggaataaacaagattcttccctgtttcatcactggtatat

SEQ ID NO: 145386 - DNA, 580 bp, Homo sapiens
aggtgagacaagagtggtcagaaagatggtgggaatagtaaaggctctggtgatraccaagtttgatgtgaagtggagagctcctctgttaaaaacaaagtggtcaaggaactgagagttgattggatgtcagagtcactaaatgtaatgacaggagctgagttagaagctggagtgtgtaaagtggacagatcagtgataaaggtagatgacaacaagaggagggggaaagggagacttaaggagaacacattgatttcacagaagcagagggctttgctgggtgatgtcctggaagcagccgtgggctgcagggaaatcactccctatcttctggctggagagacaagtagttcaaggaagtcaagtttcacctacttgagaaagtgcaagagacacagagtgttgggagtcagccaagtttcatttacagagagtcttggaaacaaacattccagaaacccctggagattaaaggggaatttgatggccacaaagcagaaagtccagaggccacaggggaaggtggattttgtttttatttctgattgtcaagcagagaagagacctggtgagggca

SEQ ID NO: 145387 - DNA, 559 bp, Homo sapiens
ctcaactctcaactcttctttccaaatgaatgcttcctatctgccaggtacaattctaaatgctgtatgtattgattcatttaaactacacaacagccctttgaggtaygtactattattattattattatttttgagacagggtctcactctgtcagccaggctagagtgcagtggcacagtctcggctcactgcaacctctgactctggggctaaagcgattctccctcctcagcctcccaagtagctgggactacagtcacatgccaccacacctggctaattttgtattttttgtagagatggggtttcaccatgttgcccaggcaggacttgagcttctgggcccaggtgatcctcctgtctcggcctcccaaagtgctgggattataggcgtgagccaatgcgcctggctgaggaaggtatcatcataattgccacctcataaataaggaaactgaagcatggggaagttaactgactcatctaaagtcgtggagccagcacatagacatccatcactgcaatcaaagaaatctggcctctacccatggtgat

SEQ ID NO: 145388 - DNA, 559 bp, Homo sapiens
ctcaactctcaactcttctttccaaatgaatgcttcctatctgccaggtacaattctaaatgctgtatgtattgattcatttaaactacacaacagccctttgaggtacgtactattattattattattatttttgagacagggtctcactctgtcagccaggctagagtgcagtggcacagtctcggctcactgcaacctctgactctggggctaaagcgattctccctcctcagcctcccaagtagctgggactacagtcacatgccaccacacctggctaattttgtattttttgtagagatggggtttcaccatgttgcccaggcrggacttgagcttctgggcccaggtgatcctcctgtctcggcctcccaaagtgctgggattataggcgtgagccaatgcgcctggctgaggaaggtatcatcataattgccacctcataaataaggaaactgaagcatggggaagttaactgactcatctaaagtcgtggagccagcacatagacatccatcactgcaatcaaagaaatctggcctctacccatggtgat

SEQ ID NO: 145389 - DNA, 559 bp, Homo sapiens
ctcaactctcaactcttctttccaaatgaatgcttcctatctgccaggtacaattctaaatgctgtatgtattgattcatttaaactacacaacagccctttgaggtacgtactattattattattattatttttgagacagggtctcactctgtcagccaggctagagtgcagtggcacagtctcggctcactgcaacctctgactctggggctaaagcgattctccctcctcagcctcccaagtagctgggactacagtcacatgccaccacacctggctaattttgtattttttgtagagatggggtttcaccatgttgcccaggcaggwcttgagcttctgggcccaggtgatcctcctgtctcggcctcccaaagtgctgggattataggcgtgagccaatgcgcctggctgaggaaggtatcatcataattgccacctcataaataaggaaactgaagcatggggaagttaactgactcatctaaagtcgtggagccagcacatagacatccatcactgcaatcaaagaaatctggcctctacccatggtgat

SEQ ID NO: 145390 - DNA, 565 bp, Homo sapiens
ctcttctttccaaatgaatgcttcctatctgccaggtacaattctaaatgctgtatgtattgattcatttaaactacacaacagccctttgaggtacgtactattattattattattatttttgagacagggtctcactctgtcagccaggctagagtgcagtggcacagtctcggctcactgcaacctctgactctggggctaaagcgattctccctcctcagcctcccaagtagctgggactacagtcacatgccaccacacctggctaattttgtattttttgtagagatggggtttcaccatgttgcccaggcaggacttgagcttctgggcccaggtgatcctcctgtctcrgcctcccaaagtgctgggattataggcgtgagccaatgcgcctggctgaggaaggtatcatcataattgccacctcataaataaggaaactgaagcatggggaagttaactgactcatctaaagtcgtggagccagcacatagacatccatcactgcaatcaaagaaatctggcctctacccatggtgatatatgttaccttctaatg

SEQ ID NO: 145391 - DNA, 620 bp, Homo sapiens
caaattcagtagccaaaatttaatcaggtgccattttgtttttaaatactgttgtacatgttgacttgtagtagcaactctcttaatacttgaaaatgccatcattgtgaaatagcaaaatcatttggccatttcaaatagttcatttgccttttaaacttagtttctttcttttttttttagacggagtctcgctctgtcaccaggctggagtgcagtgacacaatcttggctcactgcaacctccgcctcccaggttcaagcaattctcctgcctcagcctcccaagtagctgagactacaggcgtgtgccaccatgcccaactaacttttgtatttttagtagagaccaggtttcaccatgttggccaggatggtcttgatctcttgacctcatgatctgcctgcctcagcctcccaaagtgctgggattacagctatgagccaccacgccggcccttagtttctttattacttcatttaaaattatttgtatgtgctcaagtggtttggtgaggctcagcaatggttagccagtaaagtttaytgctgctatttttatttatttaaatcatataggaatacttttccttataaaaagccctgttttccttataaat

SEQ ID NO: 145392 - DNA, 748 bp, Homo sapiens
gattttaattagagaagcttctaaatagtgttttagatttaaaaaacaacatagataactacatataaatgatttgtatttctgtataaaaattgaaaatagtgtactaatttttcaatttaatcctctaaatgagtttaatttcccttcatagtagaattatctgtctgcatgttgccaaatactaaggagataaattagattgatacttagaaagcatctgaatacttcaaattgaaggagtctataaataactaaaataattcactgtctgtctatgtcaaggtgctatttggtaattctttcaaaaacattttaatgatcatctattaaccaccaatatagtcacaggtaccttgaggaatgtgaagctgattaatcacacacccgctaaagggagataagtatagcagccacatgtcctggataacccaaggtacgtctgtcttctgccactcatcctggcataaggattaacagcactgctttcactcccccaaaatatcccagtttaaacaataaatcatattggtaccatataggtaagaaatatacataaatgaataagaaatgtaatacatgccattraaaaattacagagtggcctgggtgttcacaggagggacactatgtctaacgacatgcacagtgaaagaacatttctgctggttctaggacactgcacagatcttaaatgaattatcaccaaaatatcgaatacaaatttctgatcactgaactgatttcc

SEQ ID NO: 145393 - DNA, 390 bp, Homo sapiens
tgaattccaatcaagggaacaaaacaggattttcagctactgatttgtggttggcaattttgattcatcaccttggaactgccagataatacccctttgctctcctttgctgtcagaccaaagactcctgaacactcaaggatttctgagaaccctgctgytcttgttccataagaacctgctatctgtgccccagagggtgatacacattggtttcatggactgtagaaaacagtgaaatcctatttaataaccccagtgacaaactgctatttgaatttcacctgctagttcaagtccacttttcaacttcttttttgctctgatccaatgtgggatataaactgaagataaatagaatttgcctattggataaaagtaaagaaattt

SEQ ID NO: 145394 - DNA, 535 bp, Homo sapiens
tttaagaggccaggcacggtggttcacgcttgtaatcccagcattttgggaagccattgtggacagttcacgaggtcaagagtttgagaccaggctggacaacacagtgaaaccccatttctactaaaaatacaaaaattatctgggcatggtggcgggcacctgtaatcctagctacttgggaggmtagggcaggagaatcgtttgaacctgggaggcggaagttgcaatgagccgggatagtgccactgcactccagcctgggcaacaagagtgaaactctgtctcaaaaacaaaacaacagcaacaacaacaacaacaacaactctctctctctctctctctctctctctctctctctctctctctctctctatatatatatatatatatatatatatatatatatatatacagcctttatgaatacaagcacttggcctatctttgtgctttatacaatttaattcattgatgctattactgattgactccaggaagaaaacaaacatgttccttccctttataagcatct

SEQ ID NO: 145395 - DNA, 524 bp, Homo sapiens
cctccggcacataaaaactgttttcataaaacagcctttaagaggccaggcacggtggttcacgcttgtaatcccagcattttgggaagccattgtggacagttcacgaggtcaagagtttgagaccaggctggacaacacagtgaaaccccatttctactaaaaatacaaaaattatctgggcatggtggcgggcacctgtaatcctagctacttgggaggctagggcaggagaatcgtttgaacctgggaggcggaagttgcaatgagccgggatagtgccactgcactccagcctgggcaacaagagtgaaactctgtctcaaaaacaaaacaacagcaacaacaacaacaacaacaactctctctctctctctctctctctctctctctctctctctctctctctmtatatatatatatatatatatatatatatatatatatatacagcctttatgaatacaagcacttggcctatctttgtgctttatacaatttaattcattgatgctattactgat

SEQ ID NO: 145396 - DNA, 535 bp, Homo sapiens
tttaagaggccaggcacggtggttcacgcttgtaatcccagcattttgggaagccattgtggacagttcacgaggtcaagagtttgagaccaggctggacaacacagtgaaaccccatttctactaaaaatacaaaaattatctgggcatggtggcgggcacctgtaatcctagctacttgggaggctagggcaggagaatcgtttgaacctgggaggcggaagttgcaatgagccgggatagtgccactgcactccagcctgggcaacaagagtgaaactctgtctcaaaaacaaaacaacagcaacaacaacaacaacaacaactctctctctctctctctctctctctctctctctctctctctctctctctmtatatatatatatatatatatatatatatatatatatacagcctttatgaatacaagcacttggcctatctttgtgctttatacaatttaattcattgatgctattactgattgactccaggaagaaaacaaacatgttccttccctttataagcatct

SEQ ID NO: 145397 - DNA, 356 bp, Homo sapiens
ttcagtgctgcatagtatttcattttatgaatgtaccataatttattttaacagtgccctactgtgaacatttacattattttaatttttatggttatacacaatgttatatccaatgttcttattcatatatcctttttatacgtgaatacttttgcagttcattcataggtactatcactgcagtgaaattattgtacmaaaggatatgctcgtaaattttgataaaccactaggtatcatcctccaaagagatcaccctagtttatcctctccctaacagcatctgagagagtgcctcttttccttgggatttgttatatgttttacatttttgcttctaccgtatgggtaaa

SEQ ID NO: 145398 - DNA, 539 bp, Homo sapiens
atgttgcccagactggtcttgaactcctgrattcaagcaatccacttgcctcggcctccaaaagtgctgggattacatgcatgagccaccacacctggcctatgctttcactgggatggaaaaaactacagatatatacgcaagtcatggcagactcttagctacttgtaaaatggccatcccaattgtaatttcaaatgttctccattgttcctacaaattcattcttatctatctattcattcattctttgttttgtcccacacaagatttatgccagcttacaaagatagagagaaaaatgaaaactaaattagaagaaaaataaaaataaaaaatagagatgggtgtgtaaaacagatcaaaatgacctataatcgctgtaacaattgggccacatatgtggttctctaaaatttttcttagccaacaccaaaagtgaaaccttagctggtcactagattcagggaacacaaatcaaaacaaactagttcgttggtagatgtgcttctgcccttggtaccagagtcagacaggga

SEQ ID NO: 145399 - DNA, 576 bp, Homo sapiens
acgatgaggcaggcccatccattgtccaccgcaaatgcttctaagatgccttctctctccatctaccttccagtcaggatgacggtattatgcttcttggagtcttccaaaccaccttccctcatctttcatcaatcattgtacagtttgtttacacacgtgcaatttgtttgtgcttctaatatttattgctttataaataaaccagaccaggacttgcaacctataaaagcctctcgtttgtttttggggtaggcgtggggtggggcaggtgtttgctttgacaccctgagcattgtcaaagttcagtaccacaaggttcatccagatgaattaatatgacagttagctgggagttataatgctaacttttgatttcatattttgagacagaatcatgaatatatttcatacctgaaaagcagattaagrtttagttccatataagtaagaaatgaaattgaataagatagttctctagaattagttgctgcagatgacactgaagattattttaacatatgttccagttgtttttgtaaccttgcagaaaatacacatatattgataatgaga

SEQ ID NO: 145400 - DNA, 576 bp, Homo sapiens
acgatgaggcaggcccatccattgtccaccgcaaatgcttctaagatgccttctctctccatctaccttccagtcaggatgacggtattatgcttcttggagtcttccaaaccaccttccctcatctttcatcaatcattgtacagtttgtttacacacgtgcaatttgtttgtgcttctaatatttattgctttataaataaaccagaccaggacttgcaacctataaaagcctctcgtttgtttttggggtaggcgtggggtggggcaggtgtttgctttgacaccctgagcattgtcaaagttcagtaccacaaggttcatccagatgaattaatatgacagttagctgggagttataatgctaacttttgatttcatattttgagacagaatcatgaatatatttcatacctgaaaagcagattaaggtttagttccatataagtaagaaatgaaattgaataagatagttctctagaattagttgctgcagatgacactgaagattatttyaacatatgttccagttgtttttgtaaccttgcagaaaatacacatatattgataatgaga

SEQ ID NO: 145401 - DNA, 590 bp, Homo sapiens
gtcattgttggctccatgagagaggtcattttgcttggtgagagattataggcaaaaatagaagccccaatgtagtctcctgggcaaatgacttattcatgggttctaaattattgaggtcattgaagagagtgctatttttaacctttgagaaaggaaagaacggggtgaactgggctttagggaggactgtgtcttcatagggcaaaaggcaatggtgtaaacaggsgctgaaaagaaaggtaggggtcggtgcatgcaccctgagaggggcatgtgctcagtgcatgaccctcagaagtcttctgtgtatagatgggtatgcctcatttgcaaccagccagccacaaggaaggagacttagagagctgaattggcaatataggcagatgtcttagctagagccatttttcagagagccagggagaactctgtgccacaaaatgctattcctacattttgtattccttcagagcttaaaggctttgtttttctcctgaaatgtaaatgttccctaggagattccacacattgatggtttatcagtggccacctcaattattggtgaacacctttgcaggaaaatgaat

SEQ ID NO: 145402 - DNA, 482 bp, Homo sapiens
tgaaataaatgttctgatgagctgaccagaagaattyggctttataggcagagaaggcctgaagaaagcagaagcaaagaacaagggtgtattagttacttccagacagaacaacagaaaataactggttagttaacatcaggttacttcaggctgtgtgtgtgtgtgtgtgtgtgtgtgtgtgtgtgtgtgttagaattaaagcagagagaacttccttattatgctgattgaagatttatagtggcctgtttgggaaattggctctctctctctcctgatttctcaggtcaaataacaacttagtttaggtttgttgacttggaactttagtatgggtggctccattttgatttttattctggtttgttggagcctagttcaagagcttagtccaaaacaatgacctcctgtaattttttatttatcaatagtgtgatggttaattttatgtgtccacttggttaggctacagtacccag

SEQ ID NO: 145403 - DNA, 587 bp, Homo sapiens
gtaacttagagggaaggaggaatcacaaaaggtagcaagaaggacgtgtatccatactgtgtatcaatcccaactttcttgaaaggccaggccatgcaaaggtgtgtgggaaacccaatatagatggatctaataggctactctgaaacaattttcttatttaaatgctctgcattggaccactgtgcggttaaatttctttaatatctagaatagtgcttrtacaatacagaaaagcagcccagtccccatatcctttgctgtaattccagtatttacagtagacaactggagattctaatccagaggtttgggtacagatttcacaattacaaagagctggcatcagtattgtcttcaaaggacattcaccaaaggagcgaagcaaaagctgagaatattgacaaaatgctttgttcaaccaaaaattgaatggaaaacagattccctgacaagtcatcaaattcacagccaaggggaaacaaattacaatgatagcaaagtaacagcatccagtaggtaactagccaaagtcatacatggtttactatagacaaagcctggaagactgggggcatagaaggcct

SEQ ID NO: 145404 - DNA, 587 bp, Homo sapiens
gtaacttagagggaaggaggaatcacaaaaggtagcaagaaggacgtgtatccatactgtgtatcaatcccaactttcttgaaaggccaggccatgcaaaggtgtgtgggaaacccaatatagatggatctaataggctactctgaaacaattttcttatttaaatgctctgcattggaccactgtgcggttaaatttctttaatatctagaatagtgcttatacaatacagaaaagcagcccagtccccatatcctttgctgtaattccagtatttacagtagacaactggagattctaatccagaggtttgggtacagatttcacaattacaaagagctggcatcagtattgtcttcaaaggacattcaccaaaggagcgaagcaaaagctgagaatattgacaaaatgctttgttcaaccaaaaattgaatggaaaacagattccctgacaagtcatcaaattcacagccaaggggaaacaaattacaatgatagcaaagtaacagcatccagtaggtaactagccaaagtcrtacatggtttactatagacaaagcctggaagactgggggcatagaaggcct

SEQ ID NO: 145405 - DNA, 570 bp, Homo sapiens
agctcatggcccaaggctatcagtctgacaggtgttgaagttaggatttaaagttgattctgtttgacaagaaagcttgtgcttttcccactgctgcgggaggtctcacttctttttccacaaggagaaggtatgtaattgggctaattatcactcactcttttaaaaataggaaaaccgccgggcgagrtggctcacacctataatcccaacactttgggaggttgagatgggtggatcacggggtcaggagatcgagatcatcctgctcaacatggtgaaactccgtctctactaaaaatacaaaaattagctgggcgtggtggcatgtgcctgtagtcccagctacttggcaggctgaggcaggagaaacgcttgaacccgggaggcggaggttgcagtgagcagagatcgtgccactgcacttcagcctgggtgacagacagagactccgtctcaaaaaaaaaggaaaaccaaaacaagaggcatgttctaggttaaattccctaggttgcctataacctgtcagagtttgtatctcaaacacaaactagctgactacatctttgt

SEQ ID NO: 145406 - DNA, 570 bp, Homo sapiens
agctcatggcccaaggctatcagtctgacaggtgttgaagttaggatttaaagttgattctgtttgacaagaaagcttgtgcttttcccactgctgcgggaggtctcacttctttttccacaaggagaaggtatgtaattgggctaattatcactcactcttttaaaaataggaaaaccgccgggcgaggtggctcacacctataatcccaacactttgggaggttgagatgggtggatcacgrggtcaggagatcgagatcatcctgctcaacatggtgaaactccgtctctactaaaaatacaaaaattagctgggcgtggtggcatgtgcctgtagtcccagctacttggcaggctgaggcaggagaaacgcttgaacccgggaggcggaggttgcagtgagcagagatcgtgccactgcacttcagcctgggtgacagacagagactccgtctcaaaaaaaaaggaaaaccaaaacaagaggcatgttctaggttaaattccctaggttgcctataacctgtcagagtttgtatctcaaacacaaactagctgactacatctttgt

SEQ ID NO: 145407 - DNA, 565 bp, Homo sapiens
ccaaggctatcagtctgacaggtgttgaagttaggatttaaagttgattctgtttgacaagaaagcttgtgcttttcccactgctgcgggaggtctcacttctttttccacaaggagaaggtatgtaattgggctaattatcactcactcttttaaaaataggaaaaccgccgggcgaggtggctcacacctataatcccaacactttgggaggttgagatgggtggatcacggggtcaggagatcgagatcatcctgctcaacatggtgaaactccgtctctactaaaaatacaaaaattagctgggcgtggtggcatgtgcctgtagtcccagctacttggcaggctgaggcaggagaaacgcttgaacccgggaggcggaggttgcagtgagcagagatcgtgccactgcactycagcctgggtgacagacagagactccgtctcaaaaaaaaaggaaaaccaaaacaagaggcatgttctaggttaaattccctaggttgcctataacctgtcagagtttgtatctcaaacacaaactagctgactacatctttgtgacaa

SEQ ID NO: 145408 - DNA, 582 bp, Homo sapiens
gcctttttaaggattggcctcaaactttcagggcttgatcattaccaccagcttctataattttgtccccatttccaacctaggaccatccagagaaagccaartatgttccctaaaccagtaaaatgagttgtcccgcttctaattggtttgcctctagcttcctcatgccaacaacttccaatgatgttgcatctgaagccctctcttctttgcactataaagctttcctactcctttcctgcctttgagtctgccaaaagtaactgatggtggatgagtcccttgctgtgccaagctctgaataaacagcatctgctcatttgcatttggatgttcttcacttattcccacagttccagctgctgctctattacacactagtggctgacttaggcatgttacccagactctctgagatggtatcctcatctgtgaaagaaatctagtatgctgcagggttgctatatgtaaagttgtatttagaagaagctttgcatatgctgtttaataggctcttagaaaaaagttcatgtcatttttaagtcacacattcataaatgctctttactaatactacta

SEQ ID NO: 145409 - DNA, 582 bp, Homo sapiens
gcctttttaaggattggcctcaaactttcagggcttgatcattaccaccagcttctataattttgtccccatttccaacctaggaccatccagagaaagccaaatatgttccctaaaccagtaaaatgagttgtcccgcttctaattggtttgcctctagcttcctcatgccaacaacttccaatgatgttgcatctgaagccctctcttctttgcactataaagctttcctactcctttcctgcctttgagtctgccaaaagtaactgatggtggatgagtcccttgctgtgccaagctctgaataaacagcatctgctcatttgcatttggatgttcttcacttattcccacagttccagctgctgctctattacacactagtggctgacttaggcatgytacccagactctctgagatggtatcctcatctgtgaaagaaatctagtatgctgcagggttgctatatgtaaagttgtatttagaagaagctttgcatatgctgtttaataggctcttagaaaaaagttcatgtcatttttaagtcacacattcataaatgctctttactaatactacta

SEQ ID NO: 145410 - DNA, 600 bp, Homo sapiens
gactatagtcaacaatcacttaactgtacattaaaaaataactaaaagagtgtaactgtattgtttataacccaaaggataaatgcttgtgaggatgaatatcccattctccatgttgtgattatttcacattgcatgcctgtatcaaaacatctcatgtagcccacaaatatacacacctactttgtacccacaaaaattaaaattaaaacatacaaagtaaaaaacatgtaaaaaatgaggtatattgctataaatcatttttatctttaaatttgtttgcaactgttaattttgatataacttcaaacttatagaaaagttgcaagaatagtacaaagaatttccatatacctttttcaaagtcaccaactgtagacattctaccctatttgctttatcacttttctctctctctctctctctcttctctctctctcccaccccctgccccyctgccccctacctatctactttctttcctacacttttctgaaccatttgagaataatttgcagacacttgaggacaggccacttattttgtagaatgtcattcagtttaggtttgtctgatgttttctcaattgtacacccaggt

SEQ ID NO: 145411 - DNA, 615 bp, Homo sapiens
ctggctgccctgggtgagggtagtggtgtaaacttggcgatgtctctggacatggaggctcccttgatcatccaagggcaacaacattccagagaaggtctcaggtgtaaaagcctctatcaggagcactcatagcagtgaggggatgggcacagcagctggcaaaggggatctggtgggtaccagtggctgatctaagtcaatgtctgtgttcaccatcatagatggcaccctgaacttgcccttctaatttatcacattgcagttaaataattatcttgcgaatgcacagttactatataaccgtcttcactccacataatggtcatcttgaagggggtaggggaggagaggcacaggtaaaaatgaactcagccaggmggtgataagtactatggagaaccacaaggcagggaaaaagggacatggggcaggattgaggagaagcaggaatctccaccataataggaagatgaggtgacaattgagtagagatctcaaagtggtgagaatgtgagtcatgtagctaaaagggggaagagcgctccaggccaaggatacagtgtgtcaaggacctgcagcgagaatgacctacaggtgttcaagtcaagagtt

SEQ ID NO: 145412 - DNA, 575 bp, Homo sapiens
ataatatatgatggtcataggagctgggataattagcccagacaggagaagatccacagggaacatggaaatttctaatcctctaccactctcagaggggccatagagtaggaagtgctcaaagagtagaaggatcagtgagtacaggaagaaagatttcaactctaattaagaaagggcttactaaaccagaagcgtccaaagttggcatgaggtggctgagaagacttccaacaatgttcaaacgtatggctggcacgaatgtcatggaggggaagcaaatgtcagatgtctggctggcctagatgttctccctgctcctaacccccaaattcgatgatcctctgattcattatacttatatgcactatgtttgctttattcacattatactgaaaaaggttttgtyatattcacattattatgaaaaagttcccattcctattatctttttacttctttcatcataactttatggtgcttaaattatactttttcatacctttgccacttcttcctgactttcatcatgaagcctttctagttcctcaagatccagaccaaattcctgttgg

SEQ ID NO: 145413 - DNA, 622 bp, Homo sapiens
acagtgaaaagatctaacatatgtttgattagagtccagagaggagaaagtgggacagaggcaataattaaagagatattgactggggatttcccagaattgcttaaagacatgaatttacagatttaagaggtccagtgaatcccaaacagaatacataaaatgatatccacacttagacttaccagagtgaaactgttgaaaaccaaagacagagaaaattttaaaagcagtcggagaaaagacagattacttctaaggaatttcagttagactaatagctgacttctctgtggcaataatgtaagaaatagtggaataatatcttcartgtagtgcagggttcagcaaattgtggctccatggggcaaaactagcctgctgcatgtttttcaaataagattttattggaacatagccacacccactaacgtattgtttatggcttctttcacaccactatggcagcattaaatagttgtggcagagactacatggtttgcaaagcctaacatatttactgtcagcctatttatagaaaaagtttgatgacccctgatgtaatgaaagaaaataattaccacctagaattctatacccaatgaaaacatcttttcagtat

SEQ ID NO: 145414 - DNA, 578 bp, Homo sapiens
agtaataggtggagaatgacacattgtagaagatgtacagtaaatgaacactgcatacaacagcaaaaaaaaaaaatgtgaaagtagktttaaaaataatattgaactaaaatcccaaataacaataatataagttggggggggcagagcagggtatatagaataaagtgttccaaggatctcatataacccaggaggagaataaagcttaaagtaacttttgatgttgataaattaggtacacatgttacaacttctaaggtaaccactaaaagaataggaacagtagatgaaatttccaaactagagaaagtgaaatgtaaaaaaaaagtttaacccaaaacaaggtaaaaaagagaaagaaaatgaaatgcaaaacaattgagataaacaaaaagcataaattaaaatctatgtttaaacccaaatataaaaagatggaaaaagatatgtaaacattaaccaaaagaaaaccagtggaaatatattaacattagacaaattaggcttcaaggtaaaaatcattactaaagataaatgggcttatttcagaataataaaatattaaatttaccagg

SEQ ID NO: 145415 - DNA, 379 bp, Homo sapiens
gtccctagggggccaacagcttttcatactgaccaggacagactggccacccctccccaggcacaaagccctgctgcatgtggagtccgaagaatgcaggcgagtatgggggcacaggtttgccctctcggggcgcttttgtcaagagtcccatggactagagtggctactggcttccacgggaaggatggcagccccaggcagcccacccaacagctctgtgccttaagaggtggggagggcagaagactagggcacccctgtacccagggctcaggcctgtgacccccagtgctggcaagaggaacgtgggccaggagagttgtccaggtaaaagagatagcagygggaaacaaaggtctttggctgaagcatccta

SEQ ID NO: 145416 - DNA, 553 bp, Homo sapiens
tatttagcttatttggtatgttaaaatcatatgggaagcattgtcaaatctcaaataaataatggagtttaattttttagtcatatttttctgaatatgttattattttgatatatcatgatatatgttgtcaagcataattatgatttatccttggtaaaaatggggaaacgggagagaaaaattgcatttcagaagacaagtacagtatgcctgttatcagattctagtcttgcccattgtttttgagtttttattattttcctacaatttggactaaatcctgaattctttcttggctgcaagtcttcaaactaatgcttttgracttttctctcatttttctcacttggaatcactagaatttaaaactgcttttcttgaagccctgcaaactaaagttagacaacttgatataaacttcaggaggagtcagcacagcaactcacatgtacacagcctttgtgcctgctgatgtatgggctactcaggaagttcacatgaacacgtaattcaaactataatccaggaaaatctgtaagattaccactac

SEQ ID NO: 145417 - DNA, 462 bp, Homo sapiens
gttacttaagcaaccctaaatttacaccttcaaagggatgactcaggtgaaagtttacatctccaaggcacagaacttagatctaaacaccattatttgctgaaacaaaaaggacatggataaaggcccactcaaaacaagattgtcaggaaaagtatcctaaacaaaggtacgatttggtgtataaacgttaagccaatgtctttcttattgtaaaagtttctaayggctcctgtgcagggaggtgcccttataaatggagatttccttaaagatatacatttcttctataaagagtgtcaaactagccagctaaatgccagcaatctagttagatgggggtctttcaacttagtttatttcttgattaggttactgactcagagtggatccctttaatgaatagggcaaagaaagtatttgcagtttccctggcctaatatttgaaatgtaaaaagcagc

SEQ ID NO: 145418 - DNA, 369 bp, Homo sapiens
aggacatggataaaggcccactcaaaacaagattgtcaggaaaagtatcctaaacaaaggtacgatttggtgtataaacgttaagccaatgtctttcttattgtaaaagtttctaacggctcctgtgcagggaggtgcccttataaatggagatttccttaaagatatacatttcttctataaaragtgtcaaactagccagctaaatgccagcaatctagttagatgggggtctttcaacttagtttatttcttgattaggttactgactcagagtggatccctttaatgaatagggcaaagaaagtatttgcagtttccctggcctaatatttgaaatgtaaaaagcagcacaactggaaggcagtg

SEQ ID NO: 145419 - DNA, 583 bp, Homo sapiens
ttcataaacacttatatttgcaatgagagagacattatgctgggctctgggaaaataatggtaaataaggtataggacctgattgaaggaaattataatttagtagcaaagattaaaaatggaaacacaattgcaatgtgatgttttaagtttggtattaatggaaagttctaggtgcaattgaagtatctaggaaaggtagtcttggaataaagacaggaaaggtttagcagaggagacagctaaagcacaaataaataattagaagaagatggtcaggtgaactggggagtgcattctaagaaaatggtcaccatgtactctgaggctttctcaagcagcccctcagctgattctctggactcctggacatagtccactctgctgtgcacatgcagaaggcaggcaaagctcctgcttcctgggccactctggctgtacctccccacctaatgtgagctggatgcttgtcaggggtctgtcttcrttttcctcatatctatttataactcttatacttgttatcaaagttatttaatataagtaaatttattcaaaccaatgagatatgggtacaaatgag

SEQ ID NO: 145420 - DNA, 627 bp, Homo sapiens
tgctgggtttgtccccagagattcctcaggccaaagacccacagtactgtttcaaggagtgtgtagatatgagggtgccagagtgtgagagtgaaaggcctgggcttgagttctggttcaaccacttactaggtaggcctctgtccttggacaagacaacttgctgcttgactttttaatctgtaaagaagacaagaataatcactaccktttaggattgttgtgaggattaagtgataaaatgcatgcacattctaccttaactcagcacaacgccttcaggtgaggattcatggcatggcccaggagaggagggctgcagaccggttgcctcctcctgacacctgctgtccatggagcagtctgggtcaagtctcagctcccactcagtttcccagctcagttcaggaagttccagggattcagtgggcacctcctatcttcttctacccaatctgagaaagtggcaaaaattgggagtctctgtgccgaaggtgagaaacttgcctccaacagaagacagatggcccatgatgcaagatgatgtctttcctgtgtttcttgtgtccctagtacacagacaccatgacctacagaagaagaggccagagcagggtgttgcagaga

SEQ ID NO: 145421 - DNA, 606 bp, Homo sapiens
caatcagtgtaatccaccatatatatcagcaggctaaataagaaaagccacatgatcctatcaattgatgcaaaaatgcaaaagcatttgacaaaaaaggaaagtaaaattctccacagaaaacaagttgtgctggccttatccaggtgtgcaaaggaggaaatgaacaatctttgtgctctggccttggaaaayaaggaagtgtaaactaggacacagatacagagaaagatgaagataaagcacttggattacaggctcagagaggctaagtcatttgcttaatgtcacattaccagtaattgagaatcatatcttttgatggaaaacccatagatatgtacaccagagtaccctggaattatgctcttgatcaatgtctttccaattatatttgtatattcatatatattttcttggtccattttctactgctataacagaatactacaaagtagttaattcataaataataaaagtttatctggttcatagttctgaaggctaggaagtccaagatcaaggggccacatctgatgagggccttcatgttgtgtcatcccatggtggaaggggtcacatgactagagagcacacacaagggaa

SEQ ID NO: 145422 - DNA, 601 bp, Homo sapiens
gaagcttgcagaagctcttggctattactgagctcttccttgctaatcccgggttttaccctctctcccatgtcatsgatcttcattactgtctagtcccctaagcaggttccccagcatcctcacatacccctcgcttttcatttgtccctttgtcatacgtctccccagctgccctggaatccctgccagacccagccttccttcaaagtgcaacaaaagctggatttttttatccaaacatatgaaacccaaagtcatgttgtttcgtgaagccttttgcgatgaatcccccagagcttcaggtaccccctgtttcacaaaatcaatttgattttaacagatttctgtttgcaaatcctcacctgattcacctgatgtgaatcctacctctgattaccatgataaattggaaaaagggtttgataaaaaatgagctcctggaaggtctctcagcatcctgctggggtagctgttcgacagtgttccatggggtaccatggcctttcgctgttgcccagtgcagccctctttctgcaagggtctgcagtctcagccttccagaggtgaggagctgagcccctgccagcaaaacgcttcc

SEQ ID NO: 145423 - DNA, 426 bp, Homo sapiens
caaactctatcactagggggaggttgctaaaccattagaaaccacccttgtgatccaatcacctcccaccaggccttacctctaacattggggattacaattcaacatgagatttgaatggggacatagagccaaatcatatcaatcagttaatgtaaatggcacaaccttaaacctggcccatagtaattgctcaacaagtgcttactaatacaggtccacagttctttagccatgattcagaaatcaaaaaactttgtagtttttttgtgtctttttttttttttttgtaagtttatctcaractcatctggcaacacatcccagtcagaaccatcctgaggccattcaatctttctttaatccactagggtgactattcatgtgtttcattgaagaaatgtgttcagttagatggtgttgatc

SEQ ID NO: 145424 - DNA, 543 bp, Homo sapiens
agtcactgttagagccaccacagacatgttcgcatttcaaatctcatacccagtatttagtttggtgccaaaataattgcagcttttgccattaagagtaacaaaggacattatattactgggcagacagaggaggcagttcggtgagaagaagggaatttggtccctagatattggaagtatcctacagtcaaatgaacgtgcaaagactattgtgggtggaattttgctctctgagatgtgtgcttgaggtgtgtggctgaacatctttttatgtctaattaaggagtccrcagaatagccccatggatcatgtggcccagtctggaaaaaaaatagtagtatatacttcactgggattaaaaacaaaaaaaggaagattggttttggtaacagaaaatagtcttagataaagtagaactgactaaaaattaatctgcctaaggcaaatgttgttcatgtggtttgaaatggcagaaaagtgtgttcattgtgaaattattatcaaatagtaattatgaggttgttacaatttctaggaaa

SEQ ID NO: 145425 - DNA, 543 bp, Homo sapiens
agtcactgttagagccaccacagacatgttcgcatttcaaatctcatacccagtatttagtttggtgccaaaataattgcagcttttgccattaagagtaacaaaggacattatattactgggcagacagaggaggcagttcggtgagaagaagggaatttggtccctagatattggaagtatcctacagtcaaatgaacgtgcaaagactattgtgggtggaattttgctctctgagatgtgtgcttgaggtgtgtggctgaacatctttttatgtctaattaaggagtccacagaatagccccatggatcatgtggcccagtctggaaaaaaaatagtagtatatacttcactgggattaaaaacaaaaaaaggaagattrgttttggtaacagaaaatagtcttagataaagtagaactgactaaaaattaatctgcctaaggcaaatgttgttcatgtggtttgaaatggcagaaaagtgtgttcattgtgaaattattatcaaatagtaattatgaggttgttacaatttctaggaaa

SEQ ID NO: 145426 - DNA, 602 bp, Homo sapiens
aattttaatgacttcaataaaaagtaaattttcatacaaatttctttctacgttgtgaaaataaattctatttctttcctattcttgcttttcctttttttttwaaaaaaaaatagagatgggtctcactatgctgctcaggttggtctctaactcctggcctcaataaattctcctgccttgtcctccctaagtgctggaattacaggtgtgagccactgtgcccggcctcacttttccagttataaagaatgtgtcagtgtaaggctttccctcaacaacttagtgaaatgtgaaaaaagattttgaaataaaagcatctgatgtttgaaaacatactttacaaattaaacatgctaagacttatctgtggattactgcaaacaggggaatatagtaaaaacaaatgaatttatctgtattagtgcaagtagctcaacatagtaaaaacaatagaatagaaatgtttgggctttacccatccgccaaatgaaaaaaaaatctccttttaggttaaaaggatcaagatgtaggagactggatattcactagatcccttcattttctcaaactcttcatctatttctgggctgctcattgta

SEQ ID NO: 145427 - DNA, 494 bp, Homo sapiens
tggcaacaggaggaaaatagtaggaagataagtataactttcagtgggggataaaaaataccaaactctcagctttgcagttatatgggcaggaggatcccttttggctttattataaaactattacaygtgagcacttgcacagagatccttccccaggggagaaaagttaggcccacccttggcactctgcactcactcacgagcccaccttaagagaagccccaccagcttctccacctgtgcctgctccagcaaaagcgttgctggcatatagcctctaactcctctgagaatttttatttgttcatgttaaaacaacttttattttttgctatttttaaaatcatttctttcttcataattgtatctatttctggggtacgatgtgatgttttcatctaagtgcacaatgcgggatgattaaaccaagctaattaccatatccacctcctcacttacctgtcatttttttgtggcaaggcatttgaaat

SEQ ID NO: 145428 - DNA, 494 bp, Homo sapiens
tggcaacaggaggaaaatagtaggaagataagtataactttcagtgggggataaaaaataccaaactctcagctttgcagttatatgggcaggaggatcccttttggctttattataaaactattacatgtgagcacttgcacagagatccttccccaggggagaaaagttaggcccacscttggcactctgcactcactcacgagcccaccttaagagaagccccaccagcttctccacctgtgcctgctccagcaaaagcgttgctggcatatagcctctaactcctctgagaatttttatttgttcatgttaaaacaacttttattttttgctatttttaaaatcatttctttcttcataattgtatctatttctggggtacgatgtgatgttttcatctaagtgcacaatgcgggatgattaaaccaagctaattaccatatccacctcctcacttacctgtcatttttttgtggcaaggcatttgaaat

SEQ ID NO: 145429 - DNA, 550 bp, Homo sapiens
gatccattttacagagtgctgattggtccattttacagagtgatgattggtgcgtttttacagagtgctaactggtgcatttacaatctttagctagacacagagtgctgattggtgcatttttacagagtgctgattggtgcatttacaatcctttagctagacagaaaagttctccaagtcaccacctgaaccagaagtccagctggcttcacctctcaatcccccctctaaacaggacaccccaattgctgttgggaattgggcaatgaccrctctagctacttcctactggatagaggtgaagaaagggccctgcagtggtagtgtcctccagaggggaaccctctaggccaaccaaacagcaagtgggtcgatccaggggtcctcggtagaagttgttggttgagctcatttggagttccatttgtaagatcatctatagcttgatggcctcaatcctagaggaaacaaatttgacaaggaggttaaaaatacagggcccaaaggcaagtaatagcaagacagctgtcacgggacctagaaaggg

SEQ ID NO: 145430 - DNA, 604 bp, Homo sapiens
gctgagaagtcctacaacaggctagtctttcaggttcacacattatttcctttgaaaacgtcatcccagacatagccccaaatagtgctttaccagtcttctaggtattgtttaattcagtcaagagtgacagcacatcacacttagatgtaggcacaagtgaaaaattgatggataagtttcacttgaggttacaggagatgaaagaaccagaaaataaggatttattcaaaagagctctgaattcagtttgtcaaatctatgacttgatatwtgaaatttgaaaagatggtgattatttcaaaaatctacctttctaggattcttggtggaataactgattcagacctagacttgttgtaataagtcaggtgcaagagaaaaggaggatgtccatgtcaacagacaggaaatataatggacacaaagcagattaaaattgggtttaagtttctgcttttgatgaaatgtcttccagaactttgaagacatgtctgacttgtatactccatgttgtgctgttctgaggactcatttcagtaaatctaactcagtatcctagtgcctacctttcactgagagacaattacaactgcctgcactg

SEQ ID NO: 145431 - DNA, 602 bp, Homo sapiens
cttatttaacaaaagtccttaatacaatacaattatatcagtttcagttcccacaatacattatactaatttcaggttgtacattaggtctctatacttgtttatcctactttatctactattttgtatacttcaactgatgtctctccattttctttccccccactccacctatgttatatactatttcattctctatttttttgcatttgagctcttttttttaaatagtccacatataagtgagatcatgtattatttttatttttgtgtctggcttatttaatttagcataatgtcctccaggtccacccatattgtgcaaatagaaggatctcattatttttaaaggctaaataatattccattgcatgtatacatatatatacacacrcatatatatgtacacacacacacacatgcacaattttatctttctattgcctctcttgaaatgctgacatcgtgtaaacatatacgcaccacatttttaaatctattcatctctataaagaaacttaggttgttttcatatctttactcttaggaataaagctgcattgctctatgtttctgtttttgtgtcagaatgatactgtttt

SEQ ID NO: 145432 - DNA, 648 bp, Homo sapiens
aaaagcttaaaacagttgtgcagcattaagtggtttatagctaaaatgacttccctatctacaacattttcattgaaagctatttctataatattccctaatggtattgatttgatagccaatttgtgtgtgtgtgtgtgtgtgtgtgtgtgtgtgtgtgtgtgtgtgtgtgtttgtgtatgtagatgtgtatatatatatatattcccttaggctgaattcaggagggcagttttgtcttctcaatgagtatagcacaatgctttgcatagaataaacatattaaagattttggaatgtaaaatgaaagcatatcctattgtaaattgcatatatacaatggagatgtcattattgtataatttttattacaacaaaatttcagtgacataaatgtgactatataatattttatataatttaatatttgttatttttataaaacagtaaaagaaacayatttttaaagctctatgtttcaaaacagtagacattgagaaagattaaaaatatataaatatgctgtttaaacatatttatatttgcagattctgcattttccttgagagagaaatgctctagcttttacacagatgtattagtcaaggttctctagagagagagagaaaaaaagattatgaggcattg

SEQ ID NO: 145433 - DNA, 486 bp, Homo sapiens
ttatcttgtgtttagtgtaatatcataaaccttgaataacaccatggaacccatgcaaagtgccactagtgatactgaaagtactctcaagaagcaaagaaaagtcatgacattacaatataaatttgaattgcttgatatgcaccacagatttaggtctgcagctgcaattgcccaacatttcagacaaaggatttttttttaaacagatgatgtaaactcatagtattgttaaatacagtacagtatttatgtatttgctcttcctttgattttcttaatagaatttctttcctctagctcatttactgtaagaatgcaatatataattcatatgttatctgtaaggcttgcagtcaacaagaggctattagaagctaagttttggggaaatcaaaagttttatttgaattctcgactgmagaaggaggtgggtgtctgtgtcctaaccctcatgtttttcaaggttcaattgtatttaatttg

SEQ ID NO: 145434 - DNA, 518 bp, Homo sapiens
atatgatacgtttatctcatcttcgtgtttgctgcaaaattttcttaaaatctctaaacccaatgatgtctgtctcaaagtttaggtagattttagtggttgtcagaatgtggtctatgaatcaaatgtatttctgatgagaagcccagagattactttaaaatgtagtaatctgagttttcaaactggccatctacattgtgggttgttgttcaggtggggyggggggcaagtcaggctttaaaagttgacgtcaaaaagttcactgaatgagaaatttgacttccaggtgaaataaaatagtatagcatggtgcattctagtcatcaataatagaaatgctgaaaaaaatatgaatatattagcttaaagtcttccttaagtgctaagtcattagatattgtagatgctataaaactagagaagaaagaccctcataggcaatctgacttctgcagccattttaccctggggacaattgcttatttgggcatgggcaggagggtgaggctgtgagc

SEQ ID NO: 145435 - DNA, 534 bp, Homo sapiens
tttgcttcttgtagagttattttgctaagccaaatttttaaataattattcttacaatgaaatacatggcaggtaggtatatttacaagaaaagccaataagattgagtgagagataataacccagcagtacacaaaggtatcagccgtgggagggaagaacaagagatgtaatacaaaatacacttaaaaatgttgattgttatattttttcaacacatatcctttattaaaagtaaatcttgaaataattttaattaataggaaaaattttcaattatgaggcttattaataaaagcatttattcactcagttatacattcatttacttattctttcamaaatatataatatatgccaattaaatgcttagtattaacttttaaattcagagaaattagatagatagatacattgattgatagatcaattgatggagataaatattgattgttagacacattttatgtaaatacatatagctatgcctatactcacacacatatgtgtatgctatagtagtaatatatttta

SEQ ID NO: 145436 - DNA, 586 bp, Homo sapiens
tgtgtaccagttgatataggtcaggtaacctgaagtaatgctgaattcctcaattattagtttctgatggcatctggatttagatatgccctcaattatagactttatcagmctgggcccaaggtttaaattccataattactggcgtacctggctcaagggcagaattgatttttaagagaaagtgtcatttggggttttcaaagaaccagtgggaaaaggttagaagtctggaaaagggaaagagggggaatgagttgttagaggttcagaaggaaagagattgaaaggctaaggaggaagaaggagacatggataaagaaggcaactggaagagaaagagaaataatttaccaggaaagtgatctagttcatcactgcttatgtttgtcaaatatttcatcagctttggccaacaaatattttagtgaatcaattttttaatcattttttggggggaaaacaggcttctgtatacaaaaaacaaaaagttacacaatgggcctaagaaatgtgattccatatcttttttaaggcacttctcaaatgaacaatctcttccttaggaaggtcatgaatattagtt

SEQ ID NO: 145437 - DNA, 537 bp, Homo sapiens
tttaggacgtgataattttatttcctttgactatatgtttacgagagggattgccaggtcatatgataattctagtttctgtagaaacctttatactgtttctatgatgactgtatcaatttacattcccatcaacagtgtacaagacttcmcttttctccacacacttctcaacatttatcttttgactttttgataatagccattctaatgggtgtgaaatgatatcgttagtggaactgatttgtatatgcccaataattaataatgttgagcatctttttgtatatctaaagttcctctcttaatgcagataaatttgtttttgtaaagaaaggtatgtatgcattttgcgctggtgtcatgaattgaatttgagtcaatctatattaacatttcctgtatttgtggaaattagacttatttataaaacaacacacactaaacaaaatttgttgatgaactgatattattctttaagcttcttgctttattaatgcagattatccaggcaaattcttatcactgtgagaatga

SEQ ID NO: 145438 - DNA, 327 bp, Homo sapiens
tccagtcaacttttccaggattcagaatagatttcaaagatgtgtcagtgacataaaaaagacgaaagttattgtaaaactctagaaatattttttaatgctagaaactcttattaagcatgcagaactttacaacataacattgtctctaatacaccartttattcatacatcacatattgtgatcaatacaacagacacacagagtgccaattatgtgccacttgctgggcaaatccctggggtgaaagcagtaaataacatgcctatgcctgtctttgtgtagttgagagcacaggaggattatattcaaagacacagatttca

SEQ ID NO: 145439 - DNA, 327 bp, Homo sapiens
tccagtcaacttttccaggattcagaatagatttcaaagatgtgtcagtgacataaaaaagacgaaagttattgtaaaactctagaaatattttttaatgctagaaactcttattaagcatgcagaactttacaacataacattgtctctaatacaccagtttattcatacatcacatattgtgatcaatacaacagacacacagagtgccaattatgtgccacttgctggscaaatccctggggtgaaagcagtaaataacatgcctatgcctgtctttgtgtagttgagagcacaggaggattatattcaaagacacagatttca

SEQ ID NO: 145440 - DNA, 488 bp, Homo sapiens
tgttgcccaggctggaatgcagtggttcaagctccttgcagtcttgaactcctgggctcaagcaattctcccacctcagccgctaagtagctgagactacaagcacacaccactatgcccagctaattttttagtttttatttttgtagagacagggtctcaccatgttgcccaggctggtctcaaactcctgggctcaagccatccaactgctgggcctcccaaagtgttgggactacaggtgtgagccaccgcgcctggcccttttcrttttcaatagcccaatgtgccatctaatattggaatgtatgtgcaaacaacattcaccactgaaaacataaaactgtagacctgactctattggctcgattcctgctcactttcttgggagccagtgtctggggaaaagtcatgatatggaccttcagaggcctggtcagagtgactcggacccttctgcttaatgcaatgtccccagagcaacagac

SEQ ID NO: 145441 - DNA, 488 bp, Homo sapiens
aacaattagccgggcatggtggtgtgtgcccatagycccagctacttcgggggctgaggcgggaggatcacttgagcccaggaggtagaggctgcagtgagccatgattacaccactgcactccagcatcagtgacagagcaagaccttgtctcaaaaaaagtaaaaagaaaaagaagaaagaaaatgaacctctttagagaaggagcccaaggggtgtgaccacctgctctgctcccacaggtatgccccatctcctcatgggctcagccccgctttctgcctttccttgattactctgagatacacctgtttcctttcaacacagtccctgtgatttgttgagctagtttgaagggtttctgttctcttctccctgaaaaagaccctcacattacacagggataaaatgacagcgtttgtctgcaggaaggagggagtctgcgcaaagaggaaggtgtagcattgcttcctgagccctagacagaa

SEQ ID NO: 145442 - DNA, 570 bp, Homo sapiens
gtaataggtaaacagcttttcattttcaaatgtaatttgaacacctcctctttagctcatgtaaatgattgtaattttgcagcatggctttatgcacatctctagttctggtcttcagtctgtacaaagggtagtctactgggaacatgtctgggtgagtgcactaaataacaaaaacacaaaaaattacatctttccattccactggttgtacacttcagactccatctgccatgtactagagagagaaacaacagttcagctgatgtgtgcttctaaaatccagccatcactaggaggtttcatcatytgggaataacaaggctttgtcaaaatatccatatgtaaccaaacactaatatttaccctaatagggaaaaatccatattttattttatctggcaacagaacaggatgtattttgcagattggtgaccagtttctgatttacaaaagaatggatatcccctgtctctgtctgtctgtcaggagatggtgcctcatctgtcagaactgttcatacagtgctccacacctccttctagctacctggatcagagccaccgcatc

SEQ ID NO: 145443 - DNA, 608 bp, Homo sapiens
ctcacgcaactgttcttagagctgtgctttagtctgaggttcttcctactcagccctcctttcttccacctctcccgtcacaggtggccgacctgccacctgtgatctgaagggtctcttcagctcctctggctcccctgccacctgctccttctccctcacaggtgtttccctctgaaaatctcttgtgtgctaatctcttttggcgtctgcatctcagaggacccaaactatcgcaaacatgaagaaacaatyttatttggagatgcaatatatttctgagattattaaaaaataaattctaacactaggtgacagagttcttgaaaaataagcccaaatttattttggatttatgtttcacttgccagtatagacggatgaagttgtgtttcctgccctgcccctctgggccctctacagctgtcttggggctaaagggaagaagaggaaatgacacctctgctggcggaattatagcctgccagagttggaaaggacctcagagatgatcactcaagcccaccccctcacctcacacatggagagactgaacacccgaatagttagatgtccaagtgactcgcccagggtcacagaaccaacaa

SEQ ID NO: 145444 - DNA, 608 bp, Homo sapiens
ctcacgcaactgttcttagagctgtgctttagtctgaggttcttcctactcagccctcctttcttccacctctcccgtcacaggtggccgacctgccacctgtgatctgaagggtctcttcagctcctctggctcccctgccacctgctccttctccctcacaggtgtttccctctgaaaatctcttgtgtgctaatctcttttggcgtctgcatctcagaggacccaaactatcgcaaacatgaagaaacaattttatttggagatgcaatatatttctgagattattaaaaaataaattctaacactaggtgacagagttcttgaaaaataagcccaaatttattttggatttatgtttcacttgccagtatagacggatgaagttgtgtttcctgccctgcccctctgggccctctacagctgtcttggggctaaagggaagaagaggaaatgacacctctgctggyggaattatagcctgccagagttggaaaggacctcagagatgatcactcaagcccaccccctcacctcacacatggagagactgaacacccgaatagttagatgtccaagtgactcgcccagggtcacagaaccaacaa

SEQ ID NO: 145445 - DNA, 522 bp, Homo sapiens
attttgaagtgttaagaacattaaaggcttaaagagatagttcatatttccaagtatgaaagccttttttttaaaatgtgtaaatttaaggagtacaagtgcagtgttgttacatgatatactgcatagtggtgaagtctgaacttttagtgtctccatcacccataatatacattgtacccattaataaatttcytatcatttacacctacttctcacccaccctaccctttcaagtctccaatgtgtattattccacacactgaccacgtgtattcattatttagctgccacttataagtgagaacgtgcagtttgtttttctgcttctgggttgtttcacttaagataatggcctccagttccatccatgttgctgcaaaaaaacccaaacaaacatgttttccttttttatggctgaatagtattccactatgtaccctaagtgttattaaaatgatttagtggcagtgttatctgtaacaccttttaaaatttatctgtgaaaaaatctttgattat

SEQ ID NO: 145446 - DNA, 570 bp, Homo sapiens
tgattgcttctttttgcagtgtttttacaataatttctaaacaaacaatcgaatgtgctgtgaaaatttcccattttcaattgtaggacatttgtgacatagacttttccctaacttcacagagtcattatatataaaatttttacaaatctgctagttctttgagatagtataggttcttcattaattatagattttcacagtgagtaatgtcgatttacaaaatgttaaagaagtttctttgctggattttcagagatgttcatatagtgaagtgtatgtaagtctctagcagtggatagattatgcagcatctattatttaatcataaaatatctattaatacttcatggaacaagtattctgaggtacatagtgargggaatgctaatttaagccaaatatctgaacccctttcatttcatagatggaaaattaggagctagatcacttgttcataggcagaacaagcgtttatagtttctccttcctgagcatacattataatgagaataaaggagtttttaaagtgaaacagcagaacaaaagaagtgtttaaagtagaacagt

SEQ ID NO: 145447 - DNA, 543 bp, Homo sapiens
gcatatgaaaaattttaataatttttttgtatctgaagcttgtgatgttttgataaataaaaagtaagacataaaataacttgattcgactttgcaatatatttaccttattaacaatagctcattgaaattcaatggctattcagaacttgagacaaaaacaaaaggtaatgggtctccaactctcagaggccttcaaaccagagcaactccatcttgaataggggctgggtaaaataagactgagacctactggactgctttcccaggaggttaggcattcttagtgacaggatgagataggatgtctgcataagatacaggtcacaaaggccctgctaataaaacaggatgcagtaaagaagccggcccaaacccaccaaaaccaagacggtgytgaaagtaacctctggtcgtcctcactgctcactatacactaattataatgcatcagcatgctaaaaggcactcccaccaatgccatgacagtttacaagtgccatggcaatgttcagaagctaccctatatagtctaaaaagggg

SEQ ID NO: 145448 - DNA, 521 bp, Homo sapiens
tctacctctaaacgtgttgcaaaatttggatgttttttaaaaacattttgcaatgcaaggcagaaataattagattcagccttctactaagattatcagttttcccatttggttattgaaggcttaattttggcaaatcaccacaccacaagagagacagaggctttagtagtaagtaygtacatttgcagctatgttaaatttagtaaatccctgaaaattaatatgttctgcctgctgagagaaagctcaaccaagatatttacagacacttggcattgttcactttgagaagctctactaaccaagcatttgccagctttattaattcttcctgactgttgggttttcccgattgtttatttgtttgctaccattagcagacttctttataaatcctctcaatgctgccatatgttgccgcctaccatcagtcacaagtggactggagcagccagcagaggaaattgaattatggcagaattgaggaagaatgtagctatttctttcttactgaaata

SEQ ID NO: 145449 - DNA, 558 bp, Homo sapiens
aataacaaaccccattatctgcttgaagatataacatatttctactgtaaagatacattcattgtttggattttacattctagatatccagagaaatatcactgtggaaaaatagattacgttttaattctttttctgcyccaaatttggtttattttactagtcaatttacacacaccatctatgttgatttattccatcagttagtcaatatttactctgtgcctggtaagtccagcagagagaatagcaggtgctttgaagggaaagtacattacacaaacatcgaggatatgtgtggacagagaagctagcaaagggaagcaaataggagataagaataagagatatcagggaaacaaaattggactttgactctaaataaggaaagaagctattgggctaatataacagaaggaaaaattcatgtttcaggtgtatctctggctgcaatgtggaaaatagtgacaaaggagggatgaagaaaaaaaagaaatgtggaagcaagtttggctttaattgaacaagagaaataatggtggtgtggtccagagtaat

SEQ ID NO: 145450 - DNA, 541 bp, Homo sapiens
aaatgtcaacatggtagatttaaaatcccaaatataaatacttatattaaatgtaaatgatctaaatacatcaattaaaaggtacctcttatcagattaaacaaggcaaggtagaattatttgctgtctaaaggatacattttaaataaaaagggaagttaaaaacaaaatgataaaaatatatattatgccattcgctaatcaaaggaaatacgagttgtgagataactatcagaaaagtagtcttcagggcaaagaattataccagagataaaagtgggtcattctgtaatgattagggtaaattcatgtagaagacattacaatcttaaatgttcaaaatgcatgaaacaaaaactgacagaaccaaaaggagaaatagacaaatttacaattgtagttggagatgttaatgctcctctcagcaactaatactgacagaacaaaaagattaaaatgaataacgatagagaatacatgaactacattatcgaccaactggtcctaattgacctytataaaataccacatccattctatt

SEQ ID NO: 145451 - DNA, 554 bp, Homo sapiens
  misc_feature (1)...(554): n = A,T,C or G
aggtgtttcatctatttttgtcttctcttctttggtctctacctgaaaatgtctttccctcattttcaggctactgaaatcttctaaagccttcttaanagttcttctttataggaaacttcctagatttcttcctttagtcagaattaatgctgatttatgttctctcatgaaattgtactttgtactttcatttagtgctgtgactgttctttttaaagttattgtttacttatttttttctcctccagattatacaatccttaaggatagtactggaatttcctcatcttcctattgtccacattgcccagcgtgaaattttggcccagtaggaaggctatacatttgttgaattaatttkgatctgtaaggcatattcttccaccgaaaaggacattgcacaatcacaatattctccataaacaaatggacactcagaaagaactgttgtgttcttttatctgccttccatgaatgtgcagtttccttaccacttctccatggacctagttatcttgcatagtgcacacattagaagattatgtgataag

SEQ ID NO: 145452 - DNA, 413 bp, Homo sapiens
aagcaatttcacacagtgcctgagacatggtaaattttcaaaaagtgaatgtttataaaagttattatccttatgtttgacctataattgaagtcagatgttagaagacatggcatgatatacaatcttacaaccaaaaaaaaattttgaatatctaaratcatgccacaatctcggtagcttacacttcttgtttttttttcccccttaggatttcctaatcaaataagcttgcacattaaaatatacactgatgaaaatgttatatttatagaacaaagttttaaacttcaaaattggaagtaaagattacacagtatacataccgtcaactcagcattccccaaagtgtacttggtgaaaatataatcctgcaaaatgccctttgaaaaaaactagtcctgtggtcaaat

SEQ ID NO: 145453 - DNA, 513 bp, Homo sapiens
tagtaattcttttaattatttttcctacctttttatatatatataaaactgaagtacrttcatggaaatgtttccagctgggaaggccatagactcaggaggaagtccaattatatcttatttgcatttctttacctgcctattaaattttaatcacccactgcatcacttttgtgttttcatttttgtttcttgacacagtgtttggggtggcaaggaaagaatgaaaaattataaatcctagtttttcagtgaaagaatgtggcagtagtaatggaaaaaggaaaagtattctctacacgcatctctcatgcacctgatatgtgttttaccctttaacacttgggagaatcctatgaggtgggtattatcatttccatgttgtagatgaggatttatgctcagagagattttcttaaaaaaataaaacagattgatgattatattctctaaatttttaaaatttagactacatataatggtttagactacatataatggtttggtgaaaac

SEQ ID NO: 145454 - DNA, 417 bp, Homo sapiens
acaaggacctcacccttaagaccaccacgtggatctgaattctgtgaacaacttgcawgaatttgggagcaaattcatttccagaacctccagcaaaggaatccagccctggtgacaccttgatattggccttgagagactctaagcagagaaccagctgagccactctgcacctaaacttctaactcagaacattgtaaaccaatacatttgtgttgttttaagccactaaatatatgtgatttattctgagtaatagaactttaatatgctgagatgccattaacacactacacacagacacacacacacacacacacacacacacacacacacacactacaataaagggtggggggaggagaggattcaaagaacagagtagtcaatcttgcccagaattttcaaagaaaattc

SEQ ID NO: 145455 - DNA, 594 bp, Homo sapiens
tacagcacacacaagaaataggagacctatgagtatgtgtctagaaaagacaatactaccaayattttcatgaagatatttctgcttacataactggtgcatcagtttgctctgtcactgaaattttcttccaacctgtggaaatctccgccatggacaacaagcttcttaacttttctatgcatagaattactgctgatgcctgtcggcatcaatgtttaatatttgcctagacttatggccatgtctaaaccatagtacatatgagccaaaagtagatcaagtaataaaattcaacatgactgtgtaaccctgataaagatcaagagagaaaagctatgttttcactcatttgcatgttgacattgttaacacgtggacatcatcttttcccataacaaatgcatgcacataacatagtaagtctccatctctcaaagttgtttcatgtgattctctattaggcagcagctggtttttattcaagcatatttgattaatctttaaaaatcaccagattcccccattctactttcatccacaaacagtttttaatttcccaataaagtatatcagtatgactagaacactcac

SEQ ID NO: 145456 - DNA, 519 bp, Homo sapiens
ggggaaactgccccatgactcagttacctccacctggtcctgcccttgacacgtagggattattacaattcaaggtgagatttgggtggggacacggccaaatmatatcaggcctcaaacaatttaggaagtttattttgccaaggttaaggatgcaagcccaggagacaggtctatgcctttctcccaagatgattttgaggacttcaatatttaaccaggaaagagcagatatttaggaaagaggaagaaatgtttaaaatgtgtggatagataagagataaacagttgccttcttctgagtcttcgatcagcctttcaaagaatatacaatttacatgtcagagaggagtagaggaatcttcacttatgacttctaccttagtgaatctgcatttttacatcagaggaagcaatcagttatgtatttgtctcaggtgagcagagggatgacttagagttctcttctttgtcccacacctgtgaagataagctatcagtttacattgtcagggtaaa

SEQ ID NO: 145457 - DNA, 656 bp, Homo sapiens
ctgtaatgctaacatctttcacgacattgcacatttatcaaacctaagaaatcaaaattggtttaatactctgaattacactacaaattttattctgatttacctagtttttccactcatgccttttatctgctccaggatacaatccttgctagctcattgtatttagattcaacttctttttggatgtcccctcaaagaatggagctctacacattctgggcattctgcactacagtggctgtcatttcacttctcttcagcaattcatagctgtggtaatcgcccgcaatgtacttttcttctactacaaaaccttaagctttaaggcctgcatgttgcatgtctactcattcacatattctgctaaatttccttaaggactcatcaaaaatcgattgctgttttgctgaagtaacattaacttcatgttttcactttctttcaccctatttctacctttccatcttcaaatttctcacaacagtgcaaatgataccctttatctctgatccttttaaactttacatacatcttccacgaatgwtctcatccccagattactccaaatgtcctgtctgcttggatgttctctgctgttggagcattttagatagatatgctgattgcagctatcacatccaacttcagcttaa

SEQ ID NO: 145458 - DNA, 424 bp, Homo sapiens
ggggtttctatgggtacaggatggaggatggagtgggccaaggtaattttggaaaaggcaacattcgagtgggaaaagagggatgtaaagttttcactttgggctacagttccaggcttgagggcgggggccctcaccgggcaccctgcccttttytgcctagaatttctctgcctactgtccctattagttcatgtgggtcccagtacatcttcatgtataatacttggttttctcattttttttaagtaacattttcttgccagttggacttgggattgctaactcactttagtttgtctcctttttgtagattatttttgtccatactttctgatttatgcaaaaaaaaagaaaattagagtatttcactaaggatagcactgactacatccaattactcccaacataggtgcttaaatcc

SEQ ID NO: 145459 - DNA, 560 bp, Homo sapiens
aaagtatactacagttctgcaattagatctcagtctttcggtaagactgtttattcattagtgcccagctatttggttktattttgttttgtcttctccgtaagtgggacaggaagactagagagggatggagatgggtatcttccttcacatggatgcctagagtggactggggttgagtattttcctttccccacgttgcttaggccttgggaaaaccccactcaatttgtgtttagtaaaatcctttcccttgattgcaggctttgttaaggaaaagagaagctcttagtttatttcaaaatggctgctttttccctcccagtgccagagacatggtattggggctttttatctgctcttcactgagtcaacctggtagagctcttggaggcaaaacagacacaaatgtggtgaccttcttaagatggggccccaccaaaattttaagactcattttatattgtaaaccaaaagtatctgagacaggtctcaatcaatttagagagttcattttgccaagtgacacagtctcaggatgtcctaacaacatgtgccca

SEQ ID NO: 145460 - DNA, 560 bp, Homo sapiens
aaagtatactacagttctgcaattagatctcagtctttcggtaagactgtttattcattagtgcccagctatttggttgtattttgttttgtcttctccgtaagtgggacaggaagactagagagggatggagatgggtatcttccttcacatggatgcctagagtggactggggttgagtattttcctttccccacgttgcttaggccttgggaaaaccccactcaatttgtgtttagtaaaatcctttcccttgattgcaggctttgttaaggaaaagagaagctcttagtttatttcaaaatggctgctttttccctcccagtgccagagacatggtattgggrctttttatctgctcttcactgagtcaacctggtagagctcttggaggcaaaacagacacaaatgtggtgaccttcttaagatggggccccaccaaaattttaagactcattttatattgtaaaccaaaagtatctgagacaggtctcaatcaatttagagagttcattttgccaagtgacacagtctcaggatgtcctaacaacatgtgccca

SEQ ID NO: 145461 - DNA, 560 bp, Homo sapiens
aaagtatactacagttctgcaattagatctcagtctttcggtaagactgtttattcattagtgcccagctatttggttgtattttgttttgtcttctccgtaagtgggacaggaagactagagagggatggagatgggtatcttccttcacatggatgcctagagtggactggggttgagtattttcctttccccacgttgcttaggccttgggaaaaccccactcaatttgtgtttagtaaaatcctttcccttgattgcaggctttgttaaggaaaagagaagctcttagtttatttcaaaatggctgctttttccctcccagtgccagagacatggtattggggctttttatctgctcttcactgagtcaacctggtagagctcttggaggcaaaacagacacaaatgtggtgaccttcttaagatggggccccaccaaaattttaagactcattttatattgtaaaccaaaagtatctgagacaggtctcaatcaatttaragagttcattttgccaagtgacacagtctcaggatgtcctaacaacatgtgccca

SEQ ID NO: 145462 - DNA, 415 bp, Homo sapiens
tgcttcctttgccagaaaacttcwgcaaaatacattgaatttgaatgactttaggttgggtatacatttccagtttgctacaggcactacaactctattcccagctttccgatgcttgtgtgagattatatatttactttgtcacccataagcactgacttttttacattgagatattaggcaaataactactatttaaataaggcttgactttttcatatgaaatgaaatattacaagtatacgaagaaaaaagctattaatgaaattctgatttaaaaagaaagagttttgaaggttttatgtcctgtctgcattattaaattatcaatttcacatgcccttatattgtcagctcaatgttctttctgtcattcatttctttatatttatttttattggcccctaataataga

SEQ ID NO: 145463 - DNA, 406 bp, Homo sapiens
cagaaaacttcagcaaaatacattgaatttgaatgactttaggttgggtatacatttccagtttgctacaggcactacaactctattcccagctttccgatgcttgtgtgagattatatatttactttgtcacccataagcactgacttttttacattgagatattaggcaaataactactatttaaataaggcttgactttttcatatgaaatgaaatattacaagtatacgaagaaaaaagctattaatgaaattctgatttaaaaagaaagagttttgaaggttttatgtcctgtctgcattattaaattatcaatttcacatgcccttatattgtcagctcaatgttctttctgtcattcatttctytatatttatttttattggcccctaataatagaaag

SEQ ID NO: 145464 - DNA, 623 bp, Homo sapiens
ggctcacatttatctttaatggagaaatatgttctattttaaaaagccaagaaaaaaataaacagtcatggagggttaaagttggcagaatctagcctaggtattacttttcaacttttcaagcaactagtgaatcacctatgacaagtctaattaaaacaatttctgctccgtaactgggatactaagcagatggtagaaataaagatgtgctgaacaggccataaataattgaggcaggaaaaaatacaaagagaagtgcaagctagtccttgcagtttatgtgagtatgcatagttttctctgatatgttagcatatgcttttagcattgtacctttacaaatatacattgtaagatatatgacattattcttggaagctgggccttgtatatgttataaatataatccacaaaaagtagctaaggattatgacataataatctgttgggaaatgaaataaaaggaaaggcatataaaccaaatagacaaytggaaggagatataagagtttatagtcccagtgagccgtgaactgatagtggtaattggattatataatttctcatcataaagccaatactcattgtcactgtgaaatctgttttgcttcctgtgccga

SEQ ID NO: 145465 - DNA, 548 bp, Homo sapiens
atattttcacacttgtgtccttcagaatgatcctactaatatataaactttaaattacgttattgtaatccttttgtttaaaattgttacaactttaccatttttacacatatacacatctttttgtacctttggaagtttataaagtcaaatgtttctagatatctttcattttgttttctaaattgattgtccatcatcttaatgcataattgaaaaaaatayaaatttcaagaaataatgttattctagtagtcattcttttttgtaccgtctacatttttccattggtatttcaaacagtacttggaaaatccaaaatttaaagccagagcagctgttcagcaaatgttcacagaagccaacaggctagtgtgctctcaataggtttgtgtaacaaataactgcaaagttgtttctgcataaatgagaagttcatggccaactaggaagtttacatgtgtaatttaggtctagccctggaaaaaaatggcttagaatgtgcaaatctgttgtatatagtgaggcaaagtcaggataaccatgga

SEQ ID NO: 145466 - DNA, 617 bp, Homo sapiens
tttactcagtttttctttcaaaattaagaaagaatggtatttgtaagttgatactatatatcccaggtgttcctatagggaattccaggatttgactcattggagatactatgcaggggaattgagcatttgatagcaatctgaaataaaatcactcattcatcaattaattaattcatatatattgaatatttactagctgctgggtttgggtttgcaggattgcaaagaagaaacaggaggattttgtgttagagaaaattaaagaagataggtatgattcaaggcatgatgaataaaagtaaacaggaagaaagctagggtaaarggagttcttacatttcttaaactaggctaaacattggtttcattcattatataaatagaaagctaatgaaactttttaagcataagagcaccacaagttaacatgtttaattaaacaaataaacttaatattggaaaatggattgaagtagccgggagacgacaccccaacaccacttagaagattactataatgatctaattgagagatgattgagacttagaaaaaatgtggtaatagaaaaggtgacagacttgaggtttattgaggaaaagatcttaaagaattt

SEQ ID NO: 145467 - DNA, 617 bp, Homo sapiens
tttactcagtttttctttcaaaattaagaaagaatggtatttgtaagttgatactatatatcccaggtgttcctatagggaattccaggatttgactcattggagatactatgcaggggaattgagcatttgatagcaatctgaaataaaatcactcattcatcaattaattaattcatatatattgaatatttactagctgctgggtttgggtttgcaggattgcaaagaagaaacaggaggattttgtgttagagaaaattaaagaagataggtatgattcaaggcatgatgaataaaagtaaacaggaagaaagctagggtaaaaggagttcttacatttcttaaactaggctaaacattggtttcattcattatataaatagaaagctaatgaaactttttaagcataagagcaccacaagttaacatgtttaattaaacaaataaacttaatattggaaaatggattgaagtagccgggagacgacaccccaacaccacttagaagattactataatgatctaattgagagatgattgagacttagaaaaaatgtggtaatagaaaaggtgacagacttgagrtttattgaggaaaagatcttaaagaattt

SEQ ID NO: 145468 - DNA, 602 bp, Homo sapiens
tcctattatccacgtactattaacaaaatcagaaaatgtagcattaatcrtaatgctattatctaacccacagcctatgtttattattttaaaatttgtctcagtattgttctctataactgttcttctttgattcaggaacacacattaaatttagttttcatgtcttcttatatttttaatctcaacatttcttttctttcttaaccttgataattgtacaagatcaattgctttataggttttcccacaatatgggtatctttgtcatatcctgattagtatatttagtgtttatattttaggctggatgaacacagaaatgtgatactttctcataaatcatatgagaagacacatcatattagtactgctactttaatgattttattaaggtgagagtccaactcatttcttacatggaaattatgatttttctcttttgtaaaaaataatttgtatggaaataattgagactatgtaaacatcttctttctaattaaacttttgccaactaattttaacaagcattgaggatttcctatcatttcttgtgtaattattagttgatattctactgtaagaaagatatttacctttcc

SEQ ID NO: 145469 - DNA, 602 bp, Homo sapiens
tcctattatccacgtactattaacaaaatcagaaaatgtagcattaatcataatgctattatctaacccacagcctatgtttattattttaaaatttgtctcagtattgttctctataactgttcttctttgattcaggaacacacattaratttagttttcatgtcttcttatatttttaatctcaacatttcttttctttcttaaccttgataattgtacaagatcaattgctttataggttttcccacaatatgggtatctttgtcatatcctgattagtatatttagtgtttatattttaggctggatgaacacagaaatgtgatactttctcataaatcatatgagaagacacatcatattagtactgctactttaatgattttattaaggtgagagtccaactcatttcttacatggaaattatgatttttctcttttgtaaaaaataatttgtatggaaataattgagactatgtaaacatcttctttctaattaaacttttgccaactaattttaacaagcattgaggatttcctatcatttcttgtgtaattattagttgatattctactgtaagaaagatatttacctttcc

SEQ ID NO: 145470 - DNA, 519 bp, Homo sapiens
ggtgagacaattttggaacatattttcctgagtttcccaccagaactatgatctagtcacttcctgaatttactaacttttttcccatgcatcattttccattctggcaccttccaaataaactttgtgtacttgaattcttattcagggctcatttctggaaaaatccaacctaatacaaagatcaacttcctatgtctaaatatcaaagaccagtataacttttagagtcaaaataaaaatacatatttttcttcaagcttttctactgtcatctaaatcactttagaatctcctttcagattccctaaagtacagcttgcttttactgcataattcattatgtcataatartaatactgatttgcattgtataatgctgtatgttttgtcagagtgctttgagctatacaatctattaacccgtatcttttgacttactattttttcagtatataggctctctttatccactgatgctttaaagtccttgatagcaagcaaatatagaaagaattg

SEQ ID NO: 145471 - DNA, 558 bp, Homo sapiens
tttgacttactattttttcagtatataggctctctttatccactgatgctttaaagtccttgatagcaagcaaatatagaaagaattgtgctataccctgatggctgaccattgaatatggaaatgaatcaattcaatgaaattaaactatatttgttgcacaacaacaattaaggaatataattttattataaaattcctatcagaaagttacgtaccattactcttttcaactccagagcatattttgtccccacatatcatgtttccctttgccagaatttgttatagttttagtttttgcrtgtatttttacagacagaaaaaaatagaaatatcaaggataaaaggtggttctcgtatgtagcttttttgagggagacttcatatttacctttgtggctcatttaatattcagttctgtaaatgttttctttctgcccaaaagtcttacctttgtcactccaagattccttgactcctagtaatcttattctaaaccatctaatttgccaagacctgtgtgtggtaaaaaatagggaatttggcaattcaagg

SEQ ID NO: 145472 - DNA, 544 bp, Homo sapiens
accttccaaccacatttgcattttaatgggagactcttgggagatagcaagtaacaaaagagtcaaagaaataaagttcaaatggtatatattattaggtagcagtaagtattgggattttttttatccaagggagacttttctaatgttcttcttcacttttctgctgtctcttttgttttctacattggtctggaccacaatttcttccagtcacacctaggccttactgaatactctcaatttcttaaaactgacataatctcttgtcatgaaacttctcctgttgttccgcctcctacaatgctctttcttgtaattctgtgtctaggagctcagagttgatggcacttcctcttggaagtcatcccagagcccccaagcctagggaagggtaaaggttcattgcrgtgggatctacagtaattcctcttatcttttgcactcataaagcaactgtaaacctgcattttaattacctcttaagctcttcttatttgtcctgaacgctcactgagagtaggaataatgccccttcaccttc

SEQ ID NO: 145473 - DNA, 544 bp, Homo sapiens
accttccaaccacatttgcattttaatgggagactcttgggagatagcaagtaacaaaagagtcaaagaaataaagttcaaatggtatatattattaggtagcagtaagtattgggattttttttatccaagggagacttttctaatgttcttcttcacttttctgctgtctcttttgttttctacattggtctggaccacaatttcttccagtcacacctaggccttactgaatactctcaatttcttaaaactgacataatctcttgtcatgaaacttctcctgttgttccgcctcctacaatgctctttcttgtaattctgtgtctaggagctcagagttgatggcacttcctcttggaagtcatcccagagcccccaagcctagggaagggtaaaggttcattgcggtgggatctacagtaattcctcttatcttttgcactcataaagcaactgtaaacctgyattttaattacctcttaagctcttcttatttgtcctgaacgctcactgagagtaggaataatgccccttcaccttc

SEQ ID NO: 145474 - DNA, 527 bp, Homo sapiens
tgcttgagaaaattaactatctttgccattatcttattatttcaaaaactagtctccaacttttacctgaaatgtcattttttttttcctcaggctaagcatgaagccttctggaatctaaatactagtttgttaaatacactgttcgctttaagttttatatttgctcaacttttcatcacagcacttacatctattaaatagtcaataaaaaacactttttcctcgtgttagggtatttattagtttttaatataatgtatttgatatattttcttcttcatctattttatatktatttaaacatataaaattatttatacacacacgcatacacacacacacacacacacacacacacaccccgatggtaatgtagtagatttgtattgattcagtatagctacactaaactatattttccagattttcccttcccttcataattctgaaatagcatgagctcaaaacaacattttgttatttggaaggtaaaaagtaaagttgaaattttaagtttggaaagt

SEQ ID NO: 145475 - DNA, 616 bp, Homo sapiens
ttctaatatgcactatccatatctaacattcttgattacatatggcacaaaaagcgttgattctcttgatgctgacattatatttcatattcaggcccttgcagagctgaatctattcacaattaaagtcagtgtcaatataggaaaattgatgagaaagggggaaatatagtgtaaagatctaaatgaggaacaaaagtgtattttaaaaacctacagagtaaggataggcaagaaatagattaacagagcattacattttattattgagcacaaatgtttcattcctttctctgagctcctaatcagcatttttcattattttccttccatcgtatctggctcctatgcatcagtggctatagcaacacctctgctaacactgaaaacttcctcacagactagggtttttcacgctagaattcttgccagggctgatcctccctctggttagaattccccaccacttgggaccatgggttagaataagaattctccctttggaagcaagcaatyctaggaattactgctccattcatatgtggtaaggaatgcctttcttcctgcataatgacagagtcatggtgttatgagaatgtgagggtaggctgccatc

SEQ ID NO: 145476 - DNA, 559 bp, Homo sapiens
aaaactaatgcatatcccttgactgttccctcaaaacccacgtatttgtgattatmctgagacaggcattgtgctgggatatggatataaatcaatgaacaaagtaggcatatcctttgtctttgcagctcatacaacttatcgggctttcgtatatcaaggggaataaattcaaacagttgcacgtaaaagaaagaaaaaacattcgattaatggaatttttctcagttcatcactttaacaattgctgaacttttatgatctagagacctgtgatgggtaccgggaatgccttagcaaatatacaccatccttacccatgtggagtttgtactctgtagacaatgtcagcattctccttcctgatatagactggagctaagattctacatataggtgtgcattttaataaccagacgttggagatattagggattttctccaaagacaactgaagatactgaggccaaaaaagcaaactgagccaaaaacaaatctgaatacccaaattctaaagcatcaaatacaaaaactccaaatgtgagaattaaaatcaggc

SEQ ID NO: 145477 - DNA, 559 bp, Homo sapiens
aaaactaatgcatatcccttgactgttccctcaaaacccacgtatttgtgattatactgagacaggcattgtgctgggatatggatataaatcaatgaacaaagtaggcatatcctttgtctttgcagctcatacaacttatcgggctttcgtatatcaaggggaataaattcaaacagttgcacgtaaaagaaagaaaaaacattcgattaatggaatttttctcagttcatcactttaacaattgctgaacttttatgatctagagaccygtgatgggtaccgggaatgccttagcaaatatacaccatccttacccatgtggagtttgtactctgtagacaatgtcagcattctccttcctgatatagactggagctaagattctacatataggtgtgcattttaataaccagacgttggagatattagggattttctccaaagacaactgaagatactgaggccaaaaaagcaaactgagccaaaaacaaatctgaatacccaaattctaaagcatcaaatacaaaaactccaaatgtgagaattaaaatcaggc

SEQ ID NO: 145478 - DNA, 479 bp, Homo sapiens
agctgttggtggatctaccattctggggtctggaggatgttggctctcttctcacagctccactaggcagtgccccagtggggactctgtgtgggggctctgaccccatatttcccttcctcactgtcctagcagaggttttccttgagagatgcaaccctgcagcacacttttgcctgaacatcctagtttttccatacatcttctgaaatccaggtggaagtttcccaaatctcagttcttgaattctgtgcacccacaggctgaacaccacatgtaagctgccaaggcttgcatcttgcaccctctgaagcaacagctcaagctataccttggccccttttagccatggctgtaacagctgggatgcagggcaccaagtccctaggctacacacagytgggggtccctgggctggcccatgaaaccatttattcctcctaggcctctgggcctgtaatgggaggggctgctgcata

SEQ ID NO: 145479 - DNA, 449 bp, Homo sapiens
actggaaaagacttgctattgccatgttgttaattcttttctgtacatttcctacctttcttgcccctcctttcctctcgtactcctttcctttgtgcttcattgatatttttgtagtgatatgcttgattcccttctaacctccttttgtatatattctataggctttttgtagttaccactgaagttgtatcatgctattttaaattgataacaacctaacttcaactgcatatgaaaactcaatttctttactcaattgtatttttatctacaaaaaaagaaaataaaatttaaaatattcaatttataatatcataaaaacataagtttatagtaataaacaataaaagacatgtratcactctttactaaaagctataaaacattactgagagatattttaaaatgatcaaaattgagagaaaaatatttcatacttatggatt

SEQ ID NO: 145480 - DNA, 573 bp, Homo sapiens
cagagagtgtctgtttccatcccatttgtctttttatgtgcttcttaactttcctaatggctaaacaaatctgtatatccaggctgggttcttggcatcttttctcgatgacagacttatataatcaccttctggctggctatcttcactaaaatcctgcagacacctcaaacccaaggaatccaaatctatcttccctcccctatttctcccaacagttagtggttttccagattcaattttcatgggaaatggtaaagaagaattaaactaccaaatgctgcttattatctatatgaccatggaccatrggcagttacctaagtaactctgtgcctatcttttctcatctgtaaaatggagtgtgttagtctgtcctcacagcgctaataaagacataccagagattgggtaatttataaagaaaagaggtttaattgactcacagttcaacatggctgggaggcctcaggaaacttgcaatcatggtggaagaggaagcaaacagctccatcttcacatggcggcagcaaggagaaatgctgagcaaaaggaggaaaagcccctcataaa

SEQ ID NO: 145481 - DNA, 573 bp, Homo sapiens
cagagagtgtctgtttccatcccatttgtctttttatgtgcttcttaactttcctaatggctaaacaaatctgtatatccaggctgggttcttggcatcttttctcgatgacagacttatataatcaccttctggctggctatcttcactaaaatcctgcagacacctcaaacccaaggaatccaaatctatcttccctcccctatttctcccaacagttagtggttttccagattcaattttcatgggaaatggtaaagaagaattaaactaccaaatgctgcttattatctatatgaccatggaccataggcagttacctaagtaactctgtgcctatcttttctcatctgtaaaatggagtgtgttagtctgtyctcacagcgctaataaagacataccagagattgggtaatttataaagaaaagaggtttaattgactcacagttcaacatggctgggaggcctcaggaaacttgcaatcatggtggaagaggaagcaaacagctccatcttcacatggcggcagcaaggagaaatgctgagcaaaaggaggaaaagcccctcataaa

SEQ ID NO: 145482 - DNA, 597 bp, Homo sapiens
cacttaccatgggttatattcttacttagacataagagataaaaacggtgatcaaagtcagagtattgaaaaagttacaattcttcaaaacagagatcagattgtgcaaagactgcaggaggggacatagcacactcaggaaattaaaagccagtgtgcctgtaatgttgagaggaacagaaagcataaggaaaatagttagagtctagaaaattaatagagatacagggtgttaaaacctacctaatcatggtgtatttccttttgatatgctgttcaatttggtttgctagtatttgggggaagatttttgcatcgatatttatcaggcatatgagtttgtacytttcgtttttttgttgtatttttgtctggctttggtttcagggtgagactgggttttattccaggaaggtaaggatggtgcaacatatgaaaattaacaaatgtgattcgtcacgtagaattaaggacaaaaaacatatgatcatctcaatagatgaagaaaaagcattgataaaattcagcgtatcttcatgataaaaacctgcagcactgaagaactatacctcaaaataataaaggttgtagatgaca

SEQ ID NO: 145483 - DNA, 472 bp, Homo sapiens
ggctactgaattctgagattaaaagtaaaagtactagtagaaccatttgtgctccaggccctacatagtttaaggtagtgatcagctgcagcttagaataaacataatatctgccagcaccatgatccttcttggaaaagaagcaaaatctgactgatgctggagaaagagcaccactaacctgatgctgcttggcatgaggagaggcaaatacttgsggagagattaagtctgtgaagccagtgtgcaggtctagctgaaaactgaatatgaagcaagaataataagaaaaatcatctagcacttttggcctcatgtttaaaataatgtagaagctgtcaaccacagaaagaatgtgaagcatattatacactgaacgtagttatggcaacaataatacttaaatgaatattaattacaatctagattgattcaagcctaccaaggagagagctgaaggaagaggcaaatc

SEQ ID NO: 145484 - DNA, 488 bp, Homo sapiens
tcgtagggtagaagctttattgctttgccttcattttaccatagctgtgagatgtccaaagctaaattttattcgccattattctttgctcttggaktttttaagataattttctttgtttcttatatggttcttatatttttatctaaattttaattgttttatctttaagccattctgtgaaaaccatcttaaatcttttttgaaaacttgcttgttacaaacaatttaataaatttgcaggaaaaagaagtaggatagcctatgttaagctacaagacagcttttgaatagctgtctgcacaaaatattttctctagtgacattcaaaattccactcttgttaaaaaaaatggtaacaaagaaaaatagcattctttccgcagccattctctgtatatgaattcatcaaattaatctccttaagtaactaacagaatcatggaatagtggcctctgaaaagagaggaatactgaagaaagaagac

SEQ ID NO: 145485 - DNA, 383 bp, Homo sapiens
catcgtagggtagaagctttattgctttgccttcattttaccatagctgtgagatgtccaaagctaaattttattcgccattattctttgctcttggattttttaagataattttctttgtttcttatatggttcttatatttttatctaaattttaattgttttatctttaagccattctgtgaaaaccatcttaaatcttttttgaaaacttgcttgttacaaacaatttaataaatttgcaggaaaaagaagtaggatagcctatgttaagctacaagacagcttttgaatagctgtctgcacaaaatattttctctagtgacattcaaaattccactcttgttawaaaaaatggtaacaaagaaaaatagcattctttc

SEQ ID NO: 145486 - DNA, 318 bp, Homo sapiens
ctaatatactatatatatagggaactcaaacaactcaatagcaagtaaacaactgatttaaaaataggctaagaagttgaatagacaggtcttcaaaagaagaagtacaaatgaccaataggtatacagaaaaatcttcaacgtcacaaatcatcagggaaatggaaattaaaaccataataagatatsatctcacacttgttagaataactattatcaaaatcaagaaagattacagttgttggcaaaggcgtagaaagaaggggaagtttgtatattattggtgggaatgttaattagtacagccattatggaaaa

SEQ ID NO: 145487 - DNA, 318 bp, Homo sapiens
ctaatatactatatatatagggaactcaaacaactcaatagcaagtaaacaactgatttaaaaataggctaagaagttgaatagacaggtcttcaaaagaagaagtacaaatgaccaataggtatacagaaaaatcttcaacgtcacaaatcatcagggaaatggaaattaaaaccataataagatatgatctcacacttgttagaataactattatcaaaatcargaaagattacagttgttggcaaaggcgtagaaagaaggggaagtttgtatattattggtgggaatgttaattagtacagccattatggaaaa

SEQ ID NO: 145488 - DNA, 385 bp, Homo sapiens
agtggaaagatttggaaaattcacagcctggccacataaagagtgaaaaggcatctttaagagagtaaatcaagggtttggccaaaagtctgtttgctcgaaaaattagtacccataggatcctaaaacacatttctgagatctttgaggcaagctaagaccttgagggccaggtttctagagaggcacttkcaggatctcagccattgctgccccgtgctgcctcgagtgtctgatccttgcattcaggcacagtgctctcctgctgtcccatctgtgcctcgagcagagtataagtagtaagctttggcaacactcatgccgtgctaactctgcaagccaacagagttcctgagctatgggggtatggcttcttccacctaaa

SEQ ID NO: 145489 - DNA, 385 bp, Homo sapiens
agtggaaagatttggaaaattcacagcctggccacataaagagtgaaaaggcatctttaagagagtaaatcaagggtttggccaaaagtctgtttgctcgaaaaattagtacccataggatcctaaaacacatttctgagatctttgaggcaagctaagaccttgagggccaggtttctagagaggcactttcaggatctcagccattgctgccccgtgctgcctcgagtgtctgatccttgcattcagkcacagtgctctcctgctgtcccatctgtgcctcgagcagagtataagtagtaagctttggcaacactcatgccgtgctaactctgcaagccaacagagttcctgagctatgggggtatggcttcttccacctaaa

SEQ ID NO: 145490 - DNA, 518 bp, Homo sapiens
cccctattctattactagtgctgggataactggctagctatgtgcagaagaatgaaattggacccatacyttacaccatatacaaatattaactcgaaatggattaaagatttaaacataagacctcaaactgtaagagtcctgaagaaaacccaggaaatactcttcctgacattagctttgggaaataatttatgattaagttttcaaaaggaattgcaacaaaacaaaaattgacaagtggaacctaattaaactaatgagcttctgcactgcaaaagaagccatcaacagagtaaacagacaacctaccaaaggagagaaaatatctcaaactattcatccaacaaaggtctaatatccagaaacgataagaaacttaaacaattaaacaagaaaaaaacaaataaccccattaaaaatgggcataggacatgaaaagatacttttccaaagcagacatacatgctaccaaaacaatgtgtgaaaaatgatccatatcactcacatcactaatc

SEQ ID NO: 145491 - DNA, 518 bp, Homo sapiens
cccctattctattactagtgctgggataactggctagctatgtgcagaagaatgaaattggacccataccttacaccatatacaaatattaactcgaaatggattaaagatttaaacataagacctcaaactgtaagagtcctgaagaaaacccaggaaatactcttcctgacattagctttgggaaataatttatgattaagttttcaaaaggaattgcaacaaaacaaaaattgacaagtggaacctaattaaactaatgagcttctgcactgcaaaagaarccatcaacagagtaaacagacaacctaccaaaggagagaaaatatctcaaactattcatccaacaaaggtctaatatccagaaacgataagaaacttaaacaattaaacaagaaaaaaacaaataaccccattaaaaatgggcataggacatgaaaagatacttttccaaagcagacatacatgctaccaaaacaatgtgtgaaaaatgatccatatcactcacatcactaatc

SEQ ID NO: 145492 - DNA, 414 bp, Homo sapiens
ttaattaactcttgactaattaatcagcgataattttgttttgcgatttcaaataaaaacctatgttgatagaattgcagctagtgttagagttttattaagctttttcttcttgaaatgtctgttttctgtccttgcttctctaaactgaccactccgcgtcttagacaaggctcaccaggatttcagacctgggcctgtgtgatgctcrtttaatgatctcccaatctattggtttattttctccaatatgtaccatgatcagttttatggcatttaatagtgctttgatcaagttattccacctcttaaaaactgttagtggctccttggtaaaaaaaataatgaccacatttactacttatgagatgattttttttctcctgatgctaaaattttcactgtttcaagtac

SEQ ID NO: 145493 - DNA, 414 bp, Homo sapiens
ttaattaactcttgactaattaatcagcgataattttgttttgcgatttcaaataaaaacctatgttgatagaattgcagctagtgttagagttttattaagctttttcttcttgaaatgtctgttttctgtccttgcttctctaaactgaccactccgcgtcttagacaaggctcaccaggatttcagacctgggcctgtgtgatgctcatttaatgatctcccaatctattggtttattttctccaatatgtaccatgatcagttttatggcatttaatagtrctttgatcaagttattccacctcttaaaaactgttagtggctccttggtaaaaaaaataatgaccacatttactacttatgagatgattttttttctcctgatgctaaaattttcactgtttcaagtac

SEQ ID NO: 145494 - DNA, 588 bp, Homo sapiens
ataatttttcttaatctaagttcgtagttttcacaaattttagagtctatggacccatgttaagaaccatgactagtctaaatccctcatttcatgagtaatgcattcttttgacagtctaattgtttgtccatgtaagttaggtgggtgaaggaaggattggactgaatgctgactctcccaacccttattccagtgctgatgggcaaagtacagtgcccaaaataagtgaaacaccaggtgtgggaggaaactcacaatagayactgctggcaaacatcatgaagtttattttgatgtatcagtgatatggtaggtctttcgaatttcaagtactgtgtatgaaattaaggatcaacatatttgtacctgaccccaccactgttaacatccatccccttctttttatttatatccttgagccactaatcattaactaaaaaaaaaagaacaaaacaaaaacaaaaaactttggtacttttaaaacatatttactttgtcttttgctaacacttttactatttagtctactagactgcaggcttcataaaaactgagactttccattgccaaattttaagagaatcc

SEQ ID NO: 145495 - DNA, 588 bp, Homo sapiens
ataatttttcttaatctaagttcgtagttttcacaaattttagagtctatggacccatgttaagaaccatgactagtctaaatccctcatttcatgagtaatgcattcttttgacagtctaattgtttgtccatgtaagttaggtgggtgaaggaaggattggactgaatgctgactctcccaacccttattccagtgctgatgggcaaagtacagtgcccaaaataagtgaaacaccaggtgtgggaggaaactcacaatagacactgctggcaaacatcatgaagtttattttgatgtatcagtgatatggtaggtctttcgaatttcaagtactgygtatgaaattaaggatcaacatatttgtacctgaccccaccactgttaacatccatccccttctttttatttatatccttgagccactaatcattaactaaaaaaaaaagaacaaaacaaaaacaaaaaactttggtacttttaaaacatatttactttgtcttttgctaacacttttactatttagtctactagactgcaggcttcataaaaactgagactttccattgccaaattttaagagaatcc

SEQ ID NO: 145496 - DNA, 562 bp, Homo sapiens
gccaattatttctaagaccacagttcttgttagcaatagagttattctgagaatactcaattcctaactcccaagtttcattctgttttcactgagccattttgcctcttcacaacattaacactgtctacgtttgacttatataatgaaggtcaccgtacctatgatcagaacatggaaaatcattttattcggctgacaagtaatacaattttacacagtttcaaatctggccttcttagaggcttttaggcagcacttctagggtgaaatggagaatgctagktggaaataagttgaaaggctgaaatattgtgacgcaattctgacactgaccaccaaaagttagcacaagcccccagtaagactgatctcacttgagatgccagccacagtgttagggagtcccagtccatctccacctgtacttctgatgaactgattagaaatttggggatacctatgaccttctcagttgtaataatttgctagaatgactcacaaaactcagggcagttatgactaatgttttatttggaagaatacaaattaaaaccagtca

SEQ ID NO: 145497 - DNA, 549 bp, Homo sapiens
taagatgaatttttataataatttctgaaatataatcacaagaaactgatataatttaccaaatatgttaacaactaactccaaagaaaactttcaaggacattaaacacacaggacacggtttaccactgagaatttactcattgaaattgagaaacttcatccactttccataaataaatatcactgtggtgacagacagaaaagtaaatttctatccatactgaataataagtctttaggaaaactgtcatttgataaaataagccgctcatttaaagtgaacatagtctatgaactggtaatttttgaaaagttgtcaacaattttttcaaagattaatttatcagtttttggttctctctaaagcttccttcttttcctcagctacacagaccgcttctgcctgtagggaaaaatattaaaatggctacagcaacttgagcttttcacggaatggccactataatgaatgaatgaatgtccatggttagcycctctcccagcgtacctgcagggagactgaatcatagctgtgataaggtaatg

SEQ ID NO: 145498 - DNA, 306 bp, Homo sapiens
cttgaagacaggctattagaaaacacacagtcagaggagacaaaagaaaaagaataaaaagcaattaagtatgcctacgggatttagaaaatagcyccaaatgggcaaatctaagagttattggccttaaagagtaggtagagaaagagatagatttagaaagtttattcaaaaagataaaaaagaacttcccaaacctagagaaggatatcaatatccaagtacaagaaggttatagaacaacaagcagatttaacacaaagaagactacctcaaaatcccaaagatcaaggataaagaaaggac

SEQ ID NO: 145499 - DNA, 435 bp, Homo sapiens
ctgacagattttgaagttgtcatgctttaatagcacgttgttacttaagtaatttattgtatccattttacattttattacctattgattttttccaactatcacccagttrtgctgaagccttgtttaaacttttattttgttttgttttagatttcaaagcaataaactgaatctcataaaacatactggcattctaagaaaataaaggtaacaacaaaattttaaattaacttttttgggggtgtttaatttcttggtaattttcaggactaaaagagtaaggtaattaaaaagaagatgggatagaaattaagcagtgaggatcaaacatattctattgccaaaattagttgctcaaaattaatgttcattttattcagaactaaacataggcattctcatgaactgcttaccaaagactacgtgagatct

SEQ ID NO: 145500 - DNA, 435 bp, Homo sapiens
ctgacagattttgaagttgtcatgctttaatagcacgttgttacttaagtaatttattgtatccattttacattttattacctattgattttttccaactatcacccagttatgctgaagccttgtttaaacttttattttgttttgttttagatttcaaagcaataaactgaatctcataaaacatactggcattctaagaaaataaaggtaacaacaaaattttaaattaacttttttgggggtgtttaatttcttggtarttttcaggactaaaagagtaaggtaattaaaaagaagatgggatagaaattaagcagtgaggatcaaacatattctattgccaaaattagttgctcaaaattaatgttcattttattcagaactaaacataggcattctcatgaactgcttaccaaagactacgtgagatct

SEQ ID NO: 145501 - DNA, 435 bp, Homo sapiens
ctgacagattttgaagttgtcatgctttaatagcacgttgttacttaagtaatttattgtatccattttacattttattacctattgattttttccaactatcacccagttatgctgaagccttgtttaaacttttattttgttttgttttagatttcaaagcaataaactgaatctcataaaacatactggcattctaagaaaataaaggtaacaacaaaattttaaattaacttttttgggggtgtttaatttcttggtaattttcaggactaaaagagtaaggtaattaaaaagaagatgggatagaaattaagcagtgaggatcaaacatattctattgccaaaattagttgctcaaaattaatgttcattttattcagaaytaaacataggcattctcatgaactgcttaccaaagactacgtgagatct

SEQ ID NO: 145502 - DNA, 359 bp, Homo sapiens
ctaaatactatatcactaaatgtgacagccaacaagttatcttactttcttagtctcttttygcttatagaatagcttcttatatcctcttcaatctatttttctaattaaataatttctggtgtaggatgcgataaacagtaattcagagacacattgtggaaaactttcctggatacttaacaaaaatgtatgcagctaaagtctgactacagaaataactcctgtcctagtttttatgataattattttcaatgcacagtttacatttttctaggatgcaaaaataggtatccatttagataatttatttgtactatatgtatgttcatatcaataaagaaaattatagtacagtc

SEQ ID NO: 145503 - DNA, 432 bp, Homo sapiens
atcatcatataagctttaagaataaaggagttttatatttccattgacaaagtgctgacacattgataaacaagtaactttagaaataatccctaagaattcaatatgtgctttaaagttttgcattatttatgtgtgcctaggtgatgactgtctgatttatgctccaaacctgtagattttctcctttaagcaaataagagtacatcatgattaataagtgatctctgaattaagctcactggacacatatatatatgtgtgtgtgtgtgtgtrtatatatatatatatatatatatatataaaattgttaatggcattttgatttaggcattttagtaaattttcactgttatcagaaattttatcttgtcatctatagagtagacgggctggacactttggagaacttttatagtaactgaattgtac

SEQ ID NO: 145504 - DNA, 572 bp, Homo sapiens
cccaggtgctcagacagagagcctggtgtgacatcttagatcaagatgaattggcacaaactcctgattcaagattgttttataccatttaatttagtttcttcccctgcttggatgagcacagctctggttatggatttctattctaatgtactgaagcaggccctgaaagaagccaatgaagcagctgctggagcacgggactgcagggatactgatcaataggcaaggcattgaccccagccgttcagcctctgcaatggccactgcttgaagcgggagggggcacagaagcacayatgggctgcttccagtaggaaattaaacaacaggggcatttggtgagctccgcctccatccctggtcccccaccttctttatgttccttttgtttaattgcctcaattttgtcttaactcccactccaggggaaggaattaagactttagggaagttttaacagtgtactttcaaacaatcatttgtaaattttatccctaagctaatggaaagaattgtaacaggtaccctctgctaagtggccaaaatatgaaatcttaattagctgtcaa

SEQ ID NO: 145505 - DNA, 647 bp, Homo sapiens
tgtcatagaattcccaaactttgcatgttgaaatttgatctatattcacaaacttgctccatctatagkgtttcttgtctcaatgcaaagactggttccagttattaaggccaaaatgccttgaagaaataataactcttcttcctcatatatcacatgaaactagtcaaaaactactattgaatccacctttaaaatatatccagaatatgactacttaccaccctggtcatagccaccatcctttttcccaagtattattgcaataactttatctgtcttcctgctttcatccttgctccttctaaaatctgttcactgcagaacagtgacacaaagtcattcaaacttagtgaaaccagttcattttgtgtgtgtgtgagtggcagtagcataagtgttgaaaaatgtttccgttattgattttggtctataatgttaaggtagagccaacaggatctgctggagtatctggtgaatgttgtcatgtgtaagaggtgtcaacaaaaagaatgagtggcttgagcaaatagaatagagttgtctctaactgagaaggaaagatgaggagaagaaaatttgaggaggaagaagatgggcaggagaagttcagttttggacactttaacctttagaagcataataag

SEQ ID NO: 145506 - DNA, 552 bp, Homo sapiens
ttagctcccgccatgctgtcttctcaggaaattttcctgtatcctcccagtytaagtataaatactctgtgctcccctgcagctagtgcatccccacagcctcactcttacatcatgtttaaatgtttgtctttcttaccctacaagatgtaagcatctcataaggaagggccctattttttattttgagattaatttatttaagattctcaatttgctgaagtgagacagcaagccattttatttttccgataactgacaccaactgagtcaacacctcccactttctcgcttggtcatgcattctctgtaatgacaactctgttcacttctgtaacttgtcaataattttagccattatgagagccaacttctacttcctaagacccagatatatctgttttaacatttactttaatatctaattaaacactctttttagaaacacttcctcttctctccccacactgtcattgcttctcttcctaacattgactatttatagccatcctctgtgttgcaaatatccacatgggacacattcgatgccac

SEQ ID NO: 145507 - DNA, 588 bp, Homo sapiens
agcaatttaatgctacaccctatctgtccatagccaactggaaagaactagtcacatggtccatcaatttgccaagaaagcaaggaattataatattctcatttaccaaaaaactgcattattaaaaaataattaaataccaaagaggcaaaccactgccccgaagttttgttgttgttattgttgttttgttttgtttttcrgagatagaatcttgcttggttgcccaggctggagtacagtggtggtgtgatcgcagcctactgcaatcttgaactcctggactcaaatgttcctcgtatctcagacttctaagtagcttggactataggcatatgttccaagttctaatggtggccttcagtccctcagggaccttttccgaaggcttctgacagtcttatgatctactctgtgatgtcagaaaattaaaagttaaaaatctggcactttcatgtaatattaaaaaacaaaaccctttgctcaaaccattttttatctgaattaaaaatttgttgggcagaatacaaggtattatttgaaaataatagagttgctaaaaattcatgtaagtaggaagcaacttaa

SEQ ID NO: 145508 - DNA, 588 bp, Homo sapiens
agcaatttaatgctacaccctatctgtccatagccaactggaaagaactagtcacatggtccatcaatttgccaagaaagcaaggaattataatattctcatttaccaaaaaactgcattattaaaaaataattaaataccaaagaggcaaaccactgccccgaagttttgttgttgttattgttgttttgttttgtttttcagagatagaatcttgcttggttgcccaggctggagtacagtggtggtgtgatcgcagcctactgcaatcttgaactcctggactcaaatgttcctcgtatctcagacttctaagtagcttggactataggcatatgttccaagttctaatggtggccttcagtccctcagggaccttttccgaaggcttctgacagtcttatgatctactctgtgatgtcagaaaattaaaagttaaaaatctggcactttcatgtaatattaaaaaacaaaaccctttgctcaaaccattttttatctgaattaaaaatttgttgggcagaatacaaggtattatttgaaaataatagrgttgctaaaaattcatgtaagtaggaagcaacttaa

SEQ ID NO: 145509 - DNA, 589 bp, Homo sapiens
actaattttaattctaattattagtttggatttgtcattttcaatggcatttcatctctttacagatacattttaaaagttatctaccaattagaactctctcatatgcagaaaagtttccattttctgaacaacttttctctattacattagatgcacaaaaatcgtgtgacaaaatccaccactcactcatgawgaaatactatcaataaacttggagtagaaataaatttattccacctgatgaaggtcatctttgaaaaatgtacaactagcattatacttactggtaatttttccctctaaggatagaaaaaggcaaagatccccagcctttatacatctatttaccattttactatagcttccagtcagtataatttggcaataaaaaaaaagacattcaaatcagaaaggaaaagatacatctgcctttatctgcaaacgatataattctgtacatagaaaatctaaagttgtatacaagaactactagaacaatagtaatagaataacagaaataataaattatttcatcaatgtagtgggatgtaagcaacatacaaaaattaattgtacttttatatag

SEQ ID NO: 145510 - DNA, 589 bp, Homo sapiens
actaattttaattctaattattagtttggatttgtcattttcaatggcatttcatctctttacagatacattttaaaagttatctaccaattagaactctctcatatgcagaaaagtttccattttctgaacaacttttctctattacattagatgcacaaaaatcgtgtgacaaaatccaccactcactcatgaagaaatactatcaataaacttggagtagaaataaatttattccacctgatgaaggtcatctttgaaaaatgtacaactagcattatacttactggtaatttttccctctaaggatagaaaaaggcaaagatccccagcctttatacatctatttaccattttactatagcttccagtcagtataatttggcaataaaaaaaaagacattcaaatcagaaaggaaaagatacatctgcctttatctgcaaaygatataattctgtacatagaaaatctaaagttgtatacaagaactactagaacaatagtaatagaataacagaaataataaattatttcatcaatgtagtgggatgtaagcaacatacaaaaattaattgtacttttatatag

SEQ ID NO: 145511 - DNA, 602 bp, Homo sapiens
ctcaaaaaattaaaactagaactaatatatgatccacaaccctactactggstatataaccaaaggtaacaaaatttgtatgttgaagagacacctgtactctcatgttcacttcagcattattcacaatagcaaaagctggcgttgagggatattggggtgacagaggatacaaaatttcagctaagcagagggaatgagctcaagatatctgttattcaacatagtaactatagttaataacaatgttttgtattatacttgaaaattgctaaaagagtagcttttaactgttttctccacaaataaatatgtgaggtaatacatatgttaaatagtttgatttagtcactcttcaatgtatacatatttttaagccttatgttgtataccataattttatacatttttatttgttgaatcaataaatttaaaaaattaggccaggtgctcacaacacaaaaacaaatcaacaaagcaaaacaaaaagaaaactgagattattttcaaagcagcctgggaaaaaagcagtatattactgctgtcttagcaacaataatgatagcagacttcccaaagaaacaatcaaaaccaaaaagtgc

SEQ ID NO: 145512 - DNA, 602 bp, Homo sapiens
ctcaaaaaattaaaactagaactaatatatgatccacaaccctactactggctatataaccaaaggtaacaaaatttgtatgttgaagagacacctgtactctcatgttcacttcagcattattcacaatagcaaaagctggcgttgagggatattggggtgacagaggatacaaaatttcagctaagcagagggaatgagctcaagatatctgttattcaacatagtaactatagttaataacaatgttttgtattatacttgaaaattgctaaaagagtagcttttaactgttytctccacaaataaatatgtgaggtaatacatatgttaaatagtttgatttagtcactcttcaatgtatacatatttttaagccttatgttgtataccataattttatacatttttatttgttgaatcaataaatttaaaaaattaggccaggtgctcacaacacaaaaacaaatcaacaaagcaaaacaaaaagaaaactgagattattttcaaagcagcctgggaaaaaagcagtatattactgctgtcttagcaacaataatgatagcagacttcccaaagaaacaatcaaaaccaaaaagtgc

SEQ ID NO: 145513 - DNA, 585 bp, Homo sapiens
taaataacaggtatgcagtgactaatyaacagattttgaaagtagcgatacaattggtcactaatcatgatacacatctctgatgtagttaatgacttgtggactgataagctagcagtggagtttttacagtttgtatttacagcatttccatggcaaaaatctgaaccatgcttcggggaactggtgctatttaaacagcagttactgaaatttgcacctgctgaaaacctgcaatgcaaggactgcaatcattttggctagacttttggtggttacttccatgagtacaaacacaatggctcttatttgtgcatttttatgtttcagttttagccattttcttttggccctctactgtagaagaggataactatcttttaccaccatttcactgttgccattacctggccatacatatacgtgtgcactgagaactcaaaatcctaaggcccccaatgaactgaacatatcccctcttagtcaatggtaatccagggtaaccttaaaaactgaattcttagttttgatgaaacaggaggttgagaacgcctcgttacacctcctaccttttatggttcagac

SEQ ID NO: 145514 - DNA, 585 bp, Homo sapiens
taaataacaggtatgcagtgactaatcaacagattttgaaagtagcgatacaattggtcactaatcatgatacacatctctgatgtagttaatgacttgtggactgataagctagcagtggagtttttacagtttgtatttacagcatttccatggcaaaaatctgaaccatgcttcggggaactggtgctatttaaacagcagttactgaaatttgcacctgctgaaaacctgcaatgcaaggactgcaatcattttggctagacttttggtggttacttccatgagtacaaacacaatggctcttatytgtgcatttttatgtttcagttttagccattttcttttggccctctactgtagaagaggataactatcttttaccaccatttcactgttgccattacctggccatacatatacgtgtgcactgagaactcaaaatcctaaggcccccaatgaactgaacatatcccctcttagtcaatggtaatccagggtaaccttaaaaactgaattcttagttttgatgaaacaggaggttgagaacgcctcgttacacctcctaccttttatggttcagac

SEQ ID NO: 145515 - DNA, 561 bp, Homo sapiens
aacatgcaacacatgtaacatgcatgtttgcttatcacccatgtgtgcatccccccttagtaaatattaatagcttctcctataacctgttgaaaatgtttattagccaacaccttcagcataaattcttgattttcaccttgtctacctctaagtgcctgctaaaggtttctgccagaggcaatgcttccctcttgttaggaatggccagccagcaggctgtaaccctttgtaagaaataatgcctcttctccaaattaatcaaccttgtgattctccagttgacaggacatacaccacagacacacattttctatccccacatcttcccattaaaatatattatagtttggattttacaaattgatttaggcwagattttgctgcagcaacagctccaacattttcatggctgaaaactgaaagatttcactttttgctcaagcaaagcccagtacaggtccaggaacctctccaggtgtctcaacagttaagactgacggaagctccataactcaatatttgcgtcctctgtgtccttttcagtcaattctgcaggga

SEQ ID NO: 145516 - DNA, 539 bp, Homo sapiens
ataccaatcttctgtatttgtggttcattttcccttaagattcaggttgcttttcaatgtcctcactgctgaactaggattcaattttctcttgtctactaattcaatgatgcttatttttattgtgctttacgatttccaaagtgtgttttcttttaagtaaaatgttatgggtacataataggcatattatttatraggaatatgatgtattttgatagaggcatataaggcataataatcacatcagtgtaaatggggtattcatcacctcaagcatttgccatttatttgtattacaaacattccaattatactcttttagttattataaatgtataatgttttaaaatgcatagtaaattactgttgactgtagtcgccctactctacaatcaaccaccagatcttattcgttctattgaactacccatttgtacccattaaccattctcacttccacctcaccccatcccaccccaccaccactacccatcctatcctctggtaaccattctactccttttatctatgaattc

SEQ ID NO: 145517 - DNA, 412 bp, Homo sapiens
tcatacctaaatacgatgatgactaaaaatgtagtctaatttrgtcaaaggacagaaataaatttagtagaaataaccagctgtggcccttttgttacaattaggtctcagatatttgcagatcccactgattgattcataaccctaaaagaaacaactgggattttttaattttaattttatctaatttaacacttagagaaaatcaccataagtgatataaaaagttagaaaaataggccagactaaacagtactatgcatatatcagaaataacagtaacagtcttttattgaacacagcccctttctcatgttagacattccttctctctcctccttcaaagctcactgttccagaaaggctaatgggtcactagactcccaaaaagtctcagaagagatggtcaaat

SEQ ID NO: 145518 - DNA, 482 bp, Homo sapiens
tcccctaaatgtttaattatttccctttctccaattcccagttaccctggtaaatggctggaggtctccttggggaaggatgtcagaaagattcactgcttaaatagttgtaatatagtgggatccttccttcaagagggtgacccagcctccccttcattcaaaggactctggatctgtaaactggctcaagtctggaaattgatggagaggccatgattctccatttgtgtaattcaagttgctcttttgtctattcaacctagaagttttccatttgtataatttaagtaggaatgcagtragcttcctatcaattttacttctaggaacactgattaattaaccgatgccagagctctacacgagtcagactattctgattgctgctttgcctctgctgtccattacagtagctatgcccatcttgctcacctttatgaatgagtgctgccacttgacccctgacacttcggagtcca

SEQ ID NO: 145519 - DNA, 618 bp, Homo sapiens
tagagagggaacaaaatgagtacactatgggcaactgtaaggggcaggtgaaaacgtgtcactcaaaattcatgaaaaaaaaagtgaaggcttatgaagaagaacacagtggcttggggattaaaaacaaaacgaaataaaaactgaatattttcttagtatatctaagttgcaatattagtaaatgtaagaagtgagactaataaaaaaaagccaattgtaaatctgttacagcttttaaaatctgttgatgtaatttaaataatagtaacaggccgggcgggtgcagtggctcatgcctataatgccagcactttggtgtctgactaacgtcagaaaatcaagaccagcctggccaacatggtgcaaccctgtctgtactaaaagtacaaaaattagccggaggtggtggtgcacaactgtagtcccagctagcgggaaaccaagacatgagaatcccttgaacccgggaggtggaagttgcagtgagcagagatcaccgcgctgcactccagcttgggtgacagagtgagactccctctggaaaaaaaaaaaaaaagaaaagaaagaaaaagaaatkaaatgggacattcgacaaataagcatgtatttgcaatc

SEQ ID NO: 145520 - DNA, 511 bp, Homo sapiens
aattcaaaataccccaagtagctagtgtctaatctattggaacagcacagctctaggcccaagaacaatagctcttcatgtgggaattatttagccacatttgaggaaaagaagagagatcagtgttagtagcttacaggaagcatggttgaaattgtaccaacatgggagtttggaaaggaacaggaaacatgcagagtgatctaagccatgttgagtagtaaggtttcaatcraattaaggtagccattgatgtttttaaaattaattttattaaggtggagggtacataaaataatgttaatttctgtctcatgatagtatatattttcaagaagcagaaaccactctgactagtttaagcagaaatggtagaaatatatggagatgccgacttgccatgaggctaatgaagcttgttttagaggctttcatttgtactggttttaaggcttaagagaggacgttgcattatattctcttggttaaaaatttccaaatgaagatattt

SEQ ID NO: 145521 - DNA, 520 bp, Homo sapiens
accaaagaaaaatccatgtctccgtgatccgtctgggtggtaagaaatagctgaaacagaatggcaatgtcctctgcctgaactctgcttttcaaatagcacatctcattgccagaatccaattctcatgcagaatagtctataagacagagtgggaaatgttgtttttagcttttcagcttccatggtacaaaaggacactaaaaattcacactgctggccagtctcatgttagcctatttctggagcatctccttcaatacaatgcttcaacatcttttaaaataacaacagccatcctttgacatcatgccttcctccaactataatcttattgttctggtgtattttatagaaaagcgctttgaaaaaagttttctggactgttccacttccacatgccccagatattcytcatgttcctccaatttggctttgatatttctcactttatttaaaatgattttgccagaaatgagtcaagttttgtgttacaaatttagtgtcaaattattgctct

SEQ ID NO: 145522 - DNA, 473 bp, Homo sapiens
ggacacttttttgacagtcccgttcttgttaagcagcttcaggacacggtctttatgatctaaaaccttaagcatggagtctctggcttcactgatttgatccatcacaagtttacacctctgcatatttccctgaaacagaagacattgcatcatcaatcagtgaccatgaggatagtacagcttttaaaaaactgcttgcctttgggcagaggccatgttgaggyttccacaacagagaaaatgtctttttgtttctcaggagtgcaggctgaagcacgtatgtttttactgaagatatgagggagacggggggaaacgggagaagtagggctttacagaaagcaacttcataaagtagatgatcagaagggaaggggcgcactcaaacctgtatcagttcgtttattcggtggagatcatcatctgttgctgcttttttctttgggataatcccttcctgcaggttagta

SEQ ID NO: 145523 - DNA, 520 bp, Homo sapiens
aactattcatggattagaataacacaaaaatgaaaagatttttaatataagatgagggcaacctttaacctaaaccacaagaatgaatttagacattctagggtaaaaactaagactagcgtaacattttcaaagataattatatgttcctcttttatgttttcaaagataattatatgttcctccttaacaaagactgttaaatgttgaccaaaacataaaagaataatagatttcctaaggttacaatgattcctcatcacscctacttttttttttaaagtcaggaaactgcaaagcactgttatcaaatactattatagaaatactttatgttttcaaagtactaaatgtccagttcattttgaagcaacaaatcccagcattgggttatagaggtggccatctagggggacatgtactaaatctttacttttgatgttacatgatttattatcatcagtatcatcatcatcatcaccaccaccatcacttcctccatcatcaccaaaaggcaact

SEQ ID NO: 145524 - DNA, 599 bp, Homo sapiens
gtaggctgataggtttttcaactcattcttcacttttactgatttctagaactggcaatccacacaaggagaaatcatcccaactgcataattcatggaacgtattgttactattaacagtgcataaaaaactcacaagatgactgttttagaaatcttaccactttgtaatgctaaggactctctacttccagttattcatttcttcctaccttgccagagcattttattcacattaatgttctatttcctatttgattgttagratttatctgtaaaaggctcttgaaacacatctctttcattctccatttttaatacatataaaatatttagcaaagttttatcaacacaggcataagaataaacatgtggtttttgaactaacatcttcagtgctaaaagcttgaaataaattatttctgagttagtaatcaaagagaacagaactcctgtaattttgctctgtgagggtcaatgtaaaatttgcctttattcctttcttacataattctcattttctggggattgtgaagcattcagtaactgatttctggtttgctgcatttttagcttaaatttctctaaataaaatttgt

SEQ ID NO: 145525 - DNA, 379 bp, Homo sapiens
agatctataacgaccaccagagggactgcctgagcttcttccaccaaaactgccccgcataaacttgagcttttaagcggcattatatataagccctatacgagtttaacttgatcttgttaaggtaaacaatctgttcagtctcactttctttttgcattgataattttaataatgtctgatcatttactttctaaaatcacaaatgcagtagcaagttttggccagtttcattttcttaacttttctcytccacatgggacatgctacgggaagaggcttagaatcgtggaaagaggagagtcatctgctttcagtgctggatacaagggcaggttgtgtgaccttgggaacacgtgttaaaatctccagaactgca

SEQ ID NO: 145526 - DNA, 471 bp, Homo sapiens
ttagctgttttgagccacacaaatattaaactatgcattgtggccaagtgcctataatgccaaaagcacctgtttcaaattgtgagtaatatcttatgtgttacactaytgaaatctccttgttacagaatattaatactacctattgaaaagagtaagaaataagagtttctcatttccacccttttggatttatttcatcaaatgatgtgttgatgaataatgccctttctgtaagatggataactcatggaaagaaagccatttggacatggatactcaagattttaaagaatttaggaggtggcagtgtgaatatcaaataaggtgccacttgtagagagagtatctcagaaaaggagcagagaatcatacaatagaaaagtgaaaagctgtttcctgtggtagatagactctaaataatgattttagagacagacataataaattaatttattggttcattgaaga

SEQ ID NO: 145527 - DNA, 567 bp, Homo sapiens
gtaaaattgtattatatttctaatatgaagaaatacttggtttctctttactgtttagaaagataattatcatgattgttttctttattaactcctatatgatactttgtatttttatcccctgctactcaccccaagcttatttttataattagaaaggaatcaagctagccaaacaggagttatccttccttaaggtagagaagttactrttttttttcaaatggcgatctgcctgcctgagttgctatttggatctctgatgatttcttcctttgatcccctaactcaaagcaggcaatcaaggctatgctgttagttgtaaccagatggaaacctgatctccatttatactttgcctcttgtattgataacaggacatgaaccaggatagatacactaacagtatttgactctgctgcagttgccaggctaaataaccagaactcatatctcattctactctacctatggaaacactctgtataatgaaaatgtgtgttgaaagtgtgtgggtatatgttgtgtgtatatgcattaaaattctcattagcatgggctggttgt

SEQ ID NO: 145528 - DNA, 577 bp, Homo sapiens
gtagaggaaatggctcaaccttgcccagagtacagctggttggaactctgacaacggaactgtggcccagggtaaagagcaagaggctgggggaagcacgtaatgcttcttaaagcctttgatctaaaatgacagactgtcatctccactcacattccattagcccaagcaagtttgtggctaaccagacaatgggtctcagcaatatatcccccctcccagaacgcctgaacattcaagtggcaaaagagtgaattgttgagaacaataatatagtctataatagcatataatgttcataaaattagcaccccaggcaaacaggacagaatgcctatccccagccacagctttatcctggcctacaaygctcatttatactttctttcctgtgtgaaatgaactacacttagtttattttaacctgatttttacaaacccataaagaatgcaagagatgcagtgggccaggaagaagtgagaatgttgccctatgtgtgattttttctagaatctgtctaagttctgctttattcctggatatcttgatatggaaaattaataggattgcatggta

SEQ ID NO: 145529 - DNA, 608 bp, Homo sapiens
agtgtttgtaaacagcaaagtgttatttaaatgtaacatatgagcccatataagaggttcttattaccccatgtttctagttaataccagaaaaagacagcttawactgaatccatttaaaacagagaccagtgtggacataggaactagtagggggaaatgaaatgtttgatttaaatatggatatgaatattaaaactaaaaattatgaagatgatttatttaccttgcactttataaactttagaatattattatggccatgtgctaaatcttaggacaaataattcacataatttatctattaaaattggatcatagcacaatacaactaatttaccttgcatttgggttttttcagtttgctcataacaaggaataatttttgcaaaagcatgagatgattcatcaattttctcaaggaaaatttgctttctctttagaagccccaacatgttatcaactttatcaattttcttttcttcaataattgataaaagcctgccggattttaatttgtcaatagcattatatctgattgaatgtctccaacatcaatttcattattcttatgaaatactaaatattttctaaatttgtcattttgt

SEQ ID NO: 145530 - DNA, 489 bp, Homo sapiens
gatggacaaaatgaaataaataagtaggtsaagtagagatgattataaagcacaatttaaacatggtgatctaatgttcttggtgatataaacttattctttttgaggcaacatcacttaggagtagtgattctccacagaaaacccagaccaaaaacagacaacttcactctagaccactgaacttgtagtcaaataccctagttcaagtttaaatcggtagtgcattctttaacaaccccctcggcctttcttaggctgtctcccaatctttaaaacaaagttcataattgttactatttagagttactgtgaggatgaatgagataatgctttgtgaactgggaagtgctgagtaaatacaatgaatggttcattgtgactggagtgtaaggttgattaagagtgttgccatttaatttccattaagcacacttgagtgctctaataagagcaagttttctgagaacatctccagatctctgaatt

SEQ ID NO: 145531 - DNA, 482 bp, Homo sapiens
gaattccccccacccctgtgcttccagggtgaggcgatgcccccacccgcttcagctcaccctccatgggctgcacccactgtccaaccagtcccaatgagatgaaccaggtacctcatttggaaatgcagaaatcacccgtcttctgcatygatcaggctgggagctgcagactggagctgttcctatttagccatcttgcgcaagtcaattttatatatttttcatgccagcaaataataatttgcctgaaattccattttaatgctatgaagatgactacttctacctctgaaatgccattaggttaatcatcaccttgacagactggaaaaatgatattttaggcctatattcgttgtaactcacttctgttatcatttttgaaaaagagaaaaaaattttttggtcaagtaaagactacacttaggttgaagcctccaagaattttacaatgtatgtcaggctatctgtgaacaagg

SEQ ID NO: 145532 - DNA, 543 bp, Homo sapiens
ccttctgaaccacacacacacacacacgcacacacacacacacatagcaggaaacagccccagatctttctgccacaccagcctcgagagagaagagaggaaccattcaaagctgtgaaagagaaaaaacaaaaacgaaaccatcaagccagagtccaaactttccctaacaccttgaatggcccctcaggaggccacggatggaaaggggtcttccctagaggccaacattcctcttcacactttctccaggtaaataaaagacttaacactaagcctctagccaggcatggtggctgatgcctgtaatcccagcactttgggaggccgaggtggraggattgcttgagcccaggagttcaagatcagcctgggcaacatagcaagacctgtctctactaaaaaaacatacgaaaattagccggccgtggtggtgtgcacctatagtctcagctactcgggaggctgaggcgggagtatggtttgagcccaggaggtctaggctggagtgaggtgtgatcatcccactgcactccagcctgt

SEQ ID NO: 145533 - DNA, 584 bp, Homo sapiens
accatcagatcttgtgagacttattcactatcacaagaacagcatgggaaagacctcatgattcaattacctcccaccgggtccctaccacaacccatggaaattcaagatgagattttggtggggacacagccaaaccatatcagagggggactccaggtcttaacctgttctggttggtaggtgctgtgccttatggattgttaaatactttaaataacaaccttatttaacttaccttatttaacaacttatttaaggtattattgcatctaataccttagtgtccccatcttgataaaccagtagacagcttgggaaaatcagggatcatctattcattcaattcattctgcaaatattaattgagcacttactgtgtgccagtctcactagagtctgggagtacaatagcaaataacccagccattgttcctgcctcaggaacccgagtctaatgggagagacagatatgtgaagagactattgcaacctgatatgataaaggatgagawgaaagtagtataagatgccatgggaatgtataggaagagtacccacatcaagactggggacaggaggca

SEQ ID NO: 145534 - DNA, 608 bp, Homo sapiens
agggggtgcccctctgggatgaagcttccagaggtaggaacagggagcaatctttgttctgcagcctccactggtgatacccaggaaaacagagtctggagtggacctctggcaaactccaacagacctgcagcagaggggcctgactgttagaaggaaaactaacaaacagaaaggaataatatcaacatcaacaacatcaaagacgaaaggtagataaatccacgaagatgacgagaaaccaacacaaaaaggctgaaaattccaaaaaccagaacgcctcttctcctccaaagtatcataactcctcgccagcaagggaacaaaactggacaaataataagtttgacgaattgacagaagtaggcttcagaaggtggttaatrataaactcctttgagctaaagaagcatgttctaacccaatgcagagaagctaagaacctggataaaagtttggatgagttgctaactagaataaccagcttacagaagaacataaatgacctgatggagctgaaaaacacagcacaaaaacttcttgaagcatacacaagtatcagtagctgaactgatcaagtggaagaaagtatatcagagattgaagat

SEQ ID NO: 145535 - DNA, 569 bp, Homo sapiens
aggagacccagctggactttgggcactgaccacaccacggatctcagatactgccatccctctctgctcctgtgtcatctccactttctcctgagaatggctgcccactgctcctggctttcatgtcagtctcacgtcttctgctgctagatatcagagagggtctggctctgattttcggttccaatgtgaaaaatcccagagaaggattctgattgatcaggcttggattgaatgtcaaaccctggaccaatcaactgtgtttagtrgggggctgggcagggccaaagccgaggaagaacatggctgctgtattagtctgttatcaggctgctaataaagacatacctgagacttggtaatttataaaggaaagaagtttaatgggctcacagttccacatggctgggggtgtctcacaatcagggaggaagatgaaggaagacgcaaagggacttcttacatgatggtgggcaagagagagcttgtgcaggggaactcccatttataaaaccaccagatctcctgagacttattcacttccatgagaacagcacgggaaagaccac

SEQ ID NO: 145536 - DNA, 537 bp, Homo sapiens
gggagactgtctcagaacaacaacaacaacaaaaggaaagctgtgtattgtgaagtgaaatcagagtcaccttgaaatgggcatgaggtattcatcagattgcctttggaataaaagaaataatgyccgtggaatatctcagtaacacctcctcattgctaacccttttgagggcagaaattatagtttttatttatgttagtagctccaattaatatattaataatagttctaggtgtgttctacacattattgctagtgcttacaactctacaaggtagataggtattaccactgtattataaatgagacagccaaggcttgctgtgataagtaacttgtccaaggtcacacaaaaaataagtgatacatttatgatgaaacctcagttctgactacctttgttctttcattatgacatgctgcctacctcttatttattataaacaatattggtatactgacacaaggatcagatgctttgtataatggttgtagacttttccaaggaatcttgtgactttcttctttttactt

SEQ ID NO: 145537 - DNA, 637 bp, Homo sapiens
atcactgtgttaagaaggattcaaaggctgtatctagcctctaggggaaagaaaatttgattgcatgatgatgtatgttatggacaagataaatagcgccaagatgaaccacaaatttggtatctctgttttccatgaacattcaacacaatggaacagagatgttcatgttttagtcatgagatgagaattccagagttctaatakgtcatccctttgctctttgcaccatcttcatcctgcctaatgtattgtccaattatctcatagagcatttatttatttatttattttggagttcaatggcacagtcatagcttacctcagcctcgtctttctaggctcaagcaatcctcctctctcagcctcttgagtagctaggaaaacaggcatgcacctccatgcctggctaatttttattttattattgtagagatggggtctcccttagttttccaggctgatcttgaactcctagcctcaagcaatcctcctgccttgacctcccaaagtgctaggattcaacagcactgctggtatagtagtattatgcaagactcccaaagtgctgggattataggcatgagccaccatgcccagccatctcctagaacatttagacctttgaataataaag

SEQ ID NO: 145538 - DNA, 547 bp, Homo sapiens
ggggggcttgcctaagacatccccacaggcacatagatgagaaaggctacacaggagactttcccacacatgcccacaatggaaaattttgtcccctgacacaagcacagtaaggggaasaaagcaacatggaataactcaagctaagatcccacatgcacactaggaggatgggatggaactaccagaaatgcacaccttatgcaaatgagatgcccaaccccataggggtttcttacaaaagcctctatatccaaactttgaaacaacaacccatttttctggagcccctctctgtagcagagagctattctctttccttcacctattaaatttctactctaaacctcaccctttgtgtgtccacgtccttgatctccttggctgtgagacaatgtctgcttcactaggtatataactaaagtctgcttcagtaggtatacacccaaaggaatatgagtcattctaccataaagatatgtgcacatgtatgttcactgcagcactatttataagagcaaagacatggaatcaatgtaaatgctca

SEQ ID NO: 145539 - DNA, 547 bp, Homo sapiens
ggggggcttgcctaagacatccccacaggcacatagatgagaaaggctacacaggagactttcccacacatgcccacaatggaaaattttgtcccctgacacaagcacagtaaggggaagaaagcaacatggaataactcaagctaagatcccacatgcacactaggaggatgggatggaactaccagaaatgcacrccttatgcaaatgagatgcccaaccccataggggtttcttacaaaagcctctatatccaaactttgaaacaacaacccatttttctggagcccctctctgtagcagagagctattctctttccttcacctattaaatttctactctaaacctcaccctttgtgtgtccacgtccttgatctccttggctgtgagacaatgtctgcttcactaggtatataactaaagtctgcttcagtaggtatacacccaaaggaatatgagtcattctaccataaagatatgtgcacatgtatgttcactgcagcactatttataagagcaaagacatggaatcaatgtaaatgctca

SEQ ID NO: 145540 - DNA, 547 bp, Homo sapiens
ggggggcttgcctaagacatccccacaggcacatagatgagaaaggctacacaggagactttcccacacatgcccacaatggaaaattttgtcccctgacacaagcacagtaaggggaagaaagcaacatggaataactcaagctaagatcccacatgcacactaggaggatgggatggaactaccagaaatgcacaccttatgcaaatgagatgcccaaccccataggggtttcttacaaaagcctctatatccaaactttgaaacaacaacccatttttctggagcccctctctgtagcagagagctattctctttccttcacctattaaatttctactctaaacctcaccctttgtgtgtccacgtccttgayctccttggctgtgagacaatgtctgcttcactaggtatataactaaagtctgcttcagtaggtatacacccaaaggaatatgagtcattctaccataaagatatgtgcacatgtatgttcactgcagcactatttataagagcaaagacatggaatcaatgtaaatgctca

SEQ ID NO: 145541 - DNA, 547 bp, Homo sapiens
ggggggcttgcctaagacatccccacaggcacatagatgagaaaggctacacaggagactttcccacacatgcccacaatggaaaattttgtcccctgacacaagcacagtaaggggaagaaagcaacatggaataactcaagctaagatcccacatgcacactaggaggatgggatggaactaccagaaatgcacaccttatgcaaatgagatgcccaaccccataggggtttcttacaaaagcctctatatccaaactttgaaacaacaacccatttttctggagcccctctctgtagcagagagctattctctttccttcacctattaaatttctactctaaacctcaccctttgtgtgtccacgtccttgatctccttggctgtgagacartgtctgcttcactaggtatataactaaagtctgcttcagtaggtatacacccaaaggaatatgagtcattctaccataaagatatgtgcacatgtatgttcactgcagcactatttataagagcaaagacatggaatcaatgtaaatgctca

SEQ ID NO: 145542 - DNA, 455 bp, Homo sapiens
tccagaatattttgttccttttcatgtgttctctttattaatattcccaattttgtttatatatcattttcttgacactcctctcaacttcctttagatttttaagcctttttaagacaattgtttaaagtctttcatatatctgccatcaggttttcatgaagcaatgtttctatgagtttaattgtttttcctttgaacgtaccataatttcctgctkcttctatgccttgggagtttttgttgaaaactggacattttgaatctaataatgtggtatctctggacattagagtcttctctttccttgagattatctgctatttgttatttgtgtgtttgtttgttttattgttgaaagctctctctgtgcaaggatttaggtattttctgagcctgtgcctttttctgggctctgttgtcactttctaattttgacagcatatacggttcct

SEQ ID NO: 145543 - DNA, 587 bp, Homo sapiens
taccaacttggaaagaggctgtgtctgcccaccccaccttggtgctagcatattaacgtgctccagttctccaactcacacttatcactatctgttgtttttatatttataaatgccatttttttaatctgtctagatcttcctgcctcacagttaaattcctttgaggcatattagacctgagtatcttcatcttcytttccatctcactgttttcacttgggagtattccagtcacaaaacacatttttgtaatcttaaacataagaaggaccctcaaaacagaaatgaggccattggactgaatttcaaatacagtcctatgtagcaatgatgtttgctcaagcagcattggttaagccaaaatgagatttattccactactaaaaaacacttattgttatatactatctgacaaacttttgtgttaggcacaggaaatgcaaaaataaataaggcaggactactgagtcctccaaattcacaatgaaagattggagaaggaggtgtgattttatttgtatagtaatacatagtatcagttataatccaggctcatgttaatgttgcaaaatgtaaaattctgc

SEQ ID NO: 145544 - DNA, 602 bp, Homo sapiens
tagtctgctggagaatgagaggtcatgtggaggagaatggagstgcctcagcagacagtcagctcaaactaccagacgtgcaaatgagaggatctggcagcttctaggacagccaatcctgctgataaatgcaatgcaagaaggaatccaggtaaaaatagtggagaatctcttaaccacttcacatacttatgataaataattgctgttcgtagccactaagttgtggagtggcttgttagataacaatagttaactgaaacagtctccatatgttatcaaatgaaatcacttattattgagaaagtactaatagcatcattattaattgttaaatagttattaatgttattattgacatgatagcattatcatattataaattttaaaaaataaaggcatattttaagagctatttcaactggctatgtgttaaattgtgatttcaacattatacttcgaggagcagggtccaattgcaatttttatttcttagtcttcctgctcctccactgctcagcgtgttatctcattcatagtagttacccatacatattatttaatttgaaggaatattaaaaagtgtactttatagaaattaa

SEQ ID NO: 145545 - DNA, 602 bp, Homo sapiens
tagtctgctggagaatgagaggtcatgtggaggagaatggaggtgcctcagcagacagtcagctcaaactaccagacgtgcaaatgagaggatctggcagcttctaggacagccaatcctgctgataaatgcaatgcaagaaggaatccaggtaaaaatagtggagaatctcttaaccacttcacatacttatgataaataattgctgttcgtagccactaagttgtggagtggcttgttagataacaatagttaactgaaacagtctccatatgttatcaaatgaaatcacttattattgagaaagtactaatagcatcattattaattgttaaatagttattaatgttattattgacatgatagcattatcatattataaattttaaaaaataaaggcatattttaagagctatttcaactggctatgtgttaaattrtgatttcaacattatacttcgaggagcagggtccaattgcaatttttatttcttagtcttcctgctcctccactgctcagcgtgttatctcattcatagtagttacccatacatattatttaatttgaaggaatattaaaaagtgtactttatagaaattaa

SEQ ID NO: 145546 - DNA, 589 bp, Homo sapiens
tgtaagaaatgcaaattctcaggccttatcctagaattacaaaatcccaatttctgggaataaggtccagcaatttgtcttctaaaaatccctctaggtgattctgatgcactctgacatttgaaaaccatgggtttagggaagtcagcatggatggtacagtaccatggggctagtaatacggaaaaagatgctatgatccttaggccataaagaagagaaggcaattatcagamcccaggaaaaggaaataggagaggtctatctaattggagctgtggccatcagtagacaggcactatcaacccgtgcagcccagcaggtagggagtactctctgggtgtcctgaggaggtcctgcaggtggctttcaatggccaaatccaagtgccactgcagggctggggagctaagtggctccagagtccagaggagctaattggcagagcaagtgaaggctgatgtatagattcggagggttaaacagaagacgcctatcacaggtccccaggatgatgaggaggaagaagtgaaggcatattttaaacccaggcaagatgactttgcagccctattcttaacaaccatac

SEQ ID NO: 145547 - DNA, 339 bp, Homo sapiens
gatcaaaaggagggcagacactccttacttggagctccttgattttctagtctgcaacaggactaactcagtatgtgaaggtcacattgccctagatgyggcaattagacgatcacactcatctgaactttgtgatgacattattttgtgagtcccccttatggtattgcaacacattgcttacaacaaacgctactgttgagagaatctggagaaatttagttacacggatttgagctacatgtattctctcattcctattcactccttgtgacttgtatttgtcatattatgtatttttactaaaacacaaactactcttaacattaactgtaatat

SEQ ID NO: 145548 - DNA, 312 bp, Homo sapiens
cagatcttctcatttaccttcccacatgcagacccattcctccgaaaaaaaagcaagccccattcaaatactcttttgcctaccactaaacccacacttttttgtccgcagaatttatattcgtcttccaggtctcacctccaaacacaactcagaggctcttcttaatgctctccagttmtttgtgcatctctgtcttaaactcatctgtgagttttctgcacaagtagaaaagttgtctttgcctattttatttctagtgcttggaacaataactgacctacagtaggttccccaaagttatatttcaat

SEQ ID NO: 145549 - DNA, 556 bp, Homo sapiens
agggtctcactttgtcagcaagactggagtgaagtggtgtgatcatagcccmttgctgcctcaacctcctgggctcaaacaatccttcagactcagcctcccaagtagctaggatgacaagagcatgacaccatgcctagctaatttctgtgtgtgtgtgtgtgtgaagataggggtttcactgtgttatccaggctggtcttgaactgctgacctggagtgatcctcttgccttagtatcccaaagcactgggattacaggtgagagtcaatgcactgaccaaatgacacattttcaatgagtcctattttatggtattacaaagaatcataatctggcctactctttaccctctttggccccagcattcacaatctctctttcccagtttcactttagttatacttttttccacagcccttgttatttcctggcaaaatagattgtataattatttattttgcttgctagttattgtctcctatttattcaacatggagatccatgtttcatttaattgtaatgcctcaagcacctagaattatacctaacagg

SEQ ID NO: 145550 - DNA, 556 bp, Homo sapiens
agggtctcactttgtcagcaagactggagtgaagtggtgtgatcatagccccttgctgcctcaacctcctgggctcaaacaatccttcagactcagcctcccaagtagctaggatgacaagagcatgacaccatgcctagctaatttctgtgtgtgtgtgtgtgtgaagataggggtttcactgtgttatccaggctggtcttgaactgctgacctggagtgatcctcttgccttagtatcccaaagcactgggattacaggtgagagtcaatgcactgaccaaatgacacattttcaatgagtcctattttatggtattacaaagaatcataatctggcctactctttaccctctttggccccagcattcacaatctctctttcccagtttcactttagttatacttttttccacagcccttgttatttcctggcaaaatagattgtataattrtttattttgcttgctagttattgtctcctatttattcaacatggagatccatgtttcatttaattgtaatgcctcaagcacctagaattatacctaacagg

SEQ ID NO: 145551 - DNA, 499 bp, Homo sapiens
caagtgggacaaatgcaggttaatgactagtaattctttgataaatgaagaaatcaattatgatttctagaagtacattgttgaaacagaggaaaactattgttaaatgtatgttttctccattaaccttcctaaatrttgtattaattctaatatagtattttaaattctctaggtaaacagtcaaatcaccatcaaaacaaaagataattttaatcttttctttccaagtgtttataaataattaatgcttttctcttaatatctatacttctaaatcaacctaaaacatatgtgtctttaccagcctgctgatacaaataattgacaagtcttacattttgatatcctaggaacacaaacaaaagtcaatagcaattcccagggcaatacctgtcttgttttagcgcttgttcctactgcatttaactgaacagctagtccctggtttcatttattgtttttactttctctgtttgaacatggtcctcgtgttgtt

SEQ ID NO: 145552 - DNA, 613 bp, Homo sapiens
taaagtcatattgtgcattataaaatagaaatatataaaaaaattaaataaattatattacagagaatttgaaatttaaatttaaataatttaaaaaaatttaactgatgaccttattcatttgggatcattttctctttctaaactactgtcataatctaccaactgataaaactatttcttctatgtcttgattgtctccatccaacccattatttccactttctaaaataaaaatgcacactcatgtccccctcaaaacacacacataaaaggatataatgatgagtccctgccttttgcagcaaaattctaaaatgggtcccttttgattagattaacttcaacttaactttctttccattactgctcaccatttctagtatttgaattagcatgtttatatatgcatatatacatatatatatgtgtgtgcgtgtatatataatatatggtactttctgaaaagtgctttattgccttygcacatattgttttcactccaggcaatgccccaaagctagatatcttctacagttcccccaggatacaggtcagattacttcctctatgaagatttctgtgtaaatggaaacccaaggattgcaagtga

SEQ ID NO: 145553 - DNA, 578 bp, Homo sapiens
tgcatttcttctgaaatatcgcaaataattttcatctgatcttgatgtactttccctttctcaatatttcatgaacacagctgccagatccctaaaatcccagcacctgtacrgagggcagatagtcactattacttatggattttattaatttttatttaacagagtaataaaaaatgtactttgtttctcaggcaatggtggtaactgatgcatacaaatacgggagagaggtagtcttatttcctgacaatagatgtccaaaatcttgctaagtatcctctacctattaatctaggtgcacctctacaattttcttttatatttctttttgtaaaataaaagtcatattattcagtatttaacaactgtaaactgttggtatttgtttctttttgatttaatgatgatatttagcattagtgttttttgagagagaaaaacaatgcttgtatatagtttggggaaaaattcattcaacctttatgctaggcaaaaatgctaatcaaaataataaggcaactccctaattcaacctttataaatggtagttttaaatatgcatcaatagcctcaat

SEQ ID NO: 145554 - DNA, 578 bp, Homo sapiens
tgcatttcttctgaaatatcgcaaataattttcatctgatcttgatgtactttccctttctcaatatttcatgaacacagctgccagatccctaaaatcccagcacctgtacggagggcagatagtcactattacttatggattttattaatttttatttaacagagtaataaaaaatgtactttgtttctcaggcaatggtggtaactgatgcatacaaatacgggagagaggtagtcttatttcctgacaatagatgtccaaaatcttgctaagtatcctctacctattaatctaggtgcacctcyacaattttcttttatatttctttttgtaaaataaaagtcatattattcagtatttaacaactgtaaactgttggtatttgtttctttttgatttaatgatgatatttagcattagtgttttttgagagagaaaaacaatgcttgtatatagtttggggaaaaattcattcaacctttatgctaggcaaaaatgctaatcaaaataataaggcaactccctaattcaacctttataaatggtagttttaaatatgcatcaatagcctcaat

SEQ ID NO: 145555 - DNA, 589 bp, Homo sapiens
ggacatctttatcttcttttttctttttggtcttgctgattctttcctctcacaattcaaatctacccttgaactccaagattaattattttattcaagttcagcccatttcagttactttacttttcaattccagaatttccatttggtgcttttgtgtaatctctaacttttaattcatatttcctttttattgggatattgtcattataccttcctttacttctgtaagcatgagttcatttagttctttcaacatatttatgttggcttctttgaaatttttgtctgttaagtccaatatttgggcagcttattttccagtgtatggagcatgcttttctgtttatytgcatgtcacatagtttttttcccctaatatttagataatataatgtagcaactctggacactgaatcccctccaacatggattattattgcagttgtttacttgtttgtttttttagtgacttaactgtgctattgaataccctggtctatttctcctagagtttgcatctaatgtcactttttctagtatatatacttgggcatgtccacagtcagccttggatgccaatagtttt

SEQ ID NO: 145556 - DNA, 495 bp, Homo sapiens
tggaagcgtaacatgtagaacaatcagaggaaatttattcaggtctgactttgctataggcagtgcttatcccatctagaaattctgtgtcctagtatgttgccgcaatgactttttggatacattttttgtttattttatatgtgtatttgctttaaatatccttctctggtaataaatgaatacttttctttgtgtgtgtgtgtgtgcgcacgtgtgtgtgtgtgattctgatgctatcttctcatatctgggaacttttaaaaaattttaccttcttgtaattgtgagagctgtttctcttctggctctactaatatcctcaaacttctcattcaattacctaaaactcttttcttctcccaattatctcatctctcatacccttcactttaaaatatccttttctttccattagtatttatactaaatgcagtcaattcttggyctctcttacgcaattaggtgaagcttacatttcaattacagtgttta

SEQ ID NO: 145557 - DNA, 386 bp, Homo sapiens
tgttggctgccagtctggaaatgtctgtcactttcagcatcaattttttaatttccttagcttagcacacaatagcaatgtaacaggtcaggaatggccttccagataggaagagagaagagggaatcaggaggcatggaagctcttcctccaacctygcagtttgcctttagccagccttatatacgagtcataccagaaagaagaataagagcaattatgaggctgtctaagcttccatctctttataggctacaacaggagggagtcaaaaatcttgaatgaattaagaaaagtggtacttttattgaatttaagagatataccctcaggtgtaaagccttaaaacccatctgaatgaattgggatctacatataaaacagat

SEQ ID NO: 145558 - DNA, 500 bp, Homo sapiens
gactttgtattgttacatcagagattttgtacatagattcacataagtggatgcaataaatgaacatcaggccaggtgcagtggctcacacctgtaatcccagcactttgggaggccaaggcgggcagatcacctgaggtcaggagttsgagatcagcctagccaacatagggaaaccccatctctattaaaaacacaaaattagctgggtgtggtagcacacacgtgtaatcccagcaactcgggaggccgaggcagaagaattgcttgaacccaggagacggaggttgcagtgagccaagatcgcgccactgcactccagcctgggtgacagagtaagattccacctcaaaaaaaatttaaaataaaataaaataaatgaacactagtgaatatttttaaacatctacttatgagaagtattttaaataagtggctaattttatcatatacaagtgacaagtatcatgtctatcatttacatgagaaaactaacctgg

SEQ ID NO: 145559 - DNA, 500 bp, Homo sapiens
gactttgtattgttacatcagagattttgtacatagattcacataagtggatgcaataaatgaacatcaggccaggtgcagtggctcacacctgtaatcccagcactttgggaggccaaggcgggcagatcacctgaggtcaggagttcgagaycagcctagccaacatagggaaaccccatctctattaaaaacacaaaattagctgggtgtggtagcacacacgtgtaatcccagcaactcgggaggccgaggcagaagaattgcttgaacccaggagacggaggttgcagtgagccaagatcgcgccactgcactccagcctgggtgacagagtaagattccacctcaaaaaaaatttaaaataaaataaaataaatgaacactagtgaatatttttaaacatctacttatgagaagtattttaaataagtggctaattttatcatatacaagtgacaagtatcatgtctatcatttacatgagaaaactaacctgg

SEQ ID NO: 145560 - DNA, 208 bp, Homo sapiens
gagagcacaaaatcaatgtggaaatgaattagtctgggaaggttccattcaagagctggaatgtaaatcagtccttgtagggtaagtcaaataaagatacgcagataggaaagtacagaaattgctgttagtcactctacctgtcagttttcttgattacatgcaacaagaatcaattytaacttaaacacagaaaagaacttattgt

SEQ ID NO: 145561 - DNA, 478 bp, Homo sapiens
tgaagacacaatctaagagatgagagaaaatatgagcaaaccatacatctgaaaagaagttaatatcaaaaatatacaaaaaattcaaacaatagcaagaaaacaacccaattatttaaaaatggacagaggatctgaatagacatttcttcaaaagatgacatgcaagtggccaatgggtatataaaaaataccagacatcacatcatcagagaaatgcacattaaaaccacaatgagatatcacctcacacttgttagaatggctattatcaaaaagacaaaaaagaagtgttgacatggatgtggacaaaagagaagacttgcacactgttggtgggaatrtaaattagcataggcactatgaaaaataacatggaagttcctcagaaaactaaaaacagaactaccctatgatccaacaatcccactattgggtatttatccaaagaaatgaaatcagtatgtcaaagatatat

SEQ ID NO: 145562 - DNA, 534 bp, Homo sapiens
atttaatacaacaacattggttttaagtagccactggtgccatctggggaaggccagggaccctccctaaggtctcccagggcctgtctgtggggaagctggatttgaatccaagcactctgtctctcaaatactttctcacatactgtgatttaagctctaccttttcattgatgatgctaagagcaaaaccacagaggttcctacccaacacaataaataaagttgggcttttctgggagatatattttttaagcaattccaaaagaaatattcagaaaatgcaaacctttctaaaataaaagacattttacacaaaatggaaaatctcctgggtataagtattataatttggtatatgaagacaagcttttgacaggaacagcaaggctcattgtgtattcataattcaagagttgcacccaaagacacacaagagagggaaagagagkacaagtactcacaggaatttatcaacaaaactataaatcgattacattttgacgggaaatcatctatgtatagcacacacat

SEQ ID NO: 145563 - DNA, 534 bp, Homo sapiens
atttaatacaacaacattggttttaagtagccactggtgccatctggggaaggccagggaccctccctaaggtctcccagggcctgtctgtggggaagctggatttgaatccaagcactctgtctctcaaatactttctcacatactgtgatttaagctctaccttttcattgatgatgctaagagcaaaaccacagaggttcctacccaacacaataaataaagttgggcttttctgggagatatattttttaagcaattccaaaagaaatattcagaaaatgcaaacctttctaaaataaaagacattttacacaaaatggaaaatctcctgggtataagtattataatttggtatatgaagacaagcttttgacaggaacagcaaggctcattgtgtattcataattcaagagttgcacccaaagacacacaagagagggaaagagaggacaagtactcacaggaatttatcaacaaaactataaatcgattacattttgacsggaaatcatctatgtatagcacacacat

SEQ ID NO: 145564 - DNA, 590 bp, Homo sapiens
tacttaatgatgatgcacttgattaaataaaatgaaagaaaaatgaaagttctttcagacattaaaatgaataatgagtttagacttaatccaaacgcaatttgactttaaacattcatatgaaattaaatgagccattgaatttgctatataagcaagcattaatcttatcaagctatgaaaactagaaagttatacagtgacccattaatttcagagcctaatataaggtctgtttaatgtctatactccattaaaaagtcttattccacaatataagtgctttttcataaaagtttaaaccccaattcatttttttttttactgctccaatcatgtgataatcaactctgacaagattatggctgcaaatttgaataaggtatgtaatgtcatgtgaaacaaattttgctcatggscagcttccaacaaaaaagaggacatttatatcattggcagaaatgtgtgcctacattattaaagcccactcttcctccatcctaaggtgttttccttggataaagtcgtttataattctcctattaagtagaccgatatccctgttacataagcaaaattctttcatataa

SEQ ID NO: 145565 - DNA, 590 bp, Homo sapiens
tacttaatgatgatgcacttgattaaataaaatgaaagaaaaatgaaagttctttcagacattaaaatgaataatgagtttagacttaatccaaacgcaatttgactttaaacattcatatgaaattaaatgagccattgaatttgctatataagcaagcattaatcttatcaagctatgaaaactagaaagttatacagtgacccattaatttcagagcctaatataaggtctgtttaatgtctatactccattaaaaagtcttattccacaatataagtgctttttcataaaagtttaaaccccaattcatttttttttttactgctccaatcatgtgataatcaactctgacaagattatggctgcaaatttgaataaggtatgtaatgtcatgtgaaacaaattttgctcatggcmagcttccaacaaaaaagaggacatttatatcattggcagaaatgtgtgcctacattattaaagcccactcttcctccatcctaaggtgttttccttggataaagtcgtttataattctcctattaagtagaccgatatccctgttacataagcaaaattctttcatataa

SEQ ID NO: 145566 - DNA, 635 bp, Homo sapiens
cataagaacaatctaatttgtttctaatgacaataaaaagaagccctaagccatatccttaattcatatgactgccacccattaatgtatctaattccattttcccagaaaacaggttagttttagaagagaaaatatgtttatgcaaaataagttgatgtttcattctcctgggcatttttgggggtttttttgtcttttgttttttgagacagggtctcactctgtcacccaggctgtagtacagtgactccattgtagctcactgtggcctcaaattcctgggctcaagtgatcctcctgccttagcttcccaagtatctragactacgggcgtgagccaccatgcctggctaatatttttttctttttatttttagtaaagacagggtcttattatgttgcccaggctggtcttgaactcctggcctcaagcagtcctcccaccttggcctcccagagtgctgtgattagaggcatgaaccactatgcctggcatctcctagacatttctgattatttctgattttcttcattgcttatattaaccacccaaactacatcatgggataattgaggtagtcagataatgatccccccaaagatgtctatatcctaatatctggtacctatga

SEQ ID NO: 145567 - DNA, 598 bp, Homo sapiens
tcagaccactgcaattcagtcagtcatctgggactgggacagggaaagaaggttaacgtcccactgtccgtgtgatatagaatgtttaaaaaaccttataaatcatgctttcactaatttggtcatgtcatagaaccattgctacccttcattaaaggcctctcagcatggggtaccatcatagacactgctgaaagagcatccccatcatccttgtatgattaaaatcaaactcacagaaaactgatgcagccagatcycaaagacatctgaacacaaagttccatcaaattataaactcacataatgatatgtgtctcatatgtatatgtgtgttacacatacatgccttaagaaagaatgcatactgtagaatagaggataggcacgtgtcattggcagaacagagtggatcagtggaccttcagggaaaagccattacttcttgcatttatcaggaaagttcactcaaggatgttttgaaaaagttcaattttgaatgataatcatctcctttctacactttgcacataaagagctaaccattaaggtagtaaatcatagaccaaagttagttagcataacctagatagcagaa

SEQ ID NO: 145568 - DNA, 556 bp, Homo sapiens
tcattttgatgtctgtatttgattaagtctcattagaagatacttttcaatagactaaggtcatggatttgagttcccaaagccagttagtactgctttatttaaggttagttgactggccttctaatcatggccatctatttcacaaataacgatggtgaccaaggaactaaaagtatagatgaatcacaagtagcttttccaaacttaccaatagtagaatagcaccttgaatatagcagtcatgcattcattcaacaaatactgagacctagcatgtgccacagactcttagaatttctagaaatacacaagtgaacataacaatgtcactgccttcatggagctcacattttggaattggttttatatgttgtaaaagctccagttgtcagaatccttaactcaagccccaaggcaaggattttctagctgttcaattgattctcagtggatttttatgatgtatcaatggtatccaaaagataacggtctccatatcctcyactttctattctgcagcaatcaattctctaagaaattacctgcttcaaac

SEQ ID NO: 145569 - DNA, 453 bp, Homo sapiens
attcttaaaaaagtccctctataaaaaaggcaagaaatttgcagtgcagtataacaaagcrcatataacatatagcagtgcatataacaaagactagaaagatatttactgaaatattcaccattgttatgtctagtagtggaaatacaggagtgtttcttctgatttttctcaatttaatttttttgttaactgaatgaatttttctactgagttaaaggcactatactagtcgccagggtgagaaagattaatgaatttccttcatattcagaaccatgaaaagaagaggtgaaccaggcagaaaacaacttactagaggcttatctaccctgacattcatatcaattggtattctgactgtactctgtgatactatgaagttcagatggggcttgggaagggtgaacaaaccctttctccttctctaaagacaaatctgagcttaggtta

SEQ ID NO: 145570 - DNA, 573 bp, Homo sapiens
gttgaactgcatcacgagtctgcaattgtcaatatttaaactatgagaatcctacaagtsaggcagcctgggttctttaacagataaattataagaaaagaaaaggaatggagaggaaaactgtaaagacttcaatgacacaacaagtttaaaaagtggagaagactaaactgtagaatctaaagatgtagttgggtgataaaacataaagaaatgtaaatgtctactatgagtcaggagggaggaagggggctataattgtggtgggaaacatggagggacatctaggtggctagtagagtactacttcttgattgaggtggtggttataaggttgtttgccttaaataattcactaagctatacatttgttccatgtagttttctgtatgcgttttactaatattttataataaaaaggtacacaaagctaatagctatagtatatacatatacatgcccatatatataattagatagataaaaatagctaggtaagtaggtaaaataggtagatagatagatagatagatagatagatagatagatagatagatagacagacaggcaggc

SEQ ID NO: 145571 - DNA, 509 bp, Homo sapiens
tttctgttgtgtctgagcctccactctatggtattctgttataacagcctgaacggactaagacacgtcccctcctgggtgggggtagagactgacttagctggtgggttgctgcagagttgggggttggagtttctcatctggcaagagaggaacactgaagccagggagagagcagagccaggagtacaaaatgaagatctgaaagccagaaaggaaagcagggtcccctcacccatccccatcaccccatcagcagcatcagcaacctttcckgagcacttactacaagcaaagcagcaggggaaggctatcacatgtcttccctccctaaaccaaagggccagagagagaggggacccgagaggggtgcccactatattgctttgttaaattaaacttacggccagttatcagagtcacccagtggtgatagagctaagggccattcttgggccgtgtccagaacaggctcaggtgcctggtaggtgtggtctgggcctctagca

SEQ ID NO: 145572 - DNA, 446 bp, Homo sapiens
atacaactaagcctggcttatatttatttttttcttctgattttaaaataaattagaatatttttgtatgtccctgtattcactttttttttttttcagtttttatttatatttttgttttttagagacagagtctcgcaatgttgcccaggctggagtgcagtgacacaatcatagctcactgtaacctcgaactcctgggctcaagtgatcctcctgcctcagcctatctagtagctgggactacaggcacatkccatcctgttgggctaattgtttaaagcttttttagagatgggggtctcactatgttgcccatgctggacctggcctcaagtgatcctactgcctcaggctcccaaggtcctgctgtttgccactgcacccagcctgtattagtttcttcttgctgctatgacaagctaccataaatttagtggcttaaa

SEQ ID NO: 145573 - DNA, 575 bp, Homo sapiens
agcaggacacaagcatggtgaggaaggggaaggacccaagacttgagggcagggcccccaaaagctgattaacccacctcccagaatagtaacactggctgcttacagtgtgcctactaggtgctggacatctggcagacagcttcttcgttaacctccacggtgggacagccatggctgacrtgtattaacacgctgactatggatgacattgtccctgcatctcactcagcgcctgccgaaagtgttcccagttttccaggtgagaaaaccaaggtgcagagaggtgaattcacatacccatgatcacacagctcaggggctgggattcacaggtgggcaccaaaggccagagagaggcaggtctcctcgctctgccagccaggtctgagaaccaagagtcccactgagggaggccgccagaccctctccacttccccaaatccaccacctgccaaggcagcgccactggaatctctgctgctgctgctgttgctgctgctgctcaccccacaattgatgagggtctcaggatgaaagcagagaaggaggcggagggcaggggggaattcacc

SEQ ID NO: 145574 - DNA, 440 bp, Homo sapiens
cccagaaataagtttccccagaaaggccrctggagataggagaggagaggctgtcttttatacttcagctcctggagacctagtccagggtcctagaagagaggtttccctcctaaaggaagacagaaggggcagcctggccgtgttaagccgttcttacattgctataaaggaatatatgagactgggtaatttgtaagggggtaaagcaaagacatttcaaagaaggaaggatggtagggaggtacaagctgatcaggcccaagagacccttccaacatctccatgccatgggctctgtttgggatgaatgacatcacggatcctgttctttgcaaacagaaaagacgttttttgggattccctgtgagcggctggggtgacatgaagcacactctagggcaagccccaaagcccagcacttggggactctttgggca

SEQ ID NO: 145575 - DNA, 440 bp, Homo sapiens
cccagaaataagtttccccagaaaggccactggagataggagaggagaggctgtcttttatacttcagctcctggagacctagtccagggtcctagaagagaggtttccctcctaaaggaagacagaaggggcagcctggcygtgttaagccgttcttacattgctataaaggaatatatgagactgggtaatttgtaagggggtaaagcaaagacatttcaaagaaggaaggatggtagggaggtacaagctgatcaggcccaagagacccttccaacatctccatgccatgggctctgtttgggatgaatgacatcacggatcctgttctttgcaaacagaaaagacgttttttgggattccctgtgagcggctggggtgacatgaagcacactctagggcaagccccaaagcccagcacttggggactctttgggca

SEQ ID NO: 145576 - DNA, 443 bp, Homo sapiens
agtgaaaggagaatacatggggactggatttaatgctgcktctggccagcttttatatggctgagcatttgtcatccacttctgagattgcttatgaaagaccccgttcaatatccgggtttcagcaaccctggggttaactgtcagtctctttgagccacttgctctcaggactcacccatgggaattctgcatatgcacaggggctaagattcaagtcaaaccatgcaagacctctctaccaactaggcagaactctgtggctatgtgttctcatgagatgcagttgcctaattaagcttaaaataaatgttcaatgaccagtccctggggcactaagaagacagccttgacctctgaaaggggccagcaggtggaagcagaagggtctgagcccagatcccagctctggcacctacctactagttgggtggccaggaaca

SEQ ID NO: 145577 - DNA, 453 bp, Homo sapiens
gctggggaggagtgaaaggagaatacatggggactggatttaatgctgcttctggccagcttttatatggctgagcatttgtcatccacttctgagattgcttatgaaagacmccgttcaatatccgggtttcagcaaccctggggttaactgtcagtctctttgagccacttgctctcaggactcacccatgggaattctgcatatgcacaggggctaagattcaagtcaaaccatgcaagacctctctaccaactaggcagaactctgtggctatgtgttctcatgagatgcagttgcctaattaagcttaaaataaatgttcaatgaccagtccctggggcactaagaagacagccttgacctctgaaaggggccagcaggtggaagcagaagggtctgagcccagatcccagctctggcacctacctactagttgggtggccaggaaca

SEQ ID NO: 145578 - DNA, 351 bp, Homo sapiens
atttgtcatccacttctgagattgcttatgaaagaccccrttcaatatccgggtttcagcaaccctggggttaactgtcagtctctttgagccacttgctctcaggactcacccatgggaattctgcatatgcacaggggctaagattcaagtcaaaccatgcaagacctctctaccaactaggcagaactctgtggctatgtgttctcatgagatgcagttgcctaattaagcttaaaataaatgttcaatgaccagtccctggggcactaagaagacagccttgacctctgaaaggggccagcaggtggaagcagaagggtctgagcccagatcccagctctggcacct

SEQ ID NO: 145579 - DNA, 544 bp, Homo sapiens
agcacttcaagtcacctgctcgtttaattctcacgacagccttctgaaggggatgtgctatcaccccattttacagatgaggaaacagctcccaccattcttctgtgaagacaccagctttgggatcttcccttaggaatggctccctgtgccatggacccactcccacctgagctgtgaccttggtcagcacccccagccctgctgcccctggctggggccagcctggacttgagtggggatgtctggggctcccaggtggttttgtccctgcaggtggcctctggccagccctctggccctttcacttgcaggcaaaggtttttgctgtttgcttcttgttcctctggtgaaggaccctgcttttccttccaagttttctatttcttctgcttgcggctcagcagaaaagagaataaaacttcagagtaacataaaagcttgctggtttggtggtgtgctgcaggtgtcctgcacaggtgtgtgacctcacyttgacagctggaaatgagccccaggggaccgtttacacctgggaatcggc

SEQ ID NO: 145580 - DNA, 610 bp, Homo sapiens
gccagtgagtggcagagcctcctcccgtcccaaaactctgcctctggccacccccaagcactgcccctctgatggcatcagggacgcgataaagaaacctcaggcagggccggccgagagcccttctcccaggcttgcctccagctgtgcaggaagcccacctgcccaagactcacctgcggcatttggcgaaaagcagtcctgggctcccaccctccccggcctacttgaacaggatctcgaggggtggacccaggactctgcccaagactgttgagtccctccctccccggtctttgaggtggcaaggcttccccttttgcctccactcccctgttcctgccacagcagcctcctaggactgtgttgctcttttcctttgagttggtctggctctgcaggggtcacccaggccccaggctctcagtgggtggggatctgatgtagcactgacatgtttcatccacttgactggcaggtcaaggacagcctggaggtgggcaagtcatcaggaccccagaccaggaacgatggaggctccaaagtccaccagtagrgggaagaaaatagccgctgtccccaggcagagccaccagtcacacagggacga

SEQ ID NO: 145581 - DNA, 619 bp, Homo sapiens
gttgtccttggtgttattcctataagaggcagtatgaaacaagttgtaaagcaccagctgtgttctgccctggattcaaattcttattccactacttcctatctgtctggctttgagaaaggtactgcttgaaattttagcttccttacatgtaaaacagggacaatattacctacttctcacagttacgatgagaattgagatacaatgggattttgctcacagcaagtgctcaataatttgcctagaataatattatcactctatgtctaagcttcctcgtcccactaacacttagtttcctcatttatctgatgggaatcatgaacagcatggaggaatcattttgtgttgggcttaagttctaatctaaattcattaggtgaaagccaaatatgaacatagttatccttgaaaactgctttatgtacctataaatggtgaccatatgtcccaatctgactgrcacagtccaactctatgtctttcatccatgcacagttattgaaagtatcctcttactgtcaaaagtgcctcagtttggatgagaaaccatgtggtcacccacctatgaagaacctctcccatcaagtccagtgtagattttccctcccgtgct

SEQ ID NO: 145582 - DNA, 275 bp, Homo sapiens
ttttgtgttgggcttaagttctaatctaaattcattaggtgaaagccaaatatgaacatagttatccttgaaaactgctttatgtacctataaatggtgaccatatgtcccaatctgactgacacagtccaactcyatgtctttcatccatgcacagttattgaaagtatcctcttactgtcaaaagtgcctcagtttggatgagaaaccatgtggtcacccacctatgaagaacctctcccatcaagtccagtgtagattttccctcccgtgct

SEQ ID NO: 145583 - DNA, 609 bp, Homo sapiens
atgatctgtccaggtactctgattttgaagacagctctccctggaaatcctctggacaagagaactcatattttcacaccctataacctttccattgcaaaaggcaaaccttccctcccaatatcagctcttccccacaccctttcttctccatgcccttgaaactagcagctccagaatttcacagtcagcccagccttcgtgctggtttcaatggctgctgctcttcttaaaacctataatattggcacgccacaatggactcaataaacaagaacagtctgaaaggaatagatgagacagggactcaatattttcccctagatggttctaaaataccctccacaccaygtgtgtctttttgttcatagatgtgtgtgtatgtgtgtgcctaaatagccaaatctcacctgtctcagaacatttattttttctattatatcctgcaagttgtaacaccaagatgaagagggagatataaaaggagctgcttttttggagctgatatacttttggccaaagcttatagattcttagtcatgtataaatctcattccaatgtagggctttcatgactataaacacttttctgcctttcttttcattcaa

SEQ ID NO: 145584 - DNA, 620 bp, Homo sapiens
tacaacagctagtaatcagctagctttaatatctttttcctcattagctgtatttttaccattgtattttattcatgtgatactgttttttcacttacggtactactttgtaaattaaatttattttggtaaaaagcagtactgttttacaaatagatacgaagttgacaacagtatagagatgctacgttgctacagccagwtatgtagtgatactcagatattataaaattcacaaaggttttgggggagggaggaatgtccacagtccaagcttaactggagtatttccagcccagacatttccagaccttatgattctttgcactcacagctatttgtttagaaagacttagatatcatgagccttggggttatatatctataactcagcatttcacaaagaactgagaacagacaattcataagcttcagaggtttcagcaaagcactgcaatgcttgtgtgttttaggtgagttttccagtcagtgctattttaacaaataccaggaactctatttggactggctcctatatcttcaacaacctactgggcattgtcacctgtatatcttgctgttacctcaaatttagcaggtggagaaacaaattcatcatt

SEQ ID NO: 145585 - DNA, 620 bp, Homo sapiens
tacaacagctagtaatcagctagctttaatatctttttcctcattagctgtatttttaccattgtattttattcatgtgatactgttttttcacttacggtactactttgtaaattaaatttattttggtaaaaagcagtactgttttacaaatagatacgaagttgacaacagtatagagatgctacgttgctacagccagttatgtagtgatactcagatattataaaattcacaaaggttttgggggagggaggaatgtccacagtccaagctkaactggagtatttccagcccagacatttccagaccttatgattctttgcactcacagctatttgtttagaaagacttagatatcatgagccttggggttatatatctataactcagcatttcacaaagaactgagaacagacaattcataagcttcagaggtttcagcaaagcactgcaatgcttgtgtgttttaggtgagttttccagtcagtgctattttaacaaataccaggaactctatttggactggctcctatatcttcaacaacctactgggcattgtcacctgtatatcttgctgttacctcaaatttagcaggtggagaaacaaattcatcatt

SEQ ID NO: 145586 - DNA, 229 bp, Homo sapiens
gtaagaagctctttgacaaccagaggacatggatttcctgttttcctgaagayggttttcctatcacaatatatgaagcatattcaatcaaactcctctcaacaaatccttattctttataccagtgatgaccatgaattattgcactttcttaaaaatggctttcaaacttaggaatatttgctataaaacaaagaattagggtttagagtaaaatgctaaaatatct

SEQ ID NO: 145587 - DNA, 548 bp, Homo sapiens
gtagaaatttaatgccacaaaatgaatcactggtaacttccataaagtttacagtatcttactgaagttctgagaagcccaaaacaaaaaagatcaatgatttctgaattatctgtgaaggctttatgtacacccttatttttccagattttatttaagctgctagtctttcctaaccaagttgctgaggtccttatggaaggccactgcctctcctacaagattatactagtaggtggagatccctttctccaagtagtccgtctgcctgaatcactttcacttcttacaaataaatggaaaccttcatcccccaagaaatttgcacgattaaggttttgaggagccatgtcttatggaaagaacctactttgggaatccatttatcgatcgctatattgatcagctccaaagcagccatacaaagctagcccctcgatatttcagtttctaatcttaggaaaggagttcttcctgaattcttcacgtaacaccatggtggatamtaaaatgaaccacccagacctcccaccctcttcagggaaggg

SEQ ID NO: 145588 - DNA, 508 bp, Homo sapiens
tcactacaagttcaagtgcagattccagtcaagagtgaacgtgtgtccttatttttcaatctgacagtgctatttgtgggaattgaacytcaacatccttggggaactttatgctctttcatcctaaactagggcacatctatacttctctgatacaaacctgttatgtattaaatagagagtaataattatatctaccatattgtgagctgaacacctcatatgcaccttgtaatcccttgaaaaaaaaaaagaagaggaagatagagtgacttaactaatgaacagggctaggaactccagagtccatagttgcaaccaaaatattacatgcagaacaccattataaaataaactaaataaaacttccccaaaagtaaccactgttctgtctcttctgtacccttccacagaagaaaagtaataagaacaaaaataagagccaacatttagagtgtatatgatggtgtactaccacgctaaaggctattattcctacttgcaaaat

SEQ ID NO: 145589 - DNA, 562 bp, Homo sapiens
aaaccaggtagtaggtagaatgtattttgcaaattgttaaatgttacaggagaaaaggggtcagtgctgtcatttctgcttgtatttgtatgcagcattttttggaatccctaggacttgagaatttgctcaggtattaaaacataaagttaaattcaaaccacttttgttgttaacttcatttattcatgtgcatagatcaattaaaattaaatgcttccataatatttgaacattatcctgtaaataattgttacatttggagttctaaaagaaaggaataatgcctttcaattatgttcaggcccrcgtaatctcttcaggttcttggtgctgggttgaaaggccatggaaagtgaaaagaaaattaacactaacatttatcaactgtttactccatgctggacattgtgaggggtgctcccaatgatgatcttatttagaacagacgcccccaaggattaattttgatctcccttttgcttatgagagcactgaggcttaactaatttgcccaattcagtggtagggctgggattcatgtagagggagccaggtgagg

SEQ ID NO: 145590 - DNA, 562 bp, Homo sapiens
aaaccaggtagtaggtagaatgtattttgcaaattgttaaatgttacaggagaaaaggggtcagtgctgtcatttctgcttgtatttgtatgcagcattttttggaatccctaggacttgagaatttgctcaggtattaaaacataaagttaaattcaaaccacttttgttgttaacttcatttattcatgtgcatagatcaattaaaattaaatgcttccataatatttgaacattatcctgtaaataattgttacatttggagttctaaaagaaaggaataatgcctttcaattatgttcaggcccgygtaatctcttcaggttcttggtgctgggttgaaaggccatggaaagtgaaaagaaaattaacactaacatttatcaactgtttactccatgctggacattgtgaggggtgctcccaatgatgatcttatttagaacagacgcccccaaggattaattttgatctcccttttgcttatgagagcactgaggcttaactaatttgcccaattcagtggtagggctgggattcatgtagagggagccaggtgagg

SEQ ID NO: 145591 - DNA, 330 bp, Homo sapiens
ttttcaggtcaggtgcagtggctgatgcctgtaatcccagcactttgggaggctgagctgggaggattgcttgagcccaggagttcaaaacaggcctggacaacatagtgagccctgtttctaaacaaattttaaaaaattagctaggcacagtggtgtgtagtgtagtgatwtcttcctagctaaggccgaggcaggaagatcacttgatcccaggagttcaaggctgcagtgacctatgattgtgctactgcactccagcctgagcagcagaacaagactgtgtctcaaaaaaaaaaaaaaaaaaagttaaaaaaaattacaagtttg

SEQ ID NO: 145592 - DNA, 550 bp, Homo sapiens
caggcaggttattgatgggcctgaaaggaagccaggcttagaaatggttgtggttggagcatgctgtacacccacaccatgcacacattttaagcatggagagagtgccatcataaaatgtgtggataatatctttccatagtgaactgagcactcagaaaaccttgataacactaaccatgtgactttcagtgaggggtccttcaggctctgcgatcagaagtgcatggtctattactttccagctgggtggccatacatacatcattaatcttgaagcttcactttccacatctgcgaaatggggacagtaacagcatctacctcagggatgaaatggcattaaaatgagaggatttatgcactgcaccttgctcctaagtgaggctcatgcattgcacacaygttcactgggcatcaagcatattctctgcactgtgccattgattctgttcactgctaaagcacatagagactgtcccaaccctcctggagcttcctcttgtgaaggaagacaaacattaatactacatgtacagtatttgtgtgt

SEQ ID NO: 145593 - DNA, 501 bp, Homo sapiens
atttatgcactgcaccttgctcctaagtgaggctcatgcattgcacacatgttcactgggcatcaagcatattctctgcactgtgccattgattctgttcactgctaaagcacatagagactgtcccaaccctcctggagcttcctcttgtgaaggaagacaaacattaatactacatgtacagtatttgtgtgtcctggagattaaaaactcaaatgytctgaagaaaagcaatcgttttctggcagactgcatagttgaatctagccagagcagtcagggaaggtttcccggaggaggtgacactgagctgggagctgaaggaagagcacaaattttgagtgcagagacaggggaaagcaagggaaagagttcttcctgcaggtatcacagtcaactcatgctgctattgcctaggactttcctggttttagcactgaaagtcacacagtgtgagaagcccctcagtgcctcgggcacacgggggtggttggtcatcgg

SEQ ID NO: 145594 - DNA, 501 bp, Homo sapiens
atttatgcactgcaccttgctcctaagtgaggctcatgcattgcacacatgttcactgggcatcaagcatattctctgcactgtgccattgattctgttcactgctaaagcacatagagactgtcccaaccctcctggagcttcctcttgtgaaggaagacaaacattaatactacatgtacagtatttgtgtgtcctggagattaaaaactcaaatgttctgaagaaaagcaatcgttttctggcagactgcatagttgaatctagccagagcagtcagggaaggtttcccggaggaggtgacactgagctgggagctgaaggaagagcacaaattttgagtgcagagacaggggaaagcaagggaaagagttcttcctgcaggtatcacrgtcaactcatgctgctattgcctaggactttcctggttttagcactgaaagtcacacagtgtgagaagcccctcagtgcctcgggcacacgggggtggttggtcatcgg

SEQ ID NO: 145595 - DNA, 442 bp, Homo sapiens
tttaatttttccttttgtaaatcccagctcttcttttttcctaaagacacagctggtcaaattgggtttcaaagaaaatttatttcarttagtttgtacctatcttcacatgcatgtgtttctggatacatgtgtgtgtctgggtatatgaccatctctctgcatgtgtacctatatccatgtgtatggaagaacacatatgttgtagactgtatttgcctgaggttccactgcagatgctgtttctgagcatgcattggttggaatatgtttatgtgtatgtgcaaatatctacatctaagtgagactgtggatacaatacaactaatgaaatcaaacacagactacttgtggcttaacacggttcttccgactgcactttcttgttgactgtcaccttcttgcatagctccactaacatagggtaaaaactaatgaattc

SEQ ID NO: 145596 - DNA, 445 bp, Homo sapiens
tttaatttttccttttgtaaatcccagctcttcttttttcctaaagacacagctggtcaaattgggtttcaaagaaaatttatttcagttagtttgtacctatcttcacatgcatgtgtttctggatacatgtgtgtgtctgggtatatgaccatctctcygcatgtgtacctatatccatgtgtatggaagaacacatatgttgtagactgtatttgcctgaggttccactgcagatgctgtttctgagcatgcattggttggaatatgtttatgtgtatgtgcaaatatctacatctaagtgagactgtggatacaatacaactaatgaaatcaaacacagactacttgtggcttaacacggttcttccgactgcactttcttgttgactgtcaccttcttgcatagctccactaacatagggtaaaaactaatgaattccaa

SEQ ID NO: 145597 - DNA, 442 bp, Homo sapiens
tttaatttttccttttgtaaatcccagctcttcttttttcctaaagacacagctggtcaaattgggtttcaaagaaaatttatttcagttagtttgtacctatcttcacatgcatgtgtttctggatacatgtgtgtgtctgggtatatgaccatctctctgcatgtgtacctatatccatgtgtatggaagaacacatatgttgtagactgtatttgcctgaggttccactgcagatgctgtttctgagcatgcattggttggaatatgtttatgtgtatgtgcaaatatctacatctaagtgagactgtggatacaatacaactaatgaaatcaaacacagactacttgtggcttaacacggttcttcygactgcactttcttgttgactgtcaccttcttgcatagctccactaacatagggtaaaaactaatgaattc

SEQ ID NO: 145598 - DNA, 581 bp, Homo sapiens
ctccaagaacccaacagtgcagggggtagcaccccccaggcacagctgagaagcctgtcgctagatacaggccagagtggggatttaaacacagactaatggcatgcttagctccacgcttttcctttcaggcaggtaaagcatcatgctgcggcactggggttgccagtagccacttccatcaattatgtgtgaccttgggcaaccaactcgtctctttggggctcagtttccatggctataaaccatcacctacagcatatggtgttgagaggattgaaggagctagagctgagcctggctcagagctggcactcagtttgtgccacctgtggagcttgtattcatctcargaaaagccatgcctcaggagaacggaagaaaacatgccgttcccagcccacattggtggtagtggagagggcactgggcttggagttcagagacctgaatgggagcccaggtcaacaccttcctagggctgtgatcttggatgagtcactagactcctccaaacctcagtgtcctcatctctgcagtgaagataatggctgggaataataccggtattcctaaagctt

SEQ ID NO: 145599 - DNA, 581 bp, Homo sapiens
ctccaagaacccaacagtgcagggggtagcaccccccaggcacagctgagaagcctgtcgctagatacaggccagagtggggatttaaacacagactaatggcatgcttagctccacgcttttcctttcaggcaggtaaagcatcatgctgcggcactggggttgccagtagccacttccatcaattatgtgtgaccttgggcaaccaactcgtctctttggggctcagtttccatggctataaaccatcacctacagcatatggtgttgagaggattgaaggagctagagctgagcctggctcagagctggcactcagtttgtgccacctgtggagcttgtattcatctcaggaaaagccatgcctcaggagaacrgaagaaaacatgccgttcccagcccacattggtggtagtggagagggcactgggcttggagttcagagacctgaatgggagcccaggtcaacaccttcctagggctgtgatcttggatgagtcactagactcctccaaacctcagtgtcctcatctctgcagtgaagataatggctgggaataataccggtattcctaaagctt

SEQ ID NO: 145600 - DNA, 643 bp, Homo sapiens
taaagccagtatcgtcagccacctagccttcctctgctaagcctcgtcttgtgtgggctcactcatacccagggacacagatcattgtagtgcagcaagacaggggtcctgtgtctctctgagggactggagatcagagcagcactgttttgcagkcacttgctgttttatttacaaagtactcctatgatcttcacattatctccgtgcctgctagaaacatgtaaagctggccatgtagatatttttgccatttaacaggttgggaaattgtgtttactactgcaaggcacacagcttactggacctgggtggcagtgccagtgttgtgagaacacactgctccctgcccagttttgtgataaatgcagggaccctcgaggcacttaacataaactcattggtgtgttcagacccatcagtgctggaccctatagtctgcaggactttcactgctggggtgaagctagacacaggaaggcatattccatatgtaccctcaggattcctctatagcaaagagtctggaagtgtgagggtgaagccctcccccaacctgcctggatttgctagagcgttctatttgctcatcctcatggccaacagatgtttgtggagggagatgtcagcaagcagggggctg

SEQ ID NO: 145601 - DNA, 565 bp, Homo sapiens
tcatgagactttcatatcagataaagaaaccaagacacagaggagtaagtgacatcaccaggttacagcagtaacagatgtggaaccttacccaagatccaggctctccagcaggggggtggcattgaaggggtagccctgactggactggaagctccttgagggcaggggccctgtcctatctattgctggagcagcggccatgacagtgcctgacacatagaggtatatgctgactgagataatgagtgaatgaaggaggacgtggtcccttccaggttcagtgactcagttaagccagtgactcagtgcctctggtgggggcagagatgagagtgaagggaagtctgtgttgtctgttgaatccactccaggctgcattgtcactgatgctagtggccatctgcccatcctcctactgactccatgtaccaggcagcattggtcccttcacggcactgattaggagcaagcctrctgtttgtaaggtaggtttgcttccacctttagaggcttgagagaaggaagtttgcattctccttctgtataatatgagctgtgttac

SEQ ID NO: 145602 - DNA, 562 bp, Homo sapiens
ctgccaagccgtgactcagaatggcactgataaccacacagccttcayctcccctgctgcatcccctcatcccccctatgaccacgtgcttctcaccacttccgaagttcggtgtcatctctgagcctggcttggctcacagacagcaagttctgcaagaacactctcgcctccttccaggcagcctgacccaggcccatgaagctgttgagtgtaggctaagaccaaaacagggagaaaaaagatcacgtacaggaaaacccagggagtatccctccttccaatggaaggccagccagcctgccagcccttgccacttctctcccgctaactcaaactctcaggacctctgctcttagttttgtcatttattcatcaacctggagaaaagcatatcctctcttgacgttgcctcaggccctcgtgcacctgcacacaattgtccaagcccaggagttgctacctggcacagcaactgtgctaagcttggcccggcccacagttgaaggtggccatgttcttccagtagaggcacactccagtctgcagagtgatcacagcc

SEQ ID NO: 145603 - DNA, 562 bp, Homo sapiens
ctgccaagccgtgactcagaatggcactgataaccacacagccttcacctcccctgctgcatcccctcatcccccctatgaccacgtgcttctcaccacttccgaagttcggtgtcatctctgagcctggcttggctcacagacagcaagttctgcaagaacactctcgcctccttccaggcagcctgacccaggcccatgaagctgttgagtgtaggctaagaccaaaacagggagaaaraagatcacgtacaggaaaacccagggagtatccctccttccaatggaaggccagccagcctgccagcccttgccacttctctcccgctaactcaaactctcaggacctctgctcttagttttgtcatttattcatcaacctggagaaaagcatatcctctcttgacgttgcctcaggccctcgtgcacctgcacacaattgtccaagcccaggagttgctacctggcacagcaactgtgctaagcttggcccggcccacagttgaaggtggccatgttcttccagtagaggcacactccagtctgcagagtgatcacagcc

SEQ ID NO: 145604 - DNA, 615 bp, Homo sapiens
acaagaaaagtaaccagagttcctgaagagcttcatctcatagacaactaggaacgacccaggactgcagacactgacacttttttcacctaggaactcgccctgaggtgagaagccaccctgaattgtcccaaggccacctcctaccagtttgtctgtctcaaaacaaccccagccttatccaagtataacctctgagaccttcgatggcattacctctatcggaaatggaacgcaaggagcattctcttgttggcatccacagtaagtgccactgaggtcagggacaagtcgtttcacaatgtcctacctgattgaagacatcctggtgtttggagaggacaggaccagtaaagaggtgcttgatgatgctgaggtccaggatctggtcgccaatggccacacctatcctcggtcttggctaggaggaagaygacaccgtcagcaccagaaaaagcccctggctgggcttggctcatttactcagaaagcctatctattgaagagtccacaggtccccctttaggtggccctgtatgcagagcggactgaagaaccatgttctcagcatcctgccccagctcccttgtgccatctctgcttccagaactaaaa

SEQ ID NO: 145605 - DNA, 615 bp, Homo sapiens
acaagaaaagtaaccagagttcctgaagagcttcatctcatagacaactaggaacgacccaggactgcagacactgacacttttttcacctaggaactcgccctgaggtgagaagccaccctgaattgtcccaaggccacctcctaccagtttgtctgtctcaaaacaaccccagccttatccaagtataacctctgagaccttcgatggcattacctctatcggaaatggaacgcaaggagcattctcttgttggcatccacagtaagtgccactgaggtcagggacaagtcgtttcacaatgtcctacctgattgaagacatcctggtgtttggagaggacaggaccagtaaagaggtgcttgatgatgctgaggtccaggatctggtcgccaatggccacacctatcctcggtcttggctaggaggaagacgacaccgtcagcaccagaaaaagcccctggctgggcttggctcatttactcagaaagcctrtctattgaagagtccacaggtccccctttaggtggccctgtatgcagagcggactgaagaaccatgttctcagcatcctgccccagctcccttgtgccatctctgcttccagaactaaaa

SEQ ID NO: 145606 - DNA, 561 bp, Homo sapiens
acttctttctaccaatcagactacactgacttagtcaaagtttgtttccctgccctctttcttctgatcagtaggggaatgccagggagcccacaccaggagctgaaagaatttcagctataggcagagacacttgccatcttagatctcacaactctaagccaagaaacgcgcgtgcccctctgacctgctacgcataccgggttatcatttcccgggttctagggttaggggctatccagcgagatgaaccaccagccctgacctggcctcttgggcgagagaaacacaccgcaaccaccwcggagtaggcagcatgcctgtgtgctgcagcttccggtaacagaatcctgcttgctctgcttgtctgggagagtgacacgattcatttcattttgcatttaattctcagcaaacctgcggacaatgaggctgaaaagttaaacaacgtgcacagctagaaagttacgaggcgggactcgagcccataggcactctcacggaacgaatcttaagagaaaaatggcacaagcctccatcccgcccctcattccactccat

SEQ ID NO: 145607 - DNA, 498 bp, Homo sapiens
tgtaagaaaaaatgcagcagaaatgagggtaggaagtatgcaattgatatttacatgaagaaaatgataktgacaggaagaaatgaagaatgtgtgagaacattttaggcagatggaaggtaagagccaaggccctgaagcaggaatatgcgtggcatgtttgagaaatagagtagattagtctagctggctggagagaaggggtaggggtggagggtagcaatcaatgaggtttggtgacagtgataagatcatgtagggttttatgggtcactgtaaggacctttagtctgagttgaggagagttttagatagataagtgacatgcattttaacaggaccactgtggctgctgtgttcagaatagaatgattaatcttaatcagggaagaactagggagaccagttagataagaaagtctagtgtttgagccagggtggtattagtgaaagtggagaggaatggttgggttctttacgtattttcaaggtaaagct

SEQ ID NO: 145608 - DNA, 498 bp, Homo sapiens
tgtaagaaaaaatgcagcagaaatgagggtaggaagtatgcaattgatatttacatgaagaaaatgatagtgacaggaagaaatgaagaatgtgtgagaacattttaggcagatggaaggtaagagccaaggccctgaagcaggaatatgcgtggcatgtttgagaaatagagtagattagtctagctggcyggagagaaggggtaggggtggagggtagcaatcaatgaggtttggtgacagtgataagatcatgtagggttttatgggtcactgtaaggacctttagtctgagttgaggagagttttagatagataagtgacatgcattttaacaggaccactgtggctgctgtgttcagaatagaatgattaatcttaatcagggaagaactagggagaccagttagataagaaagtctagtgtttgagccagggtggtattagtgaaagtggagaggaatggttgggttctttacgtattttcaaggtaaagct

SEQ ID NO: 145609 - DNA, 632 bp, Homo sapiens
gaaatatttactaaaatagatcatattctgtactacaaagcagacatcagtaaagttaaaatacttgaaattataaaatgcatattctctgaccacagagaaataaaacaagaaatcaataacagaaaggtatatgaaaaatccccaaatatttggatcttaataacacacttctaaataactgatgggttaaagaagaaagcacaagataaattattttgaaatgagtcaaaatgaaaacacatcaaagtttgtgggataaagtaagacagtccttggaagggcaatttataatatttagtgcttatcttagaaaagaaaaatcttaaatcaatgatctcaacttctaccttatgaaagtagaagaaaagccagtgaaatctaaaataagctaaataaagataagaacagaaattaatgaaatagaaaacagagaaacaataaagaaatattaatgtaaccaaaatccacctctttgaaaagactaataattgayaaaactctagacagattgaccagaaaaagagggactcatagatatcattcagatatttaaagaaatattgtgaactttatgccaattaactcaacaattgggtaaaatagatttattgaatgacactgattaccaa

SEQ ID NO: 145610 - DNA, 647 bp, Homo sapiens
tgtgtactgttttctcattgtctatttcttccaataaaagttttccttgaagctatcctccaccattttatatttactgggttatcatagaaaggaaaacaggcttagctgttgcaacgaagagacctaaaactacagtggctcaaagaagacagaaagaaatttatttcttaagtgctagagcggcactgtctaatagaaatataaggcaagtctcatttgtaatttraaattctctagtagccacactggaaaaaataagcagtgaaattaatttttgataatatatttcttttaactaatatatccaaaatattttcatttcagcatgtaattgatataaaatactattgatatattttgcattcttttttgggagggactaaattatagcccatgtcaattcagactagtcccatttcgggagctcaaacgccacatgtagctggtggctaccatattgggcagtgcagagtagagatcagagagagtccctaaacagttctttccagggttagccaggaactcacaatgcttcgatttcattattccactttccttagagcaggatttctcaagctcagcaatattgacttttgaggcctgataaagctgtgctgttgggactatctagtgcatagtaggat

SEQ ID NO: 145611 - DNA, 533 bp, Homo sapiens
ttattcccagcaggcagtttgatcttctctggaactcaaaccactgaatttcccaagacactagagagaaataatcacaactttctgatgtacaaatcattctggcaataaattttccaaagagcaaaggatccaggattcttttttgctgaagcaaatctaagtgatgacacagagaagcaccaggacatttgtgtgtctgtcatggaagaggattacgtttctacatcttcyggttcaaggttttcaggtgcaatcattgctctcagtttgactatttcgtctccacatacagggggctattcagagactcctttggcatctggcaacatgggtttcatgaccacaaagtaaaaacgaaataatgcacataccaaaacataaacacattgtaaagtgcactcagcctcagattccaaactcagcgaccctgcatgatttaacaaagggggaagccagactcctgtcccgcggggggagaaacaaggcctccaaactgacagctactatcattccaaaacaagtcattgttt

SEQ ID NO: 145612 - DNA, 491 bp, Homo sapiens
gaattcaaaagtgagtccacaaaagacttaagcttcaataatggcttcaataaaatctgagctgaagtgagcatgattattttatatgacattgaaaaaactcaatgtcaaatatggctgctgtttttaggcttaaaacagaaaagaagctcatgtgtggagatagatgtgtagccactcacagtctagagcaagaggaatgttgacactaaagttctggcagttttaaatygtttctgatgatggagatttcagtggcattttctcaaaatataacagtaggctaaaatattcatttccacaccaactgaatgactactatgtgtaggcaaagcattatgaaggaagaaagatcaaaaagtacttctcttttctccataagcttatggtttggtgcaatgatttctggatttttaaaattgtacacccacatttaattatacacccatgagctagagtatgacctaatcctaaaaaataaattcaaaatg

SEQ ID NO: 145613 - DNA, 565 bp, Homo sapiens
acagctcagtctcttgaaattatgackcttatcataggagagtacatttgggttacattttttttttaatcaaagaaaactcatcaaggccagagcaatcctacaaatggattgctcaagctgaaaaactcttcatcttgactatttatggagaaatttctactaaagatttactcaaaccaggggagaacatattttcatttcaagtctttaaacattgattaagcccctatcatgtacatagcactaggctgggccctgtggaaggcacacaaactaatgagctatgattcctgagatttcacaatttagaagggaaaatgaatgggcaagtgcctaattagccttaggtaggacgagaacaaatgcaatcagccttaataatagacatatcaccatataacatgagaagagagagggggcacagactatttctgactaaggggatctgagacgttttcttggaggaggtaaaatctatttcaaggggtaagaagatattccacatggagaaaagactttgagcaaatgttcagtggaaacgtgaactaggcttagggaattc

SEQ ID NO: 145614 - DNA, 560 bp, Homo sapiens
tttatttttgggcatacgagcatgagaaccctctcttcatagccttctccagctatatatgttagggttttttgtttgtgtgttggttttttaacatgactgactccattctgattctgacaactttcacacctacaatacctcaataaagggtaattctcacctcttcctgtattctccttactccaggttatctgacattttgccaatcagttctctttcaattggtgctttcacatataaccaaaataataactgaagactatgatgataacactgagattcttcgcagtcactgtgtcattacagataaaactgtgttttcagcatagtatcaatgttaggtgtaaytgattatggtctgcattaaaaaaaaaactcattatccatggacattgacttagttgaaacaaaatagttaaccaaaaccatatcttccagattattaagcataaaggaaaattctagcaagggtttttacctggaacaccaacttgaattcagaagtgcctttgtcaagcagtagatttgaacaaatgttctctacatctccttcctat

SEQ ID NO: 145615 - DNA, 475 bp, Homo sapiens
acatttaaatcagttggaccttgagcaaaatagattgccctccataatgtgggtgggcctcatccagtcagttaaaggccttaatagaaaaaagactgaccttccctttggattctaactgcaactcttccctggatctgcagtctaccctacagatttcagacttgcctatccccacaattacatgacactccaattccttaaaatttcataaaataaattycaattccctaaaataaatctctctctctctctctctcattctttctctctctctctcactctgtctcaggttctgtgaaaaagtctactagttcactttggatttgaggaaggttccaatacacttcctattgcttcagtttctctggggagttctgacgagtacacacggtaaagtttgagaagctcaccctgcaatgtacttggcattaatccatccttttatgtatgacttgtccaaattcacctattt

SEQ ID NO: 145616 - DNA, 475 bp, Homo sapiens
acatttaaatcagttggaccttgagcaaaatagattgccctccataatgtgggtgggcctcatccagtcagttaaaggccttaatagaaaaaagactgaccttccctttggattctaactgcaactcttccctggatctgcagtctaccctacagatttcagacttgcctatccccacaattacatgacactccaattccttaaaatttcataaaataaatttcaattccctaaaataaatctctctctctctctctctcattctttctctctctctctcactctgtctcaggttctgtgaaaaagtctactagttcactttggatttgaggaaggttccaatacacttcctattgcttcagtttctctggggagttctgacgagtacacacggtmaagtttgagaagctcaccctgcaatgtacttggcattaatccatccttttatgtatgacttgtccaaattcacctattt

SEQ ID NO: 145617 - DNA, 521 bp, Homo sapiens
gaattctgttgcccgaggctagcagaaggtgtgcttgtctttgtggacaagtggtgcagcctagtggaaagatggtcgtgcctggccttgattgctagctcagccacccacagttctgtgaacttgaacaaattctgtactctgtctgagcctaacctgtaaaatggaggtttcctgtgtcttgcagagttacaatgaggatatgaaataatagccatccagcatatggcatttgataaatgacagttttcatgactgttattcttattgccaggacactacacagctacctactccaagagtaagagtgtcagagrgtgaggtgagaggagacagaccacaggcattctggaataaccactatggtcaccacctcacctcccttaatgttgacagtttgcatggccctggagatgtttagagagcacttccacagtcaccaccccactcgctttccttttctccctctgcctagaaagtcagggacctctgtgacaaattgcagacacccctggaacaaa

SEQ ID NO: 145618 - DNA, 526 bp, Homo sapiens
aggtgtgcttgtctttgtggacaagtggtgcagcctagtggaaagatggtcgtgcctggccttgattgctagctcagccacccacagttctgtgaacttgaacaaattctgtactctgtctgagcctaacctgtaaaatggaggtttcctgtgtcttgcagagttacaatgaggatatgaaataatagccatccagcatatggcatttgataaatgacagttttcatgactgttattcttattgccaggacactacacagctacctactccaagagtaagagtgtcagagggtgaggtgagaggagacagaccacaggcattctggaataaccactatggtcaccacctcacctccyttaatgttgacagtttgcatggccctggagatgtttagagagcacttccacagtcaccaccccactcgctttccttttctccctctgcctagaaagtcagggacctctgtgacaaattgcagacacccctggaacaaatgcaatgaaagctcagaaccacagggaattc

SEQ ID NO: 145619 - DNA, 522 bp, Homo sapiens
aggtgtgcttgtctttgtggacaagtggtgcagcctagtggaaagatggtcgtgcctggccttgattgctagctcagccacccacagttctgtgaacttgaacaaattctgtactctgtctgagcctaacctgtaaaatggaggtttcctgtgtcttgcagagttacaatgaggatatgaaataatagccatccagcatatggcatttgataaatgacagttttcatgactgttattcttattgccaggacactacacagctacctactccaagagtaagagtgtcagagggtgaggtgagaggagacagaccacaggcattctggaataaccactatggtcaccacctcacctcccttaatgttgacagtttgcatggccctggagatgtttagagagcmcttccacagtcaccaccccactcgctttccttttctccctctgcctagaaagtcagggacctctgtgacaaattgcagacacccctggaacaaatgcaatgaaagctcagaaccacaggga

SEQ ID NO: 145620 - DNA, 557 bp, Homo sapiens
ggaaattggtaaatctaaggaacagaacatttaagcacaatgtgggtgtagcaaacacaaacatttatgtatttacgtgtgcaaattagtataaacatttgatgggcttcgaattattttgaatggcttttccttctctctgatgaaactgaattgtcacagtctccaagccctcatgcttctccaagagctagagyggctcaagccctcctcagtgcatacctactcttatttgaggcatagttctaacgagtttgtttaggtggtttctaaacccacgacgtgtgagaggtgggaaattagatcagggagtagccagttactcattctctgagtctgtttcctctgtaaaatatgaatcataacagaacttaacctaaagggttgttcagaggatcaaatgagataatgtaaggaaagcacttcgcacatttacaaaggttgatgtaggaaacactttgacctagaagaggtcctgacaatcgaatgatcttcacacctcattttgaaaattaggaaaatgagttccagagacgtcaaatgtaaaagccaaacat

SEQ ID NO: 145621 - DNA, 557 bp, Homo sapiens
ggaaattggtaaatctaaggaacagaacatttaagcacaatgtgggtgtagcaaacacaaacatttatgtatttacgtgtgcaaattagtataaacatttgatgggcttcgaattattttgaatggcttttccttctctctgatgaaactgaattgtcacagtctccaagccctcatgcttctccaagagctagagcggctcaagccctcctcagtgcatacctactcttatttgaggcatagttctaacgagtttgtttaggtggtttctaaacccacgacgtgtgagaggtgggaaattagatcagggagtagccagttactcattctcygagtctgtttcctctgtaaaatatgaatcataacagaacttaacctaaagggttgttcagaggatcaaatgagataatgtaaggaaagcacttcgcacatttacaaaggttgatgtaggaaacactttgacctagaagaggtcctgacaatcgaatgatcttcacacctcattttgaaaattaggaaaatgagttccagagacgtcaaatgtaaaagccaaacat

SEQ ID NO: 145622 - DNA, 536 bp, Homo sapiens
tcctgttttacccactcacagcattgatctctgttttgtgattctttggtttaagtctttcttttccacaagacccgtatcagtagagacctcatttatttttgcttgccgctctgttcccaaattttgtacagtgtgcttggcacataaaatgaatgcaacaatgaatgaatgatcaaaatgcgctcgcattctttttttttgcctataataaaactaattttgcacattgtttgtccccrctggctgtgctatgtttagtgtttgtttgtggatgataagctttcctcattgacactgcactatatgacttaagctaagctgtgtgctagtaggtattcacaactgtttctctttggtttgtattcagaataaaagttagaagagcaataggttgctagttagcaaaaatccatttactattgctcatgtttgtgaacatgtccaattaatattatgcattaaaatttcacaataaggatgaccctggagatcagactagtaagaaaaagaacaaagtgaagatagaagaattc

SEQ ID NO: 145623 - DNA, 476 bp, Homo sapiens
tatatctgatatgtgtgttgcaaatattttctcccagcccgtggctagtggagggaggagggtgggtggaagggagtgcgagtataaagaattgttttggttacttggatgaggctaatcaggacatcattgaaatatttttaaaatgttctttacatggaattcccggtgctcagactacrattgtgggtgtcgttttgcctcaaggtccactagtctcaaaggaggaaagtgtccccagggtttgttccttctcctcggatgaccaacagtgtggaacgaatggctgtgagacacttgaagaaatgttgaattcaaaagtgagtccacaaaagacttaagcttcaataatggcttcaataaaatctgagctgaagtgagcatgattattttatatgacattgaaaaaactcaatgtcaaatatggctgctgtttttaggcttaaaacagaaaagaagctcatgtgtggagatag

SEQ ID NO: 145624 - DNA, 476 bp, Homo sapiens
tatatctgatatgtgtgttgcaaatattttctcccagcccgtggctagtggagggaggagggtgggtggaagggagtgcgagtataaagaattgttttggttacttggatgaggctaatcaggacatcattgaaatatttttaaaatgttctttacatggaattcccggtgctcagactacaattgtgggtgtcgttttgcctcaaggtccactagtctcaaaggaggaaagtgtccccwgggtttgttccttctcctcggatgaccaacagtgtggaacgaatggctgtgagacacttgaagaaatgttgaattcaaaagtgagtccacaaaagacttaagcttcaataatggcttcaataaaatctgagctgaagtgagcatgattattttatatgacattgaaaaaactcaatgtcaaatatggctgctgtttttaggcttaaaacagaaaagaagctcatgtgtggagatag

SEQ ID NO: 145625 - DNA, 406 bp, Homo sapiens
tcttggttcttcccaaccaaatctcagccactttatgcctctcagccagcctaaatgcctggacccatctacatcctgtgaagcagcgtcattgcgaactctcctttcattgcttgtgaaggatgctgacactgatcaccaggactatgtcactcaccaggacccagagcagctgatttgtaagtaatcrcaccttctgggagtttgtcattttctagtgttacctcttttttttaattgcctcttaataattacagtgaaaactaccaaaaaaaagtttatcttaactttggcccatatacatatacccttgcattttgtcacttccctaccaaagattggctcccaaacattctctccagcctcactttctgccacaaaagcagagctggctcccagccaggtg

SEQ ID NO: 145626 - DNA, 643 bp, Homo sapiens
ggatcactttaaacagcaaaatgatcaacaaaaagcacaaaaatacaaaaaactgtggcacttaatcgaccatcagaaggacacttgtttatagtataagaaaaggcagagactgccttgttcaacctcagctggaaacacgcgtgtcaggraacacatttttttttttgctgctctgcttgcatgactgtgaatgaccataaaaccacaagtattgattttgggttaaaaataaattttagcaaataggtaaatttgcaaatatggaatccgcaaataatgagtatcgactatacttgtcactcacaaatgtatcaggctcctgtagcagatgaggaattgagacttcaatactggcaggctaatctgagtgcaggcccccattgagactccgagtgcttgggtgactgtgggtaaggtactttacctccatctgagcctcccctttcctcatctataaagtaataatgcccaaactttttcttctttgggttaaataatagcaatttcaataatttcccaccttgtactttacatttctaatcttttttttttcactacagtcttcatagaactatctcacatttctcatatgctagaattaagctaaagatagcaacctagttctaagtggacaaaataa

SEQ ID NO: 145627 - DNA, 643 bp, Homo sapiens
ggatcactttaaacagcaaaatgatcaacaaaaagcacaaaaatacaaaaaactgtggcacttaatcgaccatcagaaggacacttgtttatagtataagaaaaggcagagactgccttgttcaacctcagctggaaacacgcgtgtcaggaaacacatttttttttttgctgctctgcttgcatgactgtgaatgaccataaaaccacaagtattgattttgggttaaaaataaattttagcaaataggtaaatttgcaaatatggaatccgcaaataatgagtatcgactatacttgtcactcacaaatgtatcmggctcctgtagcagatgaggaattgagacttcaatactggcaggctaatctgagtgcaggcccccattgagactccgagtgcttgggtgactgtgggtaaggtactttacctccatctgagcctcccctttcctcatctataaagtaataatgcccaaactttttcttctttgggttaaataatagcaatttcaataatttcccaccttgtactttacatttctaatcttttttttttcactacagtcttcatagaactatctcacatttctcatatgctagaattaagctaaagatagcaacctagttctaagtggacaaaataa

SEQ ID NO: 145628 - DNA, 594 bp, Homo sapiens
tagctttccctacacaggcctcatctctacaactagaccataaactgcttgagggaaagatgtggtcttctatgtctttggatcccttacagtgcttacatagtgcttggtcccaagggagtgctcatagtattcttttttattggcagattctacataacacattgcaaatggtcacaacaatcaagactatakccatagatgtcccagaaataatatctgactatacagagcagcattaccaagccaccaagaagtctgcctagtaatgacaatgataacaacagctaacacttagtaagtgcttgtgatgcatctggcattcttccaggtactttccttaaatgcatgtgacaaccctatgaagttattacaattacagtactcattttacagatgggggaactgaggcacagagcagtggtataggtgctcaagctggtaaatagcagagctgggatttcaactcgggcagtctggttccagagtcagagcagaagcatggcacctgctgtctctctacagacagcaaaggggttggggagaggatgaactaggaacagccagaaatgacagaaagagctactaaagctt

SEQ ID NO: 145629 - DNA, 626 bp, Homo sapiens
ctttttctgtttgtaaggacttttttatgtacaggttctccttctattcttggaatagtcctaaccagtagaaagatcaggtgttatacccactttaaaaatgaagcaactgagtgacaaagagattaagacacattcaaaacaatatggacaagtggaggcaataggactggaactcaggtcttcctgatagctttcccacaattttgccagatgtgttaacattatgtgtgctaacaataagactcaactcagtgacattccaattaaacttactggagatgtctttttataagcttatgacagggacattgtagaagtctggagttagctcttttttaaaaaagattgccacagagattgctcatgagttcaactctggggttgaaagtgataaacaagcartgctcaaatacctttttgtaatctcctattattttgaaggaaggagtaaaaatatatataacttctttaattgtaatttaacaccaaaatatttcttctatcctgtaatttcttatcattcaaaattctaaggagttgaattttaagacataagtggagacatacaaatcacaaagatatattctaacaaacattaatagaaacaacaacaattaaaaagg

SEQ ID NO: 145630 - DNA, 477 bp, Homo sapiens
aggctgcataagaaattggtaactgtggctaaggcataaggcttacacctctaactttacatcctttcgtaccttttgaatattgtatcatgtacctatgtgtcctattcagaaaacaaawtaatgctaatggtgtatgaaaccactgattaaacaacaaagtgaaaatatgagctttgtaacattttctagggatgggggtcgacaagttgtgtcttcagagctcccacgttcttccttcctcagcagggacaggcttctcagcacgctgctgcctcagggagcccaaagggacaccaggaatgctcagcctgtgttagctcacgactatttccctgcctctaacttctctagttccccacagttcaacccagggtgggtagcctggtgtctgtttgagctcaacctccccaaaccaggaagcccacaagctgcaccagtcactgtcaaacagctagctgagcatacagggaattc

SEQ ID NO: 145631 - DNA, 444 bp, Homo sapiens
acatttccaggcatccagttgaaaaacccttgaccaacagtataaaaacgacttttagctttgcctaagcataaggcagcatcaaaggggtctggcttccttttgggaagttcttttgaatgaagtgatcagttagtatttatgctttttgtccttctgtattatgcaacagcacaaakgcacaactgccccagtgggacaatctaatgcatagccagcctgtcacacagttttaaagttggacgcatgtgtctttggcacgtcccaggtctcctttcaacttctttcagaatctcttttttaccaccctccagcccagcgcttgaggttctcaggatgaccctgggtcatttctagcttaaagagagtgggctttgagaaatatcttgataagtgttagttcaatttttaaagatggctaaaatgctaatggtgaaatttcag

SEQ ID NO: 145632 - DNA, 572 bp, Homo sapiens
catcatttcacctaccccttacaacaacctttgaggtgggtattcctaacaggagtggttgtcaatttatttaactatcaataagccacagatacttgccaatcagaaagaacactgagttaaacactagaacagggtcctggagacccctgactgtgccaggtatttgttgctagatgaggaaagaggtggggaggagccagggtgcctggcacaatgaaggggagattgggaagctatttgacaactggcctgggaaatgctctaatttttaaactgctggtatggattttgtactattggayatggctgaacatcagccgtgactttcaatctccccattctgcaaaggacaaagctgaggccctgggaggtcatgaaagcttctcaagataaacccatcaaaaagcaacaggcttgagttgaaggctactttaagtctttgagactccaaagttggtgttcttaaccgttatgctgactgtacacatgtctctaagttgacctcagtctgtgccaggctggcctggcatttctctacaaagaactggaggaaagtggatcggaggaaa

SEQ ID NO: 145633 - DNA, 572 bp, Homo sapiens
catcatttcacctaccccttacaacaacctttgaggtgggtattcctaacaggagtggttgtcaatttatttaactatcaataagccacagatacttgccaatcagaaagaacactgagttaaacactagaacagggtcctggagacccctgactgtgccaggtatttgttgctagatgaggaaagaggtggggaggagccagggtgcctggcacaatgaaggggagattgggaagctatttgacaactggcctgggaaatgctctaatttttaaactgctggtatggattttgtactattggacatggctgaacatcagccgtgactttcaatctccccattctgcaaaggacaaagctgaggccctgggaggtcatgaaagcttctcaagataaacccatcaaaaagcaacaggcttgagttgaaggctactttaagtctttgagactccaaagttggtgttcttaaccrttatgctgactgtacacatgtctctaagttgacctcagtctgtgccaggctggcctggcatttctctacaaagaactggaggaaagtggatcggaggaaa

SEQ ID NO: 145634 - DNA, 533 bp, Homo sapiens
ttctgtcactttttcctttgtgtatttctggactctgctgctagatgcatatatggttataattattacatcttamtgaatcaaccctcttatcattataaatgtctttctttagcaacaatttctgtcttgaagtctattttatctgatagtaatacagcaattccagctctctcctggctactgtttgcatggtatatcattttccatctttttacttccaacctatttgtgtatttgaatcaaaagtatgtctcttgaccaggcatggtggctcacacctataatcccagcactttgggaagccaaggtggaaagactgcttgagcccaggagtttgagaccagtctgggcaatatagggagatcccatctctataaaaaatacaaaaatttgttgggtgtggtggtgcatgcctattgctgcagccactcaggaggctgagatagaaggaacacttgagcccaggaggtcaaggctagagtgagctgtgattacaccactgcactccagcctgggcgacagagtgagac

SEQ ID NO: 145635 - DNA, 533 bp, Homo sapiens
ttctgtcactttttcctttgtgtatttctggactctgctgctagatgcatatatggttataattattacatcttactgaatcaacyctcttatcattataaatgtctttctttagcaacaatttctgtcttgaagtctattttatctgatagtaatacagcaattccagctctctcctggctactgtttgcatggtatatcattttccatctttttacttccaacctatttgtgtatttgaatcaaaagtatgtctcttgaccaggcatggtggctcacacctataatcccagcactttgggaagccaaggtggaaagactgcttgagcccaggagtttgagaccagtctgggcaatatagggagatcccatctctataaaaaatacaaaaatttgttgggtgtggtggtgcatgcctattgctgcagccactcaggaggctgagatagaaggaacacttgagcccaggaggtcaaggctagagtgagctgtgattacaccactgcactccagcctgggcgacagagtgagac

SEQ ID NO: 145636 - DNA, 533 bp, Homo sapiens
ttctgtcactttttcctttgtgtatttctggactctgctgctagatgcatatatggttataattattacatcttactgaatcaaccctcttatcattataaatgtctttctttagcaacaatttctgtcttgaagtctattttatctgatagtaatacagcaattccagctctctcctggctactgtttgcatggtatatcattttccatctttttacttccaacctatttgtgtatttgaatcaaaagtatgtctcttgaccaggcatggtggctcacacctataatcccagcactttgggaagccaaggtggaaagactgcttgagcccaggagttygagaccagtctgggcaatatagggagatcccatctctataaaaaatacaaaaatttgttgggtgtggtggtgcatgcctattgctgcagccactcaggaggctgagatagaaggaacacttgagcccaggaggtcaaggctagagtgagctgtgattacaccactgcactccagcctgggcgacagagtgagac

SEQ ID NO: 145637 - DNA, 425 bp, Homo sapiens
ttttaaatgaaaactaaacatcttaaataatatagcaactctggaaattattctcatccccttccagggtttgttgtggttgctgtttgttgttgttatttgtttgtttagtgtcttttataaactaatttgtaaagcttttattctttgtcattgtggctactaaagttaaagtctctgaccagttagcttagtaatcagctaataattagagattttcttaagcacctgaaaccagcaagtttcctgatscttgcaaagggtctctgtgtacatgttggggtacatcataaacagtcaggtgacagatgacaactctgccttagccttcactttctgcttgtacagtccctcaaggttagtcagaggtgacagcttagggtatttttagatattttcaggacatgtgcatagccttgagaatt

SEQ ID NO: 145638 - DNA, 545 bp, Homo sapiens
ttgttttatactacacaaccttgagtttaaaacaaaggagtatgatttgcaagaactgagatttctctggggcattgccagcattgaattcatttccactttgatagtgaaatttgttcactggaacatgaactgaacagcaaactatgtatttctttaaaagtttctagaacagtctttctcaaaatttttggagratgcactcacatttgagatttaaatacaaaaatatccttatatataaaaatttggcaacaatttcaaaaggtttgacaatgccctgaaacccatctacagatttggaattcacatggaatccatggagtccacataagaggctgcacttttaaggcatacagatcacaacaatttggttctgttcaataagaataaacttttaccagtagctttgtcaactcatgatcagtttctcctctattaccatcttaattagataatgcctgaaaagcagttccattctgcctcatgctaatgtttaaaataaccagactgtactggttaataattgttattaataattgttt

SEQ ID NO: 145639 - DNA, 631 bp, Homo sapiens
gaactgagatttctctggggcattgccagcattgaattcatttccactttgatagtgaaatttgttcactggaacatgaactgaacagcaaactatgtatttctttaaaagtttctagaacagtctttctcaaaatttttggaggatgcactcacatttgagatttaaatacaaaaatatccttatatataaaaatttggcaacaatttcaaaaggtttgacaatgccctgaaacccatctacagatttggaattcacatggaatccatggagtccacataagaggctgcacttttaaggcatacagatcacaacaatttggttctgttcaataagaataaacttttaccagtagctttgtcaactcatgatcagtttctcctctattaccatcttaattagataatgcctgaaaagcagttccattctgcctcatgctaatgtttaaaataacmagactgtactggttaataattgttattaataattgttttaatagaaattactactaaagtaattaataaaaatagtataactaatccacttatgccactgcagaaagctgtagagggagaaaagcaaatgtgaaaactgagaagcaaggtattttgtagcttcagtggtttcaagt

SEQ ID NO: 145640 - DNA, 546 bp, Homo sapiens
tagatatctttgtcttattccttatcttagaagaaaactttttggtgtttcactattaagtatgttagctatttttcacagatgccctttataaggctgaggaaattcctttccattcttagtttattgagtggtttttatcatgaaagtgagtcaaatcgtttttctgtgtctattttcttgtgccctttattcattaaatatggtgctcatgttaatttttctatgttgaacsaacattacatttttgggctaaatatgactttgccatggtataattccttttattagttgctggattcagtttgctagcattttattgaggatttttgcatatatattcacaatggatattggtctgtagttttcttttattgtgatgtccttttttggttttggtatcagagtaggcctggcctcacagaatgagttggggagtgctccatcttcttttattttttggaagagcttgtgaaggattggcattaattcttcattaaccctttggtagcgttcaccagtgaagtcatctggtcctcaactttt

SEQ ID NO: 145641 - DNA, 571 bp, Homo sapiens
ttgaactcccaatctcaggttttctgccctccttggcttcccaaagtgctgggattacaggtgtcagccaccacacctggcccagagattgttttctgctaagttcctgaatcttattaaataaagaaacgtgattttcatgtttatgataacagcttttaggaattagattagggccaactcttttctaaaataagtatcatcaatttttctgcttgattctttctctaacacacacacatacacacagccccccccaaaaaataggtaaattgttgctgtgagtatagaatggattttatctkatttgtatctaccaaaatattctccactttgtttccatggtacacagtctcagtccaggccctgacattcatacaaatataaagaagctctgcactatgtctcctaatgccacattatgcttttgctaaggaagaaaaaaatcacaacttgatatatagtgttagttcattcatcaattaaacaaccttcatctaaaatgcttcagtaagttctaattgcccatttataaacagtctttggcaaaagagacatctcagatgacagg

SEQ ID NO: 145642 - DNA, 265 bp, Homo sapiens
tcatcaaagctgagttcagattctacctgctggtataaatagggcttctaaaacatagtcamatttgggctccagattagggtggagctgagcttgtaacatcaaagttctttgtgacctgcagttgaacagagtttggaaagtcagaagctgacattttccagttttccaaatgcttccatatgtgccatcttatttgaaagcctacagacctttggatcaggaaaagcaagtatattttccatattttggacagaagacatga

SEQ ID NO: 145643 - DNA, 574 bp, Homo sapiens
atgtccaggggcaattgactttggcagtgttccttggtctagttcaccagcttttgcttgtttattttaccaacggggaagattgctggtttatctctgaacattctgcacaagttaaatgtgacattttctctctcctctaatgctgtctcatcatattgtttctgaatcagtgctatccctaatgctttttccaaaaatggaagctgtgaaactaattatgttaaaaatcagccacgagaattacttcttttcactttttcacaagatggctggctttgtgcaccacatcaaacttcatacaattttaacttactgagcattcaagtttgtccccaaatggcctaaacatatagtttagccacttcaaaaatattgaccaggttyttgctttccacagggagaaaaaaaaaaaaaaggtcaagttggaacttttcagttgcaaaaaaaaaaaattaacaaaaattggagtttattacagcataaaaaattcatttgtatcatctagttttgaaggacccaagctacttttggcaaaatacttaccaaccatttatcaaccattccattttcc

SEQ ID NO: 145644 - DNA, 591 bp, Homo sapiens
atttgttcagtgtacctgcttcagtaaaatggcttttcatatttttgcccatttattctcttactaaggtctctctcagaccaaaagttttaatttgagaaagtctgtttaaacattttatttattcatttcttttttsttcaacttttatttaagttccagggtacatgtgcaggtttgttacataggtaaacgtgtgcaatggtggtgtgctgcatgtatcgacccatcacctaggtattaagcccagcatgcattagctattcttgttgatgctctccctccccgagcccctcgacaggccccagtgtgtgttgttctctgccatgtgtccatgtgttctcaattatggataattaacaagtgttttgatgacttatctttcaatgctgtggttacagctcaacctgggtgtgggaatcatgaggagcactaatctgcatgtctaaaacagagcaggattagtttccaactgcatatttgaatgaattcctgttgctcgaaaaatttcatgtttttgagacttttctgtataaaacaagctaaatgtgtcatgtaaaactccaaaaacagagttgtaagcactcaata

SEQ ID NO: 145645 - DNA, 302 bp, Homo sapiens
aagcttattatttttaaatttctagagtttggggcaacacagcatgaaggagagcctcctttacttctccagccacctctgtcatccttagaggagaggcatraagggcacttgtttagacctcagtgactctacttctgaccttcagatactagagtgtcatttgtcacagtgcctttatggagtagctgacactctgattctgctagtcctgaaagccaatccctggcatgcaactaaatttcccaagggcatacttcaagaacagatatgtctctagcatagagtaaatctcatttcaa

SEQ ID NO: 145646 - DNA, 456 bp, Homo sapiens
gaattctcacttcccactaagtagtgagaagccaacacacagtctgaatggttatcactgggctccatccatagacacccaccaacgacaactccaaacagaaagctctttcccacctttgaaaataggatgcttgggcaagtgtggstggagagataacgctggaagaactaatgctgtggccgcaaaacagcaaacagaatcaaaacactggcctagatattacagcagggatgccacacaagttcaagtgttgaaaggtatactctgacgtggttgcaaatggaaatattaacaaggtcaggacacagacatcttcagatggaagcagggcataaaagccttgatttttttccaaggtgtcagcattaagtgctacacacacaacttgaaatggaaataatccttgttgctacttggtaaccaccttcccaccatcaactgcttctttctaga

SEQ ID NO: 145647 - DNA, 459 bp, Homo sapiens
catgaattctcacttcccactaagtagtgagaagccaacacacagtctgaatggttatcactgggctccatccatagacacccaccaacgacaactccaaacagaaagctctttcccacctttgaaaataggatgcttgggcaagtgtggctggagagataaygctggaagaactaatgctgtggccgcaaaacagcaaacagaatcaaaacactggcctagatattacagcagggatgccacacaagttcaagtgttgaaaggtatactctgacgtggttgcaaatggaaatattaacaaggtcaggacacagacatcttcagatggaagcagggcataaaagccttgatttttttccaaggtgtcagcattaagtgctacacacacaacttgaaatggaaataatccttgttgctacttggtaaccaccttcccaccatcaactgcttctttctaga

SEQ ID NO: 145648 - DNA, 534 bp, Homo sapiens
gaattctagggccttgcccaccacctgttcttccccatagtaccayagctgatgctctcttgaaagcaccatctcccagcaggaggccaaccagcacaaaagatagtgcattaagaaaccaaaactaaggaccctcacagattccatttcacccccctgccacttccactggagcaggtgctggtatccaccactgagagacccacagacagttcacatcacaagactctgtgcagacaacccccagtaccagcctggagcctggcagacttgctgggtggctagatccagaagagagttagtgatcactacagctcagctctcaggaagccacatccataggaaaaatgggagagtactacatcaaaggaacaccctgtaggaaaaagaatttgaacaacagccttgagcccaagaccttccctctgacagagccccccgaaatgagagggaaccagaaaaccaaccctggtaatatgacaaaacagagttctttaacaacctccccaaatcacactagctcactagcaatgg

SEQ ID NO: 145649 - DNA, 534 bp, Homo sapiens
gaattctagggccttgcccaccacctgttcttccccatagtaccacagctgatgctctcttgaaagcaccatctcccagcaggaggccaaccagcacaaaagatagtgcattaagaaaccaaaactaaggaccctcacagattccatttcacccccctgccacttccactggagcaggtgctggtatccaccactgagagamccacagacagttcacatcacaagactctgtgcagacaacccccagtaccagcctggagcctggcagacttgctgggtggctagatccagaagagagttagtgatcactacagctcagctctcaggaagccacatccataggaaaaatgggagagtactacatcaaaggaacaccctgtaggaaaaagaatttgaacaacagccttgagcccaagaccttccctctgacagagccccccgaaatgagagggaaccagaaaaccaaccctggtaatatgacaaaacagagttctttaacaacctccccaaatcacactagctcactagcaatgg

SEQ ID NO: 145650 - DNA, 586 bp, Homo sapiens
atttactagttatctaacacaaactggagtcattttgttgaaacgtaaatcatatacaatatagtttattttctcctaggaaaagtatwcatgatggataattatctttattccctatcaattattcaccattttataacgttttgctgtttatcattttttcacttcttatatttttaaataattattaaaaattttaataacctgtgctattgctaataacaactatcagtgacttaattctggttctctgaggggaagctttccttgttatgtctcaaactagatcctttttcttcacctttttttgcattctgtttcagtgtatctaccataaaccctttgttttcattttctttctgaaaaggtatactgaagtttctaaagctttcagacacatagctcatacatatgtcttgagaaatagatacaatgaaggaagtttgatatctttgtcatgataatttaatggctatactacttgatgttaggacgtttctcaaagttaaatagtcagaataagattataacgtgtgcagtcattaagaatatttgatcggcattgtatgaatcatatattaaaatg

SEQ ID NO: 145651 - DNA, 585 bp, Homo sapiens
cttgtaaacacgtatgagctcatcattagattggaactattgttttcagttgaacattgtacttatggtcttcgaatataaagataaatactggaaactttcaaattatgtgcttttattttaytaagcttgaattttcatttcattagtttttccacagcatatacatacttctaagaacagacccttgaaagatgttaatgaatttatgttgtaaactttgttcatagccataagtacaaacgttttgttttgtttttgcttttgttttcttcagaatttttctaagaaagacttaaaaaaaaaacacaggagggatatggcaataatcaatctagcagaaaatatttgaagcttgcagctttataattcaagttgatcttcattaagttaaaattccctgctttaaaacattatggaaatctttaacatttcagacagttgctttttgtgacagtttctatttcttcccctctgctgacagttcctataatgactttaatcatagagtctggaaacggaatcggctattgagtagcaacaaactcaatggtcaatgtctatgtcacttttctgggagcagga

SEQ ID NO: 145652 - DNA, 375 bp, Homo sapiens
tctgaaaacctagataccagcaatagccatactgagaagaaaggatggcaggacctctgtttgctactgcatttctaggcaccagcctggagtctggggatgctctrgttaaaatgcttagcccctggtcctattggccatactcagatcaacccctgtggagtgtactcctgagcctcaggacacagcgggcctttagaactctcctgaagcctaggtttctcctttatttctagtgaactacctagaaaagttcgagtctataggcctgtgatttcaagctctgggtgtgcgcttgtctgaggtatggagaagcttcctgaagaaacacatcagtcagttacactggccattaaggaatcttcggcacaccca

SEQ ID NO: 145653 - DNA, 587 bp, Homo sapiens
ttcatgagtgggtgaacatagtgtttgatgtcacagctgcacacacttggtccagcacccccatatgcctagatacaaagtgggcatcacttgtgttctttgttgtgcctcatkctgatgaccttttcgcctgacattttcttcccacaggcctcatgaatggccaggctatgctccacttccttcaagttgttcatttctcttcatctcatgaacgtgaacctgtcctcaatttcattgccataagatctcctcttagtaggtgatgcctaattactctttccaattaacatgctattcaaatttgtctaatgtttcttccagttctaaaatttgatgaccactgatctgatgtgaccgtgtgattgtttcacaatttgatgtgtgtgatgatattagtatgtacaatacatgctgtttacctctatctagtaacaaatgtttacatttgttactagagtaagctttaggggtagaacttgagtctcaaagctcacgtcttgggaaaaaaaaaagatctggtattgatagaaccttgataaatcccttgttatagcacatgtttttgtttcccagaagtagggcaa

SEQ ID NO: 145654 - DNA, 437 bp, Homo sapiens
ctcacctcaccatgtgtaatatagtatgttatatcacctaaaggacaaaaatgattagaaaaaaatgaaaattgtaagaaattgtccatccaattacctagacagcattcaagctcaaagcatttggataaccacaattgttctatttctatttatccgaggcatattccttcattgccaactatgtgtcaggtgttgggaytgacattttggatagaattataagcaagatggaaatgctctcttctctcacagagccaagtacctacagaggacagtgcaatgcagattggcctctgtggattctgaagcaatatagggctcaacgttgcctgccttagaatgtgagaaaataagtacaaatagatgctgcttctttgaagtaatgtataaaatttaaagaagatagcaggatcagtagtgttttatatttcgtc

SEQ ID NO: 145655 - DNA, 613 bp, Homo sapiens
tgtgtgtgcaccctgccatgccactgttgctggtgtgagcacaccccacaccccccagctgtactgtcattgctgacacaaatgcatgctaagattccatcaatcccaggccctccatatgtagacatcaccaccagtgaaaacacatgccgagagaccagcaaccccgcccccacaccatactgccatcaccactgctgaaaacatacgcacagaggctggcagctccgcactctccagcaacccacccttgttgctgcagccactggtgtgagcatgcacaggaataccacaaccccactcccactagtaccccacaacagcaaacatgcatgcaccccaccacattgccactgctgctggcatgcacgaatgagcatgaatcctgctgccaccacctcagtgaagcactttggctgccatcatccatcaaagtgctgtggccagcagtctgggaatacctcagcccctccagttcagtaggttctgagcctctagcaaacaaagaacaaagctgtgggctggtaccatttctccagagttagagcacagaggccaagagtgctgagctgagacttggcttcctraaatctttcagaaatgaagctagctg

SEQ ID NO: 145656 - DNA, 522 bp, Homo sapiens
gaagtcctatttctttgctggctgtcagaagccactcacagtcattccttgtcacatggttccctccaccttcaaatcagcatggagaatctccctcatgctgaattcctcttacccttctagtctcttctgtcagcaagagcctggtcagcccagtctcctctaatgggcttacctggttagatgtgatccacagaggataatctcccttttcttaagtcaactaacttgggaccttaagaacatctgcaaaatcccctcacagcaatgcctcsattcttgtttgattgaatgacttggaaaagatgtgtgcacaccacaggcaggaaccttgcggccctcttagacttctgcctaccacacattcatgggtaaactaacgaacccatgacaagtggttgaggtaagataaaaataagtcaaactcttagctaatccattgtgaagttacacttccaaaagttgggtcacgacttttttgttgttgttgttgttgtttgtatttgtaaacaagattctgta

SEQ ID NO: 145657 - DNA, 522 bp, Homo sapiens
gaagtcctatttctttgctggctgtcagaagccactcacagtcattccttgtcacatggttccctccaccttcaaatcagcatggagaatctccctcatgctgaattcctcttacccttctagtctcttctgtcagcaagagcctggtcagcccagtctcctctaatgggcttacctggttagatgtgatccacagaggataatctcccttttcttaagtcaactaacttgggaccttaagaacatctgcaaaatcccctcacagcaatgcctccattcttgtttgattgaatgacttggaaaagatgtgtgcacaccacaggcaggaaccttgcggccctcttagacttctgcctaccacacattcatgggtaaactaacgaacccatgacaagtggttgaggtaagataaaaataagtcaaactcttagctaawccattgtgaagttacacttccaaaagttgggtcacgacttttttgttgttgttgttgttgtttgtatttgtaaacaagattctgta

SEQ ID NO: 145658 - DNA, 580 bp, Homo sapiens
taatgcagagtgacattttggtatgaaggttaaatttatctagaacagcccaaactaggatgcaaatgtgatatgagagcttttacatacggatccagtcagtgagtatattggaaagtgtaaactggatatgaggacgagtgtagtcgttatgatcattaaaaaagagactgacacaatccaaatgacatgaatcaactttatttgtgrgacatggagacagccaacagaaagcctggcttagaggcaatgaaactatttagagtctagtgaagctttaaaattaaatagaaagttccaaaacaagtggtcaagagctgacagaatgtataggggaaagctctccccaaagagccatgtattaagctggtcaaaattagcaaagacaatcatttaaaatttaaatgttaaaagacacaaacaaagctatatcttgaaaccagcaaaaggaaaaaaaaggtctcatcatgtacaaaggaaaccaaatgtgattaatggctgacacctcaacagaaataatgaaagtcaaaaggcagtggtataacatattcaaagtactgggggaaaaattacccaccaa

SEQ ID NO: 145659 - DNA, 554 bp, Homo sapiens
agttagaaagaccctgaggatttgtcagtgctcttgctataataagtaaccaaattcttataaaataattatgtcttataccccaataccagtttctattttcttaatttggtatctttggttattgaaatgaattaactagagccattgagttttgtcatcagtaggtaatttctagtcttcctgttcttgcctggagtcttctagaagtacaaactggaaactgtgccttgtcaagacagcccagaaggacacactcagagtcgcagtgtggcctggaccgtgccaaggatcgactcattggaatgggcttcccagtgtgggctgacgttgccacagtgaggaggcccctgcaaggtcatgtctggggctgagccaggtccacagaacctgtttagtacaggagtagatggctatgtgaaagcaggccctsaccagcatcaggcagaacagaattaatggtatatgtctgggtcacagcatcagtgagggaaatttaatgtggtcgaagttctattttctaatgggcatgtgagcaagccctttttacttct

SEQ ID NO: 145660 - DNA, 473 bp, Homo sapiens
gacaatctcaaaagttttctgatctcagtttcgtcagttggaaaataagttcttactagataatttctagcttcttccaaccctgatatcctttttttgtttggttttgctttgttttttagattgtgagaacatctattaaaatgtaattaattggtaatataagctgcaggtttatttatctttattaaggcataattgactaatacaaattatatatatttacagtgtacaatgtgatgttttgagatatgcatatattgtgaaaggattaagtyaagccaattaatatatccatcacctcacatatttaccaatttttttgctggtgggaacttttaggatctactctcttcttaacatttcataaaaaagtggtaagccggtgaggtgatgggttaattatcttgttttaatctttctacaatgtatatgtagatcaaacatcacattgttatacccccataaatata

SEQ ID NO: 145661 - DNA, 622 bp, Homo sapiens
agagcaactaagagcactctgatgaacgaagaaagagaaggcatgccgctaagacaccagcacatgttagaaaggtgcagaggtcaggatggcgtgatcctggagtaagaataaataaccaatcaattgaacagaataaagtagaagatcagacccatatttctatacacatttctatacaaatgtgtacaaatgtatacatttctaaacaaatgtgtttctatacaaatgatagctacacatataataaaagtttgattttaacattagaaaggaaaatagattctttagtatagggctctattcctaactcacatcatataccaaaataaatttcaaatagattacagagtggcatactgaaaattaccaatgaaagaattgaaagcaatataactaaatacctatccaatccctgtcaagggagtgtttctaagcatatgcacaaaagaagatataataaaggaaaggacactatgtagaactgtaagaaaattagaaattctctctaaaacttaaaatgtaataataataaaatttwaaaaaaagaaattctctctatagaaaggagcactaactaaattaaaagatgaacaataaaccaggaggagagaagttagaa

SEQ ID NO: 145662 - DNA, 446 bp, Homo sapiens
ttggagttagagttagagttaggtctcccctcatagtcagcctccctccttccatttttcccctgctccgtttgtacaaggtggggagcaggtggagctcgcactcacaatcctctgatatttgtcaaattgtgaagtggcattgtaagagagccttggctttattattttttattttcctccttaaagccagggtcatggcrgctgtcccatcagggcaataggatctcatgagaagagatggaagaggggaggagggaaagaccagagggcagagacatatttttctccactaaaagggcctgtcttctgctctgttccccaggtgtgagcgcaaagataggcaggtgaatgagtggatgagaaaaccagtgatggatgtctggctggtctttgtccccctaccctccagtggagagagacccagggaagggagatgagtggga

SEQ ID NO: 145663 - DNA, 403 bp, Homo sapiens
gaattctcccccaaatcaacaggaaatagatctttaaaggtctctcagctggggcttgggtacaacgttattggaaggaataccactatcaagaccttggtgttcaagccctcctcatcagtgaatccaagtaaaagtgactattgcgtgctttgtgttcwctgctaaatcaaatgctatggatttcgtttcttttggcgtgttttggaaccctggaacagctctggctttggtgttaagtgcttccctggacgtagccaatgtggacactgctggctctgcaacctgactggatgtgatgcaacataggactgcattgccaaatatcccacctgagtgtggcttagtgaatttctcattgccagtcctggagtatcacccttccgtggtgaaagcctggctc

SEQ ID NO: 145664 - DNA, 498 bp, Homo sapiens
agaattagatagaggctttgtggaaattctgaatttttgaacactcttaaatacaccattattcttcattaagtccaattgcatatcataatttgcacattcttctctattaatgtagtatcactagcactagtctaatatttattaaccaagattaggataattttccagctcaaagaaaattatctagctcaaaaaacaatagagcttaaacaaaaatgaaagggaagaaaaataattcaaactccctgatagggaatttttaaatggtaaaaccattgattgattacgatcattccctgagagggcatattggttcaacaaagaatagcttgattataatctggcctgacaacaaagttggcctcacagactgtaagtgaattgtaaaggcaatgtaaaaaaaaaaaaaaaaaaaaaaaamcttaccttgtaaaggactttaaaagttaaggttgtaaacttgaaatgcatttttttttgtatataaaagtaata

SEQ ID NO: 145665 - DNA, 498 bp, Homo sapiens
agaattagatagaggctttgtggaaattctgaatttttgaacactcttaaatacaccattattcttcattaagtccaattgcatatcataatttgcacattcttctctattaatgtagtatcactagcactagtctaatatttattaaccaagattaggataattttccagctcaaagaaaattatctagctcaaaaaacaatagagcttaaacaaaaatgaaagggaagaaaaataattcaaactccctgatagggaatttttaaatggtaaaaccattgattgattacgatcattccctgagagggcatattggttcaacaaagaatagcttgattataatctggcctgacaacaaagttggcctcacagactgtaagtgaattgtaaaggcaatgtaaaaaaaaaaaaaaaaaaaaaaaaccttaccttgtaaaggactttraaagttaaggttgtaaacttgaaatgcatttttttttgtatataaaagtaata

SEQ ID NO: 145666 - DNA, 498 bp, Homo sapiens
agaattagatagaggctttgtggaaattctgaatttttgaacactcttaaatacaccattattcttcattaagtccaattgcatatcataatttgcacattcttctctattaatgtagtatcactagcactagtctaatatttattaaccaagattaggataattttccagctcaaagaaaattatctagctcaaaaaacaatagagcttaaacaaaaatgaaagggaagaaaaataattcaaactccctgatagggaatttttaaatggtaaaaccattgattgattacgatcattccctgagagggcatattggttcaacaaagaatagcttgattataatctggcctgacaacaaagttggcctcacagactgtaagtgaattgtaaaggcaatgtaaaaaaaaaaaaaaaaaaaaaaaaccttaccttgtaaaggactttaaaagttaaggttgtaaacttgaratgcatttttttttgtatataaaagtaata

SEQ ID NO: 145667 - DNA, 488 bp, Homo sapiens
actgtgctaaaattctgaataaaaaattaacatgaaattcagcatctaaaaagaacagagtttcatcaagtcagctttacaccaagaatggccmggtgctcactatgagaaaacatatcaacataatttattatatccacaagaagaagaatcatataaacataccaactgagaccagaagaacttttataaaactgaaacagctgcttctaccaaagcctcagttaaatggaaatagaaacggaatattttatatataatagaggatccttacccaaatccaactaccaccatgattgtaagtggaaaaatgctaaaagctaaagtcatttccactaaaatcaggaacaggcaggggttcccccatcaccagtgctattcagcatagttttagcagtctggaaaatgacataaggaaagaaaacagtacatttaagcattggaagagtatagataccttttttttcgctagtaatacgattttatac

SEQ ID NO: 145668 - DNA, 496 bp, Homo sapiens
tttaattaagtcctatttctctatttttgtttctgttacatttgcttttgaagtattagtcgtgaattctttgcctaagccaatattcaacagagttttttggccaggtgtagtggctcttgcctgtaatcccagcactttgggaggctgaggtgggaggattgcttgagcccaggagttcaagagcagcctaggcagcatagygataccctgtctctacaaaaaaattttaaaaattagccaggcatggtggtgtgcacctgtagttctagctactcaagaggctgaggcaagataatcgcttgagtccagggagttgaggttgcagtgaaccatgtttgtgccactgcacttcagcctgggtgtgagagagagactccatctctttaaagaaaaagagtttttcttaggttttcttctatagttcttatagtttcagatcttacatttaagtctttaatccattttgagttgatttttggatatggtgagagat

SEQ ID NO: 145669 - DNA, 409 bp, Homo sapiens
gctctttgtactattcttgcaacttttcacacatacctctgtcctagccccaaagagacttggaatttgggttctggctactacaaaggctggaattctgctgtgaatttccccaaaaagtagaaagctaacaggcagtccaactgtgacatgcctggtgccgcacttgctgggttttagagattctgtggtggaagcctctggaaactgggtgagctctccccacccctagccctgttatttaggtttttgggttttttttaagagacagtgtctcactctgttgcccaggcctgagtgcagtggcgcaatcatggctcactgcatcctcaacctcctgggctcaagtgatcctcccacctcagcctcccaggtagctgagaccacagktgtgcgtgccgccacacct

SEQ ID NO: 145670 - DNA, 431 bp, Homo sapiens
tgaaatgttttctttttttttgtttgtttgagacagagtctcgctctgtcacccaggatagaggacagtggcatgctctctgctcactgcaacctctgctgcccgggttcaagctattctcctgcctcagcctcccaagtagctgggattacaggcacctgtcactgtgcccggctaatttttgtatttttggtagagacggggtttcaccatgttggtcaggctggtcttgaactcctgacctcacgatctgcccgcctcggcctcccaaagtgctgcgattacaggcatgagccactgtgcccggccacrgttttcttcattccggtagtctatgtcttactaattattctgagtgctaaatatgtctgctcagatttctaacctagttttttgtgcattttaaaaagttaagactcatcacatagaat

SEQ ID NO: 145671 - DNA, 584 bp, Homo sapiens
accattagaataaatttcacaagtttaaaactgcattaaaatccagtaatgaatgtatcaatttagagacagtcaagaataactgccctaaaataataagaaagctgaatcaattaattggaatgtctatctmactatctatctatgtgcctatctatctatcatctatctatctatctatctatctatctatctatctatctatctatctatctatctatctatcatctgtgtattagctcagaagaattccctttggaaattatcatgttatcccattcattcagcttttgggccacagcagatggtggagcctctgtgtttcttacaatcccagggaggacggagagccagcatgatggctggcattgtgacagcctgggccctggagttcctgaagtgatgcctgctggcactggatctatacagttattttctaaatggttaagtctcagtagattctgatgaacatctttccaggataattagacatattttagagattaccatttgcttttccttgaaataaatctactctcttagctgcatgtctgcacgtaagtcctccacatcacagtccattg

SEQ ID NO: 145672 - DNA, 584 bp, Homo sapiens
accattagaataaatttcacaagtttaaaactgcattaaaatccagtaatgaatgtatcaatttagagacagtcaagaataactgccctaaaataataagaaagctgaatcaattaattggaatgtctatctcwctatctatctatgtgcctatctatctatcatctatctatctatctatctatctatctatctatctatctatctatctatctatctatctatcatctgtgtattagctcagaagaattccctttggaaattatcatgttatcccattcattcagcttttgggccacagcagatggtggagcctctgtgtttcttacaatcccagggaggacggagagccagcatgatggctggcattgtgacagcctgggccctggagttcctgaagtgatgcctgctggcactggatctatacagttattttctaaatggttaagtctcagtagattctgatgaacatctttccaggataattagacatattttagagattaccatttgcttttccttgaaataaatctactctcttagctgcatgtctgcacgtaagtcctccacatcacagtccattg

SEQ ID NO: 145673 - DNA, 584 bp, Homo sapiens
accattagaataaatttcacaagtttaaaactgcattaaaatccagtaatgaatgtatcaatttagagacagtcaagaataactgccctaaaataataagaaagctgaatcaattaattggaatgtctatctcactatctatctatgtgcctatctatctatcatctatctatctatctatctatctatctatctatctatctatctatctatctatctatctatcatctgtgtattagctcagaagaattccctttggaaattrtcatgttatcccattcattcagcttttgggccacagcagatggtggagcctctgtgtttcttacaatcccagggaggacggagagccagcatgatggctggcattgtgacagcctgggccctggagttcctgaagtgatgcctgctggcactggatctatacagttattttctaaatggttaagtctcagtagattctgatgaacatctttccaggataattagacatattttagagattaccatttgcttttccttgaaataaatctactctcttagctgcatgtctgcacgtaagtcctccacatcacagtccattg

SEQ ID NO: 145674 - DNA, 584 bp, Homo sapiens
accattagaataaatttcacaagtttaaaactgcattaaaatccagtaatgaatgtatcaatttagagacagtcaagaataactgccctaaaataataagaaagctgaatcaattaattggaatgtctatctcactatctatctatgtgcctatctatctatcatctatctatctatctatctatctatctatctatctatctatctatctatctatctatctatcatctgtgtattagctcagaagaattccctttggaaattatcatgttatcccattcattcagcttttgggccacagcagatggtggagcctctgtgtttcttacaatcccagggaggacggagagccagcatgatggctggcattgtgacagcctgggccctggagttcctgaagtgatgcctgctggcactggatctatacagttattttctaaatggttaagtctcagtagattctgatgaacatctttccaggataattagacatattttagagattrccatttgcttttccttgaaataaatctactctcttagctgcatgtctgcacgtaagtcctccacatcacagtccattg

SEQ ID NO: 145675 - DNA, 556 bp, Homo sapiens
catgatggctggcattgtgacagcctgggccctggagttcctgaagtgatgcctgctggcactggatctatacagttattttctaaatggttaagtctcagtagattctgatgaacatctttccaggataattagacatattttagagattaccatttgcttttccttgaaataaatctactctcttagctgcatgtctgcacgtaagtcctccacatcacagtccattgtactcataacagaatgataacagaaatttctcctttttcttctcactaacttttttggaacaggtgactttgtccctttatacatgtcatactctgtgctaaattgtacctatatattatttccaatcatcatawctatcctgtgatttgtaattcttattttaaaaatgaaaaagagagcatcaggcatagataatttataatatgttaaattggttgatttgaattatatagtcaggtatgtcttgaggttatttctggtgggcactttggaccttatacaagaacaatcatttttctcttcttcctcattagcaggtaccttg

SEQ ID NO: 145676 - DNA, 379 bp, Homo sapiens
cccattgtcttcctgaactcaattttcagtgcttctttgtcatagcatgcatgcatgcatatatacacacatacacagaaatgcacacaccgcagtaaaacatcccttgctatcctaatgtctttttgcttactcctgacaagctgtgatatctcactgaagaaccataattgagtaaatggtcaggcatcaatctacattttctatcattcaatatgtcacttttcatatatttgattatccaggtcccattctctcaagactttgyactcttataagtatctaatacaattttaaaaaccacatattaatgatttcatgttgtttttcttccataagaatacactaagtttttcatagggtcctattattccaggag

SEQ ID NO: 145677 - DNA, 490 bp, Homo sapiens
agcagactttatttgtctcattgcttttgagtcagattagttgcataggacaatattttttattttcaagtttaatcagggtggaagagataaagatacgttaatttcagatttaaaggagtagtgatgcaggattagcatattatggcttactgtttgggtagaagcttcatggggtgaaagtccatgctgacaaaactccagaaatgattaatgtggctcacctgtaactcacaaccagcaatttctcatagttctagtaagcaagtctgctgactctcaagaattatcccagtaagtaataaatcacaaaagyaattaaaatcccccttagagttcagtagacttcttacattcgaccccacatccaattgtctaggagaaattattgacttaagtttaagatcagaaaacagtgcaaagcaacttacgtgaagtattgtaagataggttatctttatttttttccctgtctgtttctcagctccca

SEQ ID NO: 145678 - DNA, 641 bp, Homo sapiens
gaaactgtaagtcacgttttataaaccaaataatatatatagtattataaatatatttagaaggctttacattgtattcaaatatgaatattaatgatttggcagtgggttatgtttgcagtccccaggttaacattatcacactcacccatatattttgaatctcaccaacattattataaataatatcttttttaccatgggaactcttacattaaaaatgttgttatagaatgtgcatatttttgcataatacaaatatgcaatcaaaaggaaaataccttgaaaaatagcttagtcagtttttaatcttaagtgtgttgaactttgattttccaattctctttaatcacaatgtttagtaaatcatgaagtgaagaagaaaacatgtatttgattttaatttcattattaccattcattgcaaatgaaaacatttgttaacagaaaatgtataaaccttagtatttactcatttgtttaagaaacacttactgagtacctttacaactaaattaagagcccatycatgatttcctgggtgagtattctttgacagttttggctaccacaggtggctggctagtaaaattgtttagaaaattgactacagtaatgtcaagattattgttccattgttt

SEQ ID NO: 145679 - DNA, 559 bp, Homo sapiens
aatgaatcatgcacacacttgcctagatttttgttctaatttttctcattttgtatatttagtttatacaaattagatcatattctagacacttgtctatatcttgcttttcttagttaacaataaaacaagaaattattccatgtcttatgagagagtgctaacttatttctaaatttatatattatttttaatggatctatagtttatttattcattttcctattaatgagtgctcagtttgtttctatatatatttttgcccttgaaagcaacattgtcataaatattctatacatgtctccctattaatttactgttttatttaatgaagtagggaattcaagaatgaaactggtgtggtaaagagtaggtgccctttacatcttaatactaattttcctaacaatattggatacttcttctgtgaattgattatttaagtcctttgctctttcttatttcaattacatttttaaaagcaaatttaagttcttatgtttataaaagacctttgtrtattgtagattttaatctgttttcttatttgttttgtaat

SEQ ID NO: 145680 - DNA, 567 bp, Homo sapiens
cttatgtttataaaagacctttgtgtattgtagattttaatctgttttcttatttgttttgtaatatattttttccaatgagattttctggttggatctcaagagagagggagatacaagattgattctgtcagtaagaaaacagctcagatctaggcaggggaaagcctggtgcaagaatcaaatcttgaatttcataaaaataatgaccatcaaagaactatggatctgctttcatggttctctgtgataaatcggtttctctgttcttccttgtggaaagttccctgytgtttatacgtcttatgctttatttggtttcctcatagcacctcgttaagaaaactgaaaaatagagatttcctctttgaaatctaaatatctaaaaccagaactgtgggtcttcctttatacagagaaaaatatattttaaaaaactcagaaaaagacccagttggactaaaaaaaatctatatttattcagcattatggtaagtgtgacttctgttgactttaggagaaattaagggtacagaactcttaggaatcagataactggagaaacac

SEQ ID NO: 145681 - DNA, 448 bp, Homo sapiens
atggcactacagaacagctcttaatgctacagctttgaagcagcacgtcactctgacmctcatcattagccaaagcaaggcacacatctaagtctgaatacaatggggcaggagacgataattctctcccaggatgcagtggcaaatattttgagcagtatttcactctaccctgtgaggaagctgaggcacatagacattaagagatttgcccacagtcacaggtaggatttcaacccaggcattttgcatccacagcctgtttttagcttctctcctatactcccttatttatatgtgaaatgaaaacatgtacattcaccctatatctgttaggataaatattgagcatgctcactggctacacaaagagagaactttgggattgtgtcattccaggtacccctggctgccccccttgtgatgtcagcttcagaagtatcagtag

SEQ ID NO: 145682 - DNA, 625 bp, Homo sapiens
aaactgccaaaaacttcaagattcacttttctaataggataggtgatcaagttggataatagccaggtgatggaatgtctagatgtgattaatataaaatgggactgcttcccagctactcrggaggctgaggcaggagaatggtgtgaaactgggaggcagagcttgcagtgagccaagatctcaccactgaactccagcctgggcaacagagtgagactccatttcaaaaacaaaacaaaacaaaacaaaaaacaaaacaaaaacaaacacaaacaaaaaacaatgggactgcttttcctgagtaggatttaaagtggtctggaaggaaatccaaaaggagaattagaaaagtattttgaacaatgaaaattatactgaaataagaatatccctctacaagataactccttgaaagcctgcagtcttgtgcatatctaagatatacaatatttgagaaagatatgtactatttcacaatcttttcataattcatatgattgatttattcattcaatgactaataatttttctcaatctatatagtcatgtctctgaaaatacacagtaatttgcatttaatcagaaagtttctgtttagtatttatttataaacaaggtgaat

SEQ ID NO: 145683 - DNA, 625 bp, Homo sapiens
aaactgccaaaaacttcaagattcacttttctaataggataggtgatcaagttggataatagccaggtgatggaatgtctagatgtgattaatataaaatgggactgcttcccagctactcgggaggctgaggcaggagaatggtgtgaaactgggaggcagagcttgcrgtgagccaagatctcaccactgaactccagcctgggcaacagagtgagactccatttcaaaaacaaaacaaaacaaaacaaaaaacaaaacaaaaacaaacacaaacaaaaaacaatgggactgcttttcctgagtaggatttaaagtggtctggaaggaaatccaaaaggagaattagaaaagtattttgaacaatgaaaattatactgaaataagaatatccctctacaagataactccttgaaagcctgcagtcttgtgcatatctaagatatacaatatttgagaaagatatgtactatttcacaatcttttcataattcatatgattgatttattcattcaatgactaataatttttctcaatctatatagtcatgtctctgaaaatacacagtaatttgcatttaatcagaaagtttctgtttagtatttatttataaacaaggtgaat

SEQ ID NO: 145684 - DNA, 476 bp, Homo sapiens
gtataatctctattttttattgttttgcatgtttcaataattaaagacatatggaaaatgttacttttagaccttggctactctgggcacactgcctatggggtaatcctgctccacaaggagcagtgaaaaaaaaaaaaaaaagacctactagatgtcacaaatacaataggaatgtattaaactaaattattatatccagtaacgtactaattattcctagttgtcaacctgctctgcacccattaaaataaaatttgtattgctccaggaaaaagataaatagagattagaattagaaacttaatatttggctttgtctttcaaaacagtcttctaagatctaagtctctatacttaagtctgaagtttttggttttcaaaattgargttttgctggaaaaaaaaaagctttacaaaataatttcaaatctaaaccataacaaggtaaaaacaaggtgtcaagccttactttt

SEQ ID NO: 145685 - DNA, 438 bp, Homo sapiens
tttctttgcatgcgaatgtccagtttttccagcaccatttgctggaaagattgccttttcaccattatattgcctttgctactttggcaaacatcagttgactctaaccaatttttggtaacgaggcaaaagcaagtacaaggaagatgcacttaattacggcaaatgtcccagagcaactgggcaaccaaaagccaaaaacttaaacctcataatcctcataaaaacccaaaatgaagtatagacaaatttaagatgtaaaacacaaaaatttagaaatgaaataggaggaaatttgggagatctatggctaggttcttagacatarcactataaccatgatccatgaaaaagaaattaataaattggacctatgcaaatgtttaaaactttgctatgtggaagttcttgtggagagaatgaatgacaagctagaga

SEQ ID NO: 145686 - DNA, 573 bp, Homo sapiens
tgtaacctaactagatttcatcagtaacttttacagttctcctgagataatgccatgctttctgatgctatattaaaagtactttttatatttgttagttgcaactggatgatgttgttttctaaaaaggaaaatggatttgctattcatcataactgctgtcttttactgaaaataaaaagaaaatatttttggttgctgatgagtgtgtttgaactattgtattgagacaactcacttaaagatttaaatctcaaatttactagataagacacactaamaaacaaaagggtctccctctcatcaacaagaggagtaaacctttcactcttttctcctctgagcctggttattttagtccaggtgatttttatatattactcacgaacttgatacaaccatgtttctaggtaattgaacttttaccatacggtttaacttattgttgaatttaaactcaacagttgctatgctttgtagcagaatctatggtgggataccgcagcttataataccattgattaatttccaagtacctttcagattttattgcacagtgtcctgctttcacta

SEQ ID NO: 145687 - DNA, 348 bp, Homo sapiens
caattcaacaacaacagagacacaattgtacttggaaatcttcactagccttagaacaatcagtgaaggtctgcataatttcctgattaaggaaattaagaacttaattaattaaattaaataattaaattgagtgattaatttttaagaattgcttaagtgcctattatgcgttggcagcattatacrggtaaatgagacaaacaaggtccttatccttacgttctgtgggatccagaggaaggtctggaaaatattcacctatactaatgtttccctaaatggaagccatctccatttttaatctactataaaatggtaagatcaaataattttactgtcacttcc

SEQ ID NO: 145688 - DNA, 604 bp, Homo sapiens
aagaaaagaagaaaagaagatgggggaggaraagtcgatccaaaaatatagatgaaatattattcattactatctctcttttttgtttgtttgtttgtttctttgtttttgagatgttgctttgatcttgttgcccaggctggagtgcaatggaatcatctcggctcatggcaacctctgcctcccaggttcaagtaattctcctgcctcagcctcccgagtagctggggttacaggcatgcatcaccacacccagctaattttgtatttttagtagagacgaggtttctccatgttggtcaggcaggtcttgaactcccgaccgcaggtgatctgccagccttggcctcccaaagtactgggattatagatgtgagccaccgcgcctggctcattactctcattttatagcaagggatttaactaattaatggataatatttagtatttatttctaaattttaaaaaatgagaattcaaaaattctacattatacaattaaattgctcatctatgaatatcacagcatgcttccaatttttaaatttctttatagaccttagaatggtacatttaaaaaatgttgaataaagagaaagtggat

SEQ ID NO: 145689 - DNA, 604 bp, Homo sapiens
aagaaaagaagaaaagaagatgggggaggaaaagtcgatccaaaaatatagatgaaatattattcattactatctctcttttttgtttgtttgtttgtttctttgtttttgagatgttgctttgatcttgttgcccaggctggagtgcaatggaatcatctcggctcatggcaacctctgcctcccaggttcaagtaattctcctgcctcagcctcccgagtagctggggttacaggcatgcatcaccacacccagctaattttgtatttttagtagagacgaggtttctccatgttggtcaggcaggtctygaactcccgaccgcaggtgatctgccagccttggcctcccaaagtactgggattatagatgtgagccaccgcgcctggctcattactctcattttatagcaagggatttaactaattaatggataatatttagtatttatttctaaattttaaaaaatgagaattcaaaaattctacattatacaattaaattgctcatctatgaatatcacagcatgcttccaatttttaaatttctttatagaccttagaatggtacatttaaaaaatgttgaataaagagaaagtggat

SEQ ID NO: 145690 - DNA, 611 bp, Homo sapiens
ttccctgtttaaacattgctttttaataaagagctaaacccccctacactaaattagttgtgtgcacttctttataacacgtcaaatgagctgttyggttgtctcatttcttaagtattaaactcttgaggtaagggtcacttgtatcctgacccttgcacaaatctaccaccacagctgtatttctagtgcctaggatactttataaatacatgttgaatacaataaaaagatataaaattttatgagcagtgttgcttttttaaatatccattctgagtgatacttgccctgaaaacagtttccaaatatactgccttcaccctttccacctttcactaattgtatgaggttggtatttccagcatttaactcaaaatgtaactttgggttgtttaaccaaccattttgggaattggacttcacactgagaggactgaatctaaggttaatatatcaaactgaggctgtagcagaatcctctttcttcttatagacaatccatattcttcttatgaccctagcagagaatagatacccagccaactatttgattaaatcctctgttcccaccaagagtgaagtcactaacaagctgagagatcaggcat

SEQ ID NO: 145691 - DNA, 611 bp, Homo sapiens
ttccctgtttaaacattgctttttaataaagagctaaacccccctacactaaattagttgtgtgcacttctttataacacgtcaaatgagctgtttggttgtctcatttcttaagtattaaactcttgaggtaagggtcacttgtatcctgacccttgcacaaatctaccaccacagctgtatttctagtgcctaggatactttataaatacatgttgaatacaataaaaagatataaaattttatgagcagtgttgcttttttaaatatccattctgagtgatacttgccctgaaaacagtttccaaatatactgccttcaccctttccacctttcactaattgtatgaggttggtatttccagcatttaactcaaaatgtaactttgggttgtttaaccaaccattttgggaattggacttcacactgagaggactgaatctaaggttaatatatcaaactgaggctgtagcagaatcctctttcttcttatagacaatccatattcttcttatgaccctagcagagaatagatayccagccaactatttgattaaatcctctgttcccaccaagagtgaagtcactaacaagctgagagatcaggcat

SEQ ID NO: 145692 - DNA, 388 bp, Homo sapiens
actcactcactcactatcatgagaacagcatgagggtaactgcccctatgcttcaattacctcccactgggtctcttccatgacatgtggggattatgggaactacagttcaagatgagatttgggtggggacacagccaaaccatatcatacctatcatatgacagtttttatattatctatattatatgaaaattataggagatcattgtgtgaactgagctcatgcactaggtccaacagaccagactggacaaactagaatgcagtaacttgtgctaggttccatgtaatcaaaatgaactttaaaatgaaccagttttccaaaaaaaaaaaaaaaaaaaaggggaaattcacagcwatcaatcagaaggggcctggtttacct

SEQ ID NO: 145693 - DNA, 565 bp, Homo sapiens
tcacttaacctaataattgccagttccatccatgctgcaaatgacaggatctcattctctctttatggctgaatagtactccatggtgtataagtgccacatgttctttatcaactcatctgttgatggacactgaggttgcttccaaatcttggccattttaaatagtgttgtaataaacacaggcgtgcagttatctcttcagtatactgatttccytttttttttttttttttttttttttttttagtatatatctaggagtaggattactagacattactggagaatatggtagctctaattttagtttttttgaggagcctccaaactgttctataaagtggttctacaaatttacattcctaccaatagtgtacaagcattcccttttctccacttccttgccagcatttgttattgcctgtcttttgcataaaatgcattttaactggtgagatatcttattgtagttttgatttgcatttctctgatgatcagtggtattgagcaccttttcatattcctgtttgccatttgtatgtcttcttttgagaagtgtcta

SEQ ID NO: 145694 - DNA, 565 bp, Homo sapiens
tcacttaacctaataattgccagttccatccatgctgcaaatgacaggatctcattctctctttatggctgaatagtactccatggtgtataagtgccacatgttctttatcaactcatctgttgatggacactgaggttgcttccaaatcttggccattttaaatagtgttgtaataaacacaggcgtgcagttatctcttcagtatactgatttccctttttttttttttttttttttttttttttagtatatatctaggagtaggattactagacattactggaraatatggtagctctaattttagtttttttgaggagcctccaaactgttctataaagtggttctacaaatttacattcctaccaatagtgtacaagcattcccttttctccacttccttgccagcatttgttattgcctgtcttttgcataaaatgcattttaactggtgagatatcttattgtagttttgatttgcatttctctgatgatcagtggtattgagcaccttttcatattcctgtttgccatttgtatgtcttcttttgagaagtgtcta

SEQ ID NO: 145695 - DNA, 605 bp, Homo sapiens
tatttttattaagttaaccaccaacagcatgctcatcaccatcactgtcataattatttttcacattaagttgcttgagcatactttgtatttggcctcagacttggtgctgtagaatcaacgatgtagaagccagtctttgtcttaaaggatccaatagactagttgtgtctacagatctcactctccaaaaaatggtaaaagaagaaaccacaggaagagacaggctgagacaaataaaaaaatagttttgggatgtctgyattcctctaaagatgggtgggctttggataagtggaatataggacatttcaggtaagatttagagtaaatggttgctaaggtaataattattgcagtgcatttgagaaaaaatacattttctactgaaatggaaatggcattcaggttataagacctgggttttccccatcaaacagtggtgtgtgatatttataagtatgcttgaatgctagaggaggagggcttacattttgctttaggctgtcacataacttttgaagttaatgtagagaaagagcatggaataaaattcaaattattttgcttatagataaagagaccatataatttatcaccaagct

SEQ ID NO: 145696 - DNA, 507 bp, Homo sapiens
aattccaatattccctggagagaatgtggttggatagctagagtcagatgtatgctacctgccaagtcagctctggttgggttggcacaccatacatgggtggtaccagggaccacccataaggagtttcaagtatggttttgcattagggttaatgtcctgaccaaatcacaggactaaataagagaaagtaaaattaggggaactgacagacactgtaattgtcctaaagaccagggatgaaagggggagaataatttctagaacactggcagaagcaatggrattaacaaggcatacataaggctagaaatatattttcccaggttactcctggaacaaataaaagaagaaaataatgatacaaaatcaatctaatgtaggaaaggatgtattctaacttcgatgatactttattgatacaaaacaagtgacagtgatcattaaatcaggtcagtgttaccttggctaagctctcaagttaatgaatgtcgagatgacctgttt

SEQ ID NO: 145697 - DNA, 508 bp, Homo sapiens
gaattccaatattccctggagagaatgtggttggatagctagagtcagatgtatgctacctgccaagtcagctctggttgggttggcacaccatacatgggtggtaccagggaccacccataaggagtttcaagtatggttttgcattagggttaatgtcctgaccaaatcacaggactaaataagagaaagtaaaattaggggaactgacagacactgtaattgtcctaaagaccagggatgaaagggggagaataatttctagaacactggcagaagcaatggaattaacaaggcatacataaggctagaaatatattttcccaggttactcctggaacaaataaaagaagaaaataatgatacaaaatcaatctaatgtaggaaaggatgtattctaacttcgatgatactttattgatacaaaacaagtgayagtgatcattaaatcaggtcagtgttaccttggctaagctctcaagttaatgaatgtcgagatgacctgttt

SEQ ID NO: 145698 - DNA, 491 bp, Homo sapiens
atgctacctgccaagtcagctctggttgggttggcacaccatacatgggtggtaccagggaccacccataaggagtttcaagtatggttttgcattagggttaatgtcctgaccaaatcacaggactaaataagagaaagtaaaattaggggaactgacagacactgtaattgtcctaaagaccagggatgaaagggggagaataatttctagaacactggcagaagcaatggaattaacaaggcatacataaggctagaaatatattttcccaggttactcctggaacaaataaaagaagaaaataatgatacaaaatcaatctaatgtaggaaaggatgtattctaacttcgatgatactttattgatacaaaacaagtgacagtgatcattaaatcaggtcagtgttaccttggctaagctctcaagttaatgaatgtsgagatgacctgtttgtagcaataaccaaaggtcactttcaggtgaattc

SEQ ID NO: 145699 - DNA, 512 bp, Homo sapiens
agttttctggtagaatttgacagtaacattgaatcaactatttttacaatgttttcagccaaacttggccctgggcttttgaatacgatgttatttaggacctcatctggtttttgggttttttttaacaatacagtggcattaaattattaaggggatatatgtgtttttgtggtgaggataattaaggacatagtcattgtttaggctatgctgcttttatttatagcaacattgggatgaagtcaggaaaaccaggttcaaatcagctttatcacatatcaagagcatgaaaatgccaagttacataacttctaagccttcctcatcttcaaagtggggataacaatacttgctttataaatttattgtgaagatcaagtaatttagtctccatgaagaacttgttacagcaccttatgwcattattatcactattaggcaattttgcaatgacccttttaaagtaggtcaggcatatttccatgttaggttaccaggaagtttacaag

SEQ ID NO: 145700 - DNA, 561 bp, Homo sapiens
catatgctggtaatttttacttgcctctaggtataactgaattattctacatttgttttccatatgaaaacatgtgatgttacctgagaaattgtttggataaatgcagtgtatgtacttgaatgttttacaatgctgttccaactggaaacttgctacatgtcatatttttttttatatatgaaaataatctctaaggaatttatggaccaagaaagaagatattgtattagttttctatttctggggactgaaatcagcctgctaacttatttcttctggaggctgcaggaaagaatctattccttgtgttttccagtttctagaggctrccagcattccttggcttgtgccacatcacttcaatctctccttctgtcatcacattgcttctctttgcctgacctttctacatccctgttgtaagaatgtttatgattacactgggctcacctagataatccaggataatcttcttataataaaatctttaacttaatctcatttgtaaaattcctttaccattaaggtaacattcacaggctctagaaattaagatgt

SEQ ID NO: 145701 - DNA, 632 bp, Homo sapiens
aaatccatcatgattcaaaaatgacatttttttttttcaggaataagatagacttaatgggatttacctaacgagcctatgttatcagctcgctaaagcaagtttcaacctttaaagacaatttatattgttaccgttttggggacagttttatattatccctctaggaaatctcagttaaaaatagcctgctatataaaccacctatgtatttttcaaccagatattccatttcaaattcagtttttaaaaacattagttataggagtcaaatgaaaaaaaatttcagtatttcaagatgattacttaaaaatatatccactttattgagttccttgaatcagaagctaaacatgttgtatatatgtgtgtttttcatttatcctatttaatgcttcatcccacacttctgagatagtcagattaatcttattttaaatgtyttcctattatatgaaacatagtgttttacactgtaattaaaacaaggagcttatggaaatgtgaaggcggtttcacttacatgcctaaggaagaagatcaaagctagtaccatgtatatctttttataataatagattcttgcaatcaaaaaacatgaaaagattaggacaagcatagcctacacagtt

SEQ ID NO: 145702 - DNA, 632 bp, Homo sapiens
aaatccatcatgattcaaaaatgacatttttttttttcaggaataagatagacttaatgggatttacctaacgagcctatgttatcagctcgctaaagcaagtttcaacctttaaagacaatttatattgttaccgttttggggacagttttatattatccctctaggaaatctcagttaaaaatagcctgctatataaaccacctatgtatttttcaaccagatattccatttcaaattcagtttttaaaaacattagttataggagtcaaatgaaaaaaaatttcagtatttcaagatgattacttaaaaatatatccactttattgagttccttgaatcagaagctaaacatgttgtatatatgtgtgtttttcatttatcctatttaatgcttcatcccacacttctgagatagtcagattaatcttattttaaatgttttcctattatatgaaacatagtgttttacactgtaattaaaacaaggagcttatggaaatgtgaaggcggtttcacttacatscctaaggaagaagatcaaagctagtaccatgtatatctttttataataatagattcttgcaatcaaaaaacatgaaaagattaggacaagcatagcctacacagtt

SEQ ID NO: 145703 - DNA, 544 bp, Homo sapiens
atactaaaaaacctttactgcaatgttgaatacctctaaatgtgagaaagtctgttctgaaatgaatttcacctccttgcagctctcagctgccctctaagctaggtatagcaattttgtctcctactctacaagaaaaatcttcaaatgtttgaatagacttgtgtcttccctcaatttcccttttgctagggaaacattcctagctcctccaactctcaaatctgtatcattttcatacatcctctggacatatttcaatacatcaagtttctcttaaaatgtgctgtccaaagtagaatgtaataatcaaacactgtaaagagccatacactggtaaaacaatgtgagaacattttttcacggttgtataacaatttggggccatattattgtctataataatagttttttagatgaacttctataattgtgcaatttatrttttgaactttaagcaatttacaaaaagttctctttgttaaataatattttgttgattctaatgtagtgccatagatcatgtcaaatctatattacatca

SEQ ID NO: 145704 - DNA, 520 bp, Homo sapiens
aatgagatcatatccttttcagggacataaatggagctagaagccattatcctcagcaaacaaactaggtacagaaaaccaaacacttgattttctgccatttctacatgtgactagccagcatgttctcacttataagtgggagctaaacaatgagaacgacacatggacatagggaggggaacaacacacatgggggcctgttgggggcaggggtggtggcagtgggagaaagagcattagcataaatagctaatgcatgctgggcttaatacctaggtgatgggctaatagatgcagcaaaccaccatggcacacatttacatatgtaacaaacctgcacattctgcacatgtaccccagaacttataaaataaaataataaaakattgtttccctggactaaggagtgtatttcataaaagaggagacaattggtgtccaattctgtggaaagttcaaatagactgacttcttagacaagctcattgtaggcaacaatgttatcttgtatcacctg

SEQ ID NO: 145705 - DNA, 533 bp, Homo sapiens
tgaatcctctaaactacagcattgagaaaaatggcatagctctgaaaaatcagcagccatgtcctcaccaagctttgaattcaattggtggaatgtaactctcagaacaataactaatagtgctgctgtgatgtgaacttccagtaaccttacagattcatcaaatgccttatccttacctgaggcacggatgttgagagatcatgttataacatggtacacttctgattaaagccttccaagttttattatataaagtattatraaaattaaaatatagaagcaacactcatcctcacaacccaaaataattattatcccacctacaaacacccctggtattctgggtgcagtggtccttagcatatgaaggaatcacaggaagccaactgtcaagtaagccttatatatgacaagaggtagacattcttctcttggtgtatatttcattacagattagaaggaggccatgagattcatgaagtagtggggaagtggtagattggggattggaaagtttggattctgcctgc

SEQ ID NO: 145706 - DNA, 542 bp, Homo sapiens
agagttcaataatttgtatttgtaacaagttctgaggagatgctattgctgagaatcactgaaataaggagaaaaaggaatcatcagttataaattccacctgaagacaagatgctctataagcgacctttgctccctttgaaactgaacagcttggatggtgctgaaaaagggtttatgtgtgtagaagtttctttccgggcaaaatggcaactcttctgccaaaatgtcagatatatccattatttcacttttaattagtttcagggatgtgttatgaaatttagctaattttttttccagatatcacttagaattttacctggtctctgttggtattgctactacytgctgtcagcaggttccaggtgctttggaagccaagattgagcaatctggcctcaattaagcttgataaattgtttctgaattaaactgagaaagtttgagacaatacctataagtgaaaaaaaaactaagctagctatttatgaatgaaaaaccttttatctaaaacaatgttaatacctgagaacataaaa

SEQ ID NO: 145707 - DNA, 406 bp, Homo sapiens
ggaattccttattctgccattttcactgccattaaactggagggttttccccaagaaactcattttaaaatcccagcacagcagttcaaagacagtaggtttaactaattattttccaacccagtacttagtgtgttagtgtgagtactgctctactttatgtgacttctaaaggaccaatgcttttatccatgtgatcattctgaaggtctktcttccaaagattttaggttgctttctgtgctgatcatatttcctctgtcacatctatgaaataagaggctatggacagtcctctttcccattattatcatggaactgaagttcacagagtttgctgacttgctcacggttgcacaggaaggtgaagatggaggtaaaattccagacctcctgattccccatc

SEQ ID NO: 145708 - DNA, 612 bp, Homo sapiens
tgaagctgctgcttacacgcacctctcaagcagttgttgtgcaaaaacaactaaatagagatgaatcatagtgccagacctgcccccttcctcatcttcctgggacactcatcctacagaccagttgctcttgtrtttccacttccaaagccctttccagctgctcctctgagattccttcctcctctccttgcaccaacaaggtttaagcaggagataatccaatgtgtcagtcactcactagcagtcctgttgggatgtgtaataagtgctctctctatcccaggcactatgctagactcttcacatatgctagactgttcacctcattcaatcatccaacaaccctgttaggcaggtacccttatattatcccattttactggtaagaaaactgagacttaggaagattaagtaatttgcccaaggttacggggctagtactgacaagcaagttcaaaaccagtttactgcagcaaagacggagcctctatttgaggggtaaaaaaggaaaaagattaaagcaaacaaacaggaaaacttaaagagataacattatatactttcaaggtgacatcttaccagaacactgcactcaaagatgcaaaagct

SEQ ID NO: 145709 - DNA, 501 bp, Homo sapiens
catatacaacagacccaaagctaatatcatactgaatgaggaaaaactgaaatcctttcctctaagatctggaacatgaaaagaatgcccactttcaccaccgtttttaaacatagtagtggaagtcctagctacagcagtgagagaagasaaagaaataaaggacatccaaattgaagtggaagaagtcaaatcatccttgtttgcagatgatataatcttatatttgggaaaacctaaagactccataaagaaaccatgggaacttctaaataaattttttaaagttgcaggatacaaaattaacctacaaaaatcagtagcatttctatatgtcaactgtgaacaatctgaaaagaaaatttaaaaagcaatcccatttattatagctgtaaataaaatatttagaaatcaatgaaggaagggaaagatctctatgataaaaactagaaaacactgatgaaagaaattcaagaggaaacaaaaaggaaaaatattcca

SEQ ID NO: 145710 - DNA, 582 bp, Homo sapiens
aaatctttctccttaccctctccccatatcttctatctcccctttggttgtctataatcattgtcagcatttatgccacttacctctcagtcttccaatctagttactatcctyatctttccacaaaatcatcttgttaaagtaacccataacatgtagattgttaaattcaatgagcatttttctcttctcagtttatttgattctcaaaaacctctgatacaattgacctctctgtctgtgaaaacgttctattaagttggtgcaaaactaatcacggcttttgccattgaaaatcatggcaaaaactgcagtcacttttgcaccaactaaatacttcctgagtttccatgaaaaacctcttcctacatattcttttctttctctttctggccactcacactgcccattttagtgctacattttctcatctttactacctgagtgtcatgaggttcttacttcatgctaaccactaggcaaatattagaatacaacctatattaattaataagtgaaactctataattttgatgtagtaaggatttagtgtgtgctgctcccagcccctcttccttcctg

SEQ ID NO: 145711 - DNA, 392 bp, Homo sapiens
aagctctaagcacttaacaccgtttgctacatagtaggggctttatacatcgttgttgaataaaaatgaactgattaataaaggactgcatgtgaattctgtcacttgcagagttcccagactctgtagacatggcggtggagtcagggatcatggtcctttgggtggttctttattatttcatgattctgtttctaaccactttcattttcttatggtgaatgcatatctcatgaagctaaaactttccagcctccacagggacagggaaacattctgaatcctgggagagcayaattgctccaaagacaatagtacaagagcagaggggacaaagtttctaagtagggctagagttgacctgggaactagggtgagacaggtgtctctgt

SEQ ID NO: 145712 - DNA, 589 bp, Homo sapiens
actactgtgtctctgtcaggatccttttcttggtgattacttggcctaactctgatatttgagtctttgtcttcctgtaatatcgttaacatcactttcttccaatcattgtactgatcatgtgaaacagatgctagaattttatcttttccattgcacaacattttacagagtgacatatacttaactataagcttaactataagcttatagtttataacactaaactataagcttgaggacatgaagcttgcattcttatcattatattcctagcccctggcacaatggttgtctgttagtacatattggttgaatgaatgaatgaacaaatatagatcttcctaatattttgagttctgagagtttataaaaagtgatctttataaaatgaaagctgggatcgtttttgaaagattctacatcttcttggcattattattatgtagygtggcatgtttcttgcccttgaatatcctctcgtctactggggaaaccggatatctaactagaatgtaggtggggccatggtaaagatttacatagggtgttgtgagaagataggggacaatcatacaatcctttaagg

SEQ ID NO: 145713 - DNA, 613 bp, Homo sapiens
ccacattctagtgacatgttaatactatgcactgttgatgtcttactgctctcatgccttcccaagtctattgtataggaagggaagagaagggactaagctttgttgagcacctagagatccagtctctgaggaatcaagtcatgtaatacccacaaaaatcatccagtaggtatattactattttacacatgagcatttagaaagatttagggtgtttctcgcaaactatcagttaattattatctgggtctggcttttgctacyttcttattagattctcagagagctaattcacctccaactctgggggtgttgccctgctgttacctaacacgaactgaccacattaataacatcacacaatgtaatttacaaaactgaaatttaataggttatatttaattgttaacaattaaattattagaagtggtagaattagatttagattttctgcctctaaatctagcagtcttctctgatgacttctaaaatgtgatcaagtggatataatacaacagaaaaacattttttccttttcatcatttctgacaatgtagctagaaacgaactgggctatccttttgacacactaatgtttggccactttctt

SEQ ID NO: 145714 - DNA, 540 bp, Homo sapiens
ctgtcctctttgtgagtttcaaatatctatgttgaaattttgaaagtgaagaattattttgttctctctgctttattttctctctttgctgggatattacttggaaaactctggcaaaataaatgggaaataggtaaaataagaaaaaatggagagagaagacacacacatttataaaaccatattataccccactataagtagatagaagtcaaaacatcgatatacaaatgaacactcatatataccaggtatgtatttgtgatgaggtaactagacatagacttttcaagagacctaaatttaaatgttttgaacagtttctrtagataaagaaagcaagttactttgaaatatacctttttgttttgttttggaatagccaacagaatcactatgtagtcactcaaatatatgacacatattttattcattgttcatggtgaagactctacatggtggaatgatgccaaatatgaatccttcagtctagaatgttaactattctttttataaatataaaggactcctcagtgatga

SEQ ID NO: 145715 - DNA, 581 bp, Homo sapiens
tgcagagctggataactggacactcgaagaggatagagaactcagaaacagcaagtatatatgaatgaaacagccacagaataaaagatactaaagcatattggctttcctcttaggaaacaaaaatgcatccatatttcacactaagcatgaacattgattccaggtatattaaatacttaaatgtaaaaaacaagtcttttaaaactttagaagaatgtttagaaaaatataggaggtattttcttaagcatgatgtaaaaagcacaaaccataaagaagaaacctcttctctttactaaaaatcactatgaagagagtacaaagacaagtcacaaactgagagaatgaatatctataacatgtataactaaaaatccatcacctcttgaatcagtaaaaaccataataactctatagaaaatgaacaaaaagataagtaaatatttcatagaagctcaaatcactaataaacataaaaggtgctcaaactcataactaaccagagaaatrcaaacaaactaaaaccacagtcagatgctattttacatacacgagaaagacaagaatgaaaatgtttg

SEQ ID NO: 145716 - DNA, 582 bp, Homo sapiens
aattttagaaactgccactgtctttgactcagttctaaaaataatgcaaaacgtattactattttccaccattccagargggagatcacatataggataggcaaaataatataccccaaatcatttctatttatttagaaatacatttacatttaagtattacttgaatttggggcaattgacatatttcaagaccaataaagaaaataaaaataattggctgagccaagaactggctgttacctcaaatgggaaagttttctctctttggggtttaggttactatagaaaagactggccaggaatgaaatattatgaagatcatgctacagtggccctatacaatgctacttctgctggtgctcctatatccaggaatcttccaggtttcctactttggaactaaccttttcaactacaatggaaaatagagttactgcagaccaaacattattttatatatctatcgttttccccaatgtgagaaggaagatacattagcacattccctcagcaagagtgaaaaaaaaattaattcaaagtacaaagcaaacagaaaattcagctgaatcattccaaaca

SEQ ID NO: 145717 - DNA, 465 bp, Homo sapiens
tgttgggagataagaaaaccaatgaagtctccattgaaatatgcactggggttaggtagtctgtggatagttatgaggggatttgaaaacttaccggagragacttgttttaggagacaggtgaaaaggaggcatcacaaattcttaagggatgaagagttgggggcagttctagaaagataagcagagtccagggtgagtagaaagggagagagattggagtcagttcagaaagacagtaactcagcaagaataaatggaagttggaataagatttagctagaaacagaagcatgggataagacgatgagtaaatcctaatgcatttcataagaagaagcaacaaaccctgtagaaatactaaatatgggaaatgagagtaagaaatgataaacatgcttcttataagtgtatgtgaaatgagataactccaaacttttctatgaaaactggaaaaaatagcca

SEQ ID NO: 145718 - DNA, 554 bp, Homo sapiens
tgaaaactggaaaaaatagccatcaacacaaaattcgaaacaaagagggggcagtaaatctgaatcaagagggataaacatgtagcatttcctaaatrtattaccagtgaaatactttctttgttgaacttgaccttgggcatgttaaatttgagtaacacaagatatccaattattttaaggttttcactgaggggtaagaattgaatctctaaaaaggaatgaattcaaacttagaagttgcaagaagagaaatagcaaattattttttaatgtttttagttactccaccaataattgccaaatagatttggtttgcttaaagataacagatacagttattaaaaatcataattttcagtgaagtctcacaattatatcaataaagattttatgctgttattcctgaaaatgaataaaatgtaccattttgcacctgttttgtggcttttttgtaacagaactccaggtttttaaaattcccccaacaacaacaaaatgcacaataaaaaaaaaaacaaaacaccccaagcctcatgctttcaattagaatt

SEQ ID NO: 145719 - DNA, 554 bp, Homo sapiens
tgaaaactggaaaaaatagccatcaacacaaaattcgaaacaaagagggggcagtaaatctgaatcaagagggataaacatgtagcatttcctaaatatattaccagtgaaatactttctttgttgaacttgaccttgggcatgttaaatttgagtaacacaagatatccaattattttaaggttttcactgaggggtaagaattgaatctctaaaaaggaatgaattcaaacttagaagttgcaagaagagaaatagcaaattattttttaatgtttttagttactccaccaataaytgccaaatagatttggtttgcttaaagataacagatacagttattaaaaatcataattttcagtgaagtctcacaattatatcaataaagattttatgctgttattcctgaaaatgaataaaatgtaccattttgcacctgttttgtggcttttttgtaacagaactccaggtttttaaaattcccccaacaacaacaaaatgcacaataaaaaaaaaaacaaaacaccccaagcctcatgctttcaattagaatt

SEQ ID NO: 145720 - DNA, 554 bp, Homo sapiens
tgaaaactggaaaaaatagccatcaacacaaaattcgaaacaaagagggggcagtaaatctgaatcaagagggataaacatgtagcatttcctaaatatattaccagtgaaatactttctttgttgaacttgaccttgggcatgttaaatttgagtaacacaagatatccaattattttaaggttttcactgaggggtaagaattgaatctctaaaaaggaatgaattcaaacttagaagttgcaagaagagaaatagcaaattattttttaatgtttttagttactccaccaataattgccaaatagatttggtttgcttaaagataacagatacagttattaaaaatcataattttcagtgaagtctcacaattatatcaataaagattttatgctgttattcctgaaaatgaataaaatgtaccattttgcacctgttttgtggcttttttgtaacagaactccaggtttttaaaattcccccaacaacaacaaaatgcacaataaaaaaaaaaamaaaacaccccaagcctcatgctttcaattagaatt

SEQ ID NO: 145721 - DNA, 567 bp, Homo sapiens
gacttgcaagttagctattattawtttaattttaaagatgaagaaaaagagatatagacagttatggctcagtattctatttatagattaaatctaataactagttttatatgtaatctaattaagagaaacaaaatgtcagaatttaggaagtcatattttaaatagaagccacacttagccttcaattataaaaacattataaaattaaagtattataattacatttcatatataagaaggggttttgaattctcagaatgaaaaaataaaaatactatgtgctcaaaatcagctcaactagctaaggctatacgtgctcacataatgagctttgtcattgttaccaatctgtcagattacgtgaaaatatagatgagaatgacaatttgcatgaagttacagtccagacaacaaaacatgcatttactagatgagataaccatagaaatataggtcctctcattttatttctatttcaagtggttaagatgctttgataattgaaaaatctaggctacagattgcctatttttgcgtacatctttattgacaagccatggttta

SEQ ID NO: 145722 - DNA, 570 bp, Homo sapiens
tattgagtacttatgtgtcatgcacttttctaaatacgtttgatgaaaaacttcacttagccttcccaaaggtcctataagatgggcaccattacaatgatgatctgacataggagaaaattgaggcatagggaagttaaataactttgscagggtgatattacttataagcttgagaacctggaacccaaagcccgtgctcttgagaactaacaatactgccttttccatggtagtataatacacttgctgatttaacaagctggaatagatatgcttcccggtcttagcacagcttgagtttatggtaaaataaacaggcttggcatttatgatcatgcattcagtatttttggtaacatttacttccactcaacataattatgacttagttttagaaactaaggaggaaaattaaaatatggcaaatttacagctttgggtaccaatttcttattttcttaaggagagcatgtagacagtaatgttgaatccccatgaaatgaatactctggttaaaaaaagaccttcttgtcttttgggggaggaatgtaagccaagaaaacaaag

SEQ ID NO: 145723 - DNA, 551 bp, Homo sapiens
ccgctactttcttgctcctgattttgccatgtgacctgcctgttcccacttcaccttctgtcatgactgaaagctccctgaggcttcactagaagtcgagcagatgccagcgccatacttcctgtacagcctgcagaaccataagctaattaaaccttttttttttaataaattacccagtctcaggtatttctttatagcaatgcaagaacagcctaacacacttccctagttgagcactgagattactctatctcagtcaacatctttattctagscttatgagagaccataaaacaaaggcatcacactaagccgtatccagattcctgactcataaaaactacaagaaaatagaagttagttatttaatagggttttggagtaatttgttacacagcaataaataattaatgcataagtatttggttgagcatatcaatgtagtatttgatgtgaactttcttttctacttcctgcaactatcaaaatttaagtaaaatatccatctctcattatttcagggaatgtagtgaacacttaattgctct

SEQ ID NO: 145724 - DNA, 511 bp, Homo sapiens
aagtgaaacaagaggtttttttttttgccagaggagaacttagtccttggtgagcctcctggctggatagttgctaagctgcaggccattgaatcagagcagaagttttcagacttcttagcggaatttgaacaatgtaccctggaacttagggatcccagtgggtggactcacatggctcacttcggaaaagtctgatggaaagagactaaatggagytgctttgatagcaagaagagggaaagaaagttgttgtggggaaggctgggctttcagaacatggtagagacacttttctcacaacattatggaagagagctgggttggagtcatcttaaagcactagcctgttagaatgactgagtgacattttgtttccattttttagtttacactttgtaaacctagggtagttattcttcccgctcccccattgccatcagggaagggcatcttcattaagctggtgtagactttgtgcatttgaggcccctggtactgcaaggacagg

SEQ ID NO: 145725 - DNA, 424 bp, Homo sapiens
gaattctctcctggaagcttctgatctgcttcagtctgaacttgttgcctctgtgcttggtatagagctggcatctttatgatctttgttggttatatcatctttgtgggtttggatcttgtactttccctaattcgtgctcacttctcttctggatcactcttttatatggtggaacatgttctgagaaagggtataaggaggtaaaattttgagaccttgcctgatgaaatatctttgttgtcctttcattcttaatagtttggttacatagataattcaagttaggaaattacttcccctcakaatattgagagccttcctccaccactttctagtttccactgttcttgttgaggggttcaaagatattatgattcttactcttttgtaagtaactattatttttttctttctataaact

SEQ ID NO: 145726 - DNA, 416 bp, Homo sapiens
atgggttttctgcttatatttaacacctggacaccaacaattgattcgaagctcataactggatctttcaaatgtatactttgctgtaggatgccttgkgtgagccttttagctgaggaaatttgaggtcaaaacctggttgatttcccaaaaaggtatctccagttcttttgcccagagggtagactggtacctgtgttctgtgggttaaggggaaaggaggactggggactattagcacccagtatacatacacttcctaatgcctagtttccctttcatacctttgatctcaactccatcaggtgttttgcagacacaggaacagacattttactctttccagagaataaaccagtcttttattgcaataaaggaggaaaatatcctactgtaagaaaaaatggaagggtatc

SEQ ID NO: 145727 - DNA, 423 bp, Homo sapiens
actaaagtcccagcgggcccctagaggcaagtttcagagtgtgacccatgagaaggtgagctacattcaaaaagaactacttgaatgttctaatttatagaaacagaaatctggagaacaggcatgggaattgatattaaggatgtgagataatggtggaagaaacataaagttgggtcaggctgaatttattgatttagacccactaagtagggactctgcatttaatgttgcagctggggaaatttaaaaagtttctaataatgtatttgyttggttagctgaaatatagattaaaagatggcccactgtgaccaacctggaaatgtctgatctcccttgggttaatgtagaaaaaaggatccaaaaccttaaagagatagggatactgaagtagattagtcactttggaccgactcatcc

SEQ ID NO: 145728 - DNA, 599 bp, Homo sapiens
tggaggttatgcatgggctcagcaacatggactttcactcaccaaggttgacctggctatggccactgctgagtgmccaatttgccagcagcagagaccaacactgagccctcgatatggcaccattcctcagggtgatcagccagctacctggtggcaggttgattatatgggacctcttccatcatggaaagggcagaggtttgtcctcactggaatagacacttattctgaatatgggttgtttgcctgtcttgtactctatgcttctgctaagactaccatccatggactctcgaaatgccttatccaccatcaccgtattctacaaagctttgctgctgtccaaggcacttactttatggctaaagaagtgcagcagtaggctcatgctcatggaattcactggtcttaccatgttccccattgtcctgaagcagctggattgacagaatggcgaaatggccttttgaagtcacaattgcaatgccaactaggtaataatacttttcagggctgggtcaaagttcttcaaaaggctgtgtattctcagaatcagtgtccaatatatggtactgtttctcccatagccaggattc

SEQ ID NO: 145729 - DNA, 599 bp, Homo sapiens
tggaggttatgcatgggctcagcaacatggactttcactcaccaaggttgacctggctatggccactgctgagtgcccaatttgccagcagcagagaccaacactgagccctcgatatggcaccattcctcagggtgatcagccagctacctggtggcaggttgattatatgggacctcttccatcatggaaagggcagaggtttgtcctcactggaatagacacttattctgaatatgggttgtttgcctgtcttgtactctatgcttctgctaagactaccatccayggactctcgaaatgccttatccaccatcaccgtattctacaaagctttgctgctgtccaaggcacttactttatggctaaagaagtgcagcagtaggctcatgctcatggaattcactggtcttaccatgttccccattgtcctgaagcagctggattgacagaatggcgaaatggccttttgaagtcacaattgcaatgccaactaggtaataatacttttcagggctgggtcaaagttcttcaaaaggctgtgtattctcagaatcagtgtccaatatatggtactgtttctcccatagccaggattc

SEQ ID NO: 145730 - DNA, 599 bp, Homo sapiens
tggaggttatgcatgggctcagcaacatggactttcactcaccaaggttgacctggctatggccactgctgagtgcccaatttgccagcagcagagaccaacactgagccctcgatatggcaccattcctcagggtgatcagccagctacctggtggcaggttgattatatgggacctcttccatcatggaaagggcagaggtttgtcctcactggaatagacacttattctgaatatgggttgtttgcctgtcttgtactctatgcttctgctaagactaccatccatggactctcgaaatgccttatccaccatcaccgtattctacaaagctttgctgctgtccaaggcacttactttatggctaaagaagtgcagcagtaggctcatgctcatggaattcactggtcttaccatgttccccattrtcctgaagcagctggattgacagaatggcgaaatggccttttgaagtcacaattgcaatgccaactaggtaataatacttttcagggctgggtcaaagttcttcaaaaggctgtgtattctcagaatcagtgtccaatatatggtactgtttctcccatagccaggattc

SEQ ID NO: 145731 - DNA, 583 bp, Homo sapiens
cttctgctccctcctacttcccctattcctgcttgttttcttttctctcttgctcttgctcatacactcatgttcacacacacttacatagacatacagtacataaagacacagtctgaaacaattcttttcatatctatggttctaaaatagcttcctcacatgtgatttcctttttggttgttgttttaaggatgactgcattacttataattgggaaatgtttgttttggtaaggtaaaccagagacctagtctgctgtctggaggacttcagtttttaaaaaagaaacaaaacatatctgctgtgtttactcatttatctataaataattcaactagcatttatcaggtacatatgatgaccctaraactatacatttttcccatttgcacaaagaaaagagagtgatggattttgacatcaaaaatttcataatcttagtctataaaagcacaaacattactatagtgggccaaagtaaacactaagttagggatactgtatttcttattgtcaccaattactgttctgtggaatctaattgtacatatatgaaatacttttataatgttaaaggaca

SEQ ID NO: 145732 - DNA, 557 bp, Homo sapiens
caaaatgaaattataaaaataatccaaaagtaggtagaaaaagaggaaaaggaacagagaagacaaatagaaatatgatggattcaaacctatgtcaataatcacattaaatataaatggcctaaacacccyaattaaaaagcagagatcatcagattaggaaaacaaagagaagatccaaatacatactgtctacagaatccaaccttaactgtaaaggcacaaatacatttaaagtaaaagggagtaataagaaaatactgtgctagctctaattaaaaaaaaactggattgactatattaatctcacagaaaatagtcttcagaccaaagaacattagcaggtataaacagggtaatgttataacaacattataatgacagaggtaaacttatcaaaaagacatataatttcaagtggttatgtttccaataataaagtttccaaacaaataaagcaaatctgatagaactaaaaggagaaaaagataaatccacaagtataatttaaagtatgtttaaagttaaaagatggaacaagatatactatgattgtg

SEQ ID NO: 145733 - DNA, 557 bp, Homo sapiens
caaaatgaaattataaaaataatccaaaagtaggtagaaaaagaggaaaaggaacagagaagacaaatagaaatatgatggattcaaacctatgtcaataatcacattaaatataaatggcctaaacaccctaattaaaaagcagagatcatcagattaggaaaacaaaragaagatccaaatacatactgtctacagaatccaaccttaactgtaaaggcacaaatacatttaaagtaaaagggagtaataagaaaatactgtgctagctctaattaaaaaaaaactggattgactatattaatctcacagaaaatagtcttcagaccaaagaacattagcaggtataaacagggtaatgttataacaacattataatgacagaggtaaacttatcaaaaagacatataatttcaagtggttatgtttccaataataaagtttccaaacaaataaagcaaatctgatagaactaaaaggagaaaaagataaatccacaagtataatttaaagtatgtttaaagttaaaagatggaacaagatatactatgattgtg

SEQ ID NO: 145734 - DNA, 557 bp, Homo sapiens
caaaatgaaattataaaaataatccaaaagtaggtagaaaaagaggaaaaggaacagagaagacaaatagaaatatgatggattcaaacctatgtcaataatcacattaaatataaatggcctaaacaccctaattaaaaagcagagatcatcagattaggaaaacaaagagaagatccaaatacatactgtctacagaatccaaccttaactrtaaaggcacaaatacatttaaagtaaaagggagtaataagaaaatactgtgctagctctaattaaaaaaaaactggattgactatattaatctcacagaaaatagtcttcagaccaaagaacattagcaggtataaacagggtaatgttataacaacattataatgacagaggtaaacttatcaaaaagacatataatttcaagtggttatgtttccaataataaagtttccaaacaaataaagcaaatctgatagaactaaaaggagaaaaagataaatccacaagtataatttaaagtatgtttaaagttaaaagatggaacaagatatactatgattgtg

SEQ ID NO: 145735 - DNA, 530 bp, Homo sapiens
aaatagaaattttctttgggcaacattccacacttttctgtgtcaaattaactaatttccaatatttcttgtttcattatatctcttttttttaaaagtgcctctggtgagtgtatgtgtttattatagagatcttatctttaatataaacaactcaggaatgaactcttgttagaactctgttccattctgaatatatgtayaagtaatttattttactacaatcatacttgatataaaaatattattataatatctaaaagcatttctgtttggtggcaccaaatagaaatttatgcgttgtaagcaaataactattttttatctcaggaagcaagattcctttggattggcagacagtaatgctcaacggtgccattgagaaaacaagctgcttctagcttgctgctactctccatccttagcaccaacaactggatgtctaagaattgcgtttgttttagggaagaaggagtaagctttagaaacagcacaaagtagttccatcttatgggccaaaaataagtaat

SEQ ID NO: 145736 - DNA, 530 bp, Homo sapiens
aaatagaaattttctttgggcaacattccacacttttctgtgtcaaattaactaatttccaatatttcttgtttcattatatctcttttttttaaaagtgcctctggtgagtgtatgtgtttattatagagatcttatctttaatataaacaactcaggaatgaactcttgttagaactctgttccattctgaatatatgtataagtaatttattttactacaatcatacttgatataaaaatattattataatatctaaaagcatttctgtttggyggcaccaaatagaaatttatgcgttgtaagcaaataactattttttatctcaggaagcaagattcctttggattggcagacagtaatgctcaacggtgccattgagaaaacaagctgcttctagcttgctgctactctccatccttagcaccaacaactggatgtctaagaattgcgtttgttttagggaagaaggagtaagctttagaaacagcacaaagtagttccatcttatgggccaaaaataagtaat

SEQ ID NO: 145737 - DNA, 614 bp, Homo sapiens
cagcatatgaattcatcacagtggttcttactattaagtcattatatgtccttgaatctacctttagggcatatatttaaacccagttgagctcttttaatatatctctattgaggtatagacagcatagcaagtacttgtatttattttaccctcttggcaagaattccttacatatgttatagaaatataattttctcaatagatgctgctttaatttttgtaatatgaagtgacacagtatactgagtaaagccttttcagctccttacaaataatgtgatttttgagatatactattgggccactccataggaaatgytatctacaaaacattctctcaacacgtaacatataatccaaaagatctccaaattgcaatgttgaatatggggtacaactgtttgttataaacagcattgtcttttttaggctgttgcttccatttgtgaaaagcaaatctctaaaacgtaactagggacttagaaaagtagaatttcaaaattgccaaatgtctcctcgttgccttaaggtagaaaggaaaaggaagatgtaacaagttatgacagcggataacatatgttccagttgtctattgctgtgtaataaaacca

SEQ ID NO: 145738 - DNA, 614 bp, Homo sapiens
cagcatatgaattcatcacagtggttcttactattaagtcattatatgtccttgaatctacctttagggcatatatttaaacccagttgagctcttttaatatatctctattgaggtatagacagcatagcaagtacttgtatttattttaccctcttggcaagaattccttacatatgttatagaaatataattttctcaatagatgctgctttaatttttgtaatatgaagtgacacagtatactgagtaaagccttttcagctccttacaaataatgtgatttttgagatatactattgggccactccataggaaatgctatctacaaaacattctctcaacacgtaacatataatccaaaagatctccaaattgcaatgttgaatatggggtacaactgtttgttataaacagcattgtcttttttaggctgttgcttccatttgtgaaaarcaaatctctaaaacgtaactagggacttagaaaagtagaatttcaaaattgccaaatgtctcctcgttgccttaaggtagaaaggaaaaggaagatgtaacaagttatgacagcggataacatatgttccagttgtctattgctgtgtaataaaacca

SEQ ID NO: 145739 - DNA, 375 bp, Homo sapiens
ataaataatagatttagggttygaatataggcatgactgctccagagcatgcagtctctctctctctctcactcttgctccctccctacacacacacacacacgcacacacatttcattcacatacacttgtatgtatgtgtaaagacaggtgtacacattgtgtttatatttgtatgtaaatctatacgcataatgtttattcctggcatggctgtcccacatgaaattttcattagattactcagccttgctataaacaacccaaaacatacgcgtgtatataaagtgattttacctcatatgttagaatcacataaatcaaatgggggagaaaatgagaagaggctaagttagttgaacaacgtatctctgt

SEQ ID NO: 145740 - DNA, 375 bp, Homo sapiens
ataaataatagatttagggttcgaatayaggcatgactgctccagagcatgcagtctctctctctctctcactcttgctccctccctacacacacacacacacgcacacacatttcattcacatacacttgtatgtatgtgtaaagacaggtgtacacattgtgtttatatttgtatgtaaatctatacgcataatgtttattcctggcatggctgtcccacatgaaattttcattagattactcagccttgctataaacaacccaaaacatacgcgtgtatataaagtgattttacctcatatgttagaatcacataaatcaaatgggggagaaaatgagaagaggctaagttagttgaacaacgtatctctgt

SEQ ID NO: 145741 - DNA, 375 bp, Homo sapiens
ataaataatagatttagggttcgaatataggcatgactgctccagagcatgcagtctctctctctctctcactcttgctccctccctacacacacacacacacgcacacacatttcattcacatacacttgtatstatgtgtaaagacaggtgtacacattgtgtttatatttgtatgtaaatctatacgcataatgtttattcctggcatggctgtcccacatgaaattttcattagattactcagccttgctataaacaacccaaaacatacgcgtgtatataaagtgattttacctcatatgttagaatcacataaatcaaatgggggagaaaatgagaagaggctaagttagttgaacaacgtatctctgt

SEQ ID NO: 145742 - DNA, 477 bp, Homo sapiens
accccctgctcctctcacttcctttccctccgactgcgccccctccctcctccggctggcaccaccgaccccctggagttggtgctgctgcgaagtgcccttagaggatgctccagcctccccgcctgcgcccggtctcggctgcatcctttctgtctctcccacccacttccaccgagatggaaaagtgaacatccagggcaggaaacgagtgtttctccgtgccggtattccagaggccttagcccagggagactcctttcctcggggttcacagttcctctgggccctttcttcacacctcgtcacagttgcactcctcctccccaccccacccgggccccccggtatccctttrtgccacgctcacagctcgcagcccgggggcactccaggttccgtttctcgggggatctcacactggggagctgctgtaggtaaatcgccgctggaagcagtttaattccagttgcgggt

SEQ ID NO: 145743 - DNA, 241 bp, Homo sapiens
ccgtgtttgtcaagtatggcatcatggagtcatcttactcacagatggtctactgtatatttcacaattcatgttttatatgctattcacataaaaagctcagaattcggagacttgaacccctcctgtcacttttatactttcgtgtaaaagatayctcagatttcttctagtattagacatttttattttaaatttttttctctattgtatatgatgacatttccagaattaaaagctt

SEQ ID NO: 145744 - DNA, 574 bp, Homo sapiens
gtgaatgctggggagaaaaggagtagaggaggggtaggtgatagtaagaaatagaagggatttctcactgggtctggtcatatgctggctttgtgttttctgggccttgttgcaatttaacatctcttttctttatcattgttgtttatcagttttatgacaatcacctagattgaatttcttttcttttcttttcttttcttttcttttcttttttttttgagacggagttttgttcttgttgcccaggctggagtgcagtggcacgatctcggctcactgcaacctccgcctcccgggttcaagtgattcttctgcctcagcctcccgagtagctgggattacaggtgcatgccaccatgcccggctaaktttgtatttttagtagatatggggtttctccatgttggtcaggatggtcttgaactcctgacctcaggtgatccacccgcctcagcctcccaaagttctggggtttaaggtgtgagccaccgcgcccagcctgaatttcttttcatttaccctgattagtatatctgtggatttatgtcttttaacactcctggaaacatct

SEQ ID NO: 145745 - DNA, 574 bp, Homo sapiens
gtgaatgctggggagaaaaggagtagaggaggggtaggtgatagtaagaaatagaagggatttctcactgggtctggtcatatgctggctttgtgttttctgggccttgttgcaatttaacatctcttttctttatcattgttgtttatcagttttatgacaatcacctagattgaatttcttttcttttcttttcttttcttttcttttcttttttttttgagacggagttttgttcttgttgcccaggctggagtgcagtggcacgatctcggctcactgcaacctccgcctcccgggttcaagtgattcttctgcctcagcctcccgagtagctgggattacaggtgcatgccaccatgcccggctaagtttgtatttttagtagakatggggtttctccatgttggtcaggatggtcttgaactcctgacctcaggtgatccacccgcctcagcctcccaaagttctggggtttaaggtgtgagccaccgcgcccagcctgaatttcttttcatttaccctgattagtatatctgtggatttatgtcttttaacactcctggaaacatct

SEQ ID NO: 145746 - DNA, 574 bp, Homo sapiens
gtgaatgctggggagaaaaggagtagaggaggggtaggtgatagtaagaaatagaagggatttctcactgggtctggtcatatgctggctttgtgttttctgggccttgttgcaatttaacatctcttttctttatcattgttgtttatcagttttatgacaatcacctagattgaatttcttttcttttcttttcttttcttttcttttcttttttttttgagacggagttttgttcttgttgcccaggctggagtgcagtggcacgatctcggctcactgcaacctccgcctcccgggttcaagtgattcttctgcctcagcctcccgagtagctgggattacaggtgcatgccaccatgcccggctaagtttgtatttttagtagatatggggtttctccatgttggtcaggatggtcttgaactcctgacctcaggtgatccacccgcctcagcctcccaaagttctggggtttaaggtgtgagccaccrcgcccagcctgaatttcttttcatttaccctgattagtatatctgtggatttatgtcttttaacactcctggaaacatct

SEQ ID NO: 145747 - DNA, 542 bp, Homo sapiens
cattttaaaataggttttctttttattattgagttgtaagaattcagtgtatatttcaggtacaagtcccttatcagatacatgatttacagatattttctcccattctgtgtgtatcttttcaatttcttgataatggttttaattttgatgaaaacttttttatacttgtacttttsgtgtcatatctaagaaggttttgctaatcaaggcctatattttctaagagttttatagttttgtctcttacatttaggttcatgatctattttgagttaatttttgtttatagtacgaggaagggatctcttgcattcgtgctaagtggtatgtaattttggtagaggctatacagtgtgtatacatggctagccatccaaaaaaaaagaaagacttcggatactgagtccctaatgagctgccctggccagaagcattgcacctatgtggctgtttcatcattcaaaattgctaattaaaggtctgctatccacttaaccaacaatgtttatatatttttttttctaaaatgtatgtaaata

SEQ ID NO: 145748 - DNA, 561 bp, Homo sapiens
ccaaaagcaaatgcaataaaaacagtgataaacagctgggacttaattaaactaaagagcttttgcacggcaaaaggaacagtcggcacagtaaacagacaacccacagagtgggagaaaatcttcacagtctatayatctgacaaaggattaatatctagaatctacaacaaacaaacaaatcagtgagaaaaaaacaaacaatcccataaaaaagtgggctaaggacatgaatagacaattctcaaaagatgttatacaaatggccaacaaacatatgaaaaaatgctcaacatcactaatgatcagggaaatgcaaatcaaaaccacaatgtgatgctaccttactcctgcaagaatggccataatcaaaaaatcaaaaaacagtagatgttggcatggatgtggtgatcagggaacacttccacactgctggtaggaatgtaaactggtacagccactatagaaaacagtgtggagattccttaaataactaaaagtagagctactatttgatcctgcaatcccactactgggtatctaccagaggaaaagaagtcg

SEQ ID NO: 145749 - DNA, 561 bp, Homo sapiens
ccaaaagcaaatgcaataaaaacagtgataaacagctgggacttaattaaactaaagagcttttgcacggcaaaaggaacagtcggcacagtaaacagacaacccacagagtgggagaaaatcttcacagtctatacatctgacaaaggattaatatctagaatctacaacaaacaaacaaatcagtgagaaaaaaacaaacaatcccataaaaaagtgggctaaggacatgaatagacaattctcaaaagatgttatacaaatggccaacaaacatatgaaaaaatgctcaacatcactaatgatcagggaaatgcaaatcaaaaccacaatgtgatgctaccttactcctgcaagaatggccataatcaaaaaatcaaaaaacagtagatgttggcatggatgtggtgatcagggaacacttccacactgctggtrggaatgtaaactggtacagccactatagaaaacagtgtggagattccttaaataactaaaagtagagctactatttgatcctgcaatcccactactgggtatctaccagaggaaaagaagtcg

SEQ ID NO: 145750 - DNA, 327 bp, Homo sapiens
gatgcttctaagttttctgctgggggctggagcatccacaaggtaagccaagcccacagtccacaagtggaatcaggtcactgtcctcaggaagtaggrcgacaagggttaggaattactcactgggtacaatgtctgtcactcaggtgacggaaaccctaaaatccctgacttcaccactatgcaatataagcaagttacaaaattacacttgtactccatacatttatacaaatattttaaaaaagaaaaagtcttgatacagaggcccattttctctaaccaggaaggagtttccaaactacaagtcaattctttctaaaagca

SEQ ID NO: 145751 - DNA, 327 bp, Homo sapiens
gatgcttctaagttttctgctgggggctggagcatccacaaggtaagccaagcccacagtccacaagtggaatcaggtcactgtcctcaggaagtagggcgacaagggttaggaattactcactgggtacaatgtctgtcactcaggtgacggaaaccctaaaatccctgacttcaccactatgcaatmtaagcaagttacaaaattacacttgtactccatacatttatacaaatattttaaaaaagaaaaagtcttgatacagaggcccattttctctaaccaggaaggagtttccaaactacaagtcaattctttctaaaagca

SEQ ID NO: 145752 - DNA, 477 bp, Homo sapiens
accccctgctcctctcacttcctttccctccgactgcgccccctccctcctccggctggcaccaccgaccccctggagttggtgctgctgcgaagtgcccttagaggatgctccagcctccccgcctgcgcccggtctcggctgcatcctttctgtctctcccacccacttccaccgagatggaaaagtgaacatccagggcrggaaacgagtgtttctccgtgccggtattccagaggccttagcccagggagactcctttcctcggggttcacagttcctctgggccctttcttcacacctcgtcacagttgcactcctcctccccaccccacccgggccccccggtatccctttatgccacgctcacagctcgcagcccgggggcactccaggttccgtttctcgggggatctcacactggggagctgctgtaggtaaatcgccgctggaagcagtttaattccagttgcgggt

SEQ ID NO: 145753 - DNA, 477 bp, Homo sapiens
accccctgctcctctcacttcctttccctccgactgcgccccctccctcctccggctggcaccaccgaccccctggagttggtgctgctgcgaagtgcccttagaggatgctccagcctccccgcctgcgcccggtctcggctgcatcctttctgtctctcccacccacttccaccgagatggaaaagtgaacatccagggcaggaaacgagkgtttctccgtgccggtattccagaggccttagcccagggagactcctttcctcggggttcacagttcctctgggccctttcttcacacctcgtcacagttgcactcctcctccccaccccacccgggccccccggtatccctttatgccacgctcacagctcgcagcccgggggcactccaggttccgtttctcgggggatctcacactggggagctgctgtaggtaaatcgccgctggaagcagtttaattccagttgcgggt

SEQ ID NO: 145754 - DNA, 618 bp, Homo sapiens
atgaagtcttgctctgtgtctcaggctggagagcagtggcatgatcttggctcactgcaacctctgcctctgggttcaagygattttcctgtctcagcctcctgagtagctgggattacaggcacgtgccaccacacctgactaattttttgtatttttagtagagatgtggtttcaccatgttggctggtcttgaactcctaacctcaagtgatccgcccgtctcagcttcccaaagtgctgggattacaggcatgagccaccgtgcccggcccttgtctgttgttttatactttgtaacaactgtgagcaatctcttagctgataagaggagtggaaaaataccttgcctatcagttccatttccatcaccagttaatcagctgtgtgatcttggagccctagagagcacagtaaacatagaccatgaaaggtaaaagaatcacccactccagcttcttcattttatggttgaggtaaggagatccagggaagtgaggtgattttttttttaaaggctgcacagctgggtggttataaagcacagcttagagcctagatctctagttagtgctttttctcctcatttatttaataagggtaagtcatgcttgatat

SEQ ID NO: 145755 - DNA, 557 bp, Homo sapiens
gagttggccaggaaatggagctgtcytctgacctaccaaagagggagaaatgtggtggcaaccacactgtcttggatattaccaaatttgttttcagctctttaatgttcattctcattttatgtttgaggaaactgagaactgcatagattaattgacttatttttgaaatatttatttatttgagacagggtccagctctgtcactcatgctggagtgcagtggcacaatcatagcttactgcaacctcgaacacctaggctcaagcaatcctttcaccttagctgggactacaggcatgcaccaccatgcccagataattttttaatttttttttttattttttggtagagacaaagtatcactatgctccccaggctggtctcaaacccctgagctgaagtgatattcctgcctcagcctcccgaagtgctaggattataggtgccagccaccatgcttgagcattaatttttttagaagttaaattatttgtttatatcatccaggtacagtcctcagaccagccataaaaatgaaggtttctttagagata

SEQ ID NO: 145756 - DNA, 551 bp, Homo sapiens
ggaaatggagctgtcctctgacctaccaaagagggagaaatgtggtggcaaccacactgtcttggatattaccaaatttgttttcagctctttaatgttcattctcattttatgtttgaggaaactgagaactgcatagattaattgacttatttttgaaatatttatttatttgagacagggtccagctctgtcactcatgctggagtgcagtggcacaatcatagcttactgcaacctcgaacacctaggctcaagcaatcctttcaccttagctgggactacaggcatgcaccaccatgcccagataattttttaatttttttttttattttttggtagagacaaagtatcactatgctccccaggctggtctcaaacccctgagctgaagtgatattcctgcctcagcctcccgaagtgctaggattataggtgccagccaccatgcttgagcattaatttttttagaagttaaattatytgtttatatcatccaggtacagtcctcagaccagccataaaaatgaaggtttctttagagatacaga

SEQ ID NO: 145757 - DNA, 581 bp, Homo sapiens
ccatggcctcaatagcaggaacatatgggtccagaaaccaaggagtggaagttggagtagtccctttaccattacttctgctgatcatttggggggaaatcgtgttttctgtctcagaaattttagctctgttgtattagggtcctgrctcttgggtgatggaagggaatggtatctggtgggggacatatgtgttctactaaccttaaagctacagctgctgacctgcttattgtggacttctcattcctgtagatcagcaggcaaagaaaggagttaatatattgaccagggtgcttgatcatgagtattgtggggagatagggtggcttctacctacctgggagtaggaaagacatgtctgagattcagcacatatactgcaatgctttttgatgcttttggtcctgataataataatgaaagaccaattttaagaactatggcccaatctactatggtgaagtaagtaggttttactcatgggtgagtgctatattaccccatcagaaatctggatgagcaaaagttctggtctaaggagtgaagactctacaatgtgtagtagaggagagagatga

SEQ ID NO: 145758 - DNA, 486 bp, Homo sapiens
aattgtttcttacttaaaaacaaagtcttgaaacataatttaacttattttcttactgaagttttaaccactttccagcctgatgtatctcgattataacctaaaacttcttgggcagtttgttgggcaattgccttgaagtccatctatctgcaagttttaaaaacaaacaactggtaagaatataaycatataaaaacttaaaaagtgctatcttacattttaatattatttctataatgcctgtcacatagaaatgaacataattacttgatgaatgcatgtatgcatgaacccctctctccttacagtctttcaaatgagaaactgtggtatagtagaaaaatctagactttgaaatcagaaacctgggtcatatcttgtctctgccacctattgtgtgaagcatgttacttaatatttctgtttttccatttctctcaaggtaaaattaggataatatatgtcttgtagaattagcgtgag

SEQ ID NO: 145759 - DNA, 486 bp, Homo sapiens
aattgtttcttacttaaaaacaaagtcttgaaacataatttaacttattttcttactgaagttttaaccactttccagcctgatgtatctcgattataacctaaaacttcttgggcagtttgttgggcaattgccttgaagtccatctatctgcaagttttaaaaacaaacaactggtaagaatataatcatataaaaacttaaaaagtgctatcttacattttaatattatttctataatgcctgtcacatagaaatgaacataattacttgatgaatgcatgtatgcatgaacccctctctccttacagtctttcaaatgagaaactgtggtatagtrgaaaaatctagactttgaaatcagaaacctgggtcatatcttgtctctgccacctattgtgtgaagcatgttacttaatatttctgtttttccatttctctcaaggtaaaattaggataatatatgtcttgtagaattagcgtgag

SEQ ID NO: 145760 - DNA, 598 bp, Homo sapiens
aactattactgctgtgaatgagttccggaagctgcagtctcactggtccttcgggtcatcatccagctttcagttaggggaagctggcaggtaaggtgaaaacagaactggattcaaatcctgactttgtcacttagtacagctatattattttggataaattgcttaacctttgaacttcaacttccatatctatagaatggggataataatatctatctcaccgaatcattataaggattagttgagttaatatatgtaaaaatgctttaaacagtgtggagcccyataccaggttatcaaaatagttagtttctctttaaaaaaatggacacatataaatccatcatttaaaaaactctccaaagatctgcttccttaagcacttaaataaaccttcttaaagtttaattattggaacatttcttccttagctctcacttaaaactcttcaggttggatcataaatctattttctcttatttaattctccagcaaggcacaacaggtagttgatagtctctatatttgaaaagttttagtaaaccattattataacctcctctttcctagcagagtcctggtttctttacctttc

SEQ ID NO: 145761 - DNA, 598 bp, Homo sapiens
aactattactgctgtgaatgagttccggaagctgcagtctcactggtccttcgggtcatcatccagctttcagttaggggaagctggcaggtaaggtgaaaacagaactggattcaaatcctgactttgtcacttagtacagctatattattttggataaattgcttaacctttgaacttcaacttccatatctatagaatggggataataatatctatctcaccgaatcattataaggattagttgagttaatatatgtaaaaatgctttaaacagtgtggagccccatacyaggttatcaaaatagttagtttctctttaaaaaaatggacacatataaatccatcatttaaaaaactctccaaagatctgcttccttaagcacttaaataaaccttcttaaagtttaattattggaacatttcttccttagctctcacttaaaactcttcaggttggatcataaatctattttctcttatttaattctccagcaaggcacaacaggtagttgatagtctctatatttgaaaagttttagtaaaccattattataacctcctctttcctagcagagtcctggtttctttacctttc

SEQ ID NO: 145762 - DNA, 585 bp, Homo sapiens
ttgtctgtcctgtgagttgaaataactagtaaatgttatcacccacttacggagaccaatacaacagctttctctttcaaggttttgtaaaataaaatcagtagcctgttcggcattcaaagacagaaaacatttggtcaggcttayccaaacaaatttacttgagtgagtttaaacttctttaaataaaagggatacgaaaaaggtaaagctggcttagtttagccattcgtcagagatataccagtattacagaattcagataaatcaatgagacgaaacaactgttaccttatgttctgccatttgcactgaccacggtcagatctcttgtaatggccattgcatgctctaacgctgtggtaggatgatgttttactttgtctcttatttaattagaaaactttcgatgttttaaagccaaatttaatagttactaagattacattaaaagttgttataacaaatatttctaaaattatagccaaaaattaaacattataacatcatagcatatgttaagtcctcaacattaatacttttttagtataggaaatccattcatttaattttaaaaagaatgtc

SEQ ID NO: 145763 - DNA, 554 bp, Homo sapiens
cagcgagaaatctgtgatttgcaaaccatggggagctgcaaaagaggaagactgctctcaccagaaactaatcttgaccttggatttcccagactccagaactgtgagaaacaaatgtctgcygtttaagccacacagtctatagtattttgttataacaacccaacctgactattatgcatattagcaggttctgtctgtatcacacacacacacacgcacacacacaaacacatacatcgactgattgcagtgtgccaggtattgtgctaagagctccacatatttatgccttataactcaattaggtattgacacagatacagtcaagatacagtacacaagatatgtgaaacacagatgcaattatacagctgtactgaatctacatcaataccatatatatagctatctgcttcatcatctatgcatatctacatccaagtccatccatcacagcacaaacacagagtgacagatgtatacacgtatcaatgagagttatgtgagatgtctcctcagagcttaaaatgatgtcaagaacatgagtatga

SEQ ID NO: 145764 - DNA, 627 bp, Homo sapiens
gaagcatgtagataaataaatactgaaagagaaaaaacacttccttcgagatcgttatttgcatggagatctttttctatgcaaataagacagaattaaatgtggtcaaackttggtttacctttcaattaaaatgtctaattatatataaattgactcaagtgctctttactttaaaattgtaaaacactggaatgacattttgaattcactagctaatttaaggaatttccatttttacattcttctaaaatcaagagatgcatatcaaaatatttaggagtgagctgtcagactgtctatactttagaaatctgtagcaaaaaataaattagattaactattgcaaaatattagcagctgtcaattctagtttgtgagtatatgattttctgttttatttaagaaagattttttaaataaaagaacataagaacataaaagttttcctaatgtttatgaaagagagaaaaggatatataaatgcaaatattcagctctaaaactattcaagtacttaaaaaacacagaccaaaatattattgatccaaaatattattatttcaagtgtggtcacatttcgtttgaaaagagaaaaacgttctccaaattttagattgttctgtg

SEQ ID NO: 145765 - DNA, 421 bp, Homo sapiens
tgatctcaatgtatgtacactacactgagaatcaaaagatttcagaataaagttcaagacctttaatgacatacaaagcccttgcctgcttcctccagcttcatctacattgcccatattacaccttaggaactcagagtctccttaataccccaggttatctcactccactcctttgtgctagtgctacaaagatataaggtgagaaggataacagaagargactgacagttctgtagccgagcactagaagagctatcagttttagaatgctaagcctctggaaggactccagcctactagagaaaccctgtctccctaagacgtaacaggatcaggagataaataatgccagtatcttatcattctgttaatctagaagcctgatcctctccccttcctccttctgtctggtgaattc

SEQ ID NO: 145766 - DNA, 610 bp, Homo sapiens
ccagtttttatcttcagactagaggaacaaataacatcaatattcttgctaatttctcaaactgacatgattaaaaattaagtggacttttcttgttcacatatcagaaattttcatgtctatttttatctctgaacagctaatagtatattcttatatatggtgaatttgaggaaaaaacctccttaatcttaaaataaatctagtctctgaatcattttctgatttcagggtttccagcagcatttgttgcagcatgggctgtggcacgagcaactctggctgatgcgaggtgagtgaaaaggcaggggaaacgagagaacctcagatrttctcaagactcaggcttcctgctcagaattcacactcgcttctgttcttgatgccattgctttttagggatgccacaaggaaaattaccttgatgcgatggtagcttccaacacattaccagcaagctgtctattccagaggtcatagagcagaaacactcgcagactagatgaaggtgcctgacctccatagattaagaaacaaatgtaaaatataatgtgagaagcaagtggaaagagatgggtaagagaatccacttaggatttagtgaaagcag

SEQ ID NO: 145767 - DNA, 573 bp, Homo sapiens
cttaataactttttcaaaatgtaaatatcgatttctcgattatgaagtaaagccttctgatacacctaaaatggagaatactaaaatgtttaacaaaagggtaaaaataagctctactcctaccaacaagagttaataattataccattttgggtagataacgtwatagccttttaaaaaatagacacaccaatggtatgccaggttttatgggatacaaggagagtggacattctgtaatcagaagtgcctatgcacaaacagagaagcaatcatggtgtcatcctaggggatcgtggagtctgggaagccagatcatccctgggagtcccctcaggtctgaacagccacttcctgatatacaaggtagaatgtgttagctttattgctgtccagaaaccaacattatttttatgactttatggagacattttttaagttaatgtgttgcagggagtaggagaaatctacctggagtgtgggcaagttattaacacgtgaaaagtaaaaatgataatagctaatgcttacagcgctgtgtggcagccactgttcctaatgcagcccagtgat

SEQ ID NO: 145768 - DNA, 573 bp, Homo sapiens
cttaataactttttcaaaatgtaaatatcgatttctcgattatgaagtaaagccttctgatacacctaaaatggagaatactaaaatgtttaacaaaagggtaaaaataagctctactcctaccaacaagagttaataattataccattttgggtagataacgttatagccttttaaaaaatagwcacaccaatggtatgccaggttttatgggatacaaggagagtggacattctgtaatcagaagtgcctatgcacaaacagagaagcaatcatggtgtcatcctaggggatcgtggagtctgggaagccagatcatccctgggagtcccctcaggtctgaacagccacttcctgatatacaaggtagaatgtgttagctttattgctgtccagaaaccaacattatttttatgactttatggagacattttttaagttaatgtgttgcagggagtaggagaaatctacctggagtgtgggcaagttattaacacgtgaaaagtaaaaatgataatagctaatgcttacagcgctgtgtggcagccactgttcctaatgcagcccagtgat

SEQ ID NO: 145769 - DNA, 573 bp, Homo sapiens
cttaataactttttcaaaatgtaaatatcgatttctcgattatgaagtaaagccttctgatacacctaaaatggagaatactaaaatgtttaacaaaagggtaaaaataagctctactcctaccaacaagagttaataattataccattttgggtagataacgttatagccttttaaaaaatagacacaccaatggtatgccaggttttatgggatacaaggagagtggacattctgtaatcagaagtgcctatgcacaaacagagaagcaatcatggtgtcatcctaggggatmgtggagtctgggaagccagatcatccctgggagtcccctcaggtctgaacagccacttcctgatatacaaggtagaatgtgttagctttattgctgtccagaaaccaacattatttttatgactttatggagacattttttaagttaatgtgttgcagggagtaggagaaatctacctggagtgtgggcaagttattaacacgtgaaaagtaaaaatgataatagctaatgcttacagcgctgtgtggcagccactgttcctaatgcagcccagtgat

SEQ ID NO: 145770 - DNA, 192 bp, Homo sapiens
tggggacacagccaaaccatatcaaaacattttggtaaagataaaatttgagcagggcctagaaagacagtttgatcacctatcactggatgctggatgaaaggatgggtgaatggggagagtaacacagcatgaaggaaatayttacataaagacaaataccacagttcctccttttcttttccctaaccg

SEQ ID NO: 145771 - DNA, 554 bp, Homo sapiens
tggaaggagatcagtgctgcagcagctggtgagcttgggcagcaagcgtgatggcaatccatggtttttgctatttgatgagagttagtcccacatattccattcatttaaatccatttctttggagatgctgtaaagtctcaaaatattttcctttataatgagttgattcatcttagctgaattaaaatgtgaawgtgcaacaaggagaacttttttttaaagaaccaagaaaaggtaaatattgtcataaaatgtaaatgtataactaatttaatgacatatcttttatatttgaataatagaaatttcttccagggtcacctttcttatagtacatacatctaagctatgcttacagaataggagtaataaaagagaaaatcctaaactcagtgtttaaagcaacccttaactggcattaaaaaaacaaacacaccataaaacctattagggaattagggtctggcactcattgagactttagaattcatatgcttattttttgcagtagttcaggcagtagttccttttctggcaactccataaaaata

SEQ ID NO: 145772 - DNA, 554 bp, Homo sapiens
tggaaggagatcagtgctgcagcagctggtgagcttgggcagcaagcgtgatggcaatccatggtttttgctatttgatgagagttagtcccacatattccattcatttaaatccatttctttggagatgctgtaaagtctcaaaatattttcctttataatgagttgattcatcttagctgaattaaaatgtgaatrtgcaacaaggagaacttttttttaaagaaccaagaaaaggtaaatattgtcataaaatgtaaatgtataactaatttaatgacatatcttttatatttgaataatagaaatttcttccagggtcacctttcttatagtacatacatctaagctatgcttacagaataggagtaataaaagagaaaatcctaaactcagtgtttaaagcaacccttaactggcattaaaaaaacaaacacaccataaaacctattagggaattagggtctggcactcattgagactttagaattcatatgcttattttttgcagtagttcaggcagtagttccttttctggcaactccataaaaata

SEQ ID NO: 145773 - DNA, 585 bp, Homo sapiens
cagggagtttattacctgttatgtaaaagttcagcatttagtaccaatatgcaaataaacaaagcaaaaaagttcttatgtttgtgatattgaaaaataagccaatacatggggtgagcagatatgatgtatttagagtgtctctgagggaaactaacacatagcatctctcttggctgccctgattctaaacatgttaagatataaagtaagggagtgagggagaaccttattgctgcrggaggctggggtggatgatgtgaccctagctcagttagacaagtggatccactgaagaaccccataattagtcaggatcttcccacctgggcacaggatgctgaagggtaggctcctatccctggagacgctgcagagaaagtctgctcactgcaagttaccttttctatgcctaaattttgacttctttaaatgattacatcttttgcgagttatgcctagaagtgaaaattctacattgaagggggatgtgctgatttacctcagtataagtagtgtttagagcacgcatatctcatttgcctatttattcactctcattggacaaatcttgattaaacacca

SEQ ID NO: 145774 - DNA, 608 bp, Homo sapiens
gaaactatttttgtttagtccttttttaattcaacataaaaaaagaaaaacaggtaagatatacatcataaatatatatacaaacacacacaaggaagcatgcatactcacacagacactacacacacacacacacacacacccccaatatgaaaatgtcttggcttcttaagtttttaatcctttcatataatgaactctaattcaaactaaatctgaagatcagttgattttgcacatttggctacaaattctaaaaatccccacgaccctattcatgcaagaagcaaactgaaaatgatttaagaaaaacttgtatctatctgtggtatggctcatacacagttaaatgaaaacattaagaatgcgatcacattgagctgtcatccttcaaagctattactcatccttttstcttatattttaattaactacatgtgaatttattatagatatttatagagctccaattatacttagaaacaaagcacggttaaatttttaagagtcatataatgattacagagacaaaaaaccaattagtagttgccaggtgttgcagggaagggagaagtaagtggttgtggctatgaaaggattcctgtgct

SEQ ID NO: 145775 - DNA, 608 bp, Homo sapiens
gaaactatttttgtttagtccttttttaattcaacataaaaaaagaaaaacaggtaagatatacatcataaatatatatacaaacacacacaaggaagcatgcatactcacacagacactacacacacacacacacacacacccccaatatgaaaatgtcttggcttcttaagtttttaatcctttcatataatgaactctaattcaaactaaatctgaagatcagttgattttgcacatttggctacaaattctaaaaatccccacgaccctattcatgcaagaagcaaactgaaaatgatttaagaaaaacttgtatctatctgtggtatggctcatacacagttaaatgaaaacattaagaatgcgatcacattgagctgtcatccttcaaagctattactcatccttttctcttatattttaattaactacatgtgaatttattatagatatttrtagagctccaattatacttagaaacaaagcacggttaaatttttaagagtcatataatgattacagagacaaaaaaccaattagtagttgccaggtgttgcagggaagggagaagtaagtggttgtggctatgaaaggattcctgtgct

SEQ ID NO: 145776 - DNA, 562 bp, Homo sapiens
acttcacttttagggatttacatttaagttatagcttcaacaatatgaaaatacataaagactatacagtgtagtattatttatacatgtaaaatattagatagaaaaaactaaatgcccacacatttggyacttctacaaaataggctattatgaagctataaaaaagagtgagaaaactctatgacctaacatgatttccaggatgtattgtgaagtaagaaaaacaaaatgcagagagtataaattgaatgctaccttttgtgcaaaaaaagagggaaaatatacagatacatttttgtaaaacaaaactcaaagataaaccagaaaactatgaaattttttatcttatttctccctttaagtggaatatttctaactacctcatttagtataatttttatgataatattttctaagtaccttttttcaaagtaaatgttcccttttatgcttattttattaagaatttctttcatggatgggtgttaaactttatcactttttttctgtatttgctggaatgatatttgtggtgtattatcattctcatacattgttg

SEQ ID NO: 145777 - DNA, 599 bp, Homo sapiens
aagctttaatactatatgtgaaacttttatgttctttcttcyggttctttgttagatgctggaattagccaagtatgcagtagctttggaaatagaaattcagatcttgctggtccctaaaccaaaaggaacatctgaatttttttctttaaccccaaaacaagttggtaaaaaaatattgccaaagtaatctcctttgatgaatggcttaaaattagtcattcattatctgtgtgttcttaaaaataaaactcattggcaaagtagctgaaaaattttggggaacctaaaccctcttactcctccccattattttaaaactttggatactgcttgtttgcctagcagttcttcagttcacttttgagaccctcatacattttaattattgacctggatagaagggcgctattcttttagctccagatgaaatcttcctgaagtgcctataggtggagagaagagtttctggatcctgagcctgagcctggctaaatgacctctaagtcccttccatctctgaaaattctatgatccttattttttttttataacgaatatcctttgagttgtgcatatttataacaaaatatttcatt

SEQ ID NO: 145778 - DNA, 607 bp, Homo sapiens
ttatgttctttcttccggttctttgttagatgctggaattagccaagtatgcagtagctttggaaatagaaattcagatcttgctggtccctaaaccaaaaggaacatctgaatttttttctttaaccccaaaacaagttggtaaaaaaatattgccaaagtaatctcctttgatgaatggcttaaaattagtcattcattatctgtgtgttcttaaaaataaaactcattggcaaagtagctgaaaaattttggggaacctaaaccctcttactcctccccattattttaaaactttggatactgcttgtttgcctagcarttcttcagttcacttttgagaccctcatacattttaattattgacctggatagaagggcgctattcttttagctccagatgaaatcttcctgaagtgcctataggtggagagaagagtttctggatcctgagcctgagcctggctaaatgacctctaagtcccttccatctctgaaaattctatgatccttattttttttttataacgaatatcctttgagttgtgcatatttataacaaaatatttcattgatcatgttaaattgcaacctcagaagacaagct

SEQ ID NO: 145779 - DNA, 474 bp, Homo sapiens
gaattcggcagttgctgtaaaggattcatgttctgtgattgagaacacaagaagaaacccttccccactccgaaagtagttatctcgaatggctgcgtagtcctcttgcccagcggtgtccagaatatctatctgaacttcttccccatcaagaaccactttctttctataactgtcagctttggtaggttcatagtcttctacaaactgaggaaataaacattatcggtaattaacaaagtcttaaggggaayaaaatctgccaaaaaacaaaattccacatatgggcacttcacactatgaacaggacactacagaagcaacattttacgtaacacttctgttctttatagctctgttttgccattttttgtttttaaacaatacaggcagatatcccaatttacagatgaggaaaccaggcacagagcagaacacttggcaatattattgtcagtataaaattttaatgca

SEQ ID NO: 145780 - DNA, 211 bp, Homo sapiens
ttaagcaaagcactaacaagcgcctccagggtggggtggagagtttgtgccaagagcagggcttggccagagcccatcccttccaggcctggtcacagggagagagggtggagatacagcagacagaggggcygagaaggggctgcggcctccccaccttgcctctccctctggtagtgaacgtcctccccatccccaagggcctccagtc

SEQ ID NO: 145781 - DNA, 586 bp, Homo sapiens
tctcagcctacttttaagcaaagcactaacaagcgcctccagggtggggtggagagtttgtgccaagagcagggcttggccagagcccatcccttccaggcctggtcacagggagagagggtggagatacagcagacagaggggccgagaaggggctgcggcctccccaccttgcctctccctctggtagtgaacgtcctccccatccccaagggcctccagtcggccctgggctgctccaggggtccstttcagcagaccgcccccaggcctgtcaagcctgtctcttgcacagaacgctttatctgcccccacccctgcatcctgttctctgttccagaggggcaaggctgtggaaccccagaagacaggcctctgagaggacccgggtcacccggacctggactcaaatcccatccctgtacctctccttggatgaaccatcgaacactgagcttccattttgcatcttccaactgcacagagaagtaagtgtgtgctgctccttccgtggttggtgctgagtggggatttcgggaatggtccctgctccctgcattttccacagggccagcgggaaataagc

SEQ ID NO: 145782 - DNA, 527 bp, Homo sapiens
cttgattccaaacatatataygcatggctagttacctatttagttagtttgttaatcaatgaagtccaatttcctttacctcattaatgtctatttcccctccattatatattttcactttgtaaattaaatgctgataaagcctttctgtaatcattttctttattttttattttttaaatttttgctttatggtagctcagaaacttgcttctcactattagtactgatgttttgctgtttttgatcttttcttaatgatgtcttttgtaatttggagcttgtatctctaatctgtaattcatgtattcccaaattagattataaattccctgcacactggacctttttctctttcgtatttatactctgcaaaagctagtgtcaacattacctcaacattagatgttgacaaataatataattacacaaaattattttgcattaaaacttgactcgaaaaactaatcccaattgattacaatttaaaaatattagaatgagtctatttatacatgtgctgctaa

SEQ ID NO: 145783 - DNA, 525 bp, Homo sapiens
gtttcacagtttgatgtcttagatgtaagtctttaatccattttgatttgattgttttatatgatgagagacaggggtctagtttcactcttctgcatatggatatccagttttcctagcaccatttattgaagtgaccgttcttcctgcaatgtacattcttgacacctttgttgacaatgagttcactgtagatgtatggacttgtttatgggttctccattctgttccattggtctaggtgtctgtttttatggcactaccaaactgttttggtyactattggcttcgtagtataatttgaagttaggtaatgtgattcctcaggttttgttctttttgctcaggatacctttggttattctgcaacttttgtgtttccatataaattttaggattttttttctatttctgtgaaaaatgccattgataatttgataaggactgtattgactctgtagattccttttggacattttaacaatattgattcttctaatccatgaacacagaatatctcatttt

SEQ ID NO: 145784 - DNA, 557 bp, Homo sapiens
atcattccattgtctcttgaaacatatagtttatgatgagaagtatatggtactctattagttccttttttgtagaagacagcaaactttctctgcaaaaatctaaattgtaaatattttagaaaataaatattttaggctttgtcgctgataaaaggtctatgagacaaaagatctctgtctcatatccttttttctgttttttattgttgtttctaaacttgtaaaaaatgagaaactcattcatagtttgagaactgtacaaaaacaggccattaactaaatttgacccatgggctgtagtttgctggccttttctctattgtaattacatgtccttttaatttttattattgtaatatttttatcttgttttttagaaatttatgtgtttctatctttggtgttccttagctaacatatatatgacatatataattcccaagattagtkataacatagttatcaatattttaatagccttattgatggataattttcatgacataaagtccacctgttttaagtgtacaatttaatgacttttagtagatttt

SEQ ID NO: 145785 - DNA, 547 bp, Homo sapiens
gaaaaggaaggacacagactacggactttggcacccatgatatgacccagtgatgaattccaagtttacttttgcctcatatagttcagagttggtatcaggaacttggaaatgcccacgggtgcagagaagaaacaacaacaacaacaacaacaaaagtttgctctctctagccaaaggacctgaaaactgtcagcctagaaagacagaaaaagtttagaccataactgctctactctagccaaatgtgagaggaaaaataacagacaaaaataaacaagccaactgtatccacgccccccacccatgccaacaaagctacctggagagtctagatttccacctttatcagctgtccccactcctcccacccagggtggtgtcacagaaggccatagagggagctggaattttatgcctgccagttartaacaaggtcccctttcctgaatgtgtcagtggagaacacagagaacctgaacttccacccctacctgaccataataagatgtccctccaccatccccactggctgataccagaggag

SEQ ID NO: 145786 - DNA, 497 bp, Homo sapiens
aaattttatcaaaagccttttctgtatctattgagataattatgtgatttttgtctttagctctgtttatgtgaagaatcacacttactgattcaagtattcaaggttaaggcctacttgatcatggttggtaagcyttttgaagtgctgctagacttggtttgccagtatttttttgaggatttttccatcaatgttcatcaaggatattgacctgaagtttttcttttttgttgcatctctaccaggttttggtatcgggatgatgctggcctctggaatgaattgggaaggagtctctcttttttgtgtttttggaatagtttcagcagaaatactgccagctcttctttgtgtatctggtagaattcagctatgaatccgtctggtcttgggttgtgtcggtgttgttgttaggctatttattactgcttcaatttcagagattgttattggtctattcagggatttgatttctttctgatttagtactggga

SEQ ID NO: 145787 - DNA, 590 bp, Homo sapiens
cttcttgtaaagtatcttcctggggtctctgcatttcctaagtttgacatttggtctctctagctagattggggaagttctcatggatgatattgatagcgacagggggcagagaaactccaggcatgataggccgggtccccgtcaaaaccccaccctcaaactgaaaagcctgaaaccctcaacccaaagtgacaacttctattcttattttcccactcaaatgttgcctttttctaaactatctgaggccygccccatccccattctgtgcttataaaggccccagactcagccagtacagaggagaagcagttggatgttggggacaatggctgaacattggagggaaggggcttgacttcagagggacagcttgatggtgtaactttggagaagaatctggctggagatagctggacctcagggtaatataacctaccaactctgtccccttcccattgagagccactttcatcagcatgaaaatcccccgcatttaccatccttcaattaattcatgtgaccttatttttcctggacactggacaagagcttgggagccacaagtatggataaaaaaaggctgt

SEQ ID NO: 145788 - DNA, 590 bp, Homo sapiens
cttcttgtaaagtatcttcctggggtctctgcatttcctaagtttgacatttggtctctctagctagattggggaagttctcatggatgatattgatagcgacagggggcagagaaactccaggcatgataggccgggtccccgtcaaaaccccaccctcaaactgaaaagcctgaaaccctcaacccaaagtgacaacttctattcttattttcccactcaaatgttgcctttttctaaactatctgaggcccgccccatccccattctgtgcttataaaggccccagactcagccagtacagaggagaagcagttggatgttrgggacaatggctgaacattggagggaaggggcttgacttcagagggacagcttgatggtgtaactttggagaagaatctggctggagatagctggacctcagggtaatataacctaccaactctgtccccttcccattgagagccactttcatcagcatgaaaatcccccgcatttaccatccttcaattaattcatgtgaccttatttttcctggacactggacaagagcttgggagccacaagtatggataaaaaaaggctgt

SEQ ID NO: 145789 - DNA, 549 bp, Homo sapiens
agcagaatctcagcacagagctggtcagtgggaccccatggtcttgtcttttagctaaacatattacaccaattctcccagctgggtgccccctgggcatcaggagaggtgtggaagggtcatctgtctccctgggagcccagcggtcccccacacccacccacagcacacatctatgtggtgtgcaggtcttacctacagcagggaacggcacaaacctctggatgagaaggcgggtggctggggtgaacttgttggctttctgaaccaggacattaaggcccacctttgaaagaaaaaaataaaaacacagaaaaagtacatgatgctgcagtggcttgtgggaggagggggcagaactggaggaacaycagagagtgagggatgtcatctttccccacaactgcacctcacacccctaatcctcagcgtcacctgaggttgcagagctccagcgtcgctgcttaaagtaccactgcccagtcatcccaggtaactggcccatgagaaagagggagagaggtaaagcatcagagacatacacacaca

SEQ ID NO: 145790 - DNA, 189 bp, Homo sapiens
ctgggtggaggtggagaacagcaaggctaacatggaccattgaaggctggggcaagcagtcttcagtttagaggctaaatgtttcaagggggccatttggcayctggagcgctttctaggtggaaatgccagtgtcaaggctctcacaggccttgccagcccatggaacagctgggctcccatgtcaac

SEQ ID NO: 145791 - DNA, 373 bp, Homo sapiens
aactcacagccaacacttatttgagtctctactgtgagcccttttatgtctggctctgaaaactgaagtgaatcaaaaagtcatagcccctgccctgtgaactttacagtaagaaagactgtccagaacagtaagtagttgtgagtgcaaaagagaagtgctgggtgccacggagcctctgtgggattttgtgcaagcagagtgatggactgggaaatgcaatgtttargctaaagccagaaagccagcatcaggcgaagatttagtcttccgggtacagaatgttcaggggtcgggaggcgggcaggcccagcatgctccaggaactgagtgtcagggcagccggagagcacaggacgagtgggcagggtgg

SEQ ID NO: 145792 - DNA, 596 bp, Homo sapiens
ggggaacatggaatgcatagggctaagggagaagccacaggcttttagactttcagtcttccaatttcctctccacccctctgcccatccacagcttcttgaaaatgctgagcctggaaagagaaacagcctggttgtagttcactggttctcaaccttaggtgcacatcagaatcacttgggagctttaaaaaatactgctgggcccatgcctaaagatggggtttagttggtctactaacaatttgccactgacaatgtgagctggtcttgacattaaataatgctgaatctcagaataacctaaattattcccttttcaagtctcctccaatcctctgattacaaaaaagaagtctctgtttggtgctaacttgtctttaacaactctccaactcttrctatcaaccaaaatttggatttttggatatttgtctgcacccaagtctcttgttgacatgtaatccccaattttgaggtggggcctggtgggaggtgattggatcatggggacaaatctctcatgaacagcttgggccatctccttggtgaggagtgggctcttgctctgagttcacatgagtgtgtgggcacct

SEQ ID NO: 145793 - DNA, 523 bp, Homo sapiens
attaggttgagaatggttttgagcaagactcacctcaatgtctccagattycaatcactcctataagatcttattccactactgtctagctgtgcatcttagagaatgaatgactaaatctccctgtccctcagtttccttatctacaaaatggggataacaatagtaactgtttcatgaactgttgtaagaactccatgagatggtgtggataaagaggtgctaggcctcccattggctgaatccaagggcaagggagccagaggtgcagtccacaggagttcacctcctagagcacagagcaggaagagcggggcagagagtggatgggttgggacagtggcaaacggagaatcaagaacattcgatgcttgatcaatgtctactgttatttgttattggtagggtgaacatacatcccagctttctgggacaattccaatttatggctgttgtacattttcactctcaaaggtatttcacatctcaaagggctttatatagaaattctaaaatcccatca

SEQ ID NO: 145794 - DNA, 377 bp, Homo sapiens
atgcaaggaaaacactccatgtgggagggaagagtatagccaagtttaagatgtgagaaatacatgtgtggagagtagcttaatctggcttcaatccaggtggtgtacggtaagataaacaagctatastgaacattataagaagtttagaacattttcttctgctgcagctactattataccactcctcgtactaactgatatttattgtgcatttgtgctgtttcaagcactgtgctaagcactttagatacctgatctcatttgataatcacaaaactcctatgaagtagtgtatcaattagttataactgtataacaacctagtccaaaacttagcagcttaaaagaacaatcatttattatttatcatgggt

SEQ ID NO: 145795 - DNA, 449 bp, Homo sapiens
cctagacacgttaaatcagaggtgggctggggggcgggatggctcagaaattagtagtttttaaggctcccaacagggttgggactaggaccaggtaaagaaactgcctagtttttaaaatttaaggaggcactcactctcaggaggtgatcctgtgcttgcatgtccctgagaatgagtgcttccttaaatgctgcattctagatacttcactagctcacccttgtcctggctctgctcctgaagtgattccaattatcagttaaagttttagcaatcattaaaatgatgaacttacataaggtattcctgggtcacaaaagtggcctgcctttactctacttccctcttctgctttcctttactcccttccacctgtctattcctccctgaaaaatggcataaacttgtaaatcatcccarcatttagcaaataaagtatcctttag

SEQ ID NO: 145796 - DNA, 510 bp, Homo sapiens
acgtcctttgctttttacattagttatttgttgaggtaacagtgatttcttgcctttccattccaatgtcctggtgcacaaacagaatacacaaaactaattctatgaaatatagaggaaatatcttgtgctgagagagagagagagagagagagagagagacagagaggttgagattgtggtattaattcttccttcctaggctttgtttctggcttatatatttttttggattttgggcttcttacttggtgtccagagtttggtgaactggtcaggtactgattcatctatgatattcagaggttagagggtacactggttaataattcaggcttaaaaacacagatgtatgtcttgtgactgtttaaccacagactagttatttatcctctctgaacctcagctgtgaaataaggatgattcttggtagttcctgagwcctggggtgtgggcaagactaaataagcatacacatgtaaagcccagcacagtgtctggcatctggta

SEQ ID NO: 145797 - DNA, 490 bp, Homo sapiens
  misc_feature (1)...(490): n = A,T,C or G
nnnnnnnnnnnntggaattagagggatgttgcatcctatttttatagccttgtattgttataggaatgttttggcagatgcaaaattagaaacaaattttgtgtgttctctagtgcccttcagcgcttaaaggacaggaacaaagtatggcagtttgtcatcagagctccaggaagccacgaggaaactgagyttaggaaccaaattgctcaaaatgggaaagaaatgaagagatgtacagcagatgctctcagcctggaagtgtaaccttcgggaagaaggaaccaccagtcatgctaattggtcttgaacaaggcttgtttgcgctgagagatgagagagagcaccccatttcttcctgattcagttctgtagacatctttctgggatttgcaattgataattatagacacagagatacacttggcctaatttgccagcctatttggagtcatgagtgtcaccctgtatgtctggtatatgtgcagat

SEQ ID NO: 145798 - DNA, 552 bp, Homo sapiens
gttaggtaatttctaaattaatcactcttagaataattaccatgtcacagcatctgtgtgctttggtagaatttgaataacacttttttgctcagaataatgttctattcttgtcaccaaataatacttgacgtctgtgctcttgtactcccgaactgcaggaagggtgttgcctgaacagctgacacaccctcagcaatgargcttagttttgctggaacttttcaggtactaaaaaaaatccctttctctactccccattcattcacaggcatgagactggagctttattattttttctaaatctaaattgactgagtcaggcttgtagtagtcaccactaagaacagaccacagtagcatggagaatattacttgaatcttctttccatcggaaactggctgtgaaaagagtaggcccattaatcataatttgaaaaagcaagttacaaaggcttgctttgtaacttgtaaagcctcctttgatgaaggctttacaagctgtcattgcagtaagcagaactgaaacacttttttttttcgttgagcaaa

SEQ ID NO: 145799 - DNA, 491 bp, Homo sapiens
cactgcatggtctgtttattctctaattccaatatgtcttttgcttccagaagcaagaaaagtttcttctctcccctccttcccacccttttttcaaaggcaccacaagtatagacagttgcactacatcaaatctttttttgacacttgtagaaaccagtacacttttagattagacagtatcttcttttaatattttgatttgttttcctttagtttgaaaagttgtataatacttaactgactgtagcaaagttttatatgtggtagcatacctttaatttatcctattacaaaactgttctgaattttcttttggtttttaaaaaacaaaacttgttgcttagaagccatgaattattttattttacttcaactgtcgaaacttccttgttttaaaaaatgatcatttgggttcactcaggaaatgcakgtcaggaaacttgtattataagtttattagttgtgatgtatcagtaactgctgttacc

SEQ ID NO: 145800 - DNA, 585 bp, Homo sapiens
tcaccactatgtactatatacatgtaagaaatctgcacctgtacctcctaaatgtatgaaaataacattttttaaaaagaattaagtttctatggcatatttctgatcacagaaacatcaccagacttataaataaagaccctaaacacttataatattaaacactgaaataaacgtgagttatacctacatttaaggaagattaatataaacaggataattacccaattttggtgaatcactgagtgatggtaggcataaaggtagtggkttaaatcaaagaataaatgtttgcaaagtacaaatcataaggagcatcttctcccaccaatacggttcaaaatcaaacaaggacaaatctggtaggcttgctaagtgcttttgtgctgcatcatttattgttgtgcatttgtgtgattattgaacacttttcagatttttattttataataacttgtattcattcattcattttccaacctgcatattccagttcagggtcacaggtgactggagcgtatgtcagcacctcagagcacagagatggaaaccagccctggacaggacaccatcccatcacagagt

SEQ ID NO: 145801 - DNA, 424 bp, Homo sapiens
tgtaggaaaaacaaaataagccctggagtacaaaagatttggattcaaactttgaagaaggatggggaagtgtttaggaaagtgcttccctgtgtaaaacttagctggtaagtaccatatttcactgaaattgctgttataataattgaaacrgattattattggaaaaacaacatcagcaaaactaaaacctagatgagtttaaataagtgccagccatttttctcctgtggggatttagagttgaagtgggtatcttcgattacttttctttatcctcattcttattcttataatttttcctaataagtcacctaagaagggcatttaaataagtgctagccttttttctcctagggggatttagagttgaagtggatgtcttcaattacttttcttctctattctcgttcttattcttata

SEQ ID NO: 145802 - DNA, 391 bp, Homo sapiens
tttgaagctgacatgattctatatctagaaaacccatagtctcagccscaaagctccttctgctaataaaaaaaacttcagcaaagttttagaaagaaaatcaatgtacaaaaatcactagcatttctataaaccaacagtaaccaagctggcagtcaaatcaggaaggcaatcccattcacaattttcacaaaaagaataaaatatctagggtaaaatacaactaaccagggaggtgaaaaatctctacaatgagaattacaaaacactgcacaaagaaatcagagaggatacaaacaaaatggaaaacatatcatgctcatggataggaagaagcaatatcattaaaaggccatactgcacaaagcaatttacagattaaatgctattt

SEQ ID NO: 145803 - DNA, 391 bp, Homo sapiens
tttgaagctgacatgattctatatctagaaaacccatagtctcagccgcaaagctccttctgctaataaaaaaaacttcagcaaagttttagaaagaaaatcaatgtacaaaaatcactagcatttctataaaccaacagtaaccaagctggcagtcaaatcaggaaggcaatcccattcacaattttcacaaaaagaataaaatatctagggtaaaatacaactaaccagggaggtgaaaaatctctacaatgagaattacaaaacactgcacaaagaaatcagagaggatacaaacaaaatggaaaacatatcatgctcatggataggaagaakcaatatcattaaaaggccatactgcacaaagcaatttacagattaaatgctattt

SEQ ID NO: 145804 - DNA, 391 bp, Homo sapiens
tttgaagctgacatgattctatatctagaaaacccatagtctcagccgcaaagctccttctgctaataaaaaaaacttcagcaaagttttagaaagaaaatcaatgtacaaaaatcactagcatttctataaaccaacagtaaccaagctggcagtcaaatcaggaaggcaatcccattcacaattttcacaaaaagaataaaatatctagggtaaaatacaactaaccagggaggtgaaaaatctctacaatgagaattacaaaacactgcacaaagaaatcagagaggatacaaacaaaatggaaaacatatcatgctcatggataggaagaagcaatatcattaaaaggccatactgcacaaakcaatttacagattaaatgctattt

SEQ ID NO: 145805 - DNA, 269 bp, Homo sapiens
atgagctccaaaggaacttccttttagcatagagaaagctgctgtttttatttacttgcattttgcatatgaatatattttaatttagtttcaacaggtaactgaattagaaagtgaaattataaagtcatttctccaagaaagaaggtagagcttataaatattagtaatcttagctgggcacgatgacttaygcctgtaatcccagcactttgggaggctgatgcgggccaatcacctgaggtcaggagtttgtgaccagcctggcc

SEQ ID NO: 145806 - DNA, 479 bp, Homo sapiens
atgcagtctactgctgagcaaaacatcgttatgcagtgcatgattgyacatgattttgtttggttttattaattgcactggttaaaataatatatgtgtaatgtcaagatctactgttaatgatgttttacctctttgagtgaagtgtagaaaacttgtttccatatgagtctctttactatcactactttttagatataattatcttaaatacttcctctatgttccttgagcatctaaccagataggtcattaatttttgcttcaactattagaaatggcttaaaaacttaagagaagtttgattatacattatatttatgcttaattttacccatttagatggatgtttgtaaaagctgcaaaccttcttcttttatcatttcttttctgtttagagaacttattctttaaaggtaagtttgttagcaacacattaccttagcattctttcattagacaatgttttctatgtcact

SEQ ID NO: 145807 - DNA, 610 bp, Homo sapiens
cagatataaatgcaggtatgggtaaaattatggctatgggtcccagccttaaattcttatttttttataactaattgatgttcagggatagatttatgtgatctgctcatttgcaggggcccatcacttggctaattctttggtgtcattcgtgtcaagttttaaataatttttgagkaagatgtcctatattttaattttgcactgaacactgcaaattttgtagctgttcctgttaatttgttaatgaaatttctctttagaaactattaaattaataagacaataattaagcaaataattattaaattttacatggtaacactagcaatattaactcccattttctatcactttaattcaggccatcctttagaggtttaagtataatccattcttatgtcctacacaactgagtgtgtagtaccagtacgtaatcctaatgtaatggcacaccccagatgacctttttgtgtgttggcatggtttttcagtttaagcaaaagtttaattgattgaaacttgaagttcacatttttttttctacacaccaatattgaagagaagtcctacaaaatacttattctatggaaaaaaacaaagtccactt

SEQ ID NO: 145808 - DNA, 601 bp, Homo sapiens
cagatataaatgcaggtatgggtaaaattatggctatgggtcccagccttaaattcttatttttttataactaattgatgttcagggatagatttatgtgatctgctcatttgcaggggcccatcacttggctaattctttggtgtcattcgtgtcaagttttaaataatttttgaggaagatgtcctatatkttaattttgcactgaacactgcaaattttgtagctgttcctgttaatttgttaatgaaatttctctttagaaactattaaattaataagacaataattaagcaaataattattaaattttacatggtaacactagcaatattaactcccattttctatcactttaattcaggccatcctttagaggtttaagtataatccattcttatgtcctacacaactgagtgtgtagtaccagtacgtaatcctaatgtaatggcacaccccagatgacctttttgtgtgttggcatggtttttcagtttaagcaaaagtttaattgattgaaacttgaagttcacatttttttttctacacaccaatattgaagagaagtcctacaaaatacttattctatggaaaaaaacaa

SEQ ID NO: 145809 - DNA, 564 bp, Homo sapiens
aaataattattaaattttacatggtaacactagcaatattaactcccattttctatcactttaattcaggccatcctttagaggtttaagtataatccattcttatgtcctacacaactgagtgtgtagtaccagtaygtaatcctaatgtaatggcacaccccagatgacctttttgtgtgttggcatggtttttcagtttaagcaaaagtttaattgattgaaacttgaagttcacatttttttttctacacaccaatattgaagagaagtcctacaaaatacttattctatggaaaaaaacaaagtccactttagatctaaaatggttgcataaaattttgagaataacttaaatgttatatgaatgtaagtaaaaattttactgtaaactttgtaaatgctaactataaacagaaaacaagtatatcttatataaagaaatgtgtagactctctgtattaatccattttcacattgctataaagaatacccgagacagggtaatttacaaaggaaagaggcttaattgactcacagttctgcacggctggggaggcctca

SEQ ID NO: 145810 - DNA, 564 bp, Homo sapiens
aaataattattaaattttacatggtaacactagcaatattaactcccattttctatcactttaattcaggccatcctttagaggtttaagtataatccattcttatgtcctacacaactgagtgtgtagtaccagtacgtaatcctaatgtaatggcacaccccagatgacctttttgtgtgttggcatggtttttcagtttaagcaaaagtttaattgattgaaacttgaagttcacatttttttttctacacaccaatattgaagagaagtcctacaaaatacttattctatggaaaaaaacaaagtccactttagatctaaaatggttgcataaaattttgagaataacttaaatgttatatgaatgtaagtaaaaattttactgtaaactttgtaaatgctaactataaacagaaaacaagtatatcttatataaagaaatgtgtagactctctgtattaatccattttcacattgctataaagaataccygagacagggtaatttacaaaggaaagaggcttaattgactcacagttctgcacggctggggaggcctca

SEQ ID NO: 145811 - DNA, 564 bp, Homo sapiens
aaataattattaaattttacatggtaacactagcaatattaactcccattttctatcactttaattcaggccatcctttagaggtttaagtataatccattcttatgtcctacacaactgagtgtgtagtaccagtacgtaatcctaatgtaatggcacaccccagatgacctttttgtgtgttggcatggtttttcagtttaagcaaaagtttaattgattgaaacttgaagttcacatttttttttctacacaccaatattgaagagaagtcctacaaaatacttattctatggaaaaaaacaaagtccactttagatctaaaatggttgcataaaattttgagaataacttaaatgttatatgaatgtaagtaaaaattttactgtaaactttgtaaatgctaactataaacagaaaacaagtatatcttatataaagaaatgtgtagactctctgtattaatccattttcacattgctataaagaatacccgmgacagggtaatttacaaaggaaagaggcttaattgactcacagttctgcacggctggggaggcctca

SEQ ID NO: 145812 - DNA, 589 bp, Homo sapiens
tctcactaaggcacatgggtctaattccattacatttttggcctgtgtcaattaattttcttttctcagataataaatttacactcctattccacttctgagcagttagasattttcagcatggaacattctattaaaatgaaatggcaaattgccttgtagcacacacattttcaaagaatgttttgtctgataatgtagttcttatgagtttctttccaaagtaatccatttacacaaaatacattattaattttgtgcatttacaaactacacataatttcaaagtgatgtcattgttccacaaatacatctaggtttcaaagtgattgattaaattctgtttaaaattttgcacagaagtgcagtatataatcacattttatatccctctgtgcaggatatagttttctaaatcatactccgttgtcaggagcatgttcatcttccatacagaacacactgactgaaaataagatcaagtctacacatttgggatataaatttttgagattactgctcttggtataatatatctctcttgtacttgagcctctagatcttgctgtttttaacacttttgtgctcg

SEQ ID NO: 145813 - DNA, 589 bp, Homo sapiens
tctcactaaggcacatgggtctaattccattacatttttggcctgtgtcaattaattttcttttctcagataataaatttacactcctattccacttctgagcagttagacattttcagcatggaacattctattaaaatgaaatggcaaattgccttgtagcacacrcattttcaaagaatgttttgtctgataatgtagttcttatgagtttctttccaaagtaatccatttacacaaaatacattattaattttgtgcatttacaaactacacataatttcaaagtgatgtcattgttccacaaatacatctaggtttcaaagtgattgattaaattctgtttaaaattttgcacagaagtgcagtatataatcacattttatatccctctgtgcaggatatagttttctaaatcatactccgttgtcaggagcatgttcatcttccatacagaacacactgactgaaaataagatcaagtctacacatttgggatataaatttttgagattactgctcttggtataatatatctctcttgtacttgagcctctagatcttgctgtttttaacacttttgtgctcg

SEQ ID NO: 145814 - DNA, 589 bp, Homo sapiens
tctcactaaggcacatgggtctaattccattacatttttggcctgtgtcaattaattttcttttctcagataataaatttacactcctattccacttctgagcagttagacattttcagcatggaacattctattaaaatgaaatggcaaattgccttgtagcacacacattttcaaagaatgttttgtctgataatgtagttcttatgagtttctttccaaagtaatccatttacacaaaatacattattaattttgtgcatttacaaactacacataatttcaaagtgatgtcattgttccacaaatacatctaggtttcaaagtgattgattaaattctgtttaaaattttgcacagaagtgcagtatataatcacattttatatccctctgtgcaggatatagttttctaaatcatactccrttgtcaggagcatgttcatcttccatacagaacacactgactgaaaataagatcaagtctacacatttgggatataaatttttgagattactgctcttggtataatatatctctcttgtacttgagcctctagatcttgctgtttttaacacttttgtgctcg

SEQ ID NO: 145815 - DNA, 607 bp, Homo sapiens
gttgtttttgaaattgttgcatatttcaggtataattatggtttatataatcaattgcttcctgttggatatttaaggttttttttttgctattaacaaataatgcttatatctatatttttgaacatttgtacaagtataaatgcatggtaaattcctagaggtaaaattactgagtcaagagttttacatgttttgtgaattttgatagatattgtaaagttgttcttcaaagaastttcatttattgttttcccacatttagccaacattaggtattatgaaacttttttatattggccaaaactcacaggcaaaagaaaaagaaaaaagtctcattgttttagcttggtatttatttgcttatggttgaggttaaatatagtaaaaatgaaaaacccagtactatagaagatagagttgaagaaatattccagaaagtacaataaaaggagtaaaataaagaggttcaaataggagagtaaagataagaatactggtggaattatccagaaggtccaatgagaatgatacgagaaaaaaagaaaaaaagtaggatagaaaatcatcaaagacatagttcaaagaaattttatattgaaggacg

SEQ ID NO: 145816 - DNA, 607 bp, Homo sapiens
gttgtttttgaaattgttgcatatttcaggtataattatggtttatataatcaattgcttcctgttggatatttaaggttttttttttgctattaacaaataatgcttatatctatatttttgaacatttgtacaagtataaatgcatggtaaattcctagaggtaaaattactgagtcaagagttttacatgttttgtgaattttgatagatattgtaaagttgttcttcaaagaactttcatttattgttttcccacatttagccaacattaggtattatgaaacttttttatattggccaaaactcacaggcaaaagaaaaagaaaaaagtctcattgttttagcttggtatttatttgcttatggttgaggttaaatrtagtaaaaatgaaaaacccagtactatagaagatagagttgaagaaatattccagaaagtacaataaaaggagtaaaataaagaggttcaaataggagagtaaagataagaatactggtggaattatccagaaggtccaatgagaatgatacgagaaaaaaagaaaaaaagtaggatagaaaatcatcaaagacatagttcaaagaaattttatattgaaggacg

SEQ ID NO: 145817 - DNA, 571 bp, Homo sapiens
taattatggtttatataatcaattgcttcctgttggatatttaaggttttttttttgctattaacaaataatgcttatatctatatttttgaacatttgtacaagtataaatgcatggtaaattcctagaggtaaaattactgagtcaagagttttacatgttttgtgaattttgatagatattgtaaagttgttcttcaaagaactttcatttattgttttcccacatttagccaacattaggtattatgaaacttttttatattggccaaaactcacaggcaaaagaaaaagaaaaaagtctcattgttttagcttggtatttatttgcttatggttgaggttaaatatagtaaaaatgaaaaacccagtactatagaagatagagttgaagaaatattccagaaagtacaataaaaggagtaaaataaagaggttcaaataggagagtaaagataagaatactggtggaattatccagaagstccaatgagaatgatacgagaaaaaaagaaaaaaagtaggatagaaaatcatcaaagacatagttcaaagaaattttatattgaag

SEQ ID NO: 145818 - DNA, 611 bp, Homo sapiens
caattccttttgcaccaatgtcatatatytgtaaattaatagatatggcaagttcagctatatggaatagagctaagaccccaaaggaaatacttggtatagttaaagcttatatatatatataagctttatatacatattatatatataatttattatacatatatataaagcttatatatatgttaaacttacatatataagttaaagcttatatatctattatatacacacacacacacacacacacacacacacacacacacacgtatatatatatattttttcgagacagagtcttgctctgtcacccaggctggcatgcagtggcgtgatctcagctcactacaacctccacctctgggttcaagtgattcttgtgcctcagcctccctagtgctgggattacaggtgtgtgccaccatgcccagccaatttttgtatttttagtacagatggggtttcatcatgttagccaggctggtcttgaactcctggcctcaagcgatccgcccacctcagcctccctaaagcttatatattttatctctggatagtctgccctggctcagacttatacctttatataatagatatttttctagttttga

SEQ ID NO: 145819 - DNA, 611 bp, Homo sapiens
caattccttttgcaccaatgtcatatatctgtaaattaatagatatggcaagttcagctatatggaatagagctaagaccccaaaggaaatacttggtatagttaaagcttatatatatatataagctttatatacatattatatatataatttattatacatatatataaagcttatatatatgttaaacttacatatataagttaaagcttatatatctattatatayacacacacacacacacacacacacacacacacacacacgtatatatatatattttttcgagacagagtcttgctctgtcacccaggctggcatgcagtggcgtgatctcagctcactacaacctccacctctgggttcaagtgattcttgtgcctcagcctccctagtgctgggattacaggtgtgtgccaccatgcccagccaatttttgtatttttagtacagatggggtttcatcatgttagccaggctggtcttgaactcctggcctcaagcgatccgcccacctcagcctccctaaagcttatatattttatctctggatagtctgccctggctcagacttatacctttatataatagatatttttctagttttga

SEQ ID NO: 145820 - DNA, 432 bp, Homo sapiens
gaattcagtcacttctcaccagctgctggtccaagccatcacaattcccccaaagttcttaacagtgctcacagcctctcctccccaccttacccttctgattgcagctkccaccactcatcccctgctcactcctgcagtcgtcaaagaccccaatgcacttctacctcagggcctttgcacttgcagctctctttgtctgaagagcttttcccctaggtatcagcagggttaacacccttcctcattcaggtcatggcttaactgtcttcccagcgaggactcctctggccaccctattttattttttgagatgaagtctctgtcacccaggctggagtgcaaggttggctcactgcaacctgtgcctcctggattcaagcgattctcctgcctcagcctcccgagtagctgggattacaggcgcctgcc

SEQ ID NO: 145821 - DNA, 571 bp, Homo sapiens
gtttctgctttcatcatgtgacatgtgtgctcaccttctgccatgattttagtttcctgaggcctccctaaaagccgagcagatgccagcaccatgcttcctgtaaagcctgcagaaccgtgagtcaactaaacctcttttctttatgaaagaaaaggaaggaagggagagagggaaggagaaaaagagagagggagagatggatggaggaagggagggagggcttacaaccatgaggacagtttttaggtcaatgagggatgacttgggagtcctatgaagactgatgtaaactagaataaagggcatgatgagcttatgattcaaaagtatttygtcatagaaatagtttgttttctgtaaaagaacacagtaaatattttagctttgtaggccactgagtctctgttgctttaaaaaatgtgaaaaccattcttagcttgagggctggacagtccagggccatactttactgaccgctgcttgaactaaacgctgttagaagcagctctggaaaaataatttgcatggaatcttatgattttttttttttttttttgaggcagaattt

SEQ ID NO: 145822 - DNA, 267 bp, Homo sapiens
tttcttctgtgccctgctttcattcaattgtatataaacttctttccacttttaacctcctggctcattccttgccttaactgaaaagtmactgtaatccctaaggaacatgattccattgctgaattctagaaaggatgctactcattttcccatgccccacaacccatgggtatggaaagtggtactggcgctctccacattcctcaatcctacttctaaacctttagctcttccaacctccagcaaaactccctcctcctttga

SEQ ID NO: 145823 - DNA, 464 bp, Homo sapiens
ctcgctctgtcacccaggctggagtgcagtggcatgaacctggctcactgcagcctctgcctcccaggctcaagcgattctcccacctcaccygcccaagtagctgggactacaggcatgcacccccacacccagctaattttattttgcattttttgtagagacggggttttacatgttgcctaggctggtctcaaactcctgagctcaagtgatccactaccttggcctcccaaagtgctgggattacaggcatgagccactgtgcttggcccagggagtagattttctgatgataaaattaacgtgacttgttctagaaaatacagggaaagagtaaatgtgcaaagacttaaatagcatttacatgtagcccacagtgctctaaatgcttttggtggttcacagtttaatcatcataaccctatgaactagatactgttgttgcatccccatttacagag

SEQ ID NO: 145824 - DNA, 605 bp, Homo sapiens
cctgtttttaccacttcaattactgtctagctctggttttaccttgtcagtacatatggctgcccttcatttaaragtcacctcaaaaagaccactcagtcacagtctttaaattctttatattttaattgtgtaagtaccttgcctctctggtatcttgttcccaaacatttcttcagctggaccacttaagccaatgaaagagcgaatctatttaacattgattccattagctttggtttcctgaactcctttccaaattggggagatgatgggaaaaggagcacctctccatagccttctcggacctgccacaggagaggcaggggagctgtggttgttctcccacactctcatttgagtgtgaccttgtctccccaccccaatcctacacatgaagatagcagagaagtaacatacctgtataaacttaataagagcgtctctcaatggacctagtggagcctgtatcccctacccataaatagattagtcttgcatcctggcaagaaccctggatttataatcatgggccctgcctcctgttgtgacatttcagataatcacttagcctccttagacctcaattcttcatttttaaaagc

SEQ ID NO: 145825 - DNA, 605 bp, Homo sapiens
cctgtttttaccacttcaattactgtctagctctggttttaccttgtcagtacatatggctgcccttcatttaaaagtcacctcaaaaagaccactcagtcacagtctttaaattctttatattttaattgtgtaagtaccttgcctctctggtatcttgttcccaaacatttcttcagctggaccacttaagccaatgaaagagcgaatctatttaacattgattccattagctttggtttcctgaactcctttccaaattggggagatgatgggaaaaggagcacctctccatagccttctcggacctgccacaggagaggcaggggagctgtggttgttctcccacactctcatttgagtgtgaccttgtctccccaccccaatcctacacatgaagatagcagagaagtaacatacctgtataaacttaataagagcgtctctcaatggacctagtggagcctgtatcccctacccataaatagattagtcttgcatcctggcaagaaccctggatttataatcatgggccctgcctcytgttgtgacatttcagataatcacttagcctccttagacctcaattcttcatttttaaaagc

SEQ ID NO: 145826 - DNA, 488 bp, Homo sapiens
attagggaggccctaaatccagtatggttagtgtctgataagaagagggaagtttggacacagagacacagaaacacagggaaagaggccatgtgaaggtggaggcagagattggagtggtgtagctgcaagccaagcagtgccaaggtttgccagccacccttagaatctaggaagaagcaaggaaagattcttccctagacccttcagagggagtgtgggcttgccaacagcttgctttctgacttgtagcctytagaactgtgagaaaacacatttctgttgtttgaagtcacccagtttgacagctctgggagagtaatccagagtagaagccacctgagggcaaggatgatggtttattcaccttatgcctctctgcagtgtttagttccaaacatggctgactcaagatgttaaacggagcttcataaaaagatgttactggaaggtatggctctttctagcctgactgctgtcacagctgt

SEQ ID NO: 145827 - DNA, 563 bp, Homo sapiens
ttggcttactctttccaaaacaagtatttgtagagttgctgtttatatctcagtacagaaaaggccacctggattggcactggctccctattccacagagctgaacaggaatgcaaggaagaaatgtcactacatagttctgaggtgtttacaggattctaaatgagttctaatttcatttgctcaacagtaatataaaccaagctattcagataacacaattttttatacgagaaaactgaggccctgtgaggttgtaacacagactgttgttctacagatgttaagatttgaagtcaaaggacctgggttaaaaataacaaatcctgctgtgtgtgtgagacctcaggcaagacagggccctctcagaatcttttcctcacctgtggtatgtggacacttgacggttggacatattccatccatgtgtgaatgtgtacgtgcttgtatgtacaacacacacacacacacacacacacacwctctctctctctctctctctctctctctctcttaccctcactcattctttctctcatacctaaaaacgacttgaaaagctt

SEQ ID NO: 145828 - DNA, 573 bp, Homo sapiens
tcatttccatcgatagaggtgtaatatactgcatttcttcatttggtaacatagcaaagactttaaaaaaacacaaagaatggtgatgctcctaattcggatttctttatttcaaggtggtttggattttggtaagccttttcactctacagagtacttagaagacaaggccgccaactaccttggacttaaagccaagccatcagatagtgcccagcacatattaatgttagcttatttttgagaaaaattacctcttctaggccccgaagcaaaaaaatgcatttgctatgaagattgaaaatgaacaaaattacaaaaaaaaacaccaaaattggtgatttagtcagatgggtttttttgttgtaggagcacttgatttcaagtgtgttttgtatagtatgtaactacaaaatagtacattttgtagcaatttaaaactaaagttgctagmatcattttgctcttgtgccggttaatcataggatcccattaaacgtaagtgcactgagaagattaaatgtagagggaactgtttggtaaagaacattccagtaggaaaagaagagaaca

SEQ ID NO: 145829 - DNA, 447 bp, Homo sapiens
tattggtcattgattttgccagctttgcataagttcctcagcacagcaggaattccctgtagcttgcaccatggaactcactgtttccaggctcttccctcctgagtttggttctgatccacgctcatagacaaattcctgcctcccagcacccccagcccccaactgggctcttcttttcctagacttagactctttactctttggacctgacacgcagaagaattacttcttccattgacaattccagacctcttctcggctctgtaggtcaggatcccttggaggagtattcctacyggtttggatattgggactctcctgctttagaattgatccaccaggattatttactctttcctgctgcatttgggcagatgagtgaagggatatgcccttctctgcttttcacagcactttccttcacttggcatactatatatttca

SEQ ID NO: 145830 - DNA, 620 bp, Homo sapiens
ataactgagggttcaccctacactgaaattctgagcatcactcattgttgtataagaactaggattgtggatccagaaagactaggcaattaattgcattcattaatctggactgaaaccctgaaggttagtttctaaatatataggttttggttttgtttctttttcttattagattctggaaatggaaaatctaatattttgagattgtaattaattggattttggctaactgagcctttattgtatgcattttacaaagcataatggtagttgkcaaaactccatgatctttcattcaataatcttgaatttctacttgccaaatgccatgtaacacatgaattaggtctttaatctcaaggggtttataaactagttgatcccagctggcaaacataaaatatgaatgctgccacttctgcttcttgtgctcatcacaggcaatgctaattgatcacagacctcttgatgcatttagacctggcctcagaatctttcttatcagaaagcttccagttactaccagtaattaaaagttgcttacttgtttaaacctatttgctgcctctgtgctatatgaacgcttactcactcagcatatgtggagaaaacatagt

SEQ ID NO: 145831 - DNA, 549 bp, Homo sapiens
gcttctgtaaagctgacttttttctctttcttaaactcaccatacatttttctctcacttcctggaatgcttccctactkgctcttcgccatgtagccaagtcctagacatttgccaaggtcaagaacaaacccttccactttcacaaagtcttccagactcacctggccctagcaagaaatccacctccaaagacctgcatccctgatgactaatttttaacatcctggttggtaaggaggatgtggtgtttattagttgtcttttaaaaatatgtcctatatctccaactggatgccaacctctgtgtgtgaccaatctctggatacttcccactccacattccagcaaacacacagtctctgtggcatgatgcctggtccataatgggctctcaatcagtgatcatgattggtgatgggttcgatggttctctgacaggctgtattataggttcctcaaagacaaagacccatctcagcttgttcaatattaggttaccagtacctattacaggatatgttcaaaaagtatttgctaaatgaactg

SEQ ID NO: 145832 - DNA, 549 bp, Homo sapiens
gcttctgtaaagctgacttttttctctttcttaaactcaccatacatttttctctcacttcctggaatgcttccctacttgctcttcgccatgtagccaagtcctagacatttgccaaggtcaagaacaaacccttccactttcacaaagtcttccagactyacctggccctagcaagaaatccacctccaaagacctgcatccctgatgactaatttttaacatcctggttggtaaggaggatgtggtgtttattagttgtcttttaaaaatatgtcctatatctccaactggatgccaacctctgtgtgtgaccaatctctggatacttcccactccacattccagcaaacacacagtctctgtggcatgatgcctggtccataatgggctctcaatcagtgatcatgattggtgatgggttcgatggttctctgacaggctgtattataggttcctcaaagacaaagacccatctcagcttgttcaatattaggttaccagtacctattacaggatatgttcaaaaagtatttgctaaatgaactg

SEQ ID NO: 145833 - DNA, 546 bp, Homo sapiens
cctgaacacgtttaatgctgttcttggcacacactgtgttgtaattattgattgaaaggcaggtttcttctgcgttccagagtgctcttgaaagtacagattttgtttctttcatttctgtatcctgtatgtgctctgtgccaagcatgagcctgctatctaatagatggtaaataattatctgttaaatgaaagaatgagtgaatggtgggcctcccsctcgcaggtatggggtgtgctcctggaagaaggagtgagcataggcccaataaagcctcaagacccctgctgattggctgaaagtccaaggcccagctttggtaatactggcagagtggagtgtaatacagagaaactgaggcagaaggtcaatctcacagcctgaatcagcactgtatcttgtaaaaatgtcaacttgggttttgactgagtggttattaaatgtttttgacccacagtaagattgttgacaccaattcggctgcttctttacactgaggaactgtttatactgggttagctcctaaatagcttttctttttcatg

SEQ ID NO: 145834 - DNA, 612 bp, Homo sapiens
ttattgttcacttgttaacaaaggaatcttttctacatcaaggcgagttctctttttcagctgtgagctaatttctctctctgctaaacaatgattccctgctctcactcactccctctcctgcttacagacactattaacatcccacaggaagtggtgtttgtacagtgctccttgattaacgaatccccagggaatgagccttctttataggatatggggctgggctcaaaaacacttcataaatcatgcagcatgagctgtccggactggtagcggcttgccggcaaccttcggtgcacagccactgtttggcacgtctgctggaggaaaacgagtaagagctgctcacctgggaggctgctctctgttctcacactttgcttttctgcctccttccatatctcataggtggggagggtactcattcttgttcctgctccttcctgctcccttgtcaatctcttcctcttccctatccagatccttctgttcccctcccccyagtcctcccctgccccatactgcaagaccagggaaaaacgaagctaatttatcctgaaggtttaactaaatgaagcatttgcagtttaagctgaattggagaaaaat

SEQ ID NO: 145835 - DNA, 549 bp, Homo sapiens
ccaactatccccacagcagggcacaatggctcacacctgtaatcctagcactttgggaggttgagcagggagatctcttgaagccaggagtttgagaccagcctgggcaacactgcaagaccctgtcactacaaaaaatgttttaaagtttagccaggtatggtggcatgtgcctgtaatttcagctactcaggaggctgagtcaggaggattgcctgagcccagggattgaaggctgcaggaggccatgatgatatcactgcattccagcctgggcgatggcaccaggccctgamaccaaaagaaaaaaaaaaaaagtatagtcaagatatagaattaccctaagtggcaatcaacagatacttggataaattgttttttatatacatatatatatatgtatataaaacacatatatttatattacatatatatgtaacaatacacagcctttaaaaagaagaaaattctgtgatttgtgacatcatgggtggaactggaggacattatgctaagtaaaataagacagcacaaagagacaaatactgt

SEQ ID NO: 145836 - DNA, 549 bp, Homo sapiens
ccaactatccccacagcagggcacaatggctcacacctgtaatcctagcactttgggaggttgagcagggagatctcttgaagccaggagtttgagaccagcctgggcaacactgcaagaccctgtcactacaaaaaatgttttaaagtttagccaggtatggtggcatgtgcctgtaatttcagctactcaggaggctgagtcaggaggattgcctgagcccagggattgaaggctgcaggaggccatgatgatatcactgcattccagcctgggcgatggcaccaggccctgacaccaaaagaaaaaaaaaaaaagtatagtcaagatatagaattaccctaagtggcaatcaacagatacttggatarattgttttttatatacatatatatatatgtatataaaacacatatatttatattacatatatatgtaacaatacacagcctttaaaaagaagaaaattctgtgatttgtgacatcatgggtggaactggaggacattatgctaagtaaaataagacagcacaaagagacaaatactgt

SEQ ID NO: 145837 - DNA, 595 bp, Homo sapiens
tctaatgtaatactccacatgatataaatccttttaagtatattgagatgtgttggtaaacataccacattgtactagaaaacaatgtgtactctgtagtggttggatatagtgttctataaatatcatttatatggrtagttggtagtgttggtcagatcctctatctcttcactcattttttttgtctagttgttctatctgagagattgttctcagtcatgctgttctccaatatgatggtggatgtgtctatttctcctaattttgtcaaatcttcatgtattttgaagttctgttattaggtacatacacatatatatgagtatgaaatcttcctgatgtattgattctttaatcattatgaaatgtccatcttaaactctagtaatatgtaaggctattttacctgctacccatctagtcactccagttttctcatgcttactgtttaaatggtatccttttctacccattcacttttaatcagtatctgtctttttattcaaaataggttcttatagacaacattcttatccattctgacaatctctaccttttaactggagtgtttagtctgttaacatttaatgta

SEQ ID NO: 145838 - DNA, 457 bp, Homo sapiens
gatggcaccaagccattcatgagggatccatctccatgacccaaacacctcccaccaggccccacctccaactgggatcacatttcaacatgagatttggaggggacaaacatccaaaccatatcactcagtataggaagggggctctaacccaaatgcaagagcagcgagcaagaattccagcagctgcctagggtccaggacaaagggagagttcaccgtctctacacagcacgatggtgagaggacagtgtgggccccaggagatgaagcaggaagaaaatcctgtgcagaacagacaattcgtctgtcctcccrgatgagggttccctgggtcccagtgagaaggagtggacgctactgatgtgttttaacacataactttaggcctaagctaactttatggaaaactgcatataattattattctacagcacagatggattcattttgaggt

SEQ ID NO: 145839 - DNA, 409 bp, Homo sapiens
gaattctagacatcttccttaatttctactggtagtaatagctcattttctcctaagaatcaggattaattaccccagccagtatggtaattgtcttttttttttcatgttggtttattggtatgaggagaacaagatggtcaggtggcagtatcagtttccattttaayattggtatgtactttggtggaaacgttcttcctgtggaaactaagaccattatatctgcagagcacaaaggtacaaagaaggacaggaagcaaaattttcactagtggatcattaaagataatattgagagggagccacttccatttctaccacttaattcccaaattcatggatgctggctgtgtgagaaatagcacgatattcattcagagcatctactacaacatagaggatgtcg

SEQ ID NO: 145840 - DNA, 533 bp, Homo sapiens
actatttgggctttaatcctacccaaaggaggaaagaccaaataagcaaaaagtttattttttatttgcttttaaaaaatgatttgcttttgttcatgcagtaaatctttattgaatgactaatgattcaaatgttgagtctgatccgtggtttgaatacatgaaccagaccaagctctgtggctcaagcctgtaatcccaacactttgggaggctgaggcagtggggatcgcttgaagtcaggagtttgagatcagcctgggcaacacagcaagaccccctccaacccatcccgccccccaccatctctacaaaaaatttcaaaaattagctgggcatggtggcacactcctatagtcccagctactcatggggctgatgcaggttgaggcaggaggttcatgagcccaggaggttggagctgtaatgagctaggattstgcctctgcactcctagctggatgacagagcaagaccctgtctcaaaaaagaaaaaaaaaaaaaaaagaatgcatgaaccagacatgacagtt

SEQ ID NO: 145841 - DNA, 501 bp, Homo sapiens
gacagttgcccaagacatgtgacattcacttcctgccttagggtgcctctgttgctactgaggcttgagaagtcctaggacatgcttgacgcccacacwttcaaccagaattgcaggaaagttcatcttacagaaacaagagagtgaatcttagaacgatgggagccggcagaaaaatgattcaccctttctttctccctccatcccacagactatcctgaaatgcaatagttcataggctcttagaatcctgccagatcaagccatgaattatgcttggtagcaggttgtagcagtctcagtaatataccttgtgttggctccccctattttcccgcctctttcccctcattccttcactcctgctttcttgggcttgaactctcagctaaagtagcaagacataaatgtgtttgccttaggctctgtactctggagaactcaggccaagacagctggaattagggaaaacctttgaaagcagatgcctcaggataagat

SEQ ID NO: 145842 - DNA, 531 bp, Homo sapiens
atgtcttcattcaaacggcatcctatatgtgtagattmcaaatctttgcatacaatacttctctgaaagaaaatgaacttcagagtcctttacctgatgacactctaagcaattagaataactattattattaccatcaccatcaccactatcatactggcaagtttactcagatactcataaatcataaagaaaagccctttctcagttgcttagaaatgaaaaaggatgaccttacaagaaaaagtagtctttgtgctataatctcagtaatccaagacagcatatttattcctcaaatactacccacaccttcatgtatatttactgatgcttaaaattctatgaacaaggagtaaagtcttttatttcacaagaaagatgagacttaaaggacacatgccatttgaaagaaggaaattcgacaagtaaaatgaactccaagatcgaaatcactggtctagttagatctgggtagcagaggatagagaacagaaatcgctttatggcttgagtgtcaggagttaaagg

SEQ ID NO: 145843 - DNA, 426 bp, Homo sapiens
atttattaaaatagttttgggctatatctatagtctatgctcaagagccaatccttacctttgaggaaagaaaatacattgtaggaaaataggttaaagtatgagggtaatctataaccccctacctctacgccactcatagttaacaaaatattgccttcacagtgctgaagtttcagtcaggccaggatccatatcacccacagtgaatataaaaggtagatgaaaattattctttattaccctccccaaataaaagagcataaaatagcaagactatgacattgaaacttccacagcttaatcagaarcaaagcctatgaatgagatgggtcatgcttccaaaagctgtcaagaagaaaagtcttgcagtggctcaggattagtagagctgtccagggtcctgaccccattcaccaccatctc

SEQ ID NO: 145844 - DNA, 401 bp, Homo sapiens
cgaattcccagcttaccccacacctatacatgtactgtttgagagaactaagctttctatttccaagcttctattgaataatatagcctctcctcctcaatttctatccaaaatgctgtggtaagcaagtaacactttgaaatttatcattttgaagacagtcataccactctagagctaatgaaagtatggcataaatgtaaatacagtctccatctttacaaaatattataaaaaatattccatgtttaatcatttacgaacttaaaaaagccctgccaaaaatgcaagttatgagaatgttacttcttgaaggtagtttgagatacttgaaaacagtaattttagagcatagagttcttacagrgtacatgtgtctgtcttatctaataacatcctct

SEQ ID NO: 145845 - DNA, 479 bp, Homo sapiens
atggactggaacactcaatattgcttagatgacaattcagtacttgacctatagattcaatgcacttccaatcaaaatcccagcatgctattatgtacatactgacaccttaattctaatgtctatatgaaaaggcaaaagacccctaatagctatgttagctccctaggactgctataagaaattaccacaaacaggtggtttaaaayaacagattattctcttacagttctggaggctaagtccaaaaccaaggtattagcaaggccatgctctctctgaaggcttcagggaagaatccttccttgcctctctccagcttctggtgactctgtgaaatccttggtgttcctcggcttgtagatgcattattccaatctccgcccttgtcttaatgtggtgctctcttctctgtgtgcctatgttcaaaattctctctcttataagaactctagtcattggattagggaccatcataa

SEQ ID NO: 145846 - DNA, 479 bp, Homo sapiens
atggactggaacactcaatattgcttagatgacaattcagtacttgacctatagattcaatgcacttccaatcaaaatcccagcatgctattatgtacatactgacaccttaattctaatgtctatatgaaaaggcaaaagacccctaatagctatgttagctccctaggactgctataagaaattaccacaaacaggtggtttaaaatarcagattattctcttacagttctggaggctaagtccaaaaccaaggtattagcaaggccatgctctctctgaaggcttcagggaagaatccttccttgcctctctccagcttctggtgactctgtgaaatccttggtgttcctcggcttgtagatgcattattccaatctccgcccttgtcttaatgtggtgctctcttctctgtgtgcctatgttcaaaattctctctcttataagaactctagtcattggattagggaccatcataa

SEQ ID NO: 145847 - DNA, 494 bp, Homo sapiens
gaattcccaccatcatctgcagaaacgtctacccacaagcagtggctctrttttgaaggatatgtctctgtctcagttctctccaggtgcagcaccaactccccaccactcactagttaaggtggcatttgcagtttcagaactggttgcttacttattcagaattggaggaaaaggtcaagaagttgagctgtgaaatgcagaaaaaaaagtgaagaaactcagttttctctcaaaacaaaaaataaaggagttaaaatatacaaaaatgcaactgaaatctctgaatgtaattcacactctagtatgctcttttaaaaaaagatgaaagcacagaagcatacataaagcattctttgtaagctactctttgcttactaataacaaatgtaggtaaattgggcagatgtaaataaggcaccaccacaacacgtgagcgccaaccacagagccaagatccgcacactaaatacgggaagttgtaaaagactgtg

SEQ ID NO: 145848 - DNA, 404 bp, Homo sapiens
aactttcttggatgcaatctgactcaggcggcaagcaagccagggaaaggacattcttgcctcatccccacccccagtttattccatttttcttggagctggtaccagttgggtcaacccagtcagttctcccaacctaggaaaaaggaaagaccagaatgggtgaatttaaattggagagatgtcactgaacctcttcccacctcaaacctttgccctggatggggagggaacctaacatttaattttgtactctaytggctgttctgcatatattatatcattaaatcttcacaattaccctataggtagactatattataaccacttgattggtaagaaaattgagactcagagagtctcaattgtccacaagccaagaagatagcagaactgggatttca

SEQ ID NO: 145849 - DNA, 404 bp, Homo sapiens
aactttcttggatgcaatctgactcaggcggcaagcaagccagggaaaggacattcttgcctcatccccacccccagtttattccatttttcttggagctggtaccagttgggtcaacccagtcagttctcccaacctaggaaaaaggaaagaccagaatgggtgaatttaaattggagagatgtcactgaacctcttcccacctcaaacctttgccctggatggggagggaacctaacatttaattttgtactctactggctgttctgcrtatattatatcattaaatcttcacaattaccctataggtagactatattataaccacttgattggtaagaaaattgagactcagagagtctcaattgtccacaagccaagaagatagcagaactgggatttca

SEQ ID NO: 145850 - DNA, 472 bp, Homo sapiens
gaattctctgatcaaatgtactggggcaggtcatgtgatgtatctgctattccctcagctttaaaattagttcagtgacctctagagccctttccaggtttaaaagttttctaagtttatgaggcctacttgacattttttttgcacccaatasggtttacaatatataaactattaaaaatgattaagcctacacaaataaaaagtaagctctgttaacacacataaactggttttctggattaaccaggattctccatttcttctataaaacatactccccaatgtccaggtaacactaaatgcctgcagctagcaggcttatctctactttgctggcatacttctattcccaacagttgggttctggtataccccagagtcaattgagtatgtcaatctaattaggtaatttaattgactgcaatacagactaataagatatgagtatgagataaaaaggagttgtttt

SEQ ID NO: 145851 - DNA, 443 bp, Homo sapiens
gtcatgtgatgtatctgctattccctcagctttaaaattagttcagtgacctctagagccctttccaggtttaaaagttttctaagtttatgaggcctacttgacattttttttgcacccaatagggtttacaatatataaactattaaaaatgattaagcctacacaaataaaaagtaagctctgttaacacacataaactggttttctggattaaccaggattctccatttcttctataaaacatactccccaatgtccaggtaacactaaatgcctgcagctagcaggcttatctctactttgctggcatacttctattcccaacagttgggttytggtataccccagagtcaattgagtatgtcaatctaattaggtaatttaattgactgcaatacagactaataagatatgagtatgagataaaaaggagttgtttt

SEQ ID NO: 145852 - DNA, 472 bp, Homo sapiens
gaattctctgatcaaatgtactggggcaggtcatgtgatgtatctgctattccctcagctttaaaattagttcagtgacctctagagccctttccaggtttaaaagttttctaagtttatgaggcctacttgacattttttttgcacccaatagggtttacaatatataaactattaaaaatgattaagcctacacaaataaaaagtaagctctgttaacacacataaactggttttctggattaaccaggattctccatttcttctataaaacatactccccaatgtccaggtaacactaaatgcctgcagctagcaggcttatctctactttgctggcatacttctattcccaacagttgggttctggtataccccagagtcaattgagtatgtcaatctaattaggtaatttaaytgactgcaatacagactaataagatatgagtatgagataaaaaggagttgtttt

SEQ ID NO: 145853 - DNA, 501 bp, Homo sapiens
tgccagctcagctcctttctctgtggattccaagtctccttcaataattaccaatatataaaccacttcttcacacttcctatctgccttttcttcaatatgcttagcttctttgagttggatttcccggagttccatctttccttcgtcttcttttcttcctctttctgtttttctttcttccctctctctctctcttttttttttttttttttttttttgagatagggtctcattccaatgcctaggttggagagcagtggcatgatctcagcctactgcagcctcgacttcctctgctgaggtgacccactgacctcagcctcccaagtagcttggactacaagcrtgtgccacaaggacaactatttttttttttttttggtattttttaatagagatgggggtttcccatgttgcctgggctggcctcgaactcctgggctcaagtgatctgctggccttggccttccaaagtgctgtgattacaggcgtgagcca

SEQ ID NO: 145854 - DNA, 501 bp, Homo sapiens
tgccagctcagctcctttctctgtggattccaagtctccttcaataattaccaatatataaaccacttcttcacacttcctatctgccttttcttcaatatgcttagcttctttgagttggatttcccggagttccatctttccttcgtcttcttttcttcctctttctgtttttctttcttccctctctctctctcttttttttttttttttttttttttgagatagggtctcattccaatgcctaggttggagagcagtggcatgatctcagcctactgcagcctcgacttcctctgctgaggtgacccactgacctcagcctcccaagtagcttggactacaagcgtgtgccacaaggacaactatttttttttttttttggkattttttaatagagatgggggtttcccatgttgcctgggctggcctcgaactcctgggctcaagtgatctgctggccttggccttccaaagtgctgtgattacaggcgtgagcca

SEQ ID NO: 145855 - DNA, 656 bp, Homo sapiens
aacatcacacaccggggcctgtcatggggtggagtagggataacataggagatatacctaatgtaaatgacgagttaatgggtgcagcacaccaacatgcacatgtatacatatgtaacaaacctgcacattgtgcacacgtaccctagaacttaaaagtataataaaaaaaattgcaaaaaaaacccagacatacttgattttgaacaaattgcatgtttagcatataaacttcacagacattgtataaaaagctcattgtttcctattgtttagacattttaaaatatttaattcaggattgttcagcctatatgcataaaaatgtataactggtaattgattggtaatattaacctgatgtattaaatcttttaatactacacattaatttccactttgacagakgaaaactatattgctattgatttctgctattctgccctaataaatttttattgcttcctatgtctattcatgcatgacatcattttatttattacttggatggttctctattgagactcttctttagtcttattcaataattcatttaaagttttctgtgtgtatgcatgttctaaaatctcagccagaaagaatactccctcttatttcagtgtggctgtgactctagttattttcaccaggaattc

SEQ ID NO: 145856 - DNA, 408 bp, Homo sapiens
aacacgcttaagcacatagctcatagacactataaagcaactatacaatcaagtctacaaaacaacttgtaacagcacaataataggatcaaaatctgacatagaaatactaacactgaatgtaaatggaacaaatgtctcactcacaagacttagagtggttggctggatgacaaaatgataaccaatcatctcctgtctttaagaggcccatcccacatgtagtgacaaccacaggctcaaagtaaagggatggagaaagatctatcatgcaaacagaaaaccaataatagcaggagttgctgttcttatatcaggcaaaacattctttaaatcaatgacaattaagaaggtcaaagaagsacattttgtaatgataaagggtaaaattaaacaagaacacttaac

SEQ ID NO: 145857 - DNA, 588 bp, Homo sapiens
agatctgcttcaaattccaaagcctcagtcccaatgtaccagatgcttcttatcaagcaccatcagcaacaatgctattaacatcataatgaaggacaagcatgatggcacattagatatcaaaagaatggcttatatattttgtcaccaaattagagaaattgccaaacatcaaaactggcattgaaaactctgcttatttcagtggaagctagatattatgcctactctgctttttcacactttataaaatattctcagtayataactatctgggcatgtgtacaagtttaaaatgttatgatcacatctttaaaataatttctctttttatctgttacaattttgatttgtgcctaatacaaatgactttattaatggccttttgatatccaaaactttattttgtccaagcaatcagaataacaaatacaattatttgaaccaactaatctcatttcaggagaacgaaactataaaccgtgaaactataagcctagtttcaattttctatacatttgattttcatgaggacataaggatcatttacaatctgatgcatttttaaaaagatgtgtaccctaatag

SEQ ID NO: 145858 - DNA, 511 bp, Homo sapiens
aattgttaatactatcataaatggcatttatgtattcatttaccaaatattgatcaaaaactactttgtgtctaccatcagaatttaaaagacaccttcctagatcatagagaaggcttactgacatggcacatacagaatggtaaacagatagctacattacacaatgagataagtgcttcaataacaatatagagctgtaagggagtgaattgaagagatactcccctattcttaaatgttcagtgaaattcctttgtcccaaagtgctagttaaacraagacataaagaatagtctagcaaaaaaaaaaaaaaaaaaaaaatgtgattgtggtagttaatgttccagtcagagaaaatagcatagtatgggagatgagggtggaggagggctatgaaatacagtcgcaagaataagccaagttaaataatttaagctccatcctgggtatatagactttcaagtgtgtgagagagcacatacaaaattactaccatagaagaattttg

SEQ ID NO: 145859 - DNA, 609 bp, Homo sapiens
agtactgagcaaatgtgtttgcagaaaattcaagaaaaacacacaacataagaggagatctctctccttgggtagaatagttagactgatttattatggaaagtcttagactgtaactattttgtattttgacaaacatcaattctaattgaagattcatacagagtactcagtgcttttctataagggattccacctacttgtgaagatcttcaagaatattatttgttgaatcaatgaaaggtattcattttctgggtttatttcccctccttatgctaaattgttatgccagggcacaggagaatgatgattcaaaatctatacctacatccacaggaatttgcaayacttacacattttaccatcatgtcctaaatacaattcagtatgcaaggcatattcaaaacccagtccaaatgctaaaaataaattcctgtcagcaatttatttcctatcacaccatcagtgttttctctcttttgtcaacaaactattttagcacatgacattttctgtatcatttatgtgaagtttagtctgtaatatttatccttatgtcttgtctcctcatctaagtgatgaattagttgccaagcagggatgtgg

SEQ ID NO: 145860 - DNA, 601 bp, Homo sapiens
tcctatcacaccatcagtgttttctctcttttgtcaacaaactattttagcacatgacattttctgtatcatttatgtgaagtttagtctgtaatatttatccttatgtcttgtctcctcatctaagtgatgaattagttgccaagcagggatgtggcttatgcttctttttctagacagcacatgcagattttaagccataagtactttatagactctgaagggaacttttcaaacatgcaaccatttttttaaattatatttttccctattatgtcttagacaaatatgtatttgcttgaatttagggaaatgaattagaaaaagttacacaatatyaatcaaaaaattaacatggttaaacataaaatgccttaaaatacccatctgcaggaggtttccatccagagatgttctaaaatgtgttgataattatcttgcagattccataaatctcttcaaactgccagagaatgaaaagccaggtaaggtaagtgataatctgggaaattaatgtttctgacaagtcatgagaaccagaaaaagttattaaatgctaacatttcccatataatgataatggttaacactggtgtaatgc

SEQ ID NO: 145861 - DNA, 601 bp, Homo sapiens
tcctatcacaccatcagtgttttctctcttttgtcaacaaactattttagcacatgacattttctgtatcatttatgtgaagtttagtctgtaatatttatccttatgtcttgtctcctcatctaagtgatgaattagttgccaagcagggatgtggcttatgcttctttttctagacagcacatgcagattttaagccataagtactttatagactctgaagggaacttttcaaacatgcaaccatttttttaaattatatttttccctattatgtcttagacaaatatgtatttgcttgaatttagggaaatgaattagaaaaagttacacaatatcaatcaaaaaattaacatggttaaacataaaatgccttaaaatacccatctgcaggaggtttccatccagagatgttctaaaatgtgttgataattatcttgcagattccataaatctcttcaaactgccagagaatgaaaagccaggtaaggtaagtgataatctgggaaattaatgtttctgacaagtmatgagaaccagaaaaagttattaaatgctaacatttcccatataatgataatggttaacactggtgtaatgc

SEQ ID NO: 145862 - DNA, 573 bp, Homo sapiens
ttgtccttaaaactgtttgggaccttacttcttcctcttgacaggattctscgtcttcatagaacacatagccaaattacccagtgctttttccaaagccaaaaacgtacctagttactgatatctaccctacatcacaccactttgagggtgtggcccggctctctacctgattgacacatacaaatcaggccctaaattttcacaagtgatatcatttctactacctgaatgcttggtatcttaagcatatgaatttctatttagcactgtatcagcacttcaagcatttgtgaaataattcaaccatgatttgactgtgatccagtattggggaaaggcttgcttgaaaatctgatatttatcaatatgtaggggacatattaactgtccgttactccaggttctcaaaaaccaaaccctgtgtagttacagaatagatagaaaacagaatcctgcagacatgcttttactaagttgaagtttaatactagcttctcaatctttatataaagataatatataaataatatttctttgaaagtctttctttattgcaaaagtatcattaca

SEQ ID NO: 145863 - DNA, 318 bp, Homo sapiens
ttgcaattccacatgcatttcccgagttttcattccctctttctggcatgtccttcctgcctggctaatgtctctatttccttacaaackttcttagcaagctcaggggttgcttaagagactttctcttggttactcctatctcccacccttagcagagagaagagtcaggtgtgtgtgtgtgtgtgtgtgtgtgtgtgtgtgtgtgtgtgtgtgtgtgtgtggctggggccggggtttcttttgttatgaaatttctcaggttttgctgaaattatctgtggaattgtctgttccccacagtaagtcttgagttcc

SEQ ID NO: 145864 - DNA, 267 bp, Homo sapiens
gccattgaagagaaaaacaatgaagcatcattcctagcaactggtacccagtagcatagaaaatgatccacatttggcaaatttaccttgaatacagctattggatgaacataaaatttgaagagttggaagaaaaatgagatatggagtctagcatttataatgaattatcaaatgtgagtaaytgcactcagtttaaccaaaacacttagatttttgaagctgactcatcattttaataatttccttttaaaagctgttttacgc

SEQ ID NO: 145865 - DNA, 589 bp, Homo sapiens
gaccagctatttttgttggacactgtctgaattcctgatccacaggagcaattaacataatcaaatagtgggtttttttttcaggccaccaaattagggcacatttgttatatagcgataatgactggtacattcgagaaaagagcgtggatgagggacaaccatgcatccatgcaacagatgaatcatacaaaagaaaaggacaattcttgggaaagagaactctgagaaatgtaaatctgtttcaggagttcttcaagcctcatcaggatctaactggccagaattggttgcttcyaattaagcccctaatattcaaagccaactattagcacaagtctgaaatggctttaggaatgtgattttagaatgactgaggccagattgtaatcactggaaaccacaagtatcacccacctggtcagctccatgccagcaccctggaatgatgggaatatatatgtacgcgaccttaattacagcaaatttaaaaatacttgtgtgtgcctgtgtgtgtgtgtgggtgggtgggtgtactaccttagagaaaaagacaaatgacaagaaaacaaatttatatcagagtttg

SEQ ID NO: 145866 - DNA, 578 bp, Homo sapiens
agtcagaaaagagagagaggtgtgtttaattgaagcctctctcaattttttcagaaacatggagggattctcttcagtcccttggtttatggttgataactcagtgtaattgaggggcttggctgcagttctcctcagaccttcccatatccatacatgaaaatgttttctttgycactttcctagaacagtgtctgagtcccatcaaggatcatcagtgggtactgcctgcttgcttatcagaaagggctccctaatttattccccttctgcggaggtgccacaataataaacaatcattttatctccaaatgtctcagtggcctgtaaggctgcctgcttctcgaagctgttaagagcctgaatgagaagtaacataatatccttccatgaaagctccaacacttgagtaaggttctgaaatgtttcaatatacctctcagggctgtcagaaaattttcctagatccctttcatttgcttcaaatcttgtaaagaagggggacttgtactctgaagtaatcatatccactaggcatttcctgtaaaggaggaagtgactccagagcgtgtccatat

SEQ ID NO: 145867 - DNA, 609 bp, Homo sapiens
taacaggtttgaaatgatatcttatattggttttaatttatatttccctgatgatgatgatgttgagaatctattcatatgcctattggccatatctatgtcttctttgtttttagttttgtagcctgaccttttggtgtattatacaaaaaaaaaatattgtgaaggccaatgcctaggagcttttctcctgtttctcttstaggagttttacggtttcagttcttacatttaggtcttttatccattttcagttgaattttgtgtatggtgtaagataagattcctaattcttttgcatctagttttcctagcacccatttattgaagagactatctttttcccattgtggttgtatttactactgtacaatcaacaaaaattagttaactgcatggtagtccacccttatctgcaattttgctttctgcagttgcatttatctgcagacaaatgtggtctgaaaataggccagtacaatttaataaagtattttgagaaagagagaaactacattcacataccttttattacagtatattattataattgttctatcttattagttatttttgttaatctcttgctgtgtttaattaataaattaa

SEQ ID NO: 145868 - DNA, 609 bp, Homo sapiens
taacaggtttgaaatgatatcttatattggttttaatttatatttccctgatgatgatgatgttgagaatctattcatatgcctattggccatatctatgtcttctttgtttttagttttgtagcctgaccttttggtgtattatacaaaaaaaaaatattgtgaaggccaatgcctaggagcttttctcctgtttctcttctaggagttttacggtttcagttcttacatttaggtcttttatccattttcagttgaattttgtgtatggtgtaagataagattcctaattcttttgcatctagttttcctagcacccatttattgaagagactatctttttcccattgtggttgtatttactactgtacaatcaacaaaaattagttaactgcayggtagtccacccttatctgcaattttgctttctgcagttgcatttatctgcagacaaatgtggtctgaaaataggccagtacaatttaataaagtattttgagaaagagagaaactacattcacataccttttattacagtatattattataattgttctatcttattagttatttttgttaatctcttgctgtgtttaattaataaattaa

SEQ ID NO: 145869 - DNA, 385 bp, Homo sapiens
acttactgttttcttggaaataattccaagcccatagagaagctgcaatattgyacaaagagctcttgtgtatcctttatccagatttgtaaatttgtaaattgttaacattctgcctcattttctttatcattgtgtgcatctatatgtctgtatatctgcacattttttcttaatgctttactcttacatgcttcacagtgtatttcctaagaacaagaatatgctttcataaccactgtatagttaaaaacttggaaatttataattggcataatctttatgtaatctaccaggtatgcttcacctttgtcagtaatgctctttatagctttccttcctgtagtccaagatacagtccaaaatcacatattgcatttcgttg

SEQ ID NO: 145870 - DNA, 440 bp, Homo sapiens
acttactgttttcttggaaataattccaagcccatagagaagctgcaatattgcacaaagagctcttgtgtatcctttatccagatttgtaaatttgtaaattgttaacattctgcctcattttctttatcattgtgtgcatctatatgtctgtatatctgcacattttttcttaatgctttactcttacatgcttcacagtgtatttcctaagaacaagaatatgctttcataaccactgtatagttaaaaacttggaaatttataattggcataatctttatgtaatctaccaggyatgcttcacctttgtcagtaatgctctttatagctttccttcctgtagtccaagatacagtccaaaatcacatattgcatttcgttgtcatgttctttgatctggaacattatctcagacatactttgtcttttgtgacagt

SEQ ID NO: 145871 - DNA, 327 bp, Homo sapiens
ccttaaattcttatataaaatatttcaatcatgcaatttaattttacatgtaaatgaatggctggttcatgcaatactgtttatttccaattgaaattgagattcataataaatcctaaaagrtatttctttctgttatgaaatagtggtttcagatatttgccatcatatagccaagtaaggtacaaagtccaaacttatgctttgattctggtttctgttactaaactcctattttcattttcatgtcaattgatttaaagaattgagaaatgcatcatccagtttatatattgttagaaacatggagaatatgtatcaagacca

SEQ ID NO: 145872 - DNA, 427 bp, Homo sapiens
ttctgttaggtcagtgtttctgaagttactagagtcatattttttgttgcacccacagtagatccaagatacaaccaaagatattttccactaaaatgctgttgatatttttataaatttgatgaccgtataatccaatgtaaatagtaatagcattacctaactttcctatttttaaaggaatatgttaaatccttacttaaagaatattttaagccccagaacttattataattttgacttagcaaatatgtcattaattagatgaatgggtctgtgctcactattgatmtctatagctttgaataataaatagcaatggcatctgcttatatgcacccagagctttgtgtgacttccaagtattgaattatgtatttcatataaatggattttgtattttatgggttattttcttccaatataa

SEQ ID NO: 145873 - DNA, 475 bp, Homo sapiens
gcagtcaatatagtattttttccatagtaggcgtttattaaatatttctgatttaattaactgcatttgaatagctaattgttagtgatcttttcaataatttgcaatgtgaattagtgtaaggttaaaagttactaggcttgtgtttgaattgttgctcttgctaaatattgctgtaccacttaataactattgctctggcacttattgtgtggctcccaaagccacacaatagaatgaagtatataagaatataagtgaagaaaaagcttcactttcttcatttataaaacctacctcgtagagtgctgtgagaattaaaaataataaatataagatgtaactatatagtragtatttgataaatggtagatattattttcctttagcacacttgatatttttcgtctcgaaaatactgctatagaagatgaatcattttttatgacatcagaactaaacagaattactcatc

SEQ ID NO: 145874 - DNA, 577 bp, Homo sapiens
taattgaatcatggaggcagtttcccccatactgaaccatctgatggttttataaggggaaatccctttcacttggtcctcactctctcttgtctgctgccatgtaagatgtgcctttcgttttctgccatgatcatgaggcsccccccccaccgcccagccacgtggaactctgagtccattaaacctctttttctttataaattacccagtcttgggtatgtctttgtcagcagcatgaaagtggactaatacagctagttaacccttactcatctcttgggatctcaactcaaaagtaactttctcaggagagggatggtctaaaatttatactctcacagaccttttacatttataatgaagcatgttccatacttgggtattatatatagtatttatgaaattatttatctaaggtctgtttgcccactagaataaaagtttcatgagagcaggaagaatgtgtgatttgttccaacacggaacatgatatatactcactaagtgtgtttaattattagattaattaataattttatcatgtcatacctctagttaaacattttccagtggt

SEQ ID NO: 145875 - DNA, 609 bp, Homo sapiens
cttttaaccactgcactgtgcagcctgaattcatccattcaccatattatgttaatacagttccatattaaagagaaaactgtttaaactattttaaaacttaggaaggataaatgcataacttgtgttggaattttttaagcacataaaatagtttcaggcawcccattcaggtcttcatggacccctagctgtcctggacctcacattagaaatcactgacctagacccacctgaacatcatttgccatgtgaatcttctaggtctgcacaaaacacctagttaaaaatatcgtctgatgctctggaataacaagtcaaataaaatcaaaatacggaatgacattcaagcctctttttttgagtgtgtgagatggggtcctgctctgccacccaggctggagtgcagtggcgtgaccacggctcactgcgacctcaacctcccagattcaagagatcctcacacctcagcctcccgagtagctgggactataggcatgtggggcctgtgccaccgtgcctggatgattttttgtagaaaggtctacgttgcccaggctggtctccatcaaggctctaattaaactggtccttcctatcttttcagat

SEQ ID NO: 145876 - DNA, 588 bp, Homo sapiens
tagctctttcttattaaatgctgccccacacaccacagtcaagaggttgcacatgtgttcaaacactctcttcttggtagatagtcagactatttggtgttccttctgcgaaccgccctactgtcatttaagtaacaaactctgttgatacaggagtggcctctaactcatttagtctcctgtggatcaaaataaaatcctggtctcctaaatgggtgcggctgggagatcacttgcttttcagagagtagtttccatttcctrtacatcagatggtcagccctttaagcatgccaatctgcaaaaagaaaatatttctttttactttcatgtttcagagatgggatcttgctatgctgcccagattgatcttgaactcctgggctcacgtaatcctcttacctcagtctcccaaaatgcttggggattacaggcatgagccaccatgcctggctaaaaatgaattattcttatcaactgcttaaaaacatgcttactaagccatatgaacatgggcaagctgcagtttcttcaactataaaatgggaaaataataacccttacagagttgtgtaattcatagtaaaa

SEQ ID NO: 145877 - DNA, 579 bp, Homo sapiens
actacactgaagataccagttaagtatgacttaaagacaagtaaagggaggatccaggtaggtagcagtacaaatacgttttcatcatcaatggcttcatttatccatcctatcactacttatttccatttcagagaaataatatcttctacgaatttggagaggatgttgttctaaagggttgtatgagatttaatacaattaaactatgcaacaycttacatggttcagtgcttataaccctacaaggttatagggtcatttgtgcggaccaattagttaccttgctgtgttctgcggccacagtgttcacaactttctaccaattttcttcctggcaatatcttattcatcttgcaaaatccagtttggacaacacctcttccaaaaagctttccctgaattcttcttttaaagagacagttaaaaattccttcctctcttacctctgtatgttgtgcctatgtctatggtaacacattctattgaaattctgtatttttgctgtcttccttactagaccatgagcaccttgaaggcagggcctgtgggttgcccacttttgagttccagcaccta

SEQ ID NO: 145878 - DNA, 579 bp, Homo sapiens
actacactgaagataccagttaagtatgacttaaagacaagtaaagggaggatccaggtaggtagcagtacaaatacgttttcatcatcaatggcttcatttatccatcctatcactacttatttccatttcagagaaataatatcttctacgaatttggagaggatgttgttctaaagggttgtatgagatttaatacaattaaactatgcaacatcttacatggttcagtgcttataaccctacaaggttatagggtcatttgtgcggaccaattagttaccttgctgtgttctgyggccacagtgttcacaactttctaccaattttcttcctggcaatatcttattcatcttgcaaaatccagtttggacaacacctcttccaaaaagctttccctgaattcttcttttaaagagacagttaaaaattccttcctctcttacctctgtatgttgtgcctatgtctatggtaacacattctattgaaattctgtatttttgctgtcttccttactagaccatgagcaccttgaaggcagggcctgtgggttgcccacttttgagttccagcaccta

SEQ ID NO: 145879 - DNA, 241 bp, Homo sapiens
ggccactgccaagccgttgacaatgtggagaatgagttttgttcaaaatgtttgcagagagtacctattttttcactgaggctgcttagtgtcaaatgcatccttccttcattccttcaacagactgagtacccactatgtgccagcctgggcaaggaacgtttctgctttcaaggagctcaacactgtgaattcaggtgagttgtgagygctgtaatgcagaaaatacaggtgctctaga

SEQ ID NO: 145880 - DNA, 569 bp, Homo sapiens
cttctgccacttaggtctatgtggccttggacaagttacttcatcatcctgggcttcacattttgtatctgtaagctgaaaatctataaaccacagatagtagttgtggggattaaatgaggtctctgcaagtgtctggagtaaggggtagatattattaatgtttgtaaggcaggcctctgwgtttgagatttccacatgccctgtgcaactaagaatgggttgaagattttcagctttcatgtttaaagtgggatgttgtttgcccctctttcatttctgtgaacccctcctttccctagtcatgttcctgtgtttccactctcaagtgatccacagaaccctcaggttccccatccttggggattggtgggaccccagctctccaactctcttctaatcaagcctttgatctattttacatattggcatttagaatggaatttctttagggtaaaagttctacagaaaaaagacaaagagttttgaaacccaccaaccactggccgtggtctaggataaagacactggatcaaaagagggaattagataaaggacttgactttggt

SEQ ID NO: 145881 - DNA, 596 bp, Homo sapiens
actgcttccctgtttggaggctgtgttaagtgaaatgtcttgcatttattatcttttcaagtattcaagtsatagagaatgtgtctgtctgtgaatgaacacttgaaaagaaaacttaacagatgttgcttgagcctattgtcataatagacactggagcaaggtggaggtaattctgccaaaatttatataaccctaatcaggcaatcattccctagttgataatttataaactttttcagttgatatttttgaatataggctttatgtaggaaatctagtattctacaaattcactttcaacaaagtgatgttatatatattttattgagtatatatatgtatttcaatagtttgggggaagaggtgatttttggttacatgaataagttctttagtggtgatttctgatattttgatgtacccatcacccgagcagtgttaactgtacccaatatgtagttttttatttctcaccccactcccactcttccccccaagtccccaaagtccattatgtcattcttatgcctttgcatcttcatagcttaactcccacttataagtgagagaaaacatacaatatttggttttcc

SEQ ID NO: 145882 - DNA, 625 bp, Homo sapiens
cctttttaatatttttcttttctgtgtgttagcagttgtctcgtgttagtttacttctttttaaaatgtatttgtcataaatcatgccacaaccttctcagcagtgcagatcctctctcttaaagcatttaaatccatcaggcattctatcgcttttccccaccccccttttgaagaaggctctcccagagtcacctgacctgcttcagtgttgcctggtacaactctaggcctgctgaacattagtcttgaagaacatcctttcatcatccccctgaagattcactttgcctttgtcttctgtttgataccccataaacttgatcaaatattttcaaatgctctcattttataatgccctttgaatcagttttttttttctttaatgacactctatgccaaaaagaaatacctaatagttctgtgtgctaagtactttggtctcaacaaatactagtggtaattcatgtgatgtccaacaaatgtcactgtatatatcctttgatgactgaaactttctgtagtaccctttctggctttccagggcatgttggtgcaatttaacaaatgtggtcctaratcctaagcctttctttttcatgtttactcctttattttggtggca

SEQ ID NO: 145883 - DNA, 204 bp, Homo sapiens
ttctctgctctaggttttcataggtttttctttcatgttaaattttaactgggatattcctgtaccacatggttacattttaactccaaacccatgtgagattcaggcccaggatatcaaagtttagagaaarcctttgatgtttttgtcattattcctccagccacagctcaggtggagaacaaaaagcttcattattgtcgc

SEQ ID NO: 145884 - DNA, 455 bp, Homo sapiens
aaatattagcaaattgaatgcaacactgtataaaaaagaattatataccatgacaaagtgagattcattctacatatccaagtttggtttaatttgaaaatcaattaatgtaatctatcattaacttaaggagcaggctatagaaaaaaacttctaatcatattaatagatgcagaaaatgcatttgacaaaatctgacatcscttcatgataaaaactcttagtaaactagggatacagaggaacttattcaatttggtaaagaacatctacaaaaaattctaaagctaacaccacagttagtggtgttaaaaaaaaatggttacaatggtgttaaaaaaatcctgtaagataaaatatgaggcaaggatgcccctctcataactgattttaacattgtaatggaagtcctagataatacaataaaacaagaaaaggaaacaaaagtaatacag

SEQ ID NO: 145885 - DNA, 499 bp, Homo sapiens
tttctctcctttttgcaataatgagaaattcttcggtcttactcaggatggaagcacctggtggggctccyctcctctgttcctgccccacccacagcccccatccgagccctcctgcctcgggtttctggctgcccaggtcatcagttatttagaaacactaataaatgtccctgctgagaagacatgaggaagggaggtggccggtcagccccaaggctggactgcagttggaaaaatcaagagcacgcctttccctccctcgcctgccgcagctctgcgtctccctctgaacgttctgctgagctttaaaaatagcaacgctgaggggaaaatgtgttgggaaaggcatctaacatcggggtgtcttgaggcacatctttagctaagacatttcccatggaaccctgcagctataaaagcctcaaaccaaaaagaaatgtttgcctaagaagctgagtgagcaggactatgggggatgggccactggccgggaatc

SEQ ID NO: 145886 - DNA, 549 bp, Homo sapiens
ttcctattttggttttttcttttttttttttttttttttggagacagagtcttgctctgtcacccaggctggagtgtagtagtgtgatctcggttcactgcagccttaacctcccaggctcaagtgatcctcctgcctcagccccttcaaatcttcaaatagctgagactacaggcgtgcaccaccacgcctggcaagtttttgtattttttttgcagagatggtgtctcactatgttgcccaggttggtctcaaactcctgagcccaagtgatccacctaccttggtctcgcaaagtgcctggattataggtgtgagctgccacrcccaggcttgtttttcttaatagtccctgccatcgttaggtagtgggttgattgtcctgcctcactagagtataagttcagcaggacagggacctgtgtctcgttcactgctgtgctccagtgtgtgggacaagcccagccaccaagtcagctctccgttctgtgttgtctgtcttccgtgtgagtgagtatgtgcctgtgtgagtgcacacagacgtgccca

SEQ ID NO: 145887 - DNA, 609 bp, Homo sapiens
tttgggggattttggaaaagcatgattgtgytttgaaaagtgaggacatgagatttgggaggggtcagagtagaatgatatggtttgtctgtgtccccaaccaaaactcatcttgaattttacttcccataacccctacatgtcatgggagggacccaataggaggtaactgaatcatgggggtgactacccccatgctgttctcatgatagtgagttctcatgagatccatggttttataaggggcttttcccctttgcttagcacttctccttcctgccaccatgtgaagaaggatgtatttgcttccccttctgccatgattctaagttttctgaggcctccccagccatgcagaactatgagtcaattaaacctctttcctttataaattacccagtctcaggcagttctttatagcagcatgagaacagcctaatatactcctatactgttagccagtaattgtgctccttggtatttacccaaaggagttgaaaacatttgtacacagaaaaacctacacatcaatgtttattgcatctttattcacaattggcaaaacttggaaacaaacaagatgcccttcaataggtgaaaagataaact

SEQ ID NO: 145888 - DNA, 609 bp, Homo sapiens
tttgggggattttggaaaagcatgattgtgttttgaaaagtgaggacatgagatttgggaggggtcagagtagaatgatatggtttgtctgtgtccccawccaaaactcatcttgaattttacttcccataacccctacatgtcatgggagggacccaataggaggtaactgaatcatgggggtgactacccccatgctgttctcatgatagtgagttctcatgagatccatggttttataaggggcttttcccctttgcttagcacttctccttcctgccaccatgtgaagaaggatgtatttgcttccccttctgccatgattctaagttttctgaggcctccccagccatgcagaactatgagtcaattaaacctctttcctttataaattacccagtctcaggcagttctttatagcagcatgagaacagcctaatatactcctatactgttagccagtaattgtgctccttggtatttacccaaaggagttgaaaacatttgtacacagaaaaacctacacatcaatgtttattgcatctttattcacaattggcaaaacttggaaacaaacaagatgcccttcaataggtgaaaagataaact

SEQ ID NO: 145889 - DNA, 609 bp, Homo sapiens
tttgggggattttggaaaagcatgattgtgttttgaaaagtgaggacatgagatttgggaggggtcagagtagaatgatatggtttgtctgtgtccccaaccaaaactcatcttgaattttacttcccataacccctacatgtcatgggagggacccaataggaggtaactgaatcatgggggtgactacccccatgctgttctcatgatagtgagttctcatgagatccatggttttataaggggcttttcccctttgcttagcacttctccttcctgccaccatgtgaagaaggatgtatttgcttccccttctgccatgattctaagttttctgaggcctccccagccatgcagaactatgagtcaattaaacctctttcctttataaattacccagtctcaggcagttctttatagcagcatgagaacagcctaatatactcctatactgttagccagtaattgtgctccttggtatttacccaaaggagttgaaaacatttgtacacagaaaaacctacacatcaatgtttattgcatctttattcacaattggmaaaacttggaaacaaacaagatgcccttcaataggtgaaaagataaact

SEQ ID NO: 145890 - DNA, 550 bp, Homo sapiens
ccagtatttcacggccacagtgagcagtgatcacaccactgtactccagccagggtaacagggcaagaccctgtctcaacaacaacaacaamaaaaaaagaagaagaagaagaagaagatgtagaaggattacgataggtgaggtgtaggtgaagatggaaggatggaagagtgatggaggggcaatggtgtgagcaagagcagcaaggcaggaaagcacagagaaagtccaggaagctatgtgtaggtgtggtggaagacaatatatcagagacaagaagagggagaaaatacttgtagccaactctgagctcttattataagcctggcaacccacaaagtgctttgtgttcattcatcatgccattgaatcctcacaaaacccaaagggcatatatcattccctttccatttaacaggtgaggaaaccaaggtacagcaggataaagtgactggtctaacatggcccaaataggaagtggctgagccaggatttggacacggtaagtgatttcagagctgttgtacactgtgcagtgtggccagagaa

SEQ ID NO: 145891 - DNA, 550 bp, Homo sapiens
ccagtatttcacggccacagtgagcagtgatcacaccactgtactccagccagggtaacagggcaagaccctgtctcaacaacaacaacaacaaaaaaagaagaagaagaagaagaagatgtagaaggattacgataggtgaggtgtaggtgaagatggaaggatggaagagtgatggaggggcaatggtgygagcaagagcagcaaggcaggaaagcacagagaaagtccaggaagctatgtgtaggtgtggtggaagacaatatatcagagacaagaagagggagaaaatacttgtagccaactctgagctcttattataagcctggcaacccacaaagtgctttgtgttcattcatcatgccattgaatcctcacaaaacccaaagggcatatatcattccctttccatttaacaggtgaggaaaccaaggtacagcaggataaagtgactggtctaacatggcccaaataggaagtggctgagccaggatttggacacggtaagtgatttcagagctgttgtacactgtgcagtgtggccagagaa

SEQ ID NO: 145892 - DNA, 484 bp, Homo sapiens
tgtgaagctgcaacaccagaggctatgccttttctgcacttcttggctggccaattcagtgtgaatatgttctctggttaaactagatcatcaactcagctgcaggccctttctacaggagtgctcagttatgcatcatgtgcacacgtgtgtgtgcatatgtaatcactaatatgtgttttaatctgtagacctatgtgcatcattatcctgaatttcttacctccaaatcactcttttaacacaccagcctgtgtagttttcatccaaaatagtttaactgacaagaaagctattgctccattgcacctcctcacctagctttcctctactctctgggaaacccaccatcaattcttctttttccttactcatctgccaaatcttttctccattccctatgccaagattctccggcrtaaacacctatggctgccaaaccttcctgctcttgtcccaacataagcaaactgaagatgactac

SEQ ID NO: 145893 - DNA, 581 bp, Homo sapiens
tttcagttctttcttggaaaagatgaccagggccacactgaaccatttaggaacaattcagctcagagcagagagcttggtccatctcatatcgaaacacctaaacttagggctggcatgctgcagggaatcccgactatggtttctttctcccttttcattctgactactaggggcaaagaataaagtctagatcttcttttatcacaattcagtctttaatatatcaggctaagtaaattctgttcttttatttaacttgatgatgaaacagtaacttaaacaggtatgtctgatgtgacaggatttttagaaagggaatatttacatatctaattttagtaatttttttctaagctacctttaaattgccattaataggaggtaatgactattacagagtatttttactttcaactccttctacatatatattggtataaatgaaataccaggatttagtcrttcagcacagtacatggaacaggagtacatgaggaaacagagttctagaaatataccagtgcttaaataagtggcttaaattcttatactttgggctccagagcaaatcattttgt

SEQ ID NO: 145894 - DNA, 394 bp, Homo sapiens
taacaagttggacataaatttccatcattttgccttctaaatactgtattaggtaatgattctctttggatggacccagtaagatttttaatcttcaaactagaaaaaaattaatttaacttgctcacaaagtatcactattaacaaatagtattaaaatttataaaattatgtttaaatggagaaaactgttaagtaatattccaaaacaagtacaataaaacactatgggtgatatttggggatactggtttgccaaagagggyaaacattcccttgaggaaaaaactttcttgacagcattcactaatttctaaggcctgttgcccaaatggagtcatttttctctaactagaacttcaaaaactctcagtaggataaatcaaaactaaaa

SEQ ID NO: 145895 - DNA, 467 bp, Homo sapiens
ttttatggagcactttgttccagataatatttctgtaggtgtcaactacaaaggaaacaaacccttatctaagcctctctgcacattacctccttacaatatccattgccactttttgactggccaagcactagcgttatttgaacattttcaatctcatgtggaatgcaaaattcttccttataccctgattccagtttctgataatgtcctgaatgtaagatacaatcatagatttctttttttattttattttatttttaagttccatgtgcaggatgcgcaggtttgttacataggtaaatgtgtgycgtggtgacaaccatagatttcttatctcttctttgtaattccagttacaacagccttaatagaaatgaagacaactgttttcctgtcacattcacattatcttgaaaatccagaaatctacccagtcttctaagcaggtacttgtttactggtga

SEQ ID NO: 145896 - DNA, 545 bp, Homo sapiens
attatattaataaagtcattatgtttttttgttaatcagtagccattacttgtataacatatgtcattttaatgttgggtgagataaactttacttatttttacaatcattgtgttaacatttttgagtacgtacaaatagactatattataaaacacatttgtaaaaatacatatgctttagaaaaacaggcttcaagattattttccttttgctactattaagtacattgaagaaataataattttattaatgtgagtccatatagttttcaaataatggtaacacttcttttggcatatattaaatttagttttactatcagattgttatatattcatggtaaaaacttaggaaacamaaaagagaaaaggaagaaagaaaaaatggaaagaaaagtcattgacaattccattattcattgctaacattttgggctatagccttagtctcctccccatgtatatgcattttgtgctttctttttggtacagatgtgagatgatattgttttctgtttaggtttaaaacttagcatatagcca

SEQ ID NO: 145897 - DNA, 562 bp, Homo sapiens
cttatactttttatctaaatgtacctttgtattcattagccaacatctcttcatgccgctgcctacctacacacccttcccagcctctggtattatactctcttcctccatgagattgagctttttagcttcygcacatatgagtgagaacatgcaatatttgtctttctgtgcctgcattatttcacttaacagaatgacacccagttttattcatgttactgcaaatgacatgatttcattctttttcatggcgaaatagtattccattgtgtatacatactacattttctttacccattaatctattgattgacacttaggttaattagtatctttgctgttgtgaatagtgctgcaataaacatgggagtgcaggtatccctttgatatgctgatttcttttccttcagataaatatccaatagtgggattccaggattatatggtagttctagttttagttctatgagaaatctatgcactattttccatactggctatactaatttacattcccaccaatagtgtataagcattcccttttttatgcatccccacc

SEQ ID NO: 145898 - DNA, 562 bp, Homo sapiens
cttatactttttatctaaatgtacctttgtattcattagccaacatctcttcatgccgctgcctacctacacacccttcccagcctctggtattatactctcttcctccatgagattgagctttttagcttccgcacatatgagtgagaacatgcaatatttgtctttctgtgcctgcattatttcacttaacagaatgacacccagttttattcatgttactgcaaatgamatgatttcattctttttcatggcgaaatagtattccattgtgtatacatactacattttctttacccattaatctattgattgacacttaggttaattagtatctttgctgttgtgaatagtgctgcaataaacatgggagtgcaggtatccctttgatatgctgatttcttttccttcagataaatatccaatagtgggattccaggattatatggtagttctagttttagttctatgagaaatctatgcactattttccatactggctatactaatttacattcccaccaatagtgtataagcattcccttttttatgcatccccacc

SEQ ID NO: 145899 - DNA, 474 bp, Homo sapiens
ggctctttcaaagttcagctccttaccaggcacttgtaaacatgtttaaaygccccgcttaaagtgtgtggtttgcatttggactgttagaatccagagctcttgacttcttccagcggaaatagactacagtcttttcctcaactccccaaccaacggcttttgatagtctcacttaatgctctccgcataaacagttcaccatcacatttattacttattgcatttttccatatattattttagtagaaatgccacaaatagctttgaaatactgcaagtagcaaacttgttttaaatgccagcatggaagttggacttgaggcaaatagcctttctagtagaaatgggcaccctgataactccaggctttcatgaggcacaaagaacaggtcatcttgagggtcattattgtgagacatattcaccaactgaccctttatttttaaaaatttctttgtattataagagtcc

SEQ ID NO: 145900 - DNA, 509 bp, Homo sapiens
agtagatcttaaatgttttgaccacaagggagagaaaggtaatgatgtgacatgatggacatgttaactagcatgattgtggtcatcattttacaaggtatatcaaaaccccacattgcatgccttaaagttayaaccttttttttttttttgagacagggtctggctctgtggcctaggctggagtgcattggctcaatctcagttcactgcaaccttagcctcccgggctcaagtgatctcccacctaaacctccccagtagctgccactacacctggctaatttttgtgtttttgtagagacagggttttgccatgttgcacaggctggtctcgaactcctgggctcaagcaatccacccgcctcagctcccagaatgctgggattacaggcatgagctgccatgtccagcctaaatatataatccttatttgtcaattacacctcaataaagctgagggtggtgaagaacaagcacaggactgagccatgaaaaacaagagccta

SEQ ID NO: 145901 - DNA, 523 bp, Homo sapiens
tttttagtgggctacattgccacagataatttcaactttctgattagaagctggtataaacaattttatttatgagaattaatctcttaaatgtagtaaacactacgaatacagtagtgattttttttttcccatttaacaaagccraactaggaatcctggcctctatccttgaaactcagcgttatgttagcattgcatacaatacataaactctgccaaaatctattacaattgtagtaaattttgattaccggagttgtttgttatttatgtctacaagataaagataatgttgggaatagccctcttctattcaatgtataaattacttccataaaatatcttgttttgtaaacagtaaaaaaagaaaaaaagactaaacttggttgaagcttcaaattgttgcatctactttagttcaagtcaataaacactttagatgatgtggaagtccatggaagggtttagacttttaatggtgccctggtttatctctggcatgataaacaaaatgctgggg

SEQ ID NO: 145902 - DNA, 548 bp, Homo sapiens
cttgtagtgacatcagcaaaggttggtctcaattaaaatttgcgctaaaactatgttctctgtatttttgttgaattctaagattctgtaatgttgggctttggtctttaaaatgaagtctttcccaagataaaacttggctttcagagggaacaccgtttgagataccatgtggaaaaatgaagaagtaccatgtcttgtatccaacggactctactaactgtatttttgtttagtatgtggctatgacgtgacccagtgtgtcatagagcacctgcattatttcatgtagtgattctgagtagcttttattagtagtctcttcaatgtgtctaaggagattcaagatgttatatctacgtaagattttttttctgaatttaggtaaacatttaaatggattttttcttaagatggtattaaaagtctgtgggagagggactgaaaattatcaaggtttgatgctttgtaccactcattcattgattagttagatgcccctcactatgagttatgcawaagctgagttttaatgacaattttcaaaa

SEQ ID NO: 145903 - DNA, 439 bp, Homo sapiens
ttttattttggaccttgatggtattttatccaattcagggaaaacacacctgctttaataactgctaaggggacaaggatggtgtgggaggaaagatttatataactarttttacaagtgtaaattttaataatttcttgtatagcaaaacaaaaaccaaaaagcatatacaataaaactttctttggtatttagatggtatttttcttgtcagagctttggccagaagctagaagaaacaattgagttctgaattgttctcctctgtttaggctaccgtgttactaaaaggcttctgatattgcaacttttttttttttatagttagtaagtgttcctcgcttgtatccttgatggactaatctattccccacctagagagtttgagttattttctcaagagtagttagttgtattttcttcattgtgtatcacaagg

SEQ ID NO: 145904 - DNA, 493 bp, Homo sapiens
tgcccgcaaccatgcccagctaatttttgtatttttagtagagacagggttttaccacattcgccaggctggtcttgaactcctgacctcaagtgatctgcccatctcagcctcccaaagtgctgggattacaggcatgagccactgcgcccggccaaaagacgtgtttaaaaaaaaatttttttcaaaggacttctcaagttttaaactctgatctaatgaaaatgtgactagaagatcacctctgtggtgtatgaatctatctttaaattttataaataattcacactgagtcatgaaatttgttacaattatttttgtgaaggaatggtggattaacgctttctgrcagccaacagatctgcagctgcttatgattagtttttttgatgactgtttaaaaaaaaaaaacctagcctgctatattttatttttagaaacattacttaaaacttaattaaagttataaattatactaagttttctttgaggt

SEQ ID NO: 145905 - DNA, 533 bp, Homo sapiens
ggggaaaactgggtatgggtattctttaaatgcatgtaaatctacaatttaaaagtgtagcaacattttttggtaaattaaaatgatctctaggtcccttctaaaattctctgattaatgccccattcattttctagctgcctttcctttctgttaattttaaaggaacaattagcatttgttttgaagagactcttggtaaaagtatcttacccgggaatttttcgattcttacttggccctmctaattgggtgttctcagtgaaaacgagacactgctaatatgctttagaaaatagccctcacattctccctgttcccaatcccccacttactctaagctccccaggagcaataattcagaagtcaaattgctcagcactcctactacgagtgtggcagaagaatggcctcttaaagatgtccactccctgatccccagaacctgagaataccttaccttatatggcaaaagggactttgcagatgtgattaaggttgctgatcttaaaatggggagattatcctgtatt

SEQ ID NO: 145906 - DNA, 601 bp, Homo sapiens
ttaaaccaagcagcattagttcttttttattttttgaaaagcaagctagaatttaatatttgtgctttttttttttccggtgtaagacaaatactattgccttaaaaaagaaggaattcctcagccgggctcggtggcttatgcctataatcccagcactttgggaggccaaggcgggcagatcacctgaggtcaggagttcaagaccagcctggccaacatggtgaagccccatctctacaaaaatacaaaaattagctgggcatgatggcmggtgcctgtaatcccagctactccgaggctgaggcaggagaatcacttgaacctgggaggtggaggttgcagtgagccaagatcacaccattgcactccagcctgggcaacacagactctgtctcaaaaaaaaaaaaaaaaaacagcatactatttatttcttcttttctttatcccagctttattagtgtgtaactgataaataaaagttgtgtatatttacagggtatgacatgatgttttatgtacacattgtaaaatgattaaatcaaatgaattaacacatccatcacctcacatacttatttgtgtgtgtgtgtggtgagaa

SEQ ID NO: 145907 - DNA, 382 bp, Homo sapiens
cttatgctttttaagttctatttatgagatgcaccacatttattgacttgtaaatattgaactattcttgcatccctggaagaaaaccaacttgaaagtgatgaattatctttttgatttgctattggattcagcttgctagagttttgttgargacttttgcatctctgttcctcagggatatcggcttgtagttttctttctttctttctttctttttttttggtagtatgcttgactgatttttggtatcagggtgatactggtttcatagaatgagttggggaagaatcacttcttgattttttgaaatagtttcagtgggattgttaccagctcttatttatatgtctggtaaaattcagatctggtcttggcttgt

SEQ ID NO: 145908 - DNA, 583 bp, Homo sapiens
caatttctaaataattataaacaatacagaggaagaaagctgattcttaaatgcagcaaataaagtcaggaataagtttgctttgtccaacaaatactcacctaacaaccatcacacatttagcatttgattatgcatgtgttagagaggcatgccattccataatacaacattataactaaaagccatctgcttctgcttatgttttagcaagtttttataatatgaaaactgctattttccaccagartagacagctggtttgtcttaatgtagctggtccttaaatttgacatgccagtcaagccacgaggggagaacaaaatatataatatgatataccagcaatgtcattacaagagaatgaaatgtagaagccagtgtgtgtgtgtgtgtgtgtgtgtgtgtgtgtgtctgtgtgtctgtgtgtctgtgtggtggggggtgtaatagaaagataaaaattagaagggaagaaaattttatttacaaacaagcattacataagtttcagatgattcacatttaaaagatatactaatattgatttttttcaaaacactctacttaaaacaaaaacagc

SEQ ID NO: 145909 - DNA, 583 bp, Homo sapiens
caatttctaaataattataaacaatacagaggaagaaagctgattcttaaatgcagcaaataaagtcaggaataagtttgctttgtccaacaaatactcacctaacaaccatcacacatttagcatttgattatgcatgtgttagagaggcatgccattccataatacaacattataactaaaagccatctgcttctgcttatgttttagcaagtttttataatatgaaaactgctattttccaccagaatagacagctggtttgtcttaatgtagctggtccttaaatttgacatgccagtcaagccacgaggggaraacaaaatatataatatgatataccagcaatgtcattacaagagaatgaaatgtagaagccagtgtgtgtgtgtgtgtgtgtgtgtgtgtgtgtgtctgtgtgtctgtgtgtctgtgtggtggggggtgtaatagaaagataaaaattagaagggaagaaaattttatttacaaacaagcattacataagtttcagatgattcacatttaaaagatatactaatattgatttttttcaaaacactctacttaaaacaaaaacagc

SEQ ID NO: 145910 - DNA, 242 bp, Homo sapiens
cagagatgtatgtttttaaacataccccaagactgcagtagttgccccttctaggtgtttagtagcattcttagtacttatatctaaatttatcaagatggagtgtttttgcctgtttaattgtctgtctcttccattccactgttaatttcttaatagttgygactatttcacaggggtatcttcagagcctgatacaaagtctgtgtttaaaaatagccagtttctttgtgttggaacat

SEQ ID NO: 145911 - DNA, 508 bp, Homo sapiens
caggctcattataaatgctgcctaaaggcacttggtaaacctacacaattctatggaaaaataaaaaagtgttatcatggtgtctaccaaaacaaaagaaaataaaaatgctctgtattcgttatttagtttgctttttgaacagagctgattctttccagccatgtagaaatgcatgaacttcctcagctaatcctaccatatggtacagtaaggtaggtaacattttatagggcaggcttgctgttcgtgctgcaaatgtatagaaagaaagaatgaatagaaaccatgcaaaaatgagctcatactatgagcattttttattatattgagacagtcagcttattagattatgtattataagaaacatttatttgtcttttaagtactttgaytataagaaacatggaggtgatatgtgcatgctgcctttcagagtggccaggtcacctgtgtggtggagatttgtcccccggctccctgtcccagtcctgaattggtgaaagga

SEQ ID NO: 145912 - DNA, 467 bp, Homo sapiens
aaacacaaaacaatagataatcaaaatatgtgagacaaatattgatataactgaaagaagaagtagataaatccactattatgtttsgagatgttggcataccttatcagtaatgtatagctcaagcagccagaaaagcagtaaaggtatattttatttgaacagcactatcagtcagtttgatctagttaacatttatggaatgtcacatccaacaactgaagaatgcaccttcatgtcaagcttgcatgaaacatttatcaagatagtccacaatctgcatcataaacacaccttaaaaattttaaaggaattaaattaacaccaatcttcctcaaatttttctaaaaaattgcagaggagaaaatacagtcaaactcattttatgaggccagcgctatcctgatacaaagccagacaaagaactatagggaaaaacaaaacaaaaacaaaaacgaaaacaaaaa

SEQ ID NO: 145913 - DNA, 377 bp, Homo sapiens
agcatcccatcagcatcctctaaacttcayagtgggacattgatcagtgctgtatgtagaataaaatcgccccctctagtagctgacacaccatgggtggaggaggtgtctatcctgtgcaatatactatacaaagcagttcaggctaagtgacactaggtgggataagtagtgagagcttcaggaaacccaagggtcctttgcaggccacagcagagcagaatgctcccctggtacatgtgcctgaatggttactataccaagaatagtgtctggcccatacaaggaaatatttgtgaatgaattaattaacgtggaattaagtttcaaactttatgaataaaagttattcataaaacccttaaaaattttttcaa

SEQ ID NO: 145914 - DNA, 491 bp, Homo sapiens
gttgttttgttccccctcctagtaagattgcagcgttcttgacaagttcaataaaattggttatttctccctgtttccaagttctgtttagacaatggccaaggaaagccacgaacttactataatccttcacttttcaaatgagactctctgacaaaaattgtcctgctgtgtccctgaagtaataatatttttttaagtttcagaatacatatattggagaaaagacatctgccagaagaactgctttatttcctgctcaaracaatattaagtagtgatcagattattatctgggccctctaataatgaattatgtgctaaattgctgcactgtcccaaagatctaagaagaaattagagaccttgacctgtcccccactcctcatatcctaggatgggtggaaaaaaaagaagttgcaaacagacaagcaccatgaatatgatcatgacatcttttccctgttatgatgaactgcctttctgtgata

SEQ ID NO: 145915 - DNA, 500 bp, Homo sapiens
gtaatttataaaggaaagaggttcatttaggctcacagctctgcaggctgtatgaaaagcatggtaccaacatccgcaggtaccaggaagctcctaatcaaggcagaaggcaaaagcagggagctagtgtacctcatagtgaaagaggaattaagagagagggagcaagagrggaagatagcgggagggggttacactcttttaaacaactagatgtcacgtgaactcatagaatgagaactcacttattaccacgaggacaccaaggcattcatggggaatccacactcccatgacccaaacaccttgcactaggtccacctccaacattggaaatcacatttcaacatgagatttagaggggacaaaacatccaaaccatatcacttgaacaggggaaacaaaggctgagggtcaggtgagatgatattcaaggctgtaccaggcctgggtttcgaggacctacaagaggtgatgccgagcatctgtagtggtgtggc

SEQ ID NO: 145916 - DNA, 536 bp, Homo sapiens
tcctattttttcattttagcaaaatayttgagtttcaaaatatatttttagaaatggcaggtatgaggacaaacattttctccatgtaaataatatacaatgcagggttgatggtcaccttctcatcctgtaactgcttagggagacgataactcagataccatcttaagttagtacaagtttggtaaaatgtggtaaaaatgtttcaaaggattctacccacatttcttttgcttctgatccctgtactgtctaatatctcttggacaattcatctcctgtttatttatttctgactctgaaactgactaaaagggtgtcactaagccacttagtcagtgatttaacctgaagacgggaatagtatttaatgaatggaaaccttcagtggctctgcctgcagagggaggaccatcaacatggaatcctaggacaagaaggaaagaagatgggggtgggagtggaagtgtggatataactataagaatgtctcatatatttatatatatatatgtacatttatatatatatacaca

SEQ ID NO: 145917 - DNA, 404 bp, Homo sapiens
tgacctacatgtttctggaaaacctagctctactctatcttatatttaaataataaaaaagcagttattttgataaagaggaacaaacagaaaatgccaagaaaaagaagtaaaatatattttgaacctatagacatttttgaaatgatagcttttcttttgtttttttcagatagtgtctatgtctttgaactacctaggttttaaaaacaatagctgggccttgaatttaattaaaaatcttcacccatctgaaggatactctccatattttgacatatatttctttttagattagtcatgtgatttgagatcatttagattttggygttttggccaagtcagtcacaaaattgatttgagaacaatgattttttgggggcattatttttctgtgaggttaa

SEQ ID NO: 145918 - DNA, 620 bp, Homo sapiens
tactctgcacttggcatgtggctagtgcaaccaaaggatagagcttcttatgttatttagtgtcagttaatttaaatttaaataatcacatgacttatggtggccaagggctaccatatcagactgtgtaaatagagcactatggcagtgaaggacatacattttctttctctgacctaagggcatgagcttttaactaaaagaacaagtaagtgctatctggagattgttgtagacagaatatgttctatgtctccatttgggacaaagcaagaagaactaagaatatagtggtgattttcctaacatgaaagtatagtcagtgttagaatggtatacaaaaagaaattctctgtttcttgaaacctttaaaatctggatatrttctttcttacccttctaatgcagaaagactttattaactggtttagctccagcatggaaatgcctgacactgaaactccaaagaaggattaggtttatgagctgtccactattttacacaaagtagactgtgatgcttttgtttattcatgtatttgtttttctctaaattcaggtatcgaagacaagacacactagagaaactgttctcaggcgtgccaagaggagatgggcac

SEQ ID NO: 145919 - DNA, 546 bp, Homo sapiens
aagcttaggtaagcactgtcacacccsctacctgctccccataaactaatgctctcccattgccagggtactgaggtttacttaatgactgaacttcatttacctcctatgatatctccatactataaagaggttcacagatctttttgtgccaactaagtaactgttcttggccgggcacggtggctcagtcctgtaatcccagcactttgggaggccgacatgggcagatcacctgaggtcaagagcttgagaccagcctggccaacatggtgaaaccccatctctactaaaaatacaaaaaattagctgggtatcatggtgcgtgcctgtgatcccagctactcaggaggctaaggtgggaggatcacttgaaccccggagccagagattgcagtgagccgagattacgccactgcacttcagcctgggtggcaaagtgagatgctgtctcaaaaaaaaaaaaaaaaaaactgttcttcaaagtggtactgttgtgggggaaaaaaaaatagtaaaaccataataccaggaacaatctaatgg

SEQ ID NO: 145920 - DNA, 591 bp, Homo sapiens
ctggttgtgtttgaggaagtgagaggaggctgatggaagcagaatgtactgaacaaagtggggggaaagaaagataggaaataagatagttagaaggcaaaccatgcagaagcctggaaagaaattttgattatcctaagtgcagtgggaaccagtaaagggttttaagcaagggagttagtgatgtaatccaaccacttgaaattttccagacctygatggtagatgtagccccaccagggcctgaaggtaggaggcgaaaagaaaagattcttttgctctaaaaaatgtcaatggcatgcaaatgcctatccaactaagtataaagacttcagggtcttataaatattctccaagctatccttacagccttatctctcactacttcccaaaactccagtcaaaatgatgttccccaagcatacactgtgttttcctgtctcagagcctatgctgtttcctctggaggactctggaggactgcccctactatctccatctgtcaaaattgagctgtttttgtcaagacccttctcaagtgccacctcctaggtgatacctttcctaatttttcccttttttgaatgccca

SEQ ID NO: 145921 - DNA, 643 bp, Homo sapiens
ttctttgtgatgtgtacattcatctcccagagttgaacttttcttttgatggaaaagttttgaaacagtctttttgtagaacctgcaagtggacatttggagcactttgaggcctatggtggaaaaggaaatatcttcaagtaaaaaatagacagaagtatactgagaaacttctttgtgatgtgtgcgttcatctcacagttttgaaatttacttttgattgagcagtttgaaaacactctttatgtagaatctgtaagtggacatttggagcacatcacagcctatggtagaaaatgaaatatctttacataaaatcaagacagaagcaatctgagagacgtaattgtgatgtgtgcattcatctcacagagttaaacctttcttttgatggaacarttttgaaactctctttttgtagaatcttcaagtggacatttggagtgcttagaggcctatggtggaaaaggtaatatcttcacataaaaactagacagaagaattctgagaaactcctttgtgatgtgtgcgttcatgtcacagtgttgcacatttcttttgattaagcattttggaaacactctttttgtagaatctgccagtggacatttggagcgctttgtggcctatggtagaaaaggaa

SEQ ID NO: 145922 - DNA, 643 bp, Homo sapiens
ttctttgtgatgtgtacattcatctcccagagttgaacttttcttttgatggaaaagttttgaaacagtctttttgtagaacctgcaagtggacatttggagcactttgaggcctatggtggaaaaggaaatatcttcaagtaaaaaatagacagaagtatactgagaaacttctttgtgatgtgtgcgttcatctcacagttttgaaatttacttttgattgagcagtttgaaaacactctttatgtagaatctgtaagtggacatttggagcacatcacagcctatggtagaaaatgaaatatctttacataaaatcaagacagaagcaatctgagagacgtaattgtgatgtgtgcattcatctcacagagttaaacctttcttttgatggaacaattttgaaactctctttttgtagaatcttcaagtggacatttggagtgcttagaggcctatggtggaaaaggtaatatcttcacataaamactagacagaagaattctgagaaactcctttgtgatgtgtgcgttcatgtcacagtgttgcacatttcttttgattaagcattttggaaacactctttttgtagaatctgccagtggacatttggagcgctttgtggcctatggtagaaaaggaa

SEQ ID NO: 145923 - DNA, 544 bp, Homo sapiens
ggatcattgtgtggcagctacagtggcaatgatggaggcagaatggaggtctcagtaccaagacaaggagagacttggcctcacaatggcagcattgcaggggtgcgctctacagagcatttgctcacatggttttgggcattgtctctaactacmttgcttccccaataggttgacccattctaactaactccatttctctttaaaaaagcaaacttcatttgtatgacttgcaattgtaaacgacaccaattggccagttatcattcaaattctctgttacttaatcctgccttttcctgacgtatgcaactttcgcctaaaaaattggacactttgttgcttactcattgtctttacacattttaaaatgttgctttgtgccctcaatccctaactacattttcaatgttttgcaagtggggtccatgtgttcttgatttacatgaagctcaaaataatggttatagtaactagtacttcataattaagcaaaaagctcttattgaaaaatgacagaactatacatagggatgagaacatg

SEQ ID NO: 145924 - DNA, 544 bp, Homo sapiens
ggatcattgtgtggcagctacagtggcaatgatggaggcagaatggaggtctcagtaccaagacaaggagagacttggcctcacaatggcagcattgcaggggtgcgctctacagagcatttgctcacatggttttgggcattgtctctaactaccttgcttccccaataggttgacccattctaactaactccwtttctctttaaaaaagcaaacttcatttgtatgacttgcaattgtaaacgacaccaattggccagttatcattcaaattctctgttacttaatcctgccttttcctgacgtatgcaactttcgcctaaaaaattggacactttgttgcttactcattgtctttacacattttaaaatgttgctttgtgccctcaatccctaactacattttcaatgttttgcaagtggggtccatgtgttcttgatttacatgaagctcaaaataatggttatagtaactagtacttcataattaagcaaaaagctcttattgaaaaatgacagaactatacatagggatgagaacatg

SEQ ID NO: 145925 - DNA, 544 bp, Homo sapiens
ggatcattgtgtggcagctacagtggcaatgatggaggcagaatggaggtctcagtaccaagacaaggagagacttggcctcacaatggcagcattgcaggggtgcgctctacagagcatttgctcacatggttttgggcattgtctctaactaccttgcttccccaataggttgacccattctaactaactccatttctctttaaaaaagcaaacttcatttgtatgacttgcaattgtaaacgacaccaattggccagttatcattcaaattctctgttacttaatcctgccttttcctgacgtatgcaactttcgcctaaaaaattggacactttgttgcttactcattgtctttacacattttaaaatgttgctttgtgccctcaatccctaactacattttcaatgttttgcaagtggrgtccatgtgttcttgatttacatgaagctcaaaataatggttatagtaactagtacttcataattaagcaaaaagctcttattgaaaaatgacagaactatacatagggatgagaacatg

SEQ ID NO: 145926 - DNA, 452 bp, Homo sapiens
tttattttgtgctagacaaatgaagtcatagaacagaatgtgctttaaatattatgaatagtgcttacatgtgtgtgtgtctatagatgcatattaggccgctgaaaagttttattaktctttccaggagagagactgccaacttttgaacctaactagaacaagtaaattgcttcttcatatttttattaaggcaaagagagtctagttaaaaataattcaaattgtcgtggaaatgctataaattgctgtgaagtgagttgctggctatggcttgtcagagcaaatatattgtacaaatcttaggggagagttagtgcttgtgcattaaaatcaaatcatcttgcagcacaccgagaaaaaggttagatttgtaaaataatttcaaagtcatgaaaagagcaaatatgctccacaaagagcctagcaaccctcaatgacaaatgcccctt

SEQ ID NO: 145927 - DNA, 452 bp, Homo sapiens
tttattttgtgctagacaaatgaagtcatagaacagaatgtgctttaaatattatgaatagtgcttacatgtgtgtgtgtctatagatgcatattaggccgctgaaaagttttattattctttccaggagagagactgccaacttttgaacctaactagaacaagtaaattgcttcttcatatttttattaaggcaaagagagtctagttaaaaataattcaaattrtcgtggaaatgctataaattgctgtgaagtgagttgctggctatggcttgtcagagcaaatatattgtacaaatcttaggggagagttagtgcttgtgcattaaaatcaaatcatcttgcagcacaccgagaaaaaggttagatttgtaaaataatttcaaagtcatgaaaagagcaaatatgctccacaaagagcctagcaaccctcaatgacaaatgcccctt

SEQ ID NO: 145928 - DNA, 452 bp, Homo sapiens
tttattttgtgctagacaaatgaagtcatagaacagaatgtgctttaaatattatgaatagtgcttacatgtgtgtgtgtctatagatgcatattaggccgctgaaaagttttattattctttccaggagagagactgccaacttttgaacctaactagaacaagtaaattgcttcttcatatttttattaaggcaaagagagtctagttaaaaataattcaaattgtcgtggaaatgctataaattgctgtgaagtgagttgctggctatggcttgtcagagcaaatatattgtacaaatcttaggggagagttagtgcttgtgcattaaaatcaaatcatcttgcagcacaccgagaaaaaggttagatttktaaaataatttcaaagtcatgaaaagagcaaatatgctccacaaagagcctagcaaccctcaatgacaaatgcccctt

SEQ ID NO: 145929 - DNA, 452 bp, Homo sapiens
tttattttgtgctagacaaatgaagtcatagaacagaatgtgctttaaatattatgaatagtgcttacatgtgtgtgtgtctatagatgcatattaggccgctgaaaagttttattattctttccaggagagagactgccaacttttgaacctaactagaacaagtaaattgcttcttcatatttttattaaggcaaagagagtctagttaaaaataattcaaattgtcgtggaaatgctataaattgctgtgaagtgagttgctggctatggcttgtcagagcaaatatattgtacaaatcttaggggagagttagtgcttgtgcattaaaatcaaatcatcttgcagcacaccgagaaaaaggttagatttgtaarataatttcaaagtcatgaaaagagcaaatatgctccacaaagagcctagcaaccctcaatgacaaatgcccctt

SEQ ID NO: 145930 - DNA, 414 bp, Homo sapiens
aaagcatcctttaccattaagttgcatgcttgctgttggcttttcgcaggtgccatgtatctggtgtagaaagttctctattcctggttcattgagtttttatttttatttttaatcattaaagcatttggattttggtaaatgtcttttctgaatctatcgagatgatcatgcaattctcgtktcttattctatggataagatgtattaccttaatggattttgggctgttaaaccaacctgagattactagtataaatttcactttgtcatagtgtataattcttttatatgttgctagatctgattttttagtattttttaaggaattttgcatttatacttatagttattttatttttctacactatttggactaatttttgtatcaaggtaacactggccccacagaat

SEQ ID NO: 145931 - DNA, 496 bp, Homo sapiens
agaattctgagaaatttctctgtgatgtgtgcgtttatcgcccagatttgaaactttctttttattgagcagttttgaaaccctctttttgtagaatctggaagtggtcatttggagcgctttgcaacctatggtagtaaaggaaatatcttcacataaaacctagacagaagcaatctgagaaacttctttgtgatgtgtgcattcatctcacagatttaaacctttcttttgattgagcaggtttgaaactctctttttgtagaatctgcaagtggacatttggagcgctttgcatcctaagtttgaaaagttaatattgtcacataaaatctagacagaagccatctgagtaactactttgtgatgtgtgcattcatctcacagagttaaacctttcttttcattgagcagttttgaaactctctttttgtaggacctgcaggtggacatttggagcrctttgaggcctccgacggaaaaggaaatatcttca

SEQ ID NO: 145932 - DNA, 490 bp, Homo sapiens
aagatatttccttttctaccataggactcaaggtgctcgaaatgtccattgcagattctacaaaaagagtatttcaaaactggtcctcaaaagaaaggttcaactcaaggagatgaattaacacatcacaaagaagtttctcagaatgcttccatcgagtttttatgtgaagatatttccttttccaccataggcctcaaggcgctccaaaatatccacttgcagattctamaaaaagagagtttcaaaacagtgcaatcaaaagaaagggtcaactctgtgagatgaatgcacacatcgcaaagaaggttctcagattgcttctgtcttgattttatgtgactatatttccttttcaaccataggactcaaagcgctccaagtatccacttgcacattctacaaaaatagtgctttacactgctcaatcaaaaaaaaactttcaaccctgagatgaacgcacacatcacaaagaagtttctcagaattc

SEQ ID NO: 145933 - DNA, 378 bp, Homo sapiens
tcagttataaaggcaacaattatattgagaggaaaggagatgtgggtgctgtaaggaagctatatctttatccatgataacagaaagtcaataagtaacgtttaattcataattaaaaaacagaatcaggtaaaaatcattgccacagatgaacaagaatcgaggttggatggggagtaaagagaaggcatggcatccttgtgcttttcattatatgcccttctagtttgtatatcttttctaaagatatatgtgtacattattttgacttaaagcttaaaagttttaaaaagacagaaataaattaaaagtttctataatygtaatggaaatctgtcatccttcaattcttttgattattgcttttgcaaagtgcag

SEQ ID NO: 145934 - DNA, 509 bp, Homo sapiens
ttaccatgctgctaataaatacatacctgagactgggtaatttacataggaaagaggtttaattcacagctcagcatggctggggggtcctcaggaaacttacagtcatgacaggaaggggaagcaagcatgtccttcttcacatggcacagcaaggagaagtgcagagtgaagcagtatggaaaagcccattataaaaccatcagatcttttaagaactcactcactatcttgagaacagcatgagggtaactgcctccatgattcaattacctccaccaggtccctcccaggacacatggggattatgggaactacaattcaagatgagatttgggtggggacagagccaaacaatatcagtgtgtcttactatacaggttcaaagcaaatcctgagtgcattttaaaacattactaggtagtgatcattgcayaactttgtaaatctactaaaaatcacagaactgaaaatcctttaaaacagtggaagtttatggtgtgtgaatt

SEQ ID NO: 145935 - DNA, 535 bp, Homo sapiens
atgtgcccatgggacaattagtaggccataaagacaaatccgaaagaagaaaataaatggcctatggacataagtaaaaagttattgtcactaatgacgcaatatatgtaaagtcaaagagtaatgaatttccatttccacttagtagattggcgaatatatgtaggttataatacttacgtttaatggattgggaaaaatgatattctctacaatgtacygcagaagtaccttgtttcagccttcccggaagggagtttagcaataagataacatattttaggaaaacagacatgcatgcgcaagcacacacacctagaaaagaatcttgaaatattttgccaaatgctaatagtagttatttctatatggaaacattatggcttattttaactattatttcttttttcttcctacaatgaccatattgcatatataatgacaaattaaaagttaaaaaatgactttgaatcacaaattctttactttttaaagatactccatggctagaatttgttgttgcattcctgctatc

SEQ ID NO: 145936 - DNA, 575 bp, Homo sapiens
tagttatttctatatggaaacattatggcttattttaactattatttcttttttcttcctacaatgaccatattgcatatataatgacaaattaaaagttaaaaaatgactttgaatcacaaattctttactttttaaagatactccatggctagaatttgttgttgcattcctgctatcccatgtcccacttttaaaacaaaaaataaaaagaggaaaaggaaatgaagtaccattggaaggtaaaccaagcagtgttgtgcaagagagataataatggctactaattgttgattgtcggctatgtatgcttagataacaattgctgaagggcaagtcctaagattaccacaaactgtaggatttctatgtgaaagtagaaagtartatattgattgatttaatatctctccataatgactgccctatatgcatgtcctttgccctctaatttgtaactctatttttattctggactcagcaagtgacttgttttggtcaatggaagatgtctttgtcagcaatagttgccataacaaaataccatagactgggggcttaaataacaggcattt

SEQ ID NO: 145937 - DNA, 311 bp, Homo sapiens
aagcaacacacgtattcagtccataacagagaggttgcaaaaaggtgaggcttggaaagcacatgcatatttctactcactttcttgtacaactgatctttctcacacacatctgtcaaagaatcaggaaattctgggytaggctgctggaggattgtgagatacatgtaaaaaagattgagccacaggacttccaggcctggccatcccaggtcagctagactccagccaaagccttgctgacaacagtgcattacagtccaggtaagatcaactgagccacattcagacagcagaaccacctagctacc

SEQ ID NO: 145938 - DNA, 424 bp, Homo sapiens
gatctactaattttattaccaagtttagcttactaagtacagaagcaaattttactcagaaaatgtaaaatttgctaatttaatttactttaaaacatgagattttacttcaaatattataagctacctccatttatggaatactggatttcttagttttttctagtttcacagttagattaaaaacttgaaaataagaaaaatctaataacatttttataagacaaagaaaatgactttttttttggaggggaaggcaaaaggctttttggagagatttttggattttgtttttcttcttacgtaggtttaacacatactattgttaaactgattttttttttwaaagtgtctctttggaaatgtaaatgtttaaaatgtgttttcccatgtgctgtaagagttataaacacagaaggcaggc

SEQ ID NO: 145939 - DNA, 536 bp, Homo sapiens
cgcccggctaattttttttgtatttagtagagatggggtttcaccattttagtcaggctggtcatgaactcttgacctcagatgatccacctgcctcagcctcccaaagtgatggaattacaggcrtgcaccaccgtgcctggcctaatctatttcttaagaaataaatgaacagatggtcttacagccaatgagagtggatggaccagtgactctctaaacgcattaatctcatcagaaataccaagtggcccaacgcttgatgatggcaggacactgccaaggaacctctgtgcaaaaatatggccaggagtaagcatgcatatttataaggctcatattacataaaccataagaccaagggcccaggggccctgcaggcaagccaagtagattacaacctattctctttgccaagaccaatctcctgtgggctgtgggacatggcctaggtggactgaggacgccactgtcccaaggtgaatctggagatactgagttgaaccagggcacacctgaacaagacatggtagagt

SEQ ID NO: 145940 - DNA, 435 bp, Homo sapiens
taaattagttgacaggccatgtgtgccaacttgcatccaggaatgggatgagcagcatcagaacttcaccaccagagtcrctgggtaattaagtagatagcactgggcctgatcccatcgctaccctgcagttcagaatgcccctcttataacaggggcagcatggtagtacttcatcagctgtactctaacccagcaacgatagagtggaaaatcatactttccttaatgttttgttaattttgggagccctccacaccactgactgctgcattttagaataatatatagaagacatggaaatcatgaatatgaattactctctagaatcggtgcagcaatagattttggtgtattagaaagaatcctttaccacagtagcctcaatgccaaacgttttcaactcagcccagagctgaaggcattaatgaattc

SEQ ID NO: 145941 - DNA, 553 bp, Homo sapiens
catccatccatccatccacccacccacccacccatgcatttacctatctgtctcttcacctttccatctctgctgaatcattcctatcagcacataaacatgcactctcactataaaacaacaggaaaaaaaaaaaatcccttagaggctatagcccatttctctgctcttcatggcaaaagttttcaagagtgttcaaccgatgctgtttccctttcttatctccagttcattcactctttcatgctctgcaaattggcttcggcttccaccatcctcagcttgccatggccacaggttgcttttgrgttgctaaatcacttctaacctcactttactcagcttctgagcagtcaccactcaccctgaaaaccaccctcccacttctcttttttctgtgactctttgggtttgtttcagatcacattctcactctcctttgtagcctcttccttttctatctgaactcaaaatgttgggacttttcaaggcttagccagcatcctctccctaagtccactaactgccatggattttaaaaccttaaggctga

SEQ ID NO: 145942 - DNA, 576 bp, Homo sapiens
caatactcaggtagtacactatgggccttggatgagacttttagatgtgctgggtttaggtggtggctacagttagagactccttctgcttgagaaaagcagagaaaaatgtaaagggaacttcgtcttgcagcttaggtaccattttggttacagtggagtagaacaccaagtgggatcttctattcaaggccctggcaattggatggcatttctggacctgccctggaccagaaggaagcccactgtcctgatgggtgagtcctaggcctactagcatccaccacaggctgactgaagagatcttgggtattaagtgtatattggaagtagcctagctaaactccctgtgggyctgtggtggtggtggccacagagtatggttcctctgcctgtggaaagggagaggaacagtgaaaaggacgtgtcttgtgacttgaggaccagatcagccagagtagaatagaattccaggtagccttctaaggtttttgactctagtccctaacttcagaatggcatctgtagacccacccagggcctagggaactcatcaatctcaaggaaaggatagct

SEQ ID NO: 145943 - DNA, 468 bp, Homo sapiens
gaattcaacagcacattaaataagataattcacaatgatcaagtgggttttgtccctgggatggaaggatgcttcaatatacacaagtcaataaatgtgattcatcgcataagcagaattaaaaacaaaaaccatacgatcatcttaatagacacaagaaaagcattcaatraaatccagcgtcctttatgataacagccctcaaaaaaccataaatagaagtaacacacctcaaaataataaatgtcatatatgacacatccacagccaacatcatattgcatggaggaaaagttgatagcattgcccttaagatctgaacaagacaaggatgaccacttttaccacttctagtcaatgtagtactggaagtcctagccagagcaattagacagcagaaagaaataaagggcaatgaaattggaaaagagaagtctatccctgtttgctaatgatatgactgtatac

SEQ ID NO: 145944 - DNA, 527 bp, Homo sapiens
ttcctcagagcaatatatgctaattctttccattttctcataccttaatcacttttgaaaccacatctggagcattatacaagtctagggtctttatccacagagaatacaataaaagagatactcatgattctttctcaagcaattgaaatttaccttcggttcccgaccactccatagaacctgctttcaccacratgacaatttgtctctattgcacagtgcatgacacattcagtctttccatgctctgtcagtcaacagtgttagatgctgtagactctgccctcctgtccggatttccctgacatcaacatcacctgactttaatcttccctctcatgtagctttttctttgtctcttctcaagattacatttttgagcccattctgttcacactgatggtccctgggatctgtactcatctctctcctttctcacattaaaaactttcatgaacttttacacattcccatgtcatcagttaaggtgtattcttccagctgtattttttacccccgattac

SEQ ID NO: 145945 - DNA, 604 bp, Homo sapiens
tatcttttcacttttctttgacctcaccaatatttcctgatctggtatttgaacataatttacttttaaattgaagttcttaaaaactgtttatttcacaacttggcttttggcacacacaaggttcagcttaaatgactcattcattcacatagctcctgctgtgccttacagtgtatttatattttatgttggtgcatttatcctttctttgtctacttcctgctgaggatttagggagattagtttgcaaaatgagtgcagataagwtattaccttcctataacagatatttcaaaacatttaagtaacaaatcactcttctgccttctgttttctatcctaacaatataattttctaaatttccctaaatacgggtgtgtatagtggtgtgtatagtgcttgtatttcctgtttttttctgactagttttcacttttagctgagttcccagagtacttattgtaatttgggcattaaatagtagcagaattgagctatcacaaaataggtgtgatatatagtagtttagtagatccataatcaaagctcttgtcccttctcctgcaatttcaccttaatgcttcagttttgaatatagtg

SEQ ID NO: 145946 - DNA, 559 bp, Homo sapiens
aggtaagaagagtcacggtgggaagtaaagtatcatttcctgaggcctactgtgaggtaggtayaatgctaagaattgtaggtgcatggctttctcttatcttcacaataactctagaatgtagggattattattctcactgtgtagtttgttgaatgaagggatgagtgaattaatgggaaattaaagcttataatgtttaagtctctttcccaagtttacatacccaagtgacagaaccaggatccaaactaaagacttgaactatctagtgtttttgtttttgttttttccatatgtattttgtattagttagtgcctaaccaggaatagagaaatctcatacatctttaaaacagatggtatttaatacagagagttggatacaggccagagtaaaggtgggtggtcaaagagggtcattgaggaatcacagagacacatctgtcatttttagaatagaagattaaggtgaggaggcagtgttactggagcccaggtcactggggtcacctggtgaaatctggaattatggtagaactgattagcaagagctgga

SEQ ID NO: 145947 - DNA, 455 bp, Homo sapiens
gttggatacaggccagagtaaaggtgggtggtcaaagagggtcattgaggaatcacagagacacatctgtcatttttagaatagaagattaaggtgaggaggcagtgttactggagcccaggtcactggggtcacctggtgaaatctggaattatggtagaactgattagcaagagctggagctaggagagcatccagcaactaaaaagatcacgagcaaaaaagtagaggaggtacaccctggctgcttctgtcctcctgcaacctctccaatcttctgctgtttccttccattggctaaacccagtcaaagctccttgatatggaaaccaagaaaagcmcagccgcaaggggtcagttgtgctgtgatatagagcaaggaagaagcatgaaaaatgaacttcagaacaaatcaccaaggataaggacccctgcttcctctgcactgccttcca

SEQ ID NO: 145948 - DNA, 479 bp, Homo sapiens
ccccttatgttgtcacctctgtgaactggttctctaatgatrggtgtatttaaaatgattctgccaatgatacccaagggcctggcccttgagcagatttagccagctgccgggagcaagcaagttttgagaacacacaatcctccttttccccgtgggaacagcctgccattctgtctgaaccctgtctacccaaatgctctgatctttgccactgtctcaagagcattctctggacaccattgtattttcttgggacttgaacatacctgagtgctggacttttcttcttttaaaatgttaagacctagaaaaatttatcttcacaaatttagaacacagaaaacaatgcccaaaactctgagttaatcattgttaaaattttgtcatgtttgttctagtctttttttgttttataatctaagaaatatatcattaattattttttaaaagtctctgttgacttctacttctgatct

SEQ ID NO: 145949 - DNA, 569 bp, Homo sapiens
aagcataagttgccccaaattaaacaagacagccaaagagaagcatacctggattatatttattgcaattgtctttcttccccatactccctgaccacaaatcatgccattaccctccatatcaggatttcattttggatacattctttcctgtctattgtgtcttgttkaactttcagacttctgtcctcctttcttcaactggagatgcttttcagcatcagtaccagagtgcatgttgctttttcctgctgagcattgtaagagcagtgcgttttttcaacaaacaggaccctttaatgatttttttcgaagcccagatgggcatgcacttagctgcctccatctgctgttgttccctgatacagcatgacctctgtcgattcacagtgagtttcatatgcccgagggcattttctccttccatttcaaggaatgttaagtgtttatcaaagggctgccattttgggtggaatccttgttcatttggaaactcttactgcagcatagtcttcctgcctttatccactaaatgtcattaggcatggtaaaaatcaaaatctctccac

SEQ ID NO: 145950 - DNA, 521 bp, Homo sapiens
aaaatttttctcttatgtaaaaactgatacatatttttattaaataaatacctatataaatgccatttattatttgccccactgtatttctaaatagcatactaaaatacagggagtaattacacttgtttttatcaagattcataaagactacagaaatccaaactttagaatgtcttgataattaccaaatttttctcaatgagttatttctgctctctatgcaaatggatttgcaactggygctactgcttaccactatttatttgtatcttttaagcctcaaatcttaacaaataggtcatgtttccaaaagggaatgcagatttaaatactaaatccttagtgcaaagcatactcccataaaactttaacattccaagtgtcaaaattctgataacttccttttaaaattatatttaaaacagttactccaattctaaatgccttttctctctcgtatcagcacctatctctttagtattttccctttcattttttattttctccagcttctaaat

SEQ ID NO: 145951 - DNA, 376 bp, Homo sapiens
tgaaatacaaccacctctgcactgacacacaacagctgtttagggtgtccaaggaatggcctgatgaagatagcaaggaaaaactggaaaactgaataccaatttccaaatcttttaaactttattaagctgttgcaaaattcaggaaaaaatatgtaagatatatctttacttttaaatggcaacaggaaattcttgataacttcaaaatcrtgaaaactagacgtaagtgctatatgcttgtatgttattcataatttataatttgcaaggccttatcttgtacattatttctttcaattcacaaaataatttggtgagatcagtagaattatcatctctacagaatcagcctctacaaatgaagcttaaagaa

SEQ ID NO: 145952 - DNA, 605 bp, Homo sapiens
tatcatcagtgggttcttggaaactgaaactttatataaaacaacctataacaaaaccaatttttttctcatagttataacaaaacattattaatctcattattcagggacttactgcatgtcttttcacttaaagtcgcggcttccaygaacctattgatgatgttaagtgaggacttactatagtctcttacttgtctattggccacgaaataattcttcaattgactagcactcccattatgttttgcaaattatagcagacaacagaggcatagcaaaaagagcattgaacacaataaaactgcaataaactataggtctctagtctgtttctctccaatatctagatttattaaaatttcagattaaagagggaaaagatcagcctagccaacatagtaaaaccccatctctacaaaaaattcaaatgttggctaggcatggtggcacacacctgtagtcccagctactcagaaggctgaggcatgtgaatcatttgtgcccaggaggtcaaggctgcagtgagccgcaatctcaccactgcactccagcctaagtgaaagggcgagaccctgtctcaaaaatcataataataataaaag

SEQ ID NO: 145953 - DNA, 355 bp, Homo sapiens
aagacaaaaagaaagaaaaagtagagacagatggcagactttaaaattgtagagccaactaatcaaggttgttagaagtcaccagggagagtaaagcactaacagagacttcagttgacrgcaaagggtgggactttgttggaaaggccacttctccaaaacaccattcacagataagcccagttgagtgacagctataataactgactccaaaatatacagttaacgactggtcacaagaagctagaacactgatttttcacaggagaggaattgcagaataatttaaataaaagcaaagtaataagagaataaaatcatcattaaccacccttgagatgttgatggagagagc

SEQ ID NO: 145954 - DNA, 453 bp, Homo sapiens
aataatattcctgtgtgtgtgtgtgtttgtgtgtgtgtgtgttattacattttgtttgttcattcatctattgatgggcacttggtttgtttttacattatggctattggtaataatggtgcaatgcacaacattggcatatatgtatctgaattcatattttcattcttttgagtataaacctaggaatggaattgctgggtcataaaataattccatgtttagctttttgaggaattgcaaaactgttttccacagtgactacaccaatttattcctcgcctcccccgcaatgtaggaggattccaatttttccacatccttaacaaacatttgtcatttttattttcttttttaaaaattatagtcattctagcagatgtgaagtcrtatgtcattgcagttgtgatttgcatttcccaagtgattaatgatgttgagcatcttttcatg

SEQ ID NO: 145955 - DNA, 362 bp, Homo sapiens
tttatatggtcttcaaccctaactagacataagaggatacacactggagagaagccctacaaatgtgargaatgtggcaaagcttttagccgttcctcaacccttactaagcataagacaattcatactggagagaaaccctacaaatgtaaagaatgtggcaaagcttttaagcactcctcagcccttgctaaacataaaataatacatgctggagagaaactctacaaatgtgaggaatgtggcaaagcttttaatcaatcttcaaatcttacgacacataagataattcatactaaagagaaaccttccaagagtgaagaatgtgacaaagcatttatctggtcctcagcccttactga

SEQ ID NO: 145956 - DNA, 416 bp, Homo sapiens
agccttcacaccttactacacataagaggatgcacactggagagaaaccctacaaatgtgaagaatgtggcaaagcttttagccaatcctcaacccttactacacataagataattcatactggagagaaaccctacaaatgtgaagaatgtggcaaagcttttaggaaatcttcaactcttactgaacataagataattcatactggagagaaaccctacaaatgtgaagaatgtggcaaagcatttagccaatcctcaaccctaactakacatacgaggatgcacactggagagaaaccatacaaatgtgaagaatgtggcaaagcttttaatcgatcctcaaagcttactacacataagataattcatactggagagaaaccttacaagtgtgaagaatgtggcaaagcattt

SEQ ID NO: 145957 - DNA, 486 bp, Homo sapiens
gaattcataccagagagaaaacctacaaatgtgaagaatgtggcaaagcatttagccagccttcacaccttactacacataagaggatgcacactggagagaaaccctacaaatgtgaagaatgtggcaaagcttttagccaatcctcaacccttactacacataagataattcatactggagagaaaccctacaaatgtgaagaatgtggcaaagcttttaggaaatcttcaactcttactgaacataagataattcatactggagagaaaccctacaaatgtgaagaatgtggcaaagcatttagccaatcctcaaccctaactagacatacgaggatgcacactggagagaaaccatacaaatgtgaagaatgtggsaaagcttttaatcgatcctcaaagcttactacacataagataattcatactggagagaaaccttacaagtgtgaagaatgtggcaaagcatttatatcatcctcaa

SEQ ID NO: 145958 - DNA, 463 bp, Homo sapiens
tacaaatgtgaagaatgtggcaaagcatttagccagccttcacaccttactacacataagaggatgcacactggagagaaaccctacaaatgtgaagaatgtggcaaagcttttagccaatcctcaacccttactacacataagataattcatactggagagaaaccctacaaatgtgaagaatgtggcaaagcttttaggaaatcttcaactcttactgaacataagataattcatactggagagaaaccctacaaatgtgaagaatgtggcaaagcatttagccaatcctcaaccctaactagacatacgaggatgcacactggagagaaaccatacaaatgtgaagaatgtggcaaagcttttaatcratcctcaaagcttactacacataagataattcatactggagagaaaccttacaagtgtgaagaatgtggcaaagcatttatatcatcctcaa

SEQ ID NO: 145959 - DNA, 584 bp, Homo sapiens
agaagatggaaaaaatattcttgaggtgggagaaacatgttaacagataaattacagcagacagacttgatagatgggggtaaaagttattaggaacagaaggcctaattttccctagaaaaggtagtatttgagatgggtctcaacagaagagtaaagagtaaatattctttgctgggggaacgggatggagacaaaacaaaaagaacaacccgtgcaacaacagaggcagtaaagaattatttagtgtggcagtgatgtggaagacagagacaagagccaagactagcaatttggtttggaagcagatgagggtctttgtaaaacaagtgaaggagtttggatttttctttttgtagacaacagggagggaagagatgttattaggcaggcaaacaatgagagcagctttcatttttgaggatgatgactctggcagcagggtggaagataaacagcagtagagagaaactggaggcagaaaattaactcaagaggtacttatgactcaaygaggaccttaggtcagaagtgattaaacagccaaagtcagtgaccggagcatggttttggggagagcctgg

SEQ ID NO: 145960 - DNA, 632 bp, Homo sapiens
tgcattgaatcatgattgtatccctctgctgggcctgaacaatagtgctgccaatgagagccatgtggtcarccttgacaccagcaagagccatcagtttgaccttagacatggtgagctggcgactaagtccaacactcgcagccgacatatgtcacaaaataaatatacaaaaaaaaacaacagtaaatatttaacaataactaagaaataataacaaacaatattaaagactgttgggaacaggctcccaaatctggccataaacaggccccaaaactggccataaacaaaatctctgcagcactgtgacatgcttgtgatggctatgatgcccatgctgaaggtttttggtttaccagaatgagggcaaggaacacctggccaacccagggtggaaagccgcttaaggcattcctaaaccatgaacaatagcatgagcaatctgtgccttaaggacatgttcctgcagcagataactagccagagcccatccctttgtttcccataaggaatgcttttagttaatctataatctatagaaacaatgcttatcactggcttgctgtcaataaatatgtgggtagcactctgtttgtggcggtcagctctgaaggctctcagccccctga

SEQ ID NO: 145961 - DNA, 632 bp, Homo sapiens
tgcattgaatcatgattgtatccctctgctgggcctgaacaatagtgctgccaatgagagccatgtggtcaaccttgacaccagcaagagccatcagtttgaccttagacatggtgagctggcgactaagtccaacactcgcagccgacatatgtcacaaaataaatatacaaaaaaaaacaacagtaaatatttaacaataactaagaaataataacaaacaatattaaagactgttgggaacaggmtcccaaatctggccataaacaggccccaaaactggccataaacaaaatctctgcagcactgtgacatgcttgtgatggctatgatgcccatgctgaaggtttttggtttaccagaatgagggcaaggaacacctggccaacccagggtggaaagccgcttaaggcattcctaaaccatgaacaatagcatgagcaatctgtgccttaaggacatgttcctgcagcagataactagccagagcccatccctttgtttcccataaggaatgcttttagttaatctataatctatagaaacaatgcttatcactggcttgctgtcaataaatatgtgggtagcactctgtttgtggcggtcagctctgaaggctctcagccccctga

SEQ ID NO: 145962 - DNA, 450 bp, Homo sapiens
gcatttttaagtgttataactttaaatatgtaatgtgacaagagttatagacaagataatgtaaagacttactttctaagaaagtagcctttccatctgttcataactttgtgtcttcttcgaatctttaaaatattttaaaagtagaatttgagcatttcttgcaaagttaattttccatctatcttattcrttactaatatatatgggacatttcttcatcatatttcttctgtcttcttgttgcactatgtaagttgttgttttatattgaagaaagtccccactcaaaatgaaaactgtaataattataaaagacaaagatttatttaggtattgaagaattaggtattctttagaccaatgtaagtgttctgagcatgtttaaaataggttaagcaaagctatgatgtttgataggttaggagtattaaatgcattttagacatg

SEQ ID NO: 145963 - DNA, 450 bp, Homo sapiens
gcatttttaagtgttataactttaaatatgtaatgtgacaagagttatagacaagataatgtaaagacttactttctaagaaagtagcctttccatctgttcataactttgtgtcttcttcgaatctttaaaatattttaaaagtagaatttgagcatttcttgcaaagttaattttccatctatcttattcgttactaatatatatgggacatttcttcatcatatttcttctktcttcttgttgcactatgtaagttgttgttttatattgaagaaagtccccactcaaaatgaaaactgtaataattataaaagacaaagatttatttaggtattgaagaattaggtattctttagaccaatgtaagtgttctgagcatgtttaaaataggttaagcaaagctatgatgtttgataggttaggagtattaaatgcattttagacatg

SEQ ID NO: 145964 - DNA, 598 bp, Homo sapiens
cacatgatctgtgtgtagtgaacaatggtttttctttccagcagtcatatcctcatcattttcttttatttggaaactctcctccaactctcatttcatgcaatggaaaaaaaaaaaatctctgttttcatcattagagatggcatgaaacctagtctggaccaacatactcacaaatcttgcctgaagtgattgcttcacaaamagcctgaataggagaacatccaaatcaatcagagaaacttttgtgaaactacagtatgggtgaagaaacttgttgggcaaagatttcatagagtaaccatctaaagaccatctttccaaaacatagaaagagccttcctgtatgtggccaaaataaatggaacaggcatgggatatagagtgactgataatggcatttgagtccttggatccatccatacctgatctactgctggaaatcttaaacgtgtgtgtcaatgaattctctttttcagaggagccagtttgaattttttttcagccaccatcaagaattctattaaatcctgttttataacaaatattggcattgatagctctcttactaatagaagataaacaacaaaacagtgtg

SEQ ID NO: 145965 - DNA, 629 bp, Homo sapiens
actattggttccaggattaatacctaggtagcgaaataatctgcacaacacaccccaatgacatgagtttacctacgtaacaaacctgccaatgtaccacgaacctaagataaakgtaaaatattgtctttatttgatgtgttgtatcgttaaacgcatttttaaaatgtattttatttaagttaatagagtttaaagtaggaatatttattgatttaattaggaataacatgctgtgggttaaattttagttacattcactaaactatgttcatgggctttagattcccaattgcagtactggcactgtgaaattggtatgtatgtttatccttttaggcagtaaactttttaatgtaatgttgtgagatagttttcatggtgtttctacatgtcttgtgaccatttctgtcctgactacctttgctatacaaacatccttggaagatagagctagtgtcttcctcttgagcaaaggaaaatttgtttccataccagaactataaagataatgttttcctctggtgcaaatttgggcaggtttgctagtagatcccttataagatttggagtttcctaaacttggtactcctcagctgtgacatgaaatcactgggtacacagcattt

SEQ ID NO: 145966 - DNA, 629 bp, Homo sapiens
actattggttccaggattaatacctaggtagcgaaataatctgcacaacacaccccaatgacatgagtttacctacgtaacaaacctgccaatgtaccacgaacctaagataaaggtaaaatattgtctttatttgatgtgttgtatcgttaaacgcatttttaaaatgtattttatttaagttaatagagtttaaagtaggaatatttaytgatttaattaggaataacatgctgtgggttaaattttagttacattcactaaactatgttcatgggctttagattcccaattgcagtactggcactgtgaaattggtatgtatgtttatccttttaggcagtaaactttttaatgtaatgttgtgagatagttttcatggtgtttctacatgtcttgtgaccatttctgtcctgactacctttgctatacaaacatccttggaagatagagctagtgtcttcctcttgagcaaaggaaaatttgtttccataccagaactataaagataatgttttcctctggtgcaaatttgggcaggtttgctagtagatcccttataagatttggagtttcctaaacttggtactcctcagctgtgacatgaaatcactgggtacacagcattt

SEQ ID NO: 145967 - DNA, 453 bp, Homo sapiens
actcacctatggctcttttccttaaacccaggagaaagctggagggctagaaagggagccagagaatgcatccatcatggtcaaggcctgagggagaaagcatatggcagatactgtgggaaagacacgaggaaacactagaatctttctcccctatagaaaactrttcttaagctactgggcaaagagattgccctgctatcctcagataatggggcagaaacactgtggttataggtgggaggaaaaaaaaacaaaaacaacaaacaaaacaaaaccctttatctttgcatcaggtagaaaaatgattctaggcccagagaaagtctcctgctgctggtggaggagcagaagctttgagaaaggcccacctaggagaggcagaactttaaggctggcctaagactgtggtggaaactgggcaaaagaaaatgcccacatgtgtccaggacc

SEQ ID NO: 145968 - DNA, 632 bp, Homo sapiens
tgactctttccccctcctccattcttttttacttgttcatttatttatatctgtatggaatcatgaatatttattgtatgttttgtgttataatccaagtactttatttccttacttttttgttgttgttgttcaaatcattccagatttggctattgtgagggtttttttgtttgtttttttttgtattttttttttgagtacctcttaactttctrgcactacaatatacaccaggctcatcttttatatttcttgtcccagttttgaatcaactagttcttttaattagagaacggtattagaaattaaaatctgagtgctaggtgtgcttattgctactggggtgttgttgcttttaggtctgttgcttttatgtcttaggttgtgacagagcaaggacatatatgtgtttattataatatatgcataaatacacatataaatatttccatatgtaatcatctgcatatatatcaagttaaacaggaactcatactgatatcttcaattctaatccattactacatagatcattctagctttctccttttgcttacctgtgaactcacacttcaaaagtgaaaaacaaacttggctcctgtcattcaccataaacttaattttgtaat

SEQ ID NO: 145969 - DNA, 632 bp, Homo sapiens
tgactctttccccctcctccattcttttttacttgttcatttatttatatctgtatggaatcatgaatatttattgtatgttttgtgttataatccaagtactttatttccttacttttttgttgttgttgttcaaatcattccagatttggctattgtgagggtttttttgtttgtttttttttgtattttttttttgagtacctcttaactttctagcactacaatatacaccaggctcatcttttatatttcttgtcccagttttgaatcaactagttcttttaattagagaacggtattagaaattaaaatctgagtgctaggtgygcttattgctactggggtgttgttgcttttaggtctgttgcttttatgtcttaggttgtgacagagcaaggacatatatgtgtttattataatatatgcataaatacacatataaatatttccatatgtaatcatctgcatatatatcaagttaaacaggaactcatactgatatcttcaattctaatccattactacatagatcattctagctttctccttttgcttacctgtgaactcacacttcaaaagtgaaaaacaaacttggctcctgtcattcaccataaacttaattttgtaat

SEQ ID NO: 145970 - DNA, 632 bp, Homo sapiens
tgactctttccccctcctccattcttttttacttgttcatttatttatatctgtatggaatcatgaatatttattgtatgttttgtgttataatccaagtactttatttccttacttttttgttgttgttgttcaaatcattccagatttggctattgtgagggtttttttgtttgtttttttttgtattttttttttgagtacctcttaactttctagcactacaatatacaccaggctcatcttttatatttcttgtcccagttttgaatcaactagttcttttaattagagaacggtattagaaattaaaatctgagtgctaggtgtrcttattgctactggggtgttgttgcttttaggtctgttgcttttatgtcttaggttgtgacagagcaaggacatatatgtgtttattataatatatgcataaatacacatataaatatttccatatgtaatcatctgcatatatatcaagttaaacaggaactcatactgatatcttcaattctaatccattactacatagatcattctagctttctccttttgcttacctgtgaactcacacttcaaaagtgaaaaacaaacttggctcctgtcattcaccataaacttaattttgtaat

SEQ ID NO: 145971 - DNA, 632 bp, Homo sapiens
tgactctttccccctcctccattcttttttacttgttcatttatttatatctgtatggaatcatgaatatttattgtatgttttgtgttataatccaagtactttatttccttacttttttgttgttgttgttcaaatcattccagatttggctattgtgagggtttttttgtttgtttttttttgtattttttttttgagtacctcttaactttctagcactacaatatacaccaggctcatcttttatatttcttgtcccagttttgaatcaactagttcttttaattagagaacggtattagaaattaaaatctgagtgctaggtgtgcttattgctactggggtgttgttgcttttaggtctgttgcttttatgtcttaggttgtgacagagcaaggacatatatgtgtttattataatatatgcataaatacacrtataaatatttccatatgtaatcatctgcatatatatcaagttaaacaggaactcatactgatatcttcaattctaatccattactacatagatcattctagctttctccttttgcttacctgtgaactcacacttcaaaagtgaaaaacaaacttggctcctgtcattcaccataaacttaattttgtaat

SEQ ID NO: 145972 - DNA, 508 bp, Homo sapiens
caaaaatcccagcagcaagcaccaagggggaggtgggaagaaaagccataggagagtggatgtggttgagtcaaattagaatttcttagttgagggtartattaagcagaatgatcctgcagaagtttcatagagtcatcctgtgagactctcaggcacccaaaataaataaaatttttataaagtactatcagtcacataagcagttacaacttaaaaacagtagtaattggagtaatacatgtcgtacctctacctttctccctgtcccaacacaaaaaagatgccaggtcttgagaaggatgggagtctcattttttggtgtttacttctacattaagatggtgaactacctggaagaattggtaaaagtctgaaaactctgcaatcctccctgactgcaaacagtagcctttgcttgctttctgtcattgtgtccaaaattcttcccataaattcttattaaaacttataccctcatctattttaaagggaattaagagaaagt

SEQ ID NO: 145973 - DNA, 561 bp, Homo sapiens
tcattttttggtgtttacttctacattaagatggtgaactacctggaagaattggtaaaagtctgaaaactctgcaatcctccctgactgcaaacagtagcctttgcttgctttctgtcattgtgtccaaaattcttcccataaattcttattaaaacttataccctcatctattttaaagggaattaagagaaagtgatgtctgcatccttattccagagtagaaaaagggtaatcagcactcctgagggtcacaatggtaggaccagaggttgagcgagtcagaggacctggaccatggattaattcatacagaaatttatcatgaaaatagtgcccttgttcagaggatgagacatgtgctacattcatataacaatattcagacacaggaatattttaaatctcaaaagacataaagtagcaatgcctaagtagagacataygatgtaaatattaattgaaaagcaaaccctgcttttgtttttgatattttcaatagtttttcatgtctcaatctccttcaattcaggcctgatttgggttatttcttgtcttctg

SEQ ID NO: 145974 - DNA, 559 bp, Homo sapiens
catggaatccaagatactttgaagtgaacatttctaagaaaaataaacactatttatcactgtttagacaaaaggtgttgaagcaaaacatatgctcttgacattataaagatcatcacagatttttgaaaggataatgtattagaattgtgagagggaacaaaataagattactttggcctgagaatttaatggagtgtgagtcagtgagagaatgtttacagttatgagggagaaaagatgaagggagaggcatttttaatgtaaggacttgtctgtttttatttggctaaaaggaaaaagtgagcagagaaacagaagtttgaaattaataataagcttagrggaagaggagggggatggtgatggagaaagagtgaagagacttggagcaaaagcaactgtggaaaagttggctttaaaaaataaaataaaatatttttctaatattaaaaagtggagttgagatggggagaaagcttttactttttctgattcaaaaggacaggcctagctggtgcaacttctctcctcttcccacttcttcctgcattgaata

SEQ ID NO: 145975 - DNA, 563 bp, Homo sapiens
tggaaaagttggctttaaaaaataaaataaaatatttttctaatattaaaaagtggagttgagatggggagaaagcttttactttttctgattcaaaaggacaggcctagctggtgcaacttctctcctcttcccacttcttcctgcattgaatattaatgcaaaatctagagatggagctgctgtcttccagccatgggcaaaatccaaggtattttttttaatgttgaccatgatgccaatgaactgttggaccaattccagcaggctcctccctccaaggtcataataatttgaattttcaaaagtttttatttatgctgttatatatcaagttttacattactgaaagccacattaatcctaawtgttatatttttaagatatttgtatggaaatgtattaaattaccaataagttattgtactattatataattgaataaaatattaaagtattatctatgagaaagttttatgccttggcaaattgcttgggctataatatgaagcttttataaagggtagaatacaaagtaacattatatatataatatattctac

SEQ ID NO: 145976 - DNA, 541 bp, Homo sapiens
tctttcaatgctagaaaataagaaagtgctcaaaaaacccacagtcaggtgggtgtgtgaaaggaatgcacaagccaaaagaaagagcttctgatggccaaagctgcaacaataaaatgcataaaataatatacaataaatttctctatgcttatatgaataaatgattaaagaaataagtggasagtatatgcaaatcttctatgtgtaattccaaataatgtatgtagagacactactgtcaagtaaataaagcataacttcccatttcttaagcggggagttcacatagtaacttcattctaaaaaatacaagataggaatcaaaaataaaagagtgatttttacagtggagaaacttgacaaacactatctcagccagatgatcaatattaacatcaacagtgagaagtcacgttgatagtatgtacccttaaatgatgtcatgtgctgaacacattttttatgtggtgttgcctctgaaaacctttatcctaagtctaatcatgaaaaaaaaaaaatcagaaaatttccagtaaag

SEQ ID NO: 145977 - DNA, 541 bp, Homo sapiens
tctttcaatgctagaaaataagaaagtgctcaaaaaacccacagtcaggtgggtgtgtgaaaggaatgcacaagccaaaagaaagagcttctgatggccaaagctgcaacaataaaatgcataaaataatatacaataaatttctctatgcttatatgaataaatgattaaagaaataagtggacagtatatgcaaatcttctatgtgtaattccaaataatgtatgtagagacactactgtcaagtaaataaagcataacttcccatttcttaagcrgggagttcacatagtaacttcattctaaaaaatacaagataggaatcaaaaataaaagagtgatttttacagtggagaaacttgacaaacactatctcagccagatgatcaatattaacatcaacagtgagaagtcacgttgatagtatgtacccttaaatgatgtcatgtgctgaacacattttttatgtggtgttgcctctgaaaacctttatcctaagtctaatcatgaaaaaaaaaaaatcagaaaatttccagtaaag

SEQ ID NO: 145978 - DNA, 541 bp, Homo sapiens
tctttcaatgctagaaaataagaaagtgctcaaaaaacccacagtcaggtgggtgtgtgaaaggaatgcacaagccaaaagaaagagcttctgatggccaaagctgcaacaataaaatgcataaaataatatacaataaatttctctatgcttatatgaataaatgattaaagaaataagtggacagtatatgcaaatcttctatgtgtaattccaaataatgtatgtagagacactactgtcaagtaaataaagcataacttcccatttcttaagcggggagttcacatagtaacttcattctaaaaaatacaagataggaatcaaaaataaaagagtgatttttacagtggagaaacytgacaaacactatctcagccagatgatcaatattaacatcaacagtgagaagtcacgttgatagtatgtacccttaaatgatgtcatgtgctgaacacattttttatgtggtgttgcctctgaaaacctttatcctaagtctaatcatgaaaaaaaaaaaatcagaaaatttccagtaaag

SEQ ID NO: 145979 - DNA, 425 bp, Homo sapiens
atttatatgcatcgtgcaaattacatatcactattcttttggccctacgttggtcctcacctcacatattctgctttgtgtccccaaagctgggccctctaaagtgctytctccagacttcctaactagctggcttttggtaagctttgccattggacgagagggaatagatattaaaaggcaggatgaaggaaaaaagcatgttctgcatctagctctaaaagaagtagttgccgaccttggctctggtgacattgatggggagacagtcatgatctttagcagctgtggcagtagtaggccaaacagaggcccctctttggaggtccagtccagcagcatcagtgctggtttggagactgaattgctgcaggggcatatacaacagcacagcagcaggtgtccgcttatggttccaactcagg

SEQ ID NO: 145980 - DNA, 573 bp, Homo sapiens
acctcacatattctgctttgtgtccccaaagctgggccctctaaagtgctctctccagacttcctaactagctggcttttggtaagctttgccattggacgagagggaatagatattaaaaggcaggatgaaggaaaaaagcatgttctgcatctagctctaaaagaagtagttgccgaccttggctctggtgacattgatggggagacagtcatgatctttagcagctgtggcagtagtaggccaaacagaggcccctctttggaggtccagtccagcagcatcagtgctggtttggagactgaattgctgcasgggcatatacaacagcacagcagcaggtgtccgcttatggttccaactcagggtcatttgcagctttctgatctcagtgtaaaaatctgtcatccttcctatactcctatatcactctcctctcctttttcttccttcagagttttcaaaacattaatgccctatcccatgtatggaactgtttgaaacagtcaatacagtttctgtttttatgactatcttctgaatgataaagaaagcctaagttttgatgtcctt

SEQ ID NO: 145981 - DNA, 557 bp, Homo sapiens
ttgctcttggatttttgcaggttttctcaaaataaggcatagtagagccagcccattgcaggtaaaacaatttgaacagaagacatcgggacatcggggtctgtaatttcaaaggcattattgaaacaacttttttcttaacagaggaaacaaaattaatcttttaaatcaaggaggaaaattatttaattttaatgctgcacatggcaggaaaataaagtgcaaagtttacagcactttatttccttcttaccaggaaggaagaaggaaaaccccatggtattatgttttgtcaamcatgactttccagggactaaaccagactttgattttagacccctgttcattctagtttggtaaacccttgacaaattccagtctgttccacccacaggagagggtcatgttaccatctcagctgcagagccgatgaggtggttgtaccgacctgtaggatcccagagctgagagctggagatcattgattataactctcttcatgggccaatcaggtgttatatgaagaatcaaatgagagaaatgtgacaggcttctga

SEQ ID NO: 145982 - DNA, 506 bp, Homo sapiens
tcccataatccccatgtgtcatgggacagacccactgggagataattgaatcatgggggcagtaacccccatgctgttcttgtgacagtgagtgagttctcacgagatctgatgaggcttttccccctttgctcagcacttctccttcctaccaccatgtgaagaaggacatgtttggtttaccttctgctataagtttcctgaggcttcccaagccctgtggaactgtaagtcaattaaacctcttttctttataaattacccagtcttggacagttctttatagcagcatgagagcggactaatatatctacttaccaagccccttattgatcaagtatagccttagtgtaagtagacattgatgctasaatagtaccccagggcacagtctgaattagaacataggcaaggtcatactcatacttttgcacattatgggggacttgcaggtgcatgcaactttaacattctctgtagaaaaaaccagacatgttgatatatta

SEQ ID NO: 145983 - DNA, 506 bp, Homo sapiens
tcccataatccccatgtgtcatgggacagacccactgggagataattgaatcatgggggcagtaacccccatgctgttcttgtgacagtgagtgagttctcacgagatctgatgaggcttttccccctttgctcagcacttctccttcctaccaccatgtgaagaaggacatgtttggtttaccttctgctataagtttcctgaggcttcccaagccctgtggaactgtaagtcaattaaacctcttttctttataaattacccagtcttggacagttctttatagcagcatgagagcggactaatatatctacttaccaagccccttattgatcaagtatagccttagtgtaagtagacattgatgctagaatagtaccccagggcacagtctgaattagaacataggcaargtcatactcatacttttgcacattatgggggacttgcaggtgcatgcaactttaacattctctgtagaaaaaaccagacatgttgatatatta

SEQ ID NO: 145984 - DNA, 603 bp, Homo sapiens
tttgcacttgagaatcatctttttaaaattccaaacctcatgctagaccccagaacaatcagatcacaagctctagggcagtgggatgggcacagacatcaatattttatagggtccccaggtgattccaatgtgcaaacaagtttggaaagcatggcgcaggctccaagctccaagctccaagctccaggagagcagggtctgtcttataatttttactgtaactctcctacagcacctacccgaaatatttgttaaactgaattgaatttgtagagacctccattctcatgaggtcctttccaactatgcctacttgcattggtgccacctaggaccctatgaatccagagcagggcttggcataaaaggaatatgcttcatacaaactgcattatactgcttcattaataaatactgtcctagggacttccacagacctgacactttgttatttcattatgtgatttaattaaaaatggaatctattawgcctttttcacattagatgttggtagaaatttttatttttttaacttttattttaggttcagggcacatatgcaggtttgttatataaataaattgcatgtcacagaagtt

SEQ ID NO: 145985 - DNA, 604 bp, Homo sapiens
cctccattctcatgaggtcctttccaactatgcctacttgcattggtgccacctaggaccctatgaatccagagcagggcttggcataaaaggaatatgcttcatacaaactgcattatactgcttcattaataaatactgtcctagggacttccacagacctgacactttgttatttcattatgtgatttaattaaaaatggaatctattaagcctttttcacattagatgttggtagaaatttttatttttttaacttttattttaggttcagggcacatatgcaggtttgttatataaataaattgcatgtcacagaagtttggtgtacagattattttgccacccacataataagcatagaacctgagaggtgatttttggatcctcatcctcttccctccctctatccttaagcacgccccagtgtctgttgttcctttgtgtccatgtgtactcaatgtttggctcccattatatgtgtgaacatgcagtatttggttttctgttcctaygttagtttactcaggataatggcctccagctccatccacgttgctgcaaaggacatgatctccttgttcttcttatggctgcatagtg

SEQ ID NO: 145986 - DNA, 551 bp, Homo sapiens
ctgaaatctgacgttgcttttggtggtgataattaaataataatgtgattattatttcttatcaatagcagaggtggaagagaaaactagaaggttacttaatatagaagccaaatcctgaactcaaattgtagagcaaaacactgttgtttgttggttaacgaagggagaaaattcagcaggtaaatggtggatagatttttgattctggagatttgcttctgaataaactggaaagaaaagacaacggacttttttttactgcctctagttcagaaatgcatttcataagattgagaatcttatgagaatctcagaagaaagactgctgataagaaaggaggggtttcagtattaacaaattcactgaataacttttgaaaaatgacagcaggtatagacatatggaaacaagactttgagcttttaactaagtacttcaactgagagcattatcactttggaatcatgcagagacccaacaaacttmataatgacctgagtcttctttcttttgtccttagtctccattcagctcaagaaaatagtaa

SEQ ID NO: 145987 - DNA, 631 bp, Homo sapiens
ccttttctgattaaacataaatattcaytttcatatctaattttgtgttcatgattttgtatttttaagaggctccccaaaccaagatccaccctggccccttttctgtttccttcttcatacagtgactgccccatcttcctgccctcatctggtgttgactgtgccctggtttcatgatagtctttgcagttgaaccagcatacttactgcccagagctggagtgtatgctccctgaagacagtcccctgattcagagtaccacaaacagggccggacctactggaaacactttataaaggcctgttaaaagagcatctgaaatgagactgtaattctctcgaacaggtgacccgggagctgcctcccagtatgtgggcacttcaaaagtggtgtatctgcctgcaacttgcaggttttcccagaatacaagagtttctgcagaaaagatgtggttccctgtgaatagtgtgatccaaaaagacctttcccaaagtcagggtcagacagggttactgagccaagagttggatttggaccctaacagaagcaactctggagacccctctcaaattgatctcaagacctttctgctgccctcctccccatgctcactccccttctccatcc

SEQ ID NO: 145988 - DNA, 631 bp, Homo sapiens
ccttttctgattaaacataaatattcattttcatatctaattttgtgttcatgattttgtatttttaagaggctccccaaaccaagatccaccctggccccttttctgtttccttcttcatacagtgactgccccatcttcctgccctcatctggtgttgactgtgccctggtttcatgatagtctttgcagttgaaccagcatacttactgcccagagctggagtgtatgctccctgaagacagtcccctgattcagagtaccacaaacagggccggacctactggaaacactttataaaggcctgttaaaagagcatctgaaatgagactgtaattctctcgaacaggtgacccgggagctgcctcccagtatgtgggcacttcaaaagtggtgtatctkcctgcaacttgcaggttttcccagaatacaagagtttctgcagaaaagatgtggttccctgtgaatagtgtgatccaaaaagacctttcccaaagtcagggtcagacagggttactgagccaagagttggatttggaccctaacagaagcaactctggagacccctctcaaattgatctcaagacctttctgctgccctcctccccatgctcactccccttctccatcc

SEQ ID NO: 145989 - DNA, 525 bp, Homo sapiens
cttttctgacatcctaagctcgcgctgtcaggctgtgtgggttggggtcatccaagaaggttcctcagaggaactgagaaagaaccagcagcctcctttctgggcagaaaggaggaggagggtgagtggggtgcagagaggaggcggagccagggagcagtgagggaagaactgtgggagtctaggaggcagtggggccaggccaccatgcagggcctggggaaggcggcagctgtgtgccatgtgttctggatggggtgcagcatagggacagaggtcctccgggaggctgggcacagatctggagagatggcaaggccagggccagggagaataaagggcttggagagccaccccataccattcggggcagagaggggacagtccctcaaggcctggctggctagggaagggggaactctgtcctctgaggaggcagggcccaacaaggtgccgtggccckccatccccctgctttctttctggcctgcctggttccctgaggacaggacagctggccataca

SEQ ID NO: 145990 - DNA, 557 bp, Homo sapiens
tcaagtatgggtggagggactcctagttatatgggcctgcctgccagtggccgaatcagagggagacagtctatgggttcctgaatgggcagaacacagagtcatagagcaaaggacagtatttaaggccatgggaactcaagtgtgtctgataatttagttaatttaagcttagtactccttttgtggttttgacttttctagatgattgagagtggtaaggagcacgaggctttgacatgacaggcaatgctttacatagctcaagaatgattgccccagtaaaataagtttatctatcattacacaattaaattagaatagctcctgtagggaatacaaagtccattagtttyttagccactttgagtgtctcaaaaaaaaaaaaaaaagagttttaatcacctcatggttctgcaggctgtacaggaagcatggcagcatctgctccgcttctggggaggcctcagaaaacttacaatcatgacagaaggcaaagcgagatcaggaggcttacatgacagaagcagtaccgagtgtggtggggaagtgccatg

SEQ ID NO: 145991 - DNA, 414 bp, Homo sapiens
ctgaaggatttgtgattcttttaacatgagcaaaactaaaatataatgccttaacaaaatagaggtttatttcccgttcacatagtagtcttggacagttgtttggcttggtggggcagctctcctctttgccatcatccacagacccaggtttctatctgtcatcacttgagcccttgtcatcatctactttaagttggcaaaaggygggaaaaaatagaagagtgttatgggtgggggtgcagttataggccagttctgcaagtcatacccatcgtattaacccaaacctgttttgcatttcactggaaaaaatttaataaaaagattatacccaactgggcgtggtggctcaagcctgtaatcccaacactttgggaggctaaggcgggtgatcacttaaggtcaggaatt

SEQ ID NO: 145992 - DNA, 339 bp, Homo sapiens
ccacagcccaccttcccggtcacccctgcacgcctccccccattctttattcacctccccccattcagccctatcatttttacctctaccaaccctcccagccaatccgctggctcttccgatggcccccgccccacctatctgcgcgcccactcagctccagggcccctcacccttctcatcgctttatctcaaacgctttatctcaaatgccctaatgggcacagggcgctcggggctcccgcggcgctctcactttccttcgcggtccccgcgcccccgacycgcgcattcccctctctctctacacctgcctcggctcctggcctcggcccctcc

SEQ ID NO: 145993 - DNA, 623 bp, Homo sapiens
atataaaattaaaaaaaaacaaaaacacaaaacaacaagtgtaatggcaaggatatggagaaattggaaccccgtgcaatgctggtggaaatgcaaaatggtacatctgctgtggaaaacagtttggtggtggttaatcaaaaagttaaacattaaaaataaataaataaataaaaattaaaattaaaaagttaaacatataattatcatataaatccagcaattccactacaaggtaaatacccaaaagcattgaaaacagggacttgaaagatatgtktacaccaatgttcatagcagcattattcacaatagcaaaaaggtagaaagtacctgacagataaatggataaataaaaggtgatgtatacacacaatgcaatattagtcagccacaaaaatggaatggaattctgatacatgttaagacatgaatgaactctccaggccttgtgcttagtgaagtaaacaagatacaaaatgacaaatattgtataattccacttatatgaggtatttaaaataggcaaattcatagagacagaaagaatagaggttgacagttgtggggagagtggaatgggaatgattttttaatgaggacagaaattttttttctgtttg

SEQ ID NO: 145994 - DNA, 556 bp, Homo sapiens
gtttaaaacaaaagacagtgtgacctttgaataatgagagaatggaaaagagaatgttcaaggagcagagatgtgggtgcaaaatggggtacagtgatcaaaaagagaggtaaactctgcaaacactacaacatgaagcctgacaacaaatctagacaagaagctacagcaagtgactaaagggctgtttgagagttcctagaacacaatttgagttgaccaagaatatataagacttacatcatttctttctgaataagatatactagtaggtcagcaaaatccattgatatacttgaactttagcaaagcatgtgacaaattctttgctgatattcacatacacaagatggacctatatgaactagtataagtagagtataagagcttcaagamacagagattataggagtttgaaagaaagagtggttcctattaaaaaaagattccaggaaagtaactgtgtatgggagacaccagtcaattagggcaagaaattagtgtaatcactatcaggataaccttaataacaatagcaataatatgttgagcactt

SEQ ID NO: 145995 - DNA, 422 bp, Homo sapiens
cttaaccttccctctcaccttatttctcacaactctcatcacaaacctgtgctccagaaaactaaacaactggattttcccacatacgattccttcctctatttgttaatgtatactatttcttttgcctaggatgccttttacytatcatctaatatccaaagccagtaaatcacttttttcataaagtatttcattgctcctttacacacacacacacagacacacacacacacacacacacagatttcccacaggtaaaggaaagaagaaagaatgaaatgaaattttatccaatacctcattatgtgcctggcactatgtgtggtatttgatgttcatccttgaactccttgatcactttatctgcttcttttgtagtatttaaaactctatacctaaatatgttatatatatttttg

SEQ ID NO: 145996 - DNA, 603 bp, Homo sapiens
ttggtgacattatcacattattaagaaggcacttctggcctgcatcactagttcatgtttgcaaatttctgtttcccaaatgcaacagacctctccccttgggtrtgccgtgctgggagaacttcacggacctggcagtctaccatgtgagcatcagtgatgggcagtggacaacaagggcagcaatgagccacatcccaggagcaggtaaaccctcaggatttctggctgcgacagttatcactcaatagaagcaaaataacagcagaaaactggaggaattatctgtgtctagcagagaggagagtgctgagagctctagaatagagaaggaattgtaataagagctctagtgacacagaataaatgccagataaaggtaggaagctaatatgaaccatctgatgcgcaagaattcagaatccaccatctaagactggctgcagtgttgtggaatgaggtataaatctagctactagaccattctgcctgctggattcccactttttcaggactcaaggctcagttatgtattctgggattatttaagtccctgttcttcaaggtttattatttgatacttgtccgcagcattaataaaaa

SEQ ID NO: 145997 - DNA, 573 bp, Homo sapiens
tcctgccccattatttgacattcttgattcaagcggtgtgtaattataggcctaatcaagtttcaatagtcagccttaataagaatcaaagctcgaatttcattgtcaaccatcatttagtttcataaggaatggagtgcggagaatgatatggcctttcggagtgagtttgctgcattttatattagctgaattctgcagtgtaccccctctctacaatagtcataagcaagttgcatagttgcaaagtttgtttcattataagatggtacagatgaaatgatttgggggtacctgtaaacayttactcttagatacctctccagcctaattgactaatgcctacatttgatgttatgatctaaatacatctggggcacagtaatacccagagatctctcagcataaatggatttacttacttatttcttgggatgaattttgacagaggatttgggaaaaacaatgtagaaaggggaatctaagggtgagacaattttgctttcagacaactaaggttgtagtcattttccccagaaaaaaatcctatgatgggctctgggtacccaaata

SEQ ID NO: 145998 - DNA, 541 bp, Homo sapiens
cctgggcaacatagggagaccctatctctacaaaaaaatctaaaaattagctgagtgtgatggcacatgcttgtagtcccagctacttgggaggctagggtgagagggttacttgagcccaggaggtcgaggctatagcactgtattattctgctatcaygctgcaatgaagaaacacccaagactaggtaattcgtaaagaaaagaggtttaattgactcacagttctgcatggctggggaggcctcaggaaacttatattcatggtggaagacacctgttcacagggtggtaggagagagaaatgccaagcaaagggggaaaagccccttataaaaccatcagatctcatgagaactgactcactatcatgagaacagcagcaaaggggtaacaaccccccaagattcaattatctcttactggatccctcccactaaatgtggggattatgggaaccacaattcaaaatgagatttgggtagggacacagccaaaccatatcattctgcccctgaccccatccaaatctcatgttctc

SEQ ID NO: 145999 - DNA, 541 bp, Homo sapiens
cctgggcaacatagggagaccctatctctacaaaaaaatctaaaaattagctgagtgtgatggcacatgcttgtagtcccagctacttgggaggctagggtgagagggttacttgagcccaggaggtcgaggctatagcactgtattattctgctatcatgctgcaatgaagaaacacccaagactaggtaattcgtaaagaaaagaggtttaattgactcacagttmtgcatggctggggaggcctcaggaaacttatattcatggtggaagacacctgttcacagggtggtaggagagagaaatgccaagcaaagggggaaaagccccttataaaaccatcagatctcatgagaactgactcactatcatgagaacagcagcaaaggggtaacaaccccccaagattcaattatctcttactggatccctcccactaaatgtggggattatgggaaccacaattcaaaatgagatttgggtagggacacagccaaaccatatcattctgcccctgaccccatccaaatctcatgttctc

SEQ ID NO: 146000 - DNA, 541 bp, Homo sapiens
cctgggcaacatagggagaccctatctctacaaaaaaatctaaaaattagctgagtgtgatggcacatgcttgtagtcccagctacttgggaggctagggtgagagggttacttgagcccaggaggtcgaggctatagcactgtattattctgctatcatgctgcaatgaagaaacacccaagactaggtaattcgtaaagaaaagaggtttaattgactcacagttctgcatggctggggaggcctcaggaaacttatattcatggtggaagacacctgttcacagggtggtaggagagagaaatgccaagcaaagggggaaaagccccttataaaaccatcagatctcatgagaactgactcactatcatgagaacagcagcaaaggggtaacaaccccccaagattcaattatctcttactggatccctcccactamatgtggggattatgggaaccacaattcaaaatgagatttgggtagggacacagccaaaccatatcattctgcccctgaccccatccaaatctcatgttctc

SEQ ID NO: 146001 - DNA, 618 bp, Homo sapiens
tatctatttgtttattatctgtcaccaatgagacactctgtaaaggtggggtgagggacatgatgtacttttattcactatctcctaattccaagaacagtgcctagcatatattagacatatacctttaattcagtgggtaaatgaatggcagacccccaaaaaagtgcctttcaaagaggttttaggaagtattactaacatagaaatgcacaaacttcatgagtttgaaattaagcagccaatcttatgtaactcttttgatgtgacatcatacattttaaaggcataaaaagcacagattacaaacaatagaaattcggatagatcttataccacctgtgtgctgttacatggctyccagttcagcacaattaccaaaaagccacttgatatcagtatctccaaatcaacaaatgccagctcctgaagcctcaaatgcaaaacataaattctgaggcaagggtaaatcgtatgtgatgctgattcagatcattatctttaattgtttcaggtttatagttgtcattggatcattgatgtcaatgaatcgtttccacaattaaaatgattactatacctcatccaaggatccctgtgaatcttcatgaatttaaa

SEQ ID NO: 146002 - DNA, 618 bp, Homo sapiens
tatctatttgtttattatctgtcaccaatgagacactctgtaaaggtggggtgagggacatgatgtacttttattcactatctcctaattccaagaacagtgcctagcatatattagacatatacctttaattcagtgggtaaatgaatggcagacccccaaaaaagtgcctttcaaagaggttttaggaagtattactaacatagaaatgcacaaacttcatgagtttgaaattaagcagccaatcttatgtaactcttttgatgtgacatcatacattttaaaggcataaaaagcacagattacaaacaatagaaattcggatagatcttataccacctgtgtgctgttacatggctcccagttcagcacaattaccaaaaagccacttgatatcagtatctccaaatcaacaaatgccagctcctgaagcctcaaatgcaaaacataaattytgaggcaagggtaaatcgtatgtgatgctgattcagatcattatctttaattgtttcaggtttatagttgtcattggatcattgatgtcaatgaatcgtttccacaattaaaatgattactatacctcatccaaggatccctgtgaatcttcatgaatttaaa

SEQ ID NO: 146003 - DNA, 456 bp, Homo sapiens
agagacgcaaatttaccagaatgatcgtctctttcttttctggatatcttaaaatcctagatggtgtgaacaccacctatttygccacagtgttagaagaaatacattttgtattcttaatatcttcctagccctggacaccttatgttgtgatacctgtgttatacacgtaagacctattatttgaaagcacagaaaaagaaatatcaattaataagaaagactcccataaatgcaggatccagtgaaaagtgttacatctatatattatgggcaaataaatcaatgtaatcaatccatatactggagcaaggtgtagacactcaattctgttgagtgaattaagaaattaaccagtcatttggttggaatccctctggagtggctgtatgggacgataccaaaaggtagagcaggaagagtcttgggcttatttagtaatcctgcctcaaacca

SEQ ID NO: 146004 - DNA, 484 bp, Homo sapiens
gaattcagcagtatatcaaaaatatactagtgcttatattaaatgtaaaacattacaatactccaattaaacaactaagataggtatgtttaaaaaaatcaataaaatcaatatatatgccacttaaacacattttaaataatatgtgarcacagaattatttttaataattttaacttttattttagattcaggggttaagtgtgcaggtttgttacatgagtttattgtgtgacactgaggtttggggtataaatgatcccaccgcctagtagagagcatagtagctgacaggcagtttctaatccctttctcctttcgctcttgccccactctagtagtccccagtgtctattgtttccatctttatgtccatgtgtacccagagcttagctcccacttataagtgagaatatgcagtacttggtgttctgtttctgtgttaatttgcccagaatgatgacctccagctgtatccatacca

SEQ ID NO: 146005 - DNA, 484 bp, Homo sapiens
gaattcagcagtatatcaaaaatatactagtgcttatattaaatgtaaaacattacaatactccaattaaacaactaagataggtatgtttaaaaaaatcaataaaatcaatatatatgccacttaaacacattttaaataatatgtgaacacagaattatttttaataattttaacttttattttagattcaggggttaagtgtgcaggtttgttacatgagtttattgtgtgacactgaggtttggggtataaatgatcccaccgcctagtagagagcatagtagctgacaggcagtttctaatccctttctcctttcgctcttkccccactctagtagtccccagtgtctattgtttccatctttatgtccatgtgtacccagagcttagctcccacttataagtgagaatatgcagtacttggtgttctgtttctgtgttaatttgcccagaatgatgacctccagctgtatccatacca

SEQ ID NO: 146006 - DNA, 586 bp, Homo sapiens
ctaaaacttcacaattgaaatgtccatcttgggaaatataaatttaaaaaacaagcaaacaacaagttaaacccaaaataagtataaagattaatacagagactaataaaattaaaaaacaagcattcaatrtgcaaaatcaacaaaattaaaagtaggttttttaaaaaaaactaataaaaattaggaaatttctaacagaatggattaaaaaaatgctaacagtaggaactaaaactatcactgtagagctcacaagtattaaaaattcaaaattaggttttatgaacaattttataccattaatgaaatggcttaattcctagtaaaacacaacctaacataaacaacacaggaagaaatagaatttgtaatttcaaatctttcaccttctaaaaaaatttctagagcgaaaataaaaaacactagtttcatataaacatccagagttcaggagaaaaaggacaagctttccaacatttttatgagtttatcaaaatgtttacattaaaaacttgacaaagacattcaaggaagaaaaactacaggaaatctctcaaaaaacatagatgaaaaatcttatact

SEQ ID NO: 146007 - DNA, 372 bp, Homo sapiens
aaggctaatttttttgtatttttagtagagacggggttttcaccatattggccaggcaggtctcaaactcctgacytcaggtgatctgcccgcctcagcctcccaaagtgctgggattacaggcatgagccaccgcgcccagcctctgaatccttttaaaaacacttgttgaattgtttaaaaacaccttatttaaaagaacagatgtgtgtctaaagagtaaaaacagaatatcaggaaacaggattttagaagttccttggaaggaaatgtaatacagagcaaagaacattggcctttaagttgaaagacctgggtctagtccaaggctcaccacttccatccaggttgccttgggtaaatgacccacaa

SEQ ID NO: 146008 - DNA, 497 bp, Homo sapiens
gggagaaaaggagagctccgctggctatcatatgactgagtagcagggctttctttgcaaggcaaggaggcagcatctccatggtcaagcctggcatgaggatcaccaggatcacaagcccatgacagaggtgtgggagatcaccagaaaatttctcttatccatctggttcacttgagattgacaacagctcacttctcaccctgctggcaggagagttgatatttagtgttacaccatttcatgccrtctgctttaatgatgacagcttatttaaaaatccattgtggagcactgccattcaatgataaaaaataaaagatacattcagctgcttattgggctattttgtcaaaatctgagaaaatattttacattggtccaaatgactaatgattatttgttttcctacttgtgggttgtttctctctctctgagtttacagcttttaacataacacaatcagagaacagaaaaacatcagaaccaaataacac

SEQ ID NO: 146009 - DNA, 401 bp, Homo sapiens
gaattcttgcttgcacaagatccaagaaaccttccctggggtctggttcaggacccctttccagtaacagacccatcctgaggcagattraatggtggtacaagaggcagcgaggctgccaccatcctccagatgagaaatgatgagtgcctgaagtattggtctaaacatcgtgaaactgctgggtaactttttggcctggcttaggggatgcgagagactgtttcgttctatggccataagctcattgctccagttgcctctttggtattaggcaggtcaggcaggttaaactaagtggctttgaatggcctcggggttttttccttgggtctcaaaacatcatccttctgtttattctcaccaactagagctgccaggtgaaaggtgtccagaataga

SEQ ID NO: 146010 - DNA, 619 bp, Homo sapiens
atagaaaaaagaggacaaaaagcacatgatcatttcaatatacactgaaaaagcatttggcaatacacaacactctttcttggaaaaaacctttcaacaaactagaaataaattacttcctcaacatgataaagagcatctttggaaaaacccacagcctacatcatattaatggtgatgtgaaagctccagttgggagctttcttcccaatatcaggcacaaaacaagtatatttattcttgtcacttcaacattgtattaaatgttctagacagagcaattcgacaaaaggaaggaaagaagactgcgcattcagattggaaagggagaagtatgatgatctctctttgcagacgacaagataccatatagaaaaagtcctaagaaatccactwacgctgttagaactaataaagagtttagcaagattgccagacacaagatcaatatacaaaactcaatggtatttctacatattacaaacaatttgaagttaagaaaacaattccatttatatcaacaccaaaaagaatgaaatacttaggaataaatttaacaaaagttcatttctacaccaaatactacaaaacatctctgaaagaaattaaagaacaccta

SEQ ID NO: 146011 - DNA, 583 bp, Homo sapiens
aatctgtatttctctttgatttccattttattccttacatacacggtatagtaaagacaaaagtactaatcatagcaaataaaggggaagccgtgcagttggaaacagccatgcctggtgcaaatgctgccattgtttaattgttgatgatgctgcataagaatccttaaggtagaagcaatcttgaccttttttatttttgcaggcccctgccagtgcccttctccagactatattcttaaaaattaaagtgctttggtttgtagagttgactgtatgtatctccaaaatgaatatgcagcagtgattttttttttcctccctgatctctttcctgctttggtaattctgtgagggtrtaatcatattggggctgtccttggcaggttaggtgacatacaagaacatgcggttccacagcagtcctgtcattctcgggtaagaacatcaaagtgagttgcagcacttctgcattcatacacgtaaatcttaatctggaaggaagatagaatctaccatagtgaatttctccagaagttttacgcttgagtgcacccagatctgtaggcgttgacccaatcca

SEQ ID NO: 146012 - DNA, 420 bp, Homo sapiens
ggaattcaagcatatatatgaatacagttacattgagaacagtatataagagaacaaaaagaaggatgaagatggagaaaaattaataccgatttggatctaagacagtggtgctcaaccaagaaagattttgtgattgtcactatttgtggggaacatgctactggcatctagtgtgtagaggcgagagatgctgataaacatcctgcaatgtacagggctcaaacatacccygccctcaaccaagagaaagaaagaaaaaaaaattacgtcatccaagatgtcattagtgccacgggaagaagaaacatcaagctcagccatctttgaagcaacttgctttccataatgtaaaaggcaaggctttttcacccctaaaatggggcaagtaaaatagaataagaaccatacagttttgtc

SEQ ID NO: 146013 - DNA, 565 bp, Homo sapiens
atttttacatgaaaaacaatcaaccaaagtccaaattcgcattgtgaggatccgagcacatcctcccagacagacggcaaaggttccacctgctcagcagcctgtctcaggtgacctaccrggggaaagggagccaggttgttctatcacagacttgagaggaaggaagccttcttcttcaaatgcatatttcacactactactattttctctataaaatacaaagaaaactctcaactagataaactatggggctctcctcttggtcttctgtcttggtctccaagaacacacctgcccattgaagagataagaccctcgtgttgcctgtgggtccagaggccaagtgatgtcataggtttctgacttcccaggaggcttcagaatattagctcagctctgtctcttcattctactgggcatcctgattctgtctggcctcttggttccagagtgagagagagagttactcaacacactagcaaaacatctcaccaaatgggcttcaatcactaagaattaacagtctaaataaggatgaataataaagaaagattaaaggcct

SEQ ID NO: 146014 - DNA, 214 bp, Homo sapiens
ttatggtcatgcatggtgtactctctcttggtcaagtccattcccctctggagctccttgacatccagcaaaacattctcaagggagactaaagcagagaaagaacatcccagtgaaamtcaatggggaagtcacaaccacagcgaatctggctgctgggccaagttctcaggagattcttaggcttactcaagggccctaaacctagcttcca

SEQ ID NO: 146015 - DNA, 604 bp, Homo sapiens
aataatcagttactaaaatgaagaattcttggaatgcaaggtgctatttaaggaagccayatattttattgtactgtttaaaatactgtaatagatagataattcagtgagtgtggtgacccacgcctgtattcccagtactttgggaggccgaggcaggacgattacttgagcccaagagtttgagaccagcttgggtaacatagtgagaccttgtgtctacaaaaaaataaaatattagccagtcacaatgtcacgtacctgtaatgcctgggacactgaggcagaaggatcaattgagcccatgagttcgaggctgcagtgagcagccattgcactctctgagtaacagagtgagaccctgtctctaaaaataaaaaatcggtgcccatttgctcaaatttttgctatgcccctttctagttatttgaccttagataagttatgtaagttttctgcacttactatgtgacccaagttaaattctcattgataaaattagtataatacttacatcacaggaatattataaggattagatgacataacttgtaaattcctaataaagggtctgaaacataatagttactcaatatatgatagt

SEQ ID NO: 146016 - DNA, 604 bp, Homo sapiens
aataatcagttactaaaatgaagaattcttggaatgcaaggtgctatttaaggaagccatatattttattgtactgtttaaaatactgtaatagatagataattcagtgagtgtggtgacccacgcctgtattcccagtactttgggaggccgaggcaggacgattacttgagcccragagtttgagaccagcttgggtaacatagtgagaccttgtgtctacaaaaaaataaaatattagccagtcacaatgtcacgtacctgtaatgcctgggacactgaggcagaaggatcaattgagcccatgagttcgaggctgcagtgagcagccattgcactctctgagtaacagagtgagaccctgtctctaaaaataaaaaatcggtgcccatttgctcaaatttttgctatgcccctttctagttatttgaccttagataagttatgtaagttttctgcacttactatgtgacccaagttaaattctcattgataaaattagtataatacttacatcacaggaatattataaggattagatgacataacttgtaaattcctaataaagggtctgaaacataatagttactcaatatatgatagt

SEQ ID NO: 146017 - DNA, 561 bp, Homo sapiens
tacgtttgttattctgtgtatttcctacaaaaatcttattgaccattagccctgaatccctgttttayggatgagaatactgagggtcatttattaagtaccttgctcaattccacacaagttagaagcaccgagatttgagcctagatacggtcacttctaaaatttattactaaaccagcaattctcacattttttttttttttttggttttagagtgcctttatacttttaacttatttttgaaccccaataagcttttgtttagatgtgtcaaatctattaatgtttataatattagaaattaaaactgataaattttaaatgtctttaataaaatgtaatatttaataacatttaatttaaatacatataaaataaatgttatgtattaacataaatattaatacattataaattaaatgacatgttttatgaaaaatattcttcaaatccaaaaaaaaattggtgacaaaggctgcattggtttaatttttgcaaatctccttagcatctggttaatagttggcagctagattctcctgagtcaacattcaattt

SEQ ID NO: 146018 - DNA, 561 bp, Homo sapiens
tacgtttgttattctgtgtatttcctacaaaaatcttattgaccattagccctgaatccctgttttatggatgagaatactgagggtcatttattaagtaccttgctcaattccacacaagttagaagcaccgagatttgagcctagatayggtcacttctaaaatttattactaaaccagcaattctcacattttttttttttttttggttttagagtgcctttatacttttaacttatttttgaaccccaataagcttttgtttagatgtgtcaaatctattaatgtttataatattagaaattaaaactgataaattttaaatgtctttaataaaatgtaatatttaataacatttaatttaaatacatataaaataaatgttatgtattaacataaatattaatacattataaattaaatgacatgttttatgaaaaatattcttcaaatccaaaaaaaaattggtgacaaaggctgcattggtttaatttttgcaaatctccttagcatctggttaatagttggcagctagattctcctgagtcaacattcaattt

SEQ ID NO: 146019 - DNA, 584 bp, Homo sapiens
gtgcataggttttgcagttgcctctctgaggcgcttgaggggaaaacacaaggcaatctttccactttcccactttgccgcctcctggaactacctgcagacctgggctgggtttgcatcatggagatgacaggactagaagaaagaatgaccttgaggatgaaacaaagaaccccttccccctgccaaaaattaaaacaaacaaacaaaaaaccaaatatcctgattccatgggattgttttctgccttttaagacaaagacctcaaggggttgctcatgcttaagggatacttggtagaattgtcctactgttattttaataactaacaaaactggcttccatagtcactatcatgtccatagctggtcagactttttagcttggtgtttctggaggaaagcaaccattgtggaatgcaggtggcagatgtacctcaagtggcatttcagcgatagtagtagatcttttaacttattatttgttggagtttgaaacttastgaaggtttaatcaggtaccatatgttgtttgaagatgaatgcactggaggaaatctgtaaaagggggtggtgacattttac

SEQ ID NO: 146020 - DNA, 481 bp, Homo sapiens
gtttttgtctcagtaaaaataataataataataataaaatcctatgttaaatgctttggcttaagtttttgaaaagttcctgtgtaagaaggcagttgtgaccaactgaatgcttcaccagtgtcgtgagtgggagacatctggtttgaactctgcagagctcttacccagacacacacaaaggttgcttttttttaaagacaggacaagaaaaaacaaattctgctaccgagactaaaaggcgtttgagaccatgtcaaacgtgctttcggacccagagatgagcaagtccaaagaagcgacccttgattcttccatttctgggaacatccaggaccccagaaaaaatgaaggcagccgaagagcaacggcccagctgtccattggtttcccagcctcactttgtaccctttcctgagccctgcactggcagcccctgtctgggcacatccacyccatttgagtttcctttctcttttcc

SEQ ID NO: 146021 - DNA, 583 bp, Homo sapiens
gaagtattctttgttggctaagccactttctggttagttaaacactcaaaacaaagtggcttaatcaattaggaatatctcttatctcataagatttgctgattcagcagtacaataatattttcattgacgtaagttttgtgcatctatctgttctatcattaccatgttcactctgttcttttcttttttgagacagggtcttgctctgtcacccaggctggagtacagtgaggtgatcatggttcactgcagcctcaatctccaggactcaaacaatcctctacctcagcctcttgagtagctgagattacagtgatgtgccaccatgcctggctaatctttttaagtgtaagtgtgtgtgcgtgtgtktgcgtgtgtgtgtgtgtgtgtgtgtctgtgtgtagagagagggtctcactatgtttcccaggctggtcttgaattcctagggtcaagcaatcctcctccctcagcctgggattacaggcatgagccaccatgcccagcctactctactctgttctttattttctccttgtcatgagaagaaacccccagcagatatctccccaatgattca

SEQ ID NO: 146022 - DNA, 583 bp, Homo sapiens
gaagtattctttgttggctaagccactttctggttagttaaacactcaaaacaaagtggcttaatcaattaggaatatctcttatctcataagatttgctgattcagcagtacaataatattttcattgacgtaagttttgtgcatctatctgttctatcattaccatgttcactctgttcttttcttttttgagacagggtcttgctctgtcacccaggctggagtacagtgaggtgatcatggttcactgcagcctcaatctccaggactcaaacaatcctctacctcagcctcttgagtagctgagattacagtgatgtgccaccatgcctggctaatctttttaagtgtaagtgtgtgtgcgtgtgtttgygtgtgtgtgtgtgtgtgtgtgtctgtgtgtagagagagggtctcactatgtttcccaggctggtcttgaattcctagggtcaagcaatcctcctccctcagcctgggattacaggcatgagccaccatgcccagcctactctactctgttctttattttctccttgtcatgagaagaaacccccagcagatatctccccaatgattca

SEQ ID NO: 146023 - DNA, 583 bp, Homo sapiens
gaagtattctttgttggctaagccactttctggttagttaaacactcaaaacaaagtggcttaatcaattaggaatatctcttatctcataagatttgctgattcagcagtacaataatattttcattgacgtaagttttgtgcatctatctgttctatcattaccatgttcactctgttcttttcttttttgagacagggtcttgctctgtcacccaggctggagtacagtgaggtgatcatggttcactgcagcctcaatctccaggactcaaacaatcctctacctcagcctcttgagtagctgagattacagtgatgtgccaccatgcctggctaatctttttaagtgtaagtgtgtgtgcgtgtgtttgcgtgtgtgtgtgtgtgtgtgtgtctgtgtgtagagagagggtctcactatgtttcccaggctggtcttgaattcctagggtcaagcaatcctcctccctcagcctgggattacaggcatgagccaccatgcccagcctacwctactctgttctttattttctccttgtcatgagaagaaacccccagcagatatctccccaatgattca

SEQ ID NO: 146024 - DNA, 553 bp, Homo sapiens
cttcaacagataattactgtctgacaattaaaggtaacttatttcaaagcccaaattatcatgtcygacaaatgttctccaatattaaattgcttctaaccaataattctacatattatctatgaacacacatttgcagatgccatatttctttgattttaagatgcaattttaaaaattataaacatctgagaaattggggcatgtcttacaacccatgtgtagatttaatgttttagtgtatccttttttgagtggccattattattttatagtcttagaatgaagtcaacatttttcacaattaggtatatgatgggcctttgatgtgtttttataagccaggtggatgcttggtaatgtccacagtgagcattttccaggttaaaagcattgtggctctctaggtcagagaatatgggagcctcattcaactataagtctaacgtattacagtaagtttcaaacagtctttgaggaatgtgctgaccaagtctgcaggttcttcttcagcctccttggtgtggtgtggaattggaatgcctgtttttat

SEQ ID NO: 146025 - DNA, 553 bp, Homo sapiens
cttcaacagataattactgtctgacaattaaaggtaacttatttcaaagcccaaattatcatgtccgacaaatgttctccaatattaaattgcttctaaccaataattctacatattatctatgaacacacatttgcagatgccatatttctttgattttaagatgcaattttaaaaattataaacatctgagaaattggggcatgtcttacaacccatgtgtagatttaatgttttagtgtatccttttttgagtggccattattattttatagtcttagaatgaagtcaacatttttcayaattaggtatatgatgggcctttgatgtgtttttataagccaggtggatgcttggtaatgtccacagtgagcattttccaggttaaaagcattgtggctctctaggtcagagaatatgggagcctcattcaactataagtctaacgtattacagtaagtttcaaacagtctttgaggaatgtgctgaccaagtctgcaggttcttcttcagcctccttggtgtggtgtggaattggaatgcctgtttttat

SEQ ID NO: 146026 - DNA, 477 bp, Homo sapiens
ggggttgggcaggtcattgtcccaaaaagagggccaagaaaagacaccatgacttggaagaattctggagataatcctagaagaggaggaagtgaggactcctactggcaaatcaaagggtccagcccagttgtttgtttgtttgtctttaccttgttctactccataccctagcactgaactcagaagattcccatttcagcccccatctgtggaggagtccamgcatcatccattgccctggcacgtcgcattcatcaggccaccaacctgcacctccttttctggagaaagctgtgccaccttcccttatggataactctagccacagggtgaacttagaccaagctaatttgatatccagtatcagagaatcatctagctttggtggagagggaggtgaggaaagtaggcaaatgcaacttaaataggaagccaggtcaggcctgcaaaaagtggtcagatttaaggttggca

SEQ ID NO: 146027 - DNA, 477 bp, Homo sapiens
ggggttgggcaggtcattgtcccaaaaagagggccaagaaaagacaccatgacttggaagaattctggagataatcctagaagaggaggaagtgaggactcctactggcaaatcaaagggtccagcccagttgtttgtttgtttgtctttaccttgttctactccataccctagcactgaactcagaagattcccatttcagcccccatctgtggaggagtccaagcatcatccattgccctggcacgtcgcattcatcaggccaccaacctgcacctccttttctggagaaagcwgtgccaccttcccttatggataactctagccacagggtgaacttagaccaagctaatttgatatccagtatcagagaatcatctagctttggtggagagggaggtgaggaaagtaggcaaatgcaacttaaataggaagccaggtcaggcctgcaaaaagtggtcagatttaaggttggca

SEQ ID NO: 146028 - DNA, 605 bp, Homo sapiens
tgtggggcatgtcaagataccccttctaagatgaaggatgagcttttgcatctggcctatcctacaaccacaaaagaacaatacctagtgcatctctttggattttggaggcaacacactccttgtttgggtgtgctactccagtccattcaccaaatgacctgaaaagctgctaattttcagctaggtctagaataaaagaagtctcttcaggggttcaggctgttgtgcaaactgctctgccacttgatccagaagatgctatgatgtgtgaagtgccagtggcagatagaaatgctgtaggtgaatcacagcacatatttttaggatgtgctggctcctgccatcctcttcaaacagccagcctttctttgagaaactgcttttggcttgctactggactttaaaagagactggacacttaatcatgggccaccaagttaccatggaacctgagatgcccatcatgaactgatccaccaaaccatactgttggtcttgtgctggagcacactattatcawatgaaagtgacatatatgagactggactcaagcatgttctgaaggcacaagtaagatatatgaggaaatggttcaaatgtgc

SEQ ID NO: 146029 - DNA, 619 bp, Homo sapiens
attgacagatccttctctgtgctgtgagaacactctcctttggcagagaagcagtgtggtctgagcagaagcagagcaggatgtgtatgtgtgccctgtgaggggtgagaacacatggttctgtttcttccaggatccaggatattacgggacagctgtgctgctgagaaattgttgacctccaatgagttggtcctcyacagcattcaggagagccatgggtgtgacagagattgcccttttgcaggaggaaacacagttcacacctctgtccatctgcttctctacgtactcatgtctgagaactccatgtcaccagcaaaattgtgaagctgagccccacggatcattgttggaacgagatggaatctagcccagcaaggacaggtgaaacatgtgtagatcctgtgttagggctgatttgttatgggaccaaccccctgcccactggatactgaaattacaatttgaatgttctgaaacattttcaatggtgcaggtgcacagcagacggacttgtggaggatataatggccagagatttcccaagtctctaccacttgcctttctctttcttctcagaaaaaccagctttccaaggatccacaacgggactggt

SEQ ID NO: 146030 - DNA, 460 bp, Homo sapiens
tgtcactcagctggccaggatgccatatggtcttgtcattgygcttgtatcttctcttgcttctattctgtttgctgagaactattgctcaaattgcaacttagggaggacactctgttcttattacattgtcttcttcacatcttagatgaattaataaatgaataaatagaataccagagaatatttcatgatttactagatctgttcatatttagctacaattaaatgtttgtgatttccattctcaactgtcttcccctactggaggagctagtggtttttctgttttatgtggtttcatgttcctctgccagataaaaacaccactaccctggaatcctagagagcttgcctggggtaacagttactttcgagtgtttctctttgtagtctctattccatgagagaccatagaacctgtctgggggagggcagcagggaagattccagagaattc

SEQ ID NO: 146031 - DNA, 383 bp, Homo sapiens
gtgatattatgtgaaaatagctccttgagccttggaaatgtcagcatgctgagtgtatgacaggtaatgaaagaggacttttcccacacattagttttacaggattattggcctaagttgtggagtaatagacataaatcttgtttgaaaatagaacatcacacttctaggtagacttaacaccatgagaacagtcagtgcaagttggagcctggctgggtgcaagcacaaggtaagagctattgatttttaaatctctttgggtagcagaagcctgtaagaagtggcatgtatgccccattccccactttcttgtctrtgacagacatcactaacaaattataacaatgtttctgactttgcctagttcagtctcagaattc

SEQ ID NO: 146032 - DNA, 327 bp, Homo sapiens
cctgacacagaaatattccaagcctgtgataagccctctcgccctgaacccttaaatattcttagtctgtaaaagagaatgctcctggccaaaattgaccagaagcccctctcaggtttattctccaaaataaacctgtctttgactgttgaaaaataaataaataaataaatwaattaattaataaaatttagaggatgaagaaggttgcttgcagaaatgaaactcaacagaaagagagacagagacttatcagacttattggattgaagaagaggtcctatgggactaggaccctagacttctcaagatagggcactggttagc

SEQ ID NO: 146033 - DNA, 625 bp, Homo sapiens
ggtcagatttatacccatttttaattatatgcaaataagggatggtttatgcagaaatatctaggaaaagggtggcaacttctggattgtcaggatcattgccatgaaaaggagcggcggtaacttctgggagttgccatggcaatgggaaagtgacatggcacagtggtgggcatatcttatggaaagctgcttccaccttcgacctgttttagctagtcctcaatttggtcyagtgtccaagccctgcctctggagtccagtctttcctcctacctcagaaccacccaaccaagctgagcctacttccttgaccaaaataaattttgagataaaatattttttgttttaagccagtaaattttggtgtattttattaaacgacaatagaaaactaatataaaccatatgaagaagcaaagctgagttgcactggtaggaaccatgagcaaagaggaagggtggttcccttctcctgcctgtagcctctcctcccagcacccccagcaccaagcactgctctgcttgcctagcagagtctaacaagttagatagcaaagcagaatgcaatttgcaggacctcacatttctaaagacagtagcctaatataatagctagtgccgt

SEQ ID NO: 146034 - DNA, 460 bp, Homo sapiens
catacgagagactcttcatgaagcaaagctcactttagagtagggaagatgtttttaaaaaaagttttaaaaagaataagaaaatattgaactgaaaagaaatctatttaaaatgcaaayggaagacattttaacagaatccataggcatcatctcttagaagggaagtgcacacacatatgcatacacacacatgcacgcacacacacatgcacgcacaatcttgaccttgaccagttatcagatagactttaagaaaatgacaattctgtggcattgttctcttaatctattgggctacttccagttatgagttctggcatttcagagaatcctgcttccatttactttgaagaaggaggaatttgcaatcatacattctcataattcacagaaaattttaatgagtaataaatgaaagtgtcatcaacaatcaaaatatgtgagatagacggaagaa

SEQ ID NO: 146035 - DNA, 560 bp, Homo sapiens
cagagaatcctgcttccatttactttgaagaaggaggaatttgcaatcatacattctcataattcacagaaaattttaatgagtaataaatgaaagtgtcatcaacaatcaaaatatgtgagatagacggaagaaactttgctgaatgaagtcttaattctagactggaaacatggtaaaatcaagtgatttctcaatctaaagccctttctagataactgttggcttctctggaccatgcacaagtagtgaaaataattgtttaaattacatcgagcttcgaagctaaatatttyacctataccattaaagtgtaagatagagcctaaagcctaaccacacggcagaaattatttttcccagataagctgtggtgagaaatgaacaggcatctaagaggcagaaatcgtgcattttctttctccttggacatcgcaaccttctcatcaatattaatcatgaagtaatactatacatatactatgcctgagcttttcaggaaatgaatgtgtatatctgcttaaaagtgattttattgtattgtttaaaatgtgtaatgt

SEQ ID NO: 146036 - DNA, 560 bp, Homo sapiens
gcaatttacaaagaaaggtttaattggacttacaattctacgtggctggggaagcctcacaatcataatggaagacaaaaggcacatctcacatgacgacagacaagagaagagagcttatgtggggaaactcccctttttaaaaccatcagatctcgtgagactcrttcactataatgagaacagcagagaaaagacccgaccccataattcaatcacttcccactgggttcctcccatgacacgtgggaattgtgggagttaaaattcaaggtgagatttgggtggggacacagctaaatcatatcagaagcaccaagcatttcaatcacctttgcgtctagattttacaggtgtagaggagaggcctctttgcacaggtggccatattaaatctacaacgttttattatgcccaagtctgtagccagggagcaagggggtggatcaggtgctgctcataggctctgctgtaactaacagatctctccggttgaattatttcctctctctgggtttagtttctgtataagatacagaaattagatgtcatgataccca

SEQ ID NO: 146037 - DNA, 519 bp, Homo sapiens
gtggcccacgtatcgcgatccatgtgggggccccagccagactctacctgcatgtgcagctggtttccaggttctattcctagtctcagttctttcctctttacccagaaactggaaaataaaccctgccagggtcctggttcctgtcgctgtcctctggggctcctccaggccaccgtgacagggcccactggctgtgccaggttctaccacagctgggtccgaaggtgctgcacacaggatgccacgtgcactcccttgggtcagtagatgccgaatccagaatttcaaattgacctgaggggagggtgttgaagctgcatttccgcccttcctggtggatccctctgtctcctgtcttctccacgcttcctggtttgtgcaagggtttccttcgtcagtagagatagcatgggccactttacrtggtccatgttttctgatcctagtgataagaagaggaattgggaagatatataaagtacttcatggagcttaaataattctttcacgtgaatt

SEQ ID NO: 146038 - DNA, 567 bp, Homo sapiens
gagttcagggttgccttttccctttggctccagggaactgctgctggatttgagctctgcaaaaaaaaaaaaaaaaaaaaaaaatgctgactctggattcaagggaggcacaaagggacccaggaaggcctgattcacagggttccattcccaggtccccttcccttccgccaaggccagagttcaggttgaaatgtgaggcaagtttcctggcttcctcacctgactgtacttggagctaaaagcaaagccatgcctccaacagccatgagcaggagaaacgcacgattcccaggacaactgtggctacgatttgagtgccagcacgaaataggagcagcttaatggctggagaagaagactttgaagagctctctgctgctttttaaataaaaatttgcagagggagattatgactaagagagtgggtamccagaggctgacctggagcccccaggagtcatgcgcacgctgccttttgatgacgatgccagcatgaagaggtggcctacccacagccctgcatccattctgtcctcgccttgataaaaatcagtcactgaccaa

SEQ ID NO: 146039 - DNA, 409 bp, Homo sapiens
tcttagattagattggtagattcagtcatttttaatcctttcgttatcttcatttaatctcagtttagataagatttcaaggtatgtgacttaggtaggtcacttatgttagttatctattgctgtgtaataaattactccaaaacacattggcgtaaaayagcacgtattgacaatctcatggtttctgtgtctcagaagtctggaagtggcataacaaggcctctgcttcatgctcttccatgatgctgcagtgaggtgttgagcagggctgtggtttcatctgaatgctcaattagggaaagagctgcttgcatgctcagttccaaggccttggttcccctagagctgctggaccacgggcctcagtttgtccctggctgttgaccagaaggcaccctcagttcat

SEQ ID NO: 146040 - DNA, 610 bp, Homo sapiens
cagcaagtcaagtcctttgctgttcttctgcctgctttattctagctatgctggcagctgattaaatggtgcccacctggattgagggtgggtctgactctctcagttcactgactcaaatattaatctactttggcaacaccctcacagactcacccaggaacaatactttgcatcttttaattaagttgacactcaatattaaccattacaacaaccaagtgggatttatcccagatatgcaaagccagtacratattcaaaaataattaatttactttatcacatcaatagagaaatcacataatagatacagtcaaaggattttacaaaatcccatgctcattcttgattaaagctctcagtaaactaaaaatagtgaaccatttcctcgacttgatatagaatatctataaaacatctacagctaacattatcttttatagtaacaaactcaaagatttttcactaagatcagaaacaaggcaatgatgttctctctcaccacaccttttcaacattgtactagaagttctagctaatgcagtaaggcaataagaggaaatagaagtatgctgattgggaagtaagaaataaagttttctttaat

SEQ ID NO: 146041 - DNA, 610 bp, Homo sapiens
cagcaagtcaagtcctttgctgttcttctgcctgctttattctagctatgctggcagctgattaaatggtgcccacctggattgagggtgggtctgactctctcagttcactgactcaaatattaatctactttggcaacaccctcacagactcacccaggaacaatactttgcatcttttaattaagttgacactcaatattaaccattacaacaaccaagtgggatttatcccagatatgcaaagccagtacaatattcaaaaataattaatttactttatcacatcaatagagaaatcacataatagatacagtcaaaggattttacaaaatcccatgctcattcttgattaaagctctcagtaaactaaaaatagtgaaccatttcctcgacttgatatagaatatctataaaacatctacagytaacattatcttttatagtaacaaactcaaagatttttcactaagatcagaaacaaggcaatgatgttctctctcaccacaccttttcaacattgtactagaagttctagctaatgcagtaaggcaataagaggaaatagaagtatgctgattgggaagtaagaaataaagttttctttaat

SEQ ID NO: 146042 - DNA, 533 bp, Homo sapiens
attatttacttattaacattcaccaatgtgagtatacattatcacatttgtcagaataaygaatggaaggtgaaaacattattatatagacatacataaaagttatttgaaaaagttccacacattcattattcaaaaaaaaagtcttggcaaggtcttaatagaagaaaactgtctcacgcagataataagtattcatttaaaaaatatattcaaaacttcatcattagtgctgacaatttagaatcgatcacattaaactcagcaataatacaaacatgcctattatccctgcttctattaaagtttatactgatttaacaagacaaaagtaaaaaagcaatataagaattagatatgagagagtacaatgtctttttatgtaagtgtgattgtctatagacaaatccaaagtaatcaaattggcctccagcacctttgctgagagtgaggccaatacaaaaatcaatagtcgctttatacactagtaatgaccactgtaacaaagatcccattcatgatttcaacaatac

SEQ ID NO: 146043 - DNA, 533 bp, Homo sapiens
attatttacttattaacattcaccaatgtgagtatacattatcacatttgtcagaataacgaatgraaggtgaaaacattattatatagacatacataaaagttatttgaaaaagttccacacattcattattcaaaaaaaaagtcttggcaaggtcttaatagaagaaaactgtctcacgcagataataagtattcatttaaaaaatatattcaaaacttcatcattagtgctgacaatttagaatcgatcacattaaactcagcaataatacaaacatgcctattatccctgcttctattaaagtttatactgatttaacaagacaaaagtaaaaaagcaatataagaattagatatgagagagtacaatgtctttttatgtaagtgtgattgtctatagacaaatccaaagtaatcaaattggcctccagcacctttgctgagagtgaggccaatacaaaaatcaatagtcgctttatacactagtaatgaccactgtaacaaagatcccattcatgatttcaacaatac

SEQ ID NO: 146044 - DNA, 539 bp, Homo sapiens
tagacattacagaattatttacttattaacattcaccaatgtgagtatacattatcacatttgtcagaataacgaatggaaggtgaaaacattattatatagacatacataaaagttatttgaaaaagttccacacattcattattcaaaaaaaaagtcttggcaaggtcttaatagaagaaaactgtctcacgcagataataagtattcatttaaaaaatrtattcaaaacttcatcattagtgctgacaatttagaatcgatcacattaaactcagcaataatacaaacatgcctattatccctgcttctattaaagtttatactgatttaacaagacaaaagtaaaaaagcaatataagaattagatatgagagagtacaatgtctttttatgtaagtgtgattgtctatagacaaatccaaagtaatcaaattggcctccagcacctttgctgagagtgaggccaatacaaaaatcaatagtcgctttatacactagtaatgaccactgtaacaaagatcccattcatgatttca

SEQ ID NO: 146045 - DNA, 405 bp, Homo sapiens
atctttcaaggaggtgcacatgacagaggatgtgtgtcacatacaccagagtgataatgaaacgttaattaaacatatgattaactttgacctgaaatagtaggtgcctctgctaaaatcacacacagaaaaatgatacttggtgtgatttattrtttacattgtacaagtgccctaaaaatcaacaaaaagtttaaaataaaatgaggtataagttttggagaagaggaagcaaaattactattatgtgcagtcaatacgattattacataaaaaaatcaagaaaagtgacaaattatatttgggctaaaaagataataaagtggtttattacaaaataaacacagataaattattagcttttccatatagtcatggagtaatagcatttaatggtataaataa

SEQ ID NO: 146046 - DNA, 550 bp, Homo sapiens
gatgtggtcacatgtgtggtcacaagggttgggggttgaggaaagagatattcagaagaagaagagagagcgaagacttgggaaacataaacactgagggcacatctcatagaaaaaatggaaaagaataaccaaaaagaagagaaatttgatcaacaggktcaaatactgctaagaagaggagcagatgagtacctatgttgtctgttggattccatctttgtaagagaagtctcccaagtgggtgagaagctaatgttactatagctgatgctgctcaatctttcatcaaaacatccttcatgtcagaggggagcaaatgcttccaactgggcagggttggagggtggtgtcggggcctctagaagtgtttaagagtctgacatttatttaaagttttgtacttgatttttaaaatcattttaaattttggatcctattccataaaagatctatagaaaataatatttcacaatagtaacaatcagaaaaaagactggaaaaatggtttatctttctggtttgaaagggatgagtgtcatacatttaa

SEQ ID NO: 146047 - DNA, 550 bp, Homo sapiens
gatgtggtcacatgtgtggtcacaagggttgggggttgaggaaagagatattcagaagaagaagagagagcgaagacttgggaaacataaacactgagggcacatctcatagaaaaaatggaaaagaataaccaaaaagaagagaaatttgatcaacagggtcaaatrctgctaagaagaggagcagatgagtacctatgttgtctgttggattccatctttgtaagagaagtctcccaagtgggtgagaagctaatgttactatagctgatgctgctcaatctttcatcaaaacatccttcatgtcagaggggagcaaatgcttccaactgggcagggttggagggtggtgtcggggcctctagaagtgtttaagagtctgacatttatttaaagttttgtacttgatttttaaaatcattttaaattttggatcctattccataaaagatctatagaaaataatatttcacaatagtaacaatcagaaaaaagactggaaaaatggtttatctttctggtttgaaagggatgagtgtcatacatttaa

SEQ ID NO: 146048 - DNA, 569 bp, Homo sapiens
gtgtgggctgggcccctgtgagagtccacagtttttgataaaaacagatataaaatcccaggaaacatagagctgaaaattcattgttgggggcgtcactaacagtcactctctctcttcctctcaagtgacacgggaaactttagattgccaaactaactccctcctggctcttccatctggtacttcccaccgtcaccagcaacgaaccttgctaaggcgagaatcctgcatgcccaggcggtctcacaagacagccaaatcctgtagctctgtgaacagtcacttccaggggcacaaatgtgtctcctctaactcctttctctgtgccagatttcatgacatctgcaaaaatatttagaatatagacctataatgaacttttatttataccattgtatttcaagatggtaaactcagtgcatatcatgatagcttttacaatggacttattttgaaataaatcacagtcaatataaacaagaatatatatttatagaaaaattacaaaatattttgtaatttgtgaatcattactsttctttgaaaccaatgagaacaaagacaca

SEQ ID NO: 146049 - DNA, 454 bp, Homo sapiens
ttacttaaatagacctactgtatgagacaatactattaaaagaaaatgtactagtacttttgtgtatgcctgaagaaatcagtttgctaattttaggactttgccaggtggactgaygctgatttccaagattgtctggccctatgtctttcttgacatactagaaaggacatttgatgtacacactgtgatatgtacagggaaaccatagcccttgtcctgaaatgacttaggaaataaatttgtctatccccactgcctttgatcttattaaaagtcatcgaggcttattcctagcactgagaacatagaaacaggcatttgattatgcgcacatcacatggtgatacgatggtcttgccacgaactggaagcattctgtcaaattagaacattgatttcaattagtctttgtaaacaagagttactgatcaactgttctaaaataaaatgt

SEQ ID NO: 146050 - DNA, 640 bp, Homo sapiens
ttctattcccatgtggctgcatgtttcataaggagagctactaaaatgcaggaaagcacaaagtcttaattgcttgctagtgggcactcagccaacacgctgttagcagaatgaaatccaatcttagagaaaaagtgctgaacctcggctctggatcgcccaagccccayatggattgcgtgtgttttgggggaagatttggatatggcagtcttttttttcactcttttgaatgggaatgtcaatctatgggttactagaacattttattcttaatataataatcccagctgcaaaacaacattaagagggaacactgcacctcttctccccacttatgacatggacaattaatacattctcattttttgtgcttctctgaaaatactactttcaatgcaatttccaaccaaattgttactttgaagaattcatacatagtcattctgaaacatccctgccttgttctgttgtttgctatttgatctttgataattaatctccctaaatctcagttgacttatctttataatgggaaaaataaaaatgctttcctgacagggatgctgtgaagactcaatgagattcaaagctcttggcagtgtgtggcacaaacaataatgtccaatatatgttaact

SEQ ID NO: 146051 - DNA, 640 bp, Homo sapiens
ttctattcccatgtggctgcatgtttcataaggagagctactaaaatgcaggaaagcacaaagtcttaattgcttgctagtgggcactcagccaacacgctgttagcagaatgaaatccaatcttagagaaaaagtgctgaacctcggctctggatcgcccaagccccacatggattgcgtgtgttttgggggaagatttggatatggcagtcttttttttcactcttttgaatgggaatgtcaatctatgggttactagaacattttattcttaatataataatcccagctgcaaaacaacattaagagggaacactgcacctcttctccccacttatgacmtggacaattaatacattctcattttttgtgcttctctgaaaatactactttcaatgcaatttccaaccaaattgttactttgaagaattcatacatagtcattctgaaacatccctgccttgttctgttgtttgctatttgatctttgataattaatctccctaaatctcagttgacttatctttataatgggaaaaataaaaatgctttcctgacagggatgctgtgaagactcaatgagattcaaagctcttggcagtgtgtggcacaaacaataatgtccaatatatgttaact

SEQ ID NO: 146052 - DNA, 503 bp, Homo sapiens
cagtactttaaagaacatatgcagaaatatttgattgattttttttctgtgtttcaggctatccttgtgaggattctgctatattaggcctatcagaacccagaagcaaaaatagtgctgatttttatacatgctttcatccagatctacaagcagaaaatcaaaggctgtggatcctttttaccctcataatctaatccaaccctyatccaaacatttgcatcagaagggatcataaagcctctaaattaatagcatatatgataaaagcatatatgaaaaaatgtaaagtcttatagcctgtcatttatcagacatcttatttgcatgataagaacagcccttaacacaagaaaaattcaaactctgggcatcacagataaaagtcaactggtttagctctcattcatatttcagaaatttactcaaatacttttgtacacatggttgtagccaagagttgaaaaaatatgagtacatgtacatttacataaataaatatt

SEQ ID NO: 146053 - DNA, 601 bp, Homo sapiens
aaaccaatttatgaaccactatgaaaaaaggaagttccacagaaagttaaaagtagaactgccatatgatccagcaatcctacttctgggtatatattcaaaggaaatggaatcattatgccaaagagatatctgcactcccttgttcattatagcattattcacaatagccaacatatgtaaacaacctaagctgatgaatgaatggataaagaaaaatcgaattatataaaaataatattttatcattatatctatctatctgtctatcaatctatctatctaaaatgaaatgatattcagccttggaaagcaaataaaataaaataaaataaaaaacttccacttgtgacaacacggataaacctggaggacattatgctgagtgaaataagtaataagccagacacagaagaacaaatactgcaaaatctcattgatatgtggaatcttaaatttgcattcataaragcataaagtagaatagtggttttcagaggcctggggtgtgaggtaaatgggaagatgctggtcaagggttctaagttttaattatgcaggataaattagttctgaagatgtaatttacagcatggtaaac

SEQ ID NO: 146054 - DNA, 353 bp, Homo sapiens
tagaattgttaaggaagagaaagaaaagaaacgtaatttaaactgcttatttcttctttctgacactgttctttcaagcagtggagaaaaaaaagacaagtaaaaaaacaactccatggttttgtgaattcgtatgttttgtttgtgctgtttgcagcttggttgtctttcatttttgggaatgttcrttttgcatttcagagaacagcgtgccattttgtggatgttatcattatggccttttagcccagaattaccactgctgtcacagccactagaaggaaatgctctcccactcatttctctgataagaagctgcctcatatcctcatacttcctggggttcactagct

SEQ ID NO: 146055 - DNA, 353 bp, Homo sapiens
tagaattgttaaggaagagaaagaaaagaaacgtaatttaaactgcttatttcttctttctgacactgttctttcaagcagtggagaaaaaaaagacaagtaaaaaaacaactccatggttttgtgaattcgtatgttttgtttgtgctgtttgcagcttggttgtctttcatttttgggaatgttcattttgcatttcagaraacagcgtgccattttgtggatgttatcattatggccttttagcccagaattaccactgctgtcacagccactagaaggaaatgctctcccactcatttctctgataagaagctgcctcatatcctcatacttcctggggttcactagct

SEQ ID NO: 146056 - DNA, 417 bp, Homo sapiens
aagtgtcagagtttactcaagttggtagtgttgtctcatgggtaaaaattagaaaaaaaataaatcactggtgtcatggaacttgtaacctaatggaggaggatagacaacacaaagaaacagaaagatggataatctttcaaactcacaatctcaacaaattgtcctacttaaaactgcaatttcttatcagcagtaagcatttgtcaccagctgacatattatatcttttatttgttgatttgattaatacctttttcctgcagctagaatctgttttatttatttgtaaacccaaggagtatagaatagtgtatattagagartgggacttctataaatagctgttgaatgaatcagcaaattatatatgttagaaggtgataagtgatagcaaacttaggagaaaacagttgc

SEQ ID NO: 146057 - DNA, 417 bp, Homo sapiens
aagtgtcagagtttactcaagttggtagtgttgtctcatgggtaaaaattagaaaaaaaataaatcactggtgtcatggaacttgtaacctaatggaggaggatagacaacacaaagaaacagaaagatggataatctttcaaactcacaatctcaacaaattgtcctacttaaaactgcaatttcttatcagcagtaagcatttgtcaccagctgacatattatatcttttatttgttgatttgattaatacctttttcctgcagctagaatctgttttatttatttgtaaacccaaggagtatagaatagtgtatattagagaatgggwcttctataaatagctgttgaatgaatcagcaaattatatatgttagaaggtgataagtgatagcaaacttaggagaaaacagttgc

SEQ ID NO: 146058 - DNA, 577 bp, Homo sapiens
cacacaccatagtcatcacaccatattgctttttttttttttttttacttgttggcaaccttgatttaaacactasctccttgaaggtaatgtctctgtcctgttcaccatcatatctctactatataacacagggttataatatataaccttatatattataaaattttataatttaaattatataattaaactctaattagtaaatcaatttatatgttttgtacttttaatcaggttgaggataattcaggatgaaatcacatgactttatttgcctcagcacccagtgcattgcgtggtatagaattgaaagtatgtaaataattgtcaattgatgtaactgaattcatactatgaatttctctattcatttgaatttcttcacctacaatattcttgccgaaaggaagtcatgtcctaccctgaatattcccttgggtcatcagttctgaatgatacaaaatttaaatcaaatcaaatatttttcttcttttgctgtcagtagagagactaaaatgggaaaggtgagaggaacagagagaaatgatcagattagcagctttgaaactgtaca

SEQ ID NO: 146059 - DNA, 286 bp, Homo sapiens
gcttaaagagaggacttgaaatgttccaaatacagaaatgataaatatgtgaggtgatggatatcctaacttgatcatcacatattctatatgtgtaacaaaatatgacatctaccctgtaaatataaacaatatgtatcaataaaaaaaattttttttgagacagagtctcactctggcgcccaggctggagtgcaayggcatgatctcggctctgcaatctctgcctccctggttcaagcaattcccccgcctcagcctcccaagtagctgggactacaggctt

SEQ ID NO: 146060 - DNA, 255 bp, Homo sapiens
attcttttttattcattactggtatgattttataatattttgtttagtgcttttatttgtatgttcactagatamattgttttgaaaatttttccttgtaataacctggtgaggtcctgatattaagattatttggacttagaaaatgagttgaaaaatgtttcctctttttttcttcgctagagaagtgagtttggattgatgctgtttcttcaaatgcctggaaggaaagactgactctgacagtttggatca

SEQ ID NO: 146061 - DNA, 369 bp, Homo sapiens
agaattgaaatttgggttattcaacctctgtctgtgatccttaggtttatcatgttatgcttaaccacctttttggccctcatatgtaaatctgaatcataagattagtttgcaactgaaataaagatgacctattagaacactatgcctggcacatagtagatactraaaaatgatatgtcttttcttcccttcctcaattttcttcctttctttagaaaacagttacttcaatgccacatggttttattgacatctaaaatgtatatacaattgatttttagtttgggcagtggagggccctcttaaatacatcctggcagataaaatgccatgatttctctattactgcatgatcatgactgggag

SEQ ID NO: 146062 - DNA, 369 bp, Homo sapiens
agaattgaaatttgggttattcaacctctgtctgtgatccttaggtttatcatgttatgcttaaccacctttttggccctcatatgtaaatctgaatcataagattagtttgcaactgaaataaagatgacctattagaacactatgcctggcacatagtagatactaaaaaatgatatgtcttttcttcccttcctcaatttycttcctttctttagaaaacagttacttcaatgccacatggttttattgacatctaaaatgtatatacaattgatttttagtttgggcagtggagggccctcttaaatacatcctggcagataaaatgccatgatttctctattactgcatgatcatgactgggag

SEQ ID NO: 146063 - DNA, 369 bp, Homo sapiens
agaattgaaatttgggttattcaacctctgtctgtgatccttaggtttatcatgttatgcttaaccacctttttggccctcatatgtaaatctgaatcataagattagtttgcaactgaaataaagatgacctattagaacactatgcctggcacatagtagatactaaaaaatgatatgtcttttcttcccttcctcaattttcttcctttctttagaaaacagttacttcaatgccacatggttttattgacatctaaartgtatatacaattgatttttagtttgggcagtggagggccctcttaaatacatcctggcagataaaatgccatgatttctctattactgcatgatcatgactgggag

SEQ ID NO: 146064 - DNA, 581 bp, Homo sapiens
ctttgtcagaattaactaccagagatatgaatatgtagtgcattatgtgaagatgcaacatggcaactatggtcacggggacactttttcaatagcttttttttcttggagttctccagagttatgttgcctgatggagttgccaaggaaaacagaaggacagtgagaaaatattgccattgaatagactcttgtggggtttgttacaacccctaagagacttggcattctttctggcttgccctggctgatcaatgtcatgataatggcagatgatggagatccaataagtgggaataacaaatacatagtaggaaaattttcatgatcatctacatatgggacattctaaaatttgctgtcaggtctcaaaagaattaagaggtggaaataaaatactatcctttcatttatcctgtttccttttctgaccacctagccctataagctttggagatgtgagtaagttaagaaaartatatgaggataaaaatgaagacattatttgtacttaatcaaaagcagatcttgagcctgcagaataaaactgaacactggttgagcaatttatctgaaatatt

SEQ ID NO: 146065 - DNA, 374 bp, Homo sapiens
aacagaacaaagacaaataacatgatttttatctcaatagacacaggaaaggtttttgataacattcaacaccccttcgtgttaaaaactctcaattaagtaggctttgaaggaatatatctaaaaataatgagtcatcaatggcaaacccagacccaacatcatattagatgggcaaaaactggaagcattccccttgaaaactagtacaagacaggtattycctctctcaccattcctcttcagtatagtattgacgtcttggacatggcaatcaggcaagagaaagaaataaaatgcatccaagtgggaagagaggatttcaacccatccctgttggcaggcaacatgattccatatctagaaaaccccat

SEQ ID NO: 146066 - DNA, 374 bp, Homo sapiens
aacagaacaaagacaaataacatgatttttatctcaatagacacaggaaaggtttttgataacattcaacaccccttcgtgttaaaaactctcaattaagtaggctttgaaggaatatatctaaaaataatgagtcatcaatggcaaacccagacccaacatcatattagatgggcaaaaactggaagcattccccttgaaaactagtacaagacaggtatttcctctctcaccattcctcttcagtatagtattgamgtcttggacatggcaatcaggcaagagaaagaaataaaatgcatccaagtgggaagagaggatttcaacccatccctgttggcaggcaacatgattccatatctagaaaaccccat

SEQ ID NO: 146067 - DNA, 374 bp, Homo sapiens
aacagaacaaagacaaataacatgatttttatctcaatagacacaggaaaggtttttgataacattcaacaccccttcgtgttaaaaactctcaattaagtaggctttgaaggaatatatctaaaaataatgagtcatcaatggcaaacccagacccaacatcatattagatgggcaaaaactggaagcattccccttgaaaactagtacaagacaggtatttcctctctcaccattcctcttcagtatagtattgacgtcttggacatggcaatcaggcaagagaaagaaataaaatgcatccaagtgggaagagaggatttcaacccatccctgttkgcaggcaacatgattccatatctagaaaaccccat

SEQ ID NO: 146068 - DNA, 628 bp, Homo sapiens
tttcatttaatctccagctttcttaggctgaagctttatttaggactcttatttccactatctatttcttttaggtctagggccttattcttgttgctctgcatggttcttcagtcctaaggttctttgttggtggcttctgtagacaccttcartgtagcatgtgtttttatcactcatcactgtatgtttgactttctctttgtaaattttcattgaacattgtaaattacctttactttttcttcagactggtgctacattttaaaagataatgttttacctaatttagcatttctaggtgtttgcaaaaggagggatttttagaatatctaaaacaccatagtactgggagcagacaccttacagttaagtcttcattcattctggattatactctttatcattataaaatttctttattataaaatcacttagttctttcctttcgtcctctgaatgtgatctgtaattagtatcccaacaactatttcattctgtccatgctttcctagcatgcctttaaccatctttttattttcaacgtttttgaaacctttagataaatttttatgttacaaggttaggtttcactttgttactcagtttgtcttttctcttaagtaac

SEQ ID NO: 146069 - DNA, 587 bp, Homo sapiens
aaattctgtcatctttcctgtatgtgaaaagtttttatagtaagatgctgaggcaagaagataatatctgttctttaaaattgtcgtaaggattacaggagataaatgtggaagggctctgctacactatggtggatttacagattttaaagatgattaaaatggtagaatggcataacaaggggagattaaggagctaaggaaacaaagagsttttacagaactaataagtaaattagaaacagaaaagaaaagacatgactgattaccaagtttctggcatagaggaaatactgaatataatcaaaattaatgcagaatgaaaagataacatgattaaagtaattaaacagatatcaatggacatgaaaagcaaacaaaaagtatccaacttatggataaatggtatccctaaatgagggaacctaccaaatggaaatttaaaatatccaatgaaaatgagaaaaaaattcctgaagaaaaaggaagaatgtataactaaagtttgaatggacacaacatatttcagaagataatgatacaggaaaatcaacatcaaatcatttgctaggataaagaagaaattc

SEQ ID NO: 146070 - DNA, 331 bp, Homo sapiens
cctaaatgtgaagaccaaatctgtccttaactctgcagccaaagaaaatttwaaaaatctaatcacatcaccttcttctccttgcccttagaataaaaaccagaatcccatagaaaggtcagcgtggccctgtgtgatctggccactgactgcccactccatcacatcatccccctcttgcttgttctctaggcttctggcacactggccttctttctgttccttgaatgacaatgtttcttcctaccacaggacttttaaacatgatgttctcactgccatcatccttcagacagcccaaatgtcaccttctcaggggagccttccagcc

SEQ ID NO: 146071 - DNA, 569 bp, Homo sapiens
gagttatcttaagcccattttgcagatgagaaaactgagattcagcgagatttaagtatgttgcccaagtttatacagttagtaaatggcagagatggaatttgaacatgtggcaattgcaactcattgcacactgagccacctaaatttttgttcactttaagtacacagaaaaatcagaaaataaacattttccagactctactcacaattgggaaatataatcatttgttgttgtcattgttgtagtttgtttgagtcttgctgggtcacccaggctggagacaagtgctgtgatcatagttcactgtaacctcaaacatctgggctcatgcaatcttcctgcctcagcctctggaatagctgagaccacaggcatgggtcagcacacctcgctrattttaaaagttttagtagagatggggtttcactatattgctcaggctggtctcgaactcctgacctcaagagatgccttgcctccacctcccaaagtgctgggattataggcatgagccactggacccaggctaaaatcttaatattgctaggcaaggtcccatccattc

SEQ ID NO: 146072 - DNA, 438 bp, Homo sapiens
acagctcagatgtccaggacttgagatgagaatggaaagcaccgaataagaagaaagctgccacacagtaggctgaaggagaatgactacaacctttaggctgaaaaaaaaaaacactacatgctggcgtgtatccttgtggatatgtggaaacacaacaaaaatattggtccatcctggctgcagttttaaaggaaaggaagatctccyggcatcaacatctcttggagatgaacgcactatacatgcaagttcaaatctatcatcttccaccagtcaacccaagctacattccccttccatttattatcaaaggaataagcacttttgtttcccaggcttaactcctcaaaatcatgagcttttcttccctacctttcccttcattcgaactctttcctttcaaaatgtttattgaattcattcttatcctctccc

SEQ ID NO: 146073 - DNA, 438 bp, Homo sapiens
acagctcagatgtccaggacttgagatgagaatggaaagcaccgaataagaagaaagctgccacacagtaggctgaaggagaatgactacaacctttaggctgaaaaaaaaaaacactacatgctggcgtgtatccttgtggatatgtggaaacacaacaaaaatattggtccatcctggctgcagttttaaaggaaaggaagatctcccggcatcaacatctcttggagatgaacrcactatacatgcaagttcaaatctatcatcttccaccagtcaacccaagctacattccccttccatttattatcaaaggaataagcacttttgtttcccaggcttaactcctcaaaatcatgagcttttcttccctacctttcccttcattcgaactctttcctttcaaaatgtttattgaattcattcttatcctctccc

SEQ ID NO: 146074 - DNA, 438 bp, Homo sapiens
acagctcagatgtccaggacttgagatgagaatggaaagcaccgaataagaagaaagctgccacacagtaggctgaaggagaatgactacaacctttaggctgaaaaaaaaaaacactacatgctggcgtgtatccttgtggatatgtggaaacacaacaaaaatattggtccatcctggctgcagttttaaaggaaaggaagatctcccggcatcaacatctcttggagatgaacgcactatacatgcaagttcaaatctatcatcttccaccagtcaacccaagctacattccccttccatttattatcaaaggaataagcacttttgtttcccaggcttaactcctcaaaatcatgagcttttcttccctacctttcccttcattcgaactctttcctttcaaaatgtttatwgaattcattcttatcctctccc

SEQ ID NO: 146075 - DNA, 518 bp, Homo sapiens
gtatttttccaaacagcaatttccctgmctctggcttctaattctgaatttttctctatttgagaaacattccagttccccattcctttttctgatcaatagctggcctctacccacaattgattccttctccaattagctctaaatcatagtatcagatagaaactgctttctgttcaaaggcttagtgttagaaaaataatcacaacaatactgaaacacatatgtgacttgctttttgtttatgtaataaatttgactgaattttttctatggatcagtgctcctcaatttttaaatattcccatacttacgcgtgagtacatcagaacatatttacaccagtcttgggattagaggtaatgagcctcatttctccaaaaacaacagacttcctctacctcctactcacagacaaatttccctagtctgagtttgaaactaagggcacattggtttctggaaaggtgtaacctgctgtgtttgaaccagtaattaggacaatgcttatacagaaa

SEQ ID NO: 146076 - DNA, 511 bp, Homo sapiens
attgtatttttccaaacagcaatttccctgactctggcttctaattctgaayttttctctatttgagaaacattccagttccccattcctttttctgatcaatagctggcctctacccacaattgattccttctccaattagctctaaatcatagtatcagatagaaactgctttctgttcaaaggcttagtgttagaaaaataatcacaacaatactgaaacacatatgtgacttgctttttgtttatgtaataaatttgactgaattttttctatggatcagtgctcctcaatttttaaatattcccatacttacgcgtgagtacatcagaacatatttacaccagtcttgggattagaggtaatgagcctcatttctccaaaaacaacagacttcctctacctcctactcacagacaaatttccctagtctgagtttgaaactaagggcacattggtttctggaaaggtgtaacctgctgtgtttgaaccagtaattaggacaatgct

SEQ ID NO: 146077 - DNA, 511 bp, Homo sapiens
attgtatttttccaaacagcaatttccctgactctggcttctaattctgaatttttctctatttgagaaacattccagttccccattcctttttctgatcaatagctggcctctacccacaatygattccttctccaattagctctaaatcatagtatcagatagaaactgctttctgttcaaaggcttagtgttagaaaaataatcacaacaatactgaaacacatatgtgacttgctttttgtttatgtaataaatttgactgaattttttctatggatcagtgctcctcaatttttaaatattcccatacttacgcgtgagtacatcagaacatatttacaccagtcttgggattagaggtaatgagcctcatttctccaaaaacaacagacttcctctacctcctactcacagacaaatttccctagtctgagtttgaaactaagggcacattggtttctggaaaggtgtaacctgctgtgtttgaaccagtaattaggacaatgct

SEQ ID NO: 146078 - DNA, 511 bp, Homo sapiens
attgtatttttccaaacagcaatttccctgactctggcttctaattctgaatttttctctatttgagaaacattccagttccccattcctttttctgatcaatagctggcctctacccacaattgattccttctccaattagctctaaatcatagtatcagatagaaactgctttctgttcaaaggcttagtgttagaaaaataatcacaacaatactgaaacacatatgtgacttgctttttgtttatgtaataaatttgactgaattttttctatggatcagtgctcctcaatttttaaatattcccatacttacgcgtgagtacatcagaacatatttacaccagtcttgggattagaggtaatgagcctcatttctccaaaaacaacagacttcctctacctcctactcacagacaaatttccctagtctgagtttgaaactaagggcacaytggtttctggaaaggtgtaacctgctgtgtttgaaccagtaattaggacaatgct

SEQ ID NO: 146079 - DNA, 507 bp, Homo sapiens
ctaggatctcattcatttatccgtcggatgaatacatgaattaatgaattaatgaattaatgaattaatgaatgaacatgtgggctgcggcactgggcttccagaactcacaagacacatccctgtctcctatgagaaatgcaaaatacatctgtgaaacatgtgagccagcagttgaggatggcgcccggcgtgtgtggagtggcaaggctcaccctgggagaggtagctccagattcccgccgtggtgagatgtcaccgagctggcctggaaggatgagtcgcaaaggggaggagggcatttgaaaggaagagaacagcacatgcaacgtcctggaggcataaaagcaaggtccacccaggagtgaggaggactctgcccggcacatgaggaggccagtggtgtccacggccaagctgtcgcacggctgrgtcttttctctacacagatgaaaaaaatggaagaaaaatcaggatagaccggcctgagcaagcacccctgaatct

SEQ ID NO: 146080 - DNA, 573 bp, Homo sapiens
tcaatctttactttctataatgacagagcaaaccattctatttgctatttactttcctgatggtatcttcaagaaacttctggaaataggtctttgtgtcaaccagaaactgctggtcagaggataagttctggagttttcttgtakagcatggagactgcagttaataataacatatcatatacttgaagattgctgagagtagattctaaacattattatttatttattttcttagttttttcgccccacttcaataagctagtcgaagacagtagattttaaatgttctcaccacaaaaaatggttaagtatgtgggatgataaatatgtttgatttactcattccacagtgtgtacgtatatcaaagtatcatgttgtaaactataaataaatatcatttcttatttgtcaattaaaagtgtaacacacacatatgcatgcacactatatataaatacatcttttaaaactgctggtcaggaatcagacggcctccacgggtggtgtcacagggctgccccccgcagcctccctcatggttctgagccctcctcagtcactcttttgtt

SEQ ID NO: 146081 - DNA, 572 bp, Homo sapiens
aataattatgattatagcagatgactaaggtgttgtcgggagcttcaggaaaggaagaactaactcttggggaggttctcaggaaggatttccctggaaagtagccatgggacttgcgtcttaaatggtgagtaaaagctttctgagcaggggagtaggaaaagggctttctatgcagaggagcactcagcgctggcaggaaattggaatcacccaaggagattattaaatattaaatattgatatgaagtattgatgcccaatttcatctccagaaattctgatgtattggtctarggtgttgcctggtcattgggatttttacaagctcctcaagtgatcttaatgtgcaggcaaggttgaagccgctggtctaagtggggtctggtctacgataagaaagtgactttgagccatcgatttgggagacaggctctgggtggatgtgtgtgtgtgcacacatatgtatgtatgtggatgactaaaagtgcatgctctcctctcctttcccagcttcctctccagcacagcaacttgtgttcgtatgcacacacatgcatactctctctcat

SEQ ID NO: 146082 - DNA, 572 bp, Homo sapiens
aataattatgattatagcagatgactaaggtgttgtcgggagcttcaggaaaggaagaactaactcttggggaggttctcaggaaggatttccctggaaagtagccatgggacttgcgtcttaaatggtgagtaaaagctttctgagcaggggagtaggaaaagggctttctatgcagaggagcactcagcgctggcaggaaattggaatcacccaaggagattattaaatattaaatattgatatgaagtattgatgcccaatttcatctccagaaattctgatgtattggtctagggtgttgcctggtcattgggatttttacaagctcctcaagtgatcttaatgtgcaggcaaggttgaagccgctggtctaagtggggtctggtctacgataagaaagtgactttgagccatcgatttgggagacaggctctgggtggatgtgtgtgtgtgcacacatatgtrtgtatgtggatgactaaaagtgcatgctctcctctcctttcccagcttcctctccagcacagcaacttgtgttcgtatgcacacacatgcatactctctctcat

SEQ ID NO: 146083 - DNA, 507 bp, Homo sapiens
ggaaagccagctcagctcacctgggaggctccccagccaatgacccctccagcccaggccctgccagacttgtggcctaacagtgtcaaatgggagaagagaaacggcagctgagagacactccgtgttagaacaaacagctggcgacaaacgtctatgtaattggaatgccagaaaaaataaattgcatccatttttatggctagttgggaatttgatggtggtttcccacccaccccccttttccccagcatagatggcctccttgggctttgaaagcagatggtatttaacttaataactgggccgggagggggttggatatgygagccaccaacctcccctcaaccccactcccatgtgagaagcaggacagggaagcagtaggagctgggggcacacacctctgttagtggttaggtgatctcaggcaagttccttgggctcagggagccccggactcaccatctgtgcatcagacaacaccagtcccccacctcaagggtt

SEQ ID NO: 146084 - DNA, 518 bp, Homo sapiens
ctgtattttagcattatgttttattttacagtgcccttgattctttataccwgtctgaggacagtgactgtgctgaccctttacatttgtgtttcaacaatcctgaaggggattttcatctcctgaactgctttatcaatattgttttataaacaattgtgacctacaaaatttattgagcccaacctcattttttaaaggactgctataaagtcagtggaatagcattttcatgattaagagcagtcggagggattaatggagaggcagcatgagcttattcctaactttgagtgtgccaggagttttaacagggataagaggagtcaccaaacatctcttccctgtcccttgtattattttgcaagaacataggcaaacttgtgcatatttcagcagaagggatatctgggtagaagattgcattcagtttgtggagtaagggcatgcaagcaattaaatcccaacttcctcatcagcagtctgtactcaggagagctgtccagagtagccaggcc

SEQ ID NO: 146085 - DNA, 418 bp, Homo sapiens
tatgaatcctaaactaactgtgttccttacctagctgggttgctgcgtttccraaaacccattagcaacaaaaacaccaacaaaaccccaaacaatctttatgagtagcttggaaaaaaattttttaaatgcgtgaaaaaagtagacttgtgatggtgcacttcagattaattctttccattaacattttgaaatgttaagtaaataggtagtgaaatggggatggtgctagttcttcatcttgtgttagacatccaggtctagccatgtctgtacttctctaaatgtgactgtgtattcactgagattgctgctgagcctacctgagatcatgaggctgcttactcatcagtgaacagcatgaccacccttggtacacactccagcttcaagctaatggttcaggcatatctaaaat

SEQ ID NO: 146086 - DNA, 435 bp, Homo sapiens
cttgagccttggagttcaagaccagcctgggcaacaaggcaaaacyccatctctacaaaaaatacaaaagttattttggtttggtgacatgcacctgtagtcccagctactcagaaggctgaggtgggaggattgcttgaggccaagagatggaggttacagtgagccaagtttataccactgcactccagcctgggtgacagagtgagaccctgtctcaaaattatatatatatatatataaaatatcataaaaattctgaacaatggaacttggctctataacagcaacaaaaaatgattgtcacatgcatgtgtttgagtctactgccttaggtctggggttgggtttttgcaagactaggactgttatcacctcagctgggaaaactgctgttcctaatacatagaagggatgtttgcccaagtcaggggc

SEQ ID NO: 146087 - DNA, 603 bp, Homo sapiens
tggtctgtgcagacctggaaaagagcctctggaggccaggcacggtggctcatgcctgtaatcccagcactttgggaggctgaggtgggtggatcacctgaggtcaggagttcgagaccagcctgaccaacatggagaaaccccgtctctcctaaaaatagaaaaattagccaggtgtggtggtgcatgcctgtaatcccagctactcaggaggctgagacaggagaatcacttgaactcgggaggcagaggttgctgtgagcccagatcgtgccattgcactccagcctgggcgacagagctagactctgtctcaaaaaacaaaagagcctctggccttagtggccccagatagcccgaggkgttcctctttatctggaggagttagactgggggagtttggttctaggagattcctaaggattggttttctccatgtagcttctgtggttttagatagagagataagttctctctagggcagatttttactttcaagatggtccttaaactagttggattctaactgagtgtcaatagggcagttctaggctaacaggagtcctggggctgccccacaagactcctctcaccctgcagtca

SEQ ID NO: 146088 - DNA, 592 bp, Homo sapiens
tggcctgggggtgtatgggtgatggtaaacatccaaatgccattccaacaatctacttaataactgacctttacggggtggtaaagtaatcctcaaaaggtgtgaaattttagtaaataatctttattttttttagttgtgcagcattccaggcgaattatggatttataccccatcattccagacaaaaaaacactctaaggtttaagtttcctatttatttagccaaagatgcagatacttattggaagtgaggtggctacacagagtagaagayaggtaaagatacttcatgtctcattgtagcttcttttgacccttcatttatctacagagtactagtcagtcaaggtggattcttgctgggtctaagaaaatacatttcttattactccacaacattccagaaaacccagttatgcacaatccagcacccctggactctgatttaatactctttcatttggagaaagagagatgttaaggaattggtgcatgcagttgtgggcgtgcaagcctgaaatctgcagggcaggttggcagcctggaggcctggggaagagctgacattgtagctcaagtccagaggcag

SEQ ID NO: 146089 - DNA, 438 bp, Homo sapiens
acctggtgccccccttgacacgtggggattattacaattcaaggtgagattcgggtggggacgcggasgcaaaccatactagttgtcagtcatctagtgagaggacttggctcattgctattggatgttgtgtattcctagtttccgaagttgttcactcaggctttagacttcagaggaattgtttaagtaatttaaagacttagttaacatagggaacattcctcataaggaggaaaaaaaaaattattctgtgtccatcttgtctgtcttattccctaagtaagaagtatcatccaaacatagtaatgctgccaaccatattgcttgcatagtactttatcatggaacttctgaggctttcaaacacaatacctgcaaattttctattccttaaagctggtcctcaggcctgtctcagattcttcataaagatct

SEQ ID NO: 146090 - DNA, 438 bp, Homo sapiens
acctggtgccccccttgacacgtggggattattacaattcaaggtgagattcgggtggggacgcggacscaaaccatactagttgtcagtcatctagtgagaggacttggctcattgctattggatgttgtgtattcctagtttccgaagttgttcactcaggctttagacttcagaggaattgtttaagtaatttaaagacttagttaacatagggaacattcctcataaggaggaaaaaaaaaattattctgtgtccatcttgtctgtcttattccctaagtaagaagtatcatccaaacatagtaatgctgccaaccatattgcttgcatagtactttatcatggaacttctgaggctttcaaacacaatacctgcaaattttctattccttaaagctggtcctcaggcctgtctcagattcttcataaagatct

SEQ ID NO: 146091 - DNA, 570 bp, Homo sapiens
aaaatgtgcagaatgtaaatgtaggtttaatatagacatagtatttaatgcattagtcatatttatttgcagatgtcatccaaaggacttaaataataagcacactttaataaatctagcaaataacatcatattcctaactgtgctcatcctatctttctttaccctctttaccaaggagtatgttcaaactggctgacgtaaaataaatttcacgtattcatgctttttgaggtattttgtttatttgtttgttgtttgtctgtgtgtttgtttttgccaaaagatgagaagacccattcaaggaaatgccaaatagatgagaataagaataatgatgtgtttgtggccaaagagcaagccaaacgaaaaggataatttgtccactttatccaaagacttacttgattttattgagcccaaataagccctagacctctactcaaatataaatggattcatctgaaacaagctcatttgcttggcaacttccaaagtgcctctgctayggaagtatgtgacatgagtaagaaaaaagaagaaaagaaaggaaccaaaatggttccagtc

SEQ ID NO: 146092 - DNA, 437 bp, Homo sapiens
tgaattccattggattcaaatgtgtgtatagtctccttattgctgtctttaatgctatttctattagctatatctttgatatataaaaacatacaatagacattgtccagtataatttaaaaccatgttaaattttaaaatgggaatatttgaaaactttaacaattggctcccaaggcagtcctaggtccaaattccattggtccaggaatgtggtacaccctacagggcccagttgcccttcacaaagttgacggagtcaattgtttgctgcccctggaggagcaagcagagatttgacaagatgaccagacagacatctttgggtgctgrttctacctgacttaaggtgtgattggctcctttggtgtgggcactaggccaccagacgggcaaaacttcctctctcttccaagcacaggaatctgagcagaatg

SEQ ID NO: 146093 - DNA, 526 bp, Homo sapiens
gaaaatcagcgccaactccctctgctcaaatttgctactttgtgttttagttccaggcgggaagtctacactgcgctccctcccagcctccgggtctttccggatcaatatgagaatgggattgcatgtactctaggtcttgcctcctgcgctcttccattagaggatttttttatttttagtttttaaattttattttttactagttttggtttttctccgaatgtccctcctctcatctaaaaaatgaaatcccgccaaagacttatattttctgccttgtgggagaagcttctcttgggatttctgctaagtcagtgcaatagtcttaaccgttttccgcccagggtccctctgacccagctgatcttgcagggtggggaacacatcctcytccccggcaccttttcaaatgctttcatcaccccatccgcagtggaaaatagttctgtctgcgtgagtgcctagacttgcagagccttgccctgccctgagctcaagagaggtgaagaacccccaaaagaac

SEQ ID NO: 146094 - DNA, 502 bp, Homo sapiens
taccaacttctggctctatgagtatctagttatcaggccctttgctagtgstcagcaactttttgggatatgaagactcatttttaacacccacaaaactcaccgatgtctcctctgaggatagttgctgattaagaacacagctgtttctagacccctttcccatacaatgggaaacttgctctcaatttattattcctcttctcttcagaaaatctctctccaaacacaatataagaaaataggcctttacttaccaaatagcaattccatttctgccttcagccctgcctcctgttggaaattccagggtttccttacttggactattggatatgctcaaaattttctgttcaactctgcagaaaatgccttgataaagtctcacagatgttcatgttcgttgttcataaatgtttaacagtttaatactcttaaaacaaactcagttccctttatcttaattttctggcagaatatgtggaaaagaaaaaaatctcac

SEQ ID NO: 146095 - DNA, 502 bp, Homo sapiens
taccaacttctggctctatgagtatctagttatcaggccctttgctagtggtcagcaactttttgggatatgaagactcatttttaacacccacaaaactcaccgatgtctcctctgagkatagttgctgattaagaacacagctgtttctagacccctttcccatacaatgggaaacttgctctcaatttattattcctcttctcttcagaaaatctctctccaaacacaatataagaaaataggcctttacttaccaaatagcaattccatttctgccttcagccctgcctcctgttggaaattccagggtttccttacttggactattggatatgctcaaaattttctgttcaactctgcagaaaatgccttgataaagtctcacagatgttcatgttcgttgttcataaatgtttaacagtttaatactcttaaaacaaactcagttccctttatcttaattttctggcagaatatgtggaaaagaaaaaaatctcac

SEQ ID NO: 146096 - DNA, 502 bp, Homo sapiens
taccaacttctggctctatgagtatctagttatcaggccctttgctagtggtcagcaactttttgggatatgaagactcatttttaacacccacaaaactcaccgatgtctcctctgaggatagttrctgattaagaacacagctgtttctagacccctttcccatacaatgggaaacttgctctcaatttattattcctcttctcttcagaaaatctctctccaaacacaatataagaaaataggcctttacttaccaaatagcaattccatttctgccttcagccctgcctcctgttggaaattccagggtttccttacttggactattggatatgctcaaaattttctgttcaactctgcagaaaatgccttgataaagtctcacagatgttcatgttcgttgttcataaatgtttaacagtttaatactcttaaaacaaactcagttccctttatcttaattttctggcagaatatgtggaaaagaaaaaaatctcac

SEQ ID NO: 146097 - DNA, 530 bp, Homo sapiens
tattaatttggtttataatgttgagatttacagtacctattttcattctccatacatgccaacactttcccaactcagagtttgctcaacctagaagtccctctctccacattcaattttaatcaacggttctagtctccaacacctgctcctccatgaaactcttctcctctgaactcctgacatcttgrccctaagtctggctaggttataaattgacacactggcatcaatgcagtcctaggatgccagtgtgccaatttacagctgaagaactggcatgcgattccacaatctcgactgctatccattccctccatactcccattcctaattttctctgccctactcgaatgattctttttacccaagactttggtctctatgtctatgtcttatttttctttgtattgctaacatcctgggatacagtagatactaaactataaaaacctgggggatggtgagtttgccagcgtcattctctccttactacctccaactgtttctccacttctccactttccttc

SEQ ID NO: 146098 - DNA, 365 bp, Homo sapiens
tagtctttattccgcttgaggtacactatgtttctttgagagtgcatgaagtaaaatgacaattctgaaatcttataaaggaatctgattaatattttcttttcctttttatttttagagatgaggtctctctttgttgcccaggctggagtgcaatggtgcaatcatggctcactgcagccccaaactcctgggctcaagygatcgttccacctgaggctcctgagaagtagctaggactacagatgcatgccaccacacccagtgtcttattaatattttctatttgagtttataaagacttgaaggagtagcttaaatgagaagaaatttaatgtagcttaaatgaaaagaatgtgattcaa

SEQ ID NO: 146099 - DNA, 601 bp, Homo sapiens
gccatcttgttcaatgaaatgttctggtcaatagcatcacattacacataccatacccatttaatccatattctgtgaatccaattatactaaactgcatttaactctaaaacccactgatcataatttaaatgctgatgaaaacatttgaagaccgtacagtgctttaatgatcacttacctttgcaccatgcagtactctagtattctcagtagcagctgcagtaatccctgtgatagaaaactgggtgaaccaggttttactaaaatcaatagaacattctgtagttattgcaagtactgtgagataaaggtcaattaattctaatagkcaagaagaaagaatatatgctaaatttgactaggaaatgcatatatgtcattaaacgttgaatataagctttaacctattgaaatccttagtggatatatgtatttactattttcaatgtttgattttcagaagtgtgttcacaaacattttttggactatagctaagattaccatttcaaaaatacaatgctccacatttttgtatctttaaacattaatggaatttcacagcacacttctgttgaccctcaagatgactgtttccac

SEQ ID NO: 146100 - DNA, 622 bp, Homo sapiens
tgtggtgttttatgatgtgaatatttgttgaagattctttgtctttatctaggcagtgcaattcaagttctaaaagaatggaatatgacaggaaaaaagaaggtaagattaatattgattgtaaattggtaacatcttcaatcaaaaccttcatggttgttatcattttaacaaggctgccaattttttgcttctttcaagtatgttaatatatacacccagaaagcttccaaattcatgactctcggaaattagcagatactctcagatactctcactagtaatgcccttattttctactcagtgtttttaacaaccaggtgtgcttaagaagtcccagagttgttctcttttttaagtataaaggggagcccagctggagaattcaaaggattcaaaacattaacttgcctgaacgtatcctgtagcacaaagaaaaaaattaaggagtattttaaagatacttgaaaacytctaaatatattttcacatgtttttccacctgaaagaatctgtccaaggctgccctgagatgctttttggccgaattctaaggtagatcattaataaaagaagaagaaaagaaaatgccttagaaccatagtaagtaaggggctttctt

SEQ ID NO: 146101 - DNA, 586 bp, Homo sapiens
ctggccaacatggctaaaccctgtctctactaaaaatacaaaaataagcccggtgtggtggtgcatgcctgcaatcccagctactcaggaagctgaggcaggagaatcacttgaacctgggaggcagaggtggcagtgagctgagatcacaccaccgcactccagcctgggtgacagaacaagacactgtctaaacaacaaaaacaaaacaacaacaacaacaacaaaatcataagagttcagtgtgtttttggttttgtttttaataaaatcaagtgtttgaattgtgttttttaatgttttgttttaaaagacatttaataaaagggctctmtctctttctgctctggaaatgaatacaatccttgcaatgatcaaaatctatacaaaccagactttctgactaatccctttccttctcatcaagtagtttttctaagtgttcacctgcttgtgacttggacaaagcaccatagaaagagaattaaacttttttctccccacccccaacattcaatattatgccagaagttaaagaaacagagagtatggggatgaacatttacttgcaagggacaccaagaga

SEQ ID NO: 146102 - DNA, 514 bp, Homo sapiens
caactgtacacractgtagattttattggtaccatttagacacaccacttcacctaacattcacatctttgggatgtgagaagaaactggggtacccggagaaaacccatgcagacgtggggcgaatgtgagaactcctcacagacagtggcctgagctgggaatagactttatttttttctcatcaatgttataacaaaatgactttgaacaaaacgatgttatttgaggatgtgctgtacacttaggctacacaaaatttattttaaaataaaatgattgggctatgatgtatgatggctatgacatcactaggtgataggagtttttcagttccattttaatcttataggatttctgtcatatatgtggtctgttgttgacctaaaagtcattatacagtccatgactatgttctctcacagttctggaggctaggagtctgaaatcaaggcatcactggggccatgatccctctgaagggtggaaggaagaatccttccctccttcttcc

SEQ ID NO: 146103 - DNA, 559 bp, Homo sapiens
ctttgttggaatcaccactcstatttagcacagaggtcagtatttctttgaaccaagtgagctttgaagttagacctgaacttttccatactctgatttatttggggggaaaaagtaatttactgcttcttgtttccttattgtttaggaattactgctttggaggataaagtgtggatttctaaaaagcctttaaaaaagttttacttacttaccacataaggctgctttgctttgaattgtttactttgataatgttttaaagatgaactttcaccatcttgataagagagaaagttggtcaaacaactaaatgaagtcagtctgatgcagtgctgctgttggtttgtgtgattttcagatcgtatctctccttgcttctgcttccttaagtgtaaaatgaaggcagaagcgcctgtcatccctgccatcaggatgtggcacctcgttctcaacagaccacaagcttttcatgaatctttatttttttaaattttttttagagaaggtggtagagggaagttcagggaggtgcagggaggtgggaaatcacagagtt

SEQ ID NO: 146104 - DNA, 385 bp, Homo sapiens
cagtgagccgagatcgtgccactgcgctccaacctgggtgacagagtgagacactgtcccataaataaataatgaatgagaaacataaaagtgattgtcaccgagttggcagtggggacagtaaggtggttatgagtaactacagaggcagagcagggcgatcacctgtggaatccccggtgtcctagggatgcaggagatggagaggcctggcgcccagaggcctgagagtgcaggagcaggaactgcaggactcccattgtttctctgaggtcataaacctgaatattaaactttggctattttggtcgtttgtcattttcctgcatgggcacaggatttcctcatcrccctgtgcatgttccgatgaaagagggccccagag

SEQ ID NO: 146105 - DNA, 618 bp, Homo sapiens
tccttaccttggtattttcactgtttttaattttagttattatatgtagtgctctatctcattgtggttttagcttatttacatttctctaatgaggaatgatcctgagtatcatttcattttctcctgtgttctgttaatatggtgaattacattgattggctgcttaatgttaaaaaacttgcatttctggaataaacttgaagattatagttgatgtggttttctaatattttgttgagaatattttcattgatgtttttgggggttattgctctgcagttttcttataatgtgttttctgatttgggtaccagagtaatatgcttctcatacaatgagttgggaactattccaaatggtttatataggattgatacyattttttagaatagtttgatacaaaattcaccactgaagccatctgggcctgaagttctttgtgaaaaatatttacagtataaatttattgttttttttagaggatataggattattcaaattttctatttgttttgtgtctgctctggtaaattgagtctttccccaatctgtttgctcattaaatgactaaattgtttatataaagaaaaaaggagctgtttgtccaccacccgc

SEQ ID NO: 146106 - DNA, 461 bp, Homo sapiens
actttgtgaacctttaaaattagcaggtattattgcacaatttaaaaaacaacagagacacaaatcagaaaccatccactgagaaaagtaagagagttttgcagttcatcaatttagtccttcatatcctgacaataaggaaatatgggagaaacaggaaatgtttttaaagttcaaattgtctggaggaaaatgtacttgacattaagttmtaggaggaatgtatcacatagaaccttaagtaagagccatcttaagatactgtcagatgtttccaccgcttattagagaaaatgcaggcaaatcatctcacacaccacttatcttactttgggaaacactgcactaagcaaaaatgtcctttgaatgaatgacagcattgctatgggctgctaaaactggtgcagtctggttactggtcccactagtagttctaaagttaaaccttcaggagagaattc

SEQ ID NO: 146107 - DNA, 428 bp, Homo sapiens
tgtgtgtttctatagatttgtccatttcatgtaggttatctaatttgttggcatactattgctcatagcattcttttataatcctttttatttctgtaaagtcaatagcaatgtctctacttttatttttgattttagcaattytctttgctaacatctagataggctaaagtctatcagttttattgatgtttttaataaccaaacattaatttattttgttgtttttatattctcccttttgtttatcagtctatctctttcttctactagcttaggatttagtttgcctttctttttctagttccttaagatgtaaagttaggttatttatttgagatttctcttctttttaaatgtaggtgtatatagctataaatttccctcagagctctgctttttccatatttttgtgttatatttttgtt

SEQ ID NO: 146108 - DNA, 595 bp, Homo sapiens
ccaactattatcatagagtgtctgtttctctattcagttctgttaaattttgcttattatattttagtactctcttgttaggtgtgcacatgtttataattcttatgtcttcttaatkaattgacccctttatcaacatttcatgtcctaatctgagctgtttttaagtgaattttgtgaaattacattgaaagttgttcccttggctcttcatagataacagttggagacattggagcactctttaagattcgtattggtcataccaactctggatcctccccttcctggcactgcaaggaggtaaggatatatcaacactttcccattctttgcaaaatcctctgcatattcctctcaggagtcaactcatcatgcctataatgagttgatagagtcctgtacctttttagccagtgctttcttcaaggcagaagtatcatatgcccttaataattaattaattcttaattgattgagggaggcaccttaaccaagcaattctttcacctctttgcaaagaaaaaaacgcctgggactctggataaactcatatagcttcttgatatagttgcactgctgataaaaagatgac

SEQ ID NO: 146109 - DNA, 554 bp, Homo sapiens
gtagttttttgagggaacatagactggtaaacatttgcacagattgatgattcctttgtggttttaaataaggtgtgatcacttttcttaagtttctgaagttaaaatatttttgaaaagacatgaatagccctagttactgaaaastgaagcaggagcattgttctcaccattcataagtatttttttcaccatttagaagcattgttatcactattcttcctcatcagcccacacgtttcacctgagaagatgttcgccaggtgccctattcctacccattgttagtaacaatgcagaggtgactttctgctgctacttccctccattttaactgttaaagttctgctcaaagaaggcacactctacaaatatgttctgattttacttgtcttctgtgtagggcttgacccttatggtttattaataaacatttttcttttcagtttcaggacatggcttggtattctaaccataccctatcatatgtatctataaatttgataagcctttagttatctaggtcagtggtagatacagcaaatgatgattta

SEQ ID NO: 146110 - DNA, 656 bp, Homo sapiens
atggggctacatcaaacttaaaaacttctgcacagcaaaggcaacaatcattagtgtaaacaagcaacttatggagttgcaaaaaatatttyccaatcatatatctgatgaggctaatatccagaaaaaataaggaactccttcaactaaacaataacacatgaaaaagagacaatccaatttaaaaataggcaaagagcttgaatagacaattcatcaaagaatatatacaaatggcctacaagcctacaaaaattcaacatcactaattattacagaaatgcaaatgaaaaccacaatgaaaaactacctcacacccattaggatggccagtatcaatagaaaaaaaaaaaacaagtgttggggagaatgcagagaaattggaacccttgtgggatgtaaaattgtccaactactatggaaaaaggtaaggaggttcctcaaaaaatttaaaatggaattaccatataattcagcaaccccatttctagatacacacccaaaagagttcaaagtagaatctcaaagagatatttaaatttgcacacccatggtcattacaacatgattcacaataggtagaaggtggaagcaagcctaatgtccactgtcagatgaatggataaataaattgtggtatatacatatgatagagt

SEQ ID NO: 146111 - DNA, 582 bp, Homo sapiens
caagcttgttgtgaactcctgggctcaagcaatcctcctgcttcagcctcccaaaatgctgggactacaggcatgggccactgtgcctggcctcccccaatgctagttgcctggactccatggcctataaacagatattcaagtagaagaagattctcagaaagaaagaagttcattytggcactttgtatttaccataatttgggagaaacatccatttctgcccactctctccattcctggagagtggcatttgagacattgctgtcttcttgcgcagtttgcaaagtggcaacaacagccgcagtcactaagtcttgtttaagattcctgtttttcttctcatactggaaaactcttaattgctgttttctcttgatccctgtttttctggcactctggggctgccttcagggtaggttcagcctaatgagatagaatctaccctttctgggaacaggtatatagattcctgaggaacaagaaatctgcctccttagagaaatactatttccaattcagagccaaattttgactagattttcaggcgtggggttggggacattggggggaaggagttac

SEQ ID NO: 146112 - DNA, 582 bp, Homo sapiens
caagcttgttgtgaactcctgggctcaagcaatcctcctgcttcagcctcccaaaatgctgggactacaggcatgggccactgtgcctggcctcccccaatgctagttgcctggactccatggcctataaacagatattcaagtagaagaagattctcagaaagaaagaagttcattctggcactttgtatttaccataatttgggagaaacatccatttctgcccactctctccattcctggagagtggcatttgagacattgctgtcttcttgcgcagtttgcaaagtggcaacaacagccgcagtcactaagtcttgtttaagattcctgtttttcttctcatactggaaaactcttaattgctgttttctcttgatccctgtttttctggcactctggggctgccttcagggtaggttcagcctaatgagatagaatctaccctttctgggaacaggtatatagattcctgaggaacaagaaatctgcctycttagagaaatactatttccaattcagagccaaattttgactagattttcaggcgtggggttggggacattggggggaaggagttac

SEQ ID NO: 146113 - DNA, 577 bp, Homo sapiens
ccttctaccccagagagggagctggaggaaagggtgggctttgggggggtctttgaggtgcaaatttctgtgacactggtcatagctcacatagagagcgattgctgccacggctcttaaattatttgaactcacacattacgtagctggtcattcctaggcaaaaagccagggcttcctttgctgaatcctaacgaggcagttatgccaggtaggaaagggaagtgctgccccagctagctagaygccgcaacagaggaggcaaggaattcctccaaagagagaggcacacttgggtgtgatggcctttggtttgaagctggagttccttcttactccccaagttcatgggccaccagcctgagaaagcagtgaaaatgctttcctttgtctgttttcttgtttttgtttttatcaaagatttgaacaggtacacttgcaatttctgatgaaagcattttaaccaacatagatacacctctatctgtttttgcaagggtaggtaaatagaggtgaatggcaggacagataagtgagaacccccagctgtcaaaaggagaggaccattatgagaaaa

SEQ ID NO: 146114 - DNA, 577 bp, Homo sapiens
ccttctaccccagagagggagctggaggaaagggtgggctttgggggggtctttgaggtgcaaatttctgtgacactggtcatagctcacatagagagcgattgctgccacggctcttaaattatttgaactcacacattacgtagctggtcattcctaggcaaaaagccagggcttcctttgctgaatcctaacgaggcagttatgccaggtaggaaagggaagtgctgccccagctagctagatgccrcaacagaggaggcaaggaattcctccaaagagagaggcacacttgggtgtgatggcctttggtttgaagctggagttccttcttactccccaagttcatgggccaccagcctgagaaagcagtgaaaatgctttcctttgtctgttttcttgtttttgtttttatcaaagatttgaacaggtacacttgcaatttctgatgaaagcattttaaccaacatagatacacctctatctgtttttgcaagggtaggtaaatagaggtgaatggcaggacagataagtgagaacccccagctgtcaaaaggagaggaccattatgagaaaa

SEQ ID NO: 146115 - DNA, 551 bp, Homo sapiens
atggttgggtttttcctgtaaaggtttctccctgcaggaagtcggagcttcagaggagtgcaaggtcacggtgtttgttatcccacctgcctgyctgtcaagtcgctgaggattggctttgttcctctaccaaaggccacagcccctgccagggaacctcttgtccagcctgccatctgggtctattctttcctccctgtatgtttccagacctagggctggcagcagctcccttctattggtaccctcgaggtactgtgcctgccatgtcttcttgcttcatctaaaccctgcacattcctttgtaaaaagtggttttaattaaactcacctcaaattttccagtgtaagtgtgccttctgttttgttttcaggtccttgggtaaggcagtcatttaaataaattaggcattttgggcaatatttatgataagggagagagaatagggagccacagagtcctgcatgacattcctgggcaattccttccctttcaactccattgattgccctaattggctcttccttcttctggcccccagtttcctcat

SEQ ID NO: 146116 - DNA, 508 bp, Homo sapiens
gtttacagaataattaaccaaaaagtatatataacttacatataccccctcactctaccccattccccacacctcagtttcccctagtattaacatcttgcattagtgtggtacatttattagaatagatgagccaatattgatacattattattaagtaaagtctatagtttacattggggttcactctatgtgtgcacattctatgagttttgacaaatatatgatgatacgtattcaattacaatattatagaaaatagttccacagccccccaaaatcccatgctctacctcctcatcccgctgtgttgaacccctgacaataatagctctactgtctgcaaattttttccttttccagaatgtcatatagttagaatcacacagtatgtggcctttttagattggcttcttccacttagaaatatgcatttaagtttcctccatgtattttcaagttttgataatgtacttctttttatcaytgaataccattcagtgatttg

SEQ ID NO: 146117 - DNA, 411 bp, Homo sapiens
aaattctgctaattacacgtagtatttacatgattgtatggaagaatcattaagacaattatctggaaaatgaacaaacagtaaatctgaatattgtttgaaaattacggatgtgaaaagtttcccttttttttctagtttctgatgttccgagggacctggaagttgttgctgcgacccccaccagcctactgatcagctgggatgctcctgctgtcacagtgagatattacaggatcacttacggagaracaggtacagcagtaaaatgctattttacactctgattaaatcagattctgttgtggataacctgaaagcccaacagtgaacaaagaattaaagaaactttggcaagtccattcaacggagcccttgttttttccaagaaaatacgtaagatatagatga

SEQ ID NO: 146118 - DNA, 590 bp, Homo sapiens
caaataaagagacaataaaaacattattctctcttttttggatggaatactgcgtgaaatggttatccatacaaagatactttatgtagaatagaaaaaggaggccgggtgcagtggctcacacatgtaatcctagtgctttgggaggctaagccgggagcactgattgaggccaggagttcatgatcagcctgggcaatgaagtgagaccccgtctctacaaaaaaatatgaaaaaattagcgaggtgtggtgacacatgcctgtagtcccagctactcaagaggctgaggtagaggatcacttgagcctacgagttcaaggctgcagtgagctatgataactccactgcactgcygcctggatgacacagagagaccgtttctaaattaattaattaacaattttaagaaagaaaaagggccattgcttatttttccatacaaaagtaaaataaatcataatggccaataagccaatgtaacttttttttttaagggaaagcaaaacttgtaaaacctaaaatctcttagagttttggcatttacccaaatgttttcagtgattctgagaattggtggatataaaaca

SEQ ID NO: 146119 - DNA, 450 bp, Homo sapiens
tgacttattattcaataaacagtgctgggataacaggctagccatatgcagaagaatgaaactggacttctacctttcaccatgtacaaaaattaactcaaaatggattaaagatttaaatataagacttcaaactacaagaatcctagaaaaaaaactaggaaacaccattctgggcatcacccttaggaaagaatttatgactatgccctcaaaagcaattgcaacaaaaacaaaaattgataagtggaacctaattaaaataaagagcttctgcacagcaaaaagaaactattgacagactaaacagacaacctacagaattggagaaaatattcacaaaccaggcatctgacaaaggtctaatattcaaaatctatayggaacttaaacaactaaacaagcaaaaacagataaccccattaaaagtggacaaaagacatgaacaga

SEQ ID NO: 146120 - DNA, 584 bp, Homo sapiens
tgccacaagagatgtagaagatatataaggagctctgccaaccaaaggactgcatttgatacagtactttttcaaacaaaacaaaaacgtctctgcaagctgggggaatacttgtgtttaacccaagaaggagccttcagcagatctcagcaaatcaaaatagaatattcccattgaagaactccctgggtttcctctggcctcacataacacagcaataygccggggctctgcgacttcatttatttggctcacccatgcctctagcatctcctaagatgcttagaacttaactgagaatactttaagtcacaatcaaaaagggtaaggagaggtatattagttaaaacttttttttttttcagagacagggtctcaccatgtttcccaggctggtttcgaactcctgaactcaagtgatccacccaccaatgcctcccaaagtgctgggattacaggtgtgaaccacagcacccagccagttagaactttttttgatttctatgcatggaaacccatctttaaataatttagtcaggcaatgggaatttattggaggtggattctcataactgcgggaagat

SEQ ID NO: 146121 - DNA, 514 bp, Homo sapiens
gggcaggagaaggtccaaaagagactttacttctgaggctgtttctgaggccttcacactggggatcattttctgagcctcagcagactcatgggccaaatgtggcccaccacctgtttctataagaaaaattttattggaacacatccaataagcaaattcttgtttattcattgtctgtggttgtgtctgcactacaacagcaaagttaggtagttgtgataggaaccatatggcccatgaaacttaaaatatttactctctggagctatacaaaaaaggttcactgacccctggcctaggccaacacagccactgtgcctgacacacagrtggtatgtaaatgaggtactaaaactaaatgaatgacctaaagccttggtgacagtcacaatgtgaatgaacttaagcttcaaccccaggagatcattgcaattgcaaggccctcaagccatttccctttattccagaattgcttgtgtggcttactcccttcctctgtaactactgctac

SEQ ID NO: 146122 - DNA, 503 bp, Homo sapiens
aacgaaaactatacaatgtccagaaagaaaacagaagaaaatctttctgacattggataaagcaaagatttatcagatatgacaccaaaataagatccagaagagaaaaagttaataaaataaacatcaaaattaaaacctttacacttcaaaagacattaagaaaatgaaaagacaaaccacagaatgggagaaaaggcttacaaattatgtatctgataaaggacttctattgagcatatatgaagaacattaacaactcagtgataaacaaacaatcctattaaaacaaaaagagttgaataagcacttcaccaaagacacaagatgactaacctaatgggtgcatgaaaagaagctagcatcattagtcattagggaaatgcaaataaaaaccmcaatgaggcacccatacatatctagtaaaatggctccaataaaaagagacaatagcaagtattggagaggaagcagagaaactgaaatctttatacgttgctggc

SEQ ID NO: 146123 - DNA, 452 bp, Homo sapiens
gcaagtcattcacagttgagtttcctctgaaagggggatggtagcggcacctaacttaagacaatgtgacarttcaatcagggaactgaattctcaatacctaggaggacccaccacagtactcaccacatagtagacagtaaataagtcatagcttcttccaagaccccagaggtatccaatctaccccatttacctccctgggagatgaacaaagagagcaagggcctcagagaccccaaggactggagcctagggaagacccaggaccctggtgggctttctgacttgctgccatgcttgcacagaaggggagggttgaaatgatccctggttccatgctactaagttgagcctacttggctcctctgccctctgcagccacttcctgggttccagatgtaaatactggtgggagagtagggggctgggatgtggggtagggggtggag

SEQ ID NO: 146124 - DNA, 503 bp, Homo sapiens
acacctactgcaaagagcttcaactgtatgctgaattactcatcaaggggagagcttggtcctcctctctccttgctgcagccaagtccacaccctgcagcccctctgtggaccccttcaagattcggcagtctgcaatcagctccaccctcttccttcaaaggctcctgttctctagggacccgacctttgtgctcctcatcagacctgcagttttcagccaggtttctaaatgcacctggcccagctgtgctgggrtgagaacagcatctgcacgtttagcaggcacccagggatgctgtgtgcaaaagccctgagggccaagggcaccctcacggcacttggaaatcactcccttcagataccacagcacccagtgcccccgatgaccaccatcctcaccccctaccagccacatgatatctgcagcactgtttggcccatacccaggcccctgccagcaatgagcctcatgccctctctcctggaacgcagcagggatc

SEQ ID NO: 146125 - DNA, 561 bp, Homo sapiens
aagcttggacctgccactcattcattctcttgctgggcactctctgtacctcagtttcccccactgctctttgaacccccaggaacctctctcctactggctggtagctcagcccctcaactgcttgcattgtattcaaacggctttgggggtgctgcttccggtactgtctcctcactatctcaagggctctattatcagaaaatcaaaatctgttccaaaagaaaaaaaacaaaatacacccatcttayagaaaagcgagctacctgaccacccctctgccagctggtgtccagatttcaaagagccacgagcatcacttaaaggcacatgccttgtgcaaggcttgctgggagatatcagggatctgatatgggtttgtaaccaagtagactaatcaggggcctccaggagtgggcaggaagtgcaaagaaatgtcaaatgggcctagaagtcaccagagaccaagaagcgtacacagaaacctcttggccgaggttccaaggcttataaggaggtgttgcgatgctactgtgacaacaggtatggggctctgcccac

SEQ ID NO: 146126 - DNA, 377 bp, Homo sapiens
agcagtttattgtaggacacggccctctcttcctgtttggctcagctgtgtctcagctctgggcataccttgtttgattctgactgaaatcgtgaacagaagtcttcttatctcagagcagggcttcaggacaccctcagcctcacactggtcttaatrttgtgtttaccaaagagccagatgcatgtttccagtgaccttctagaaacaatagtcctctttattggactccacaaaagcaatcaaatacagtgaccaaaccagttcttgcctgccaagatccttggagaataccaccatgctaatgtggtataagaaagataaaaacaaagaggttctagaagagatgatgcttttcctccacctttagaattctc

SEQ ID NO: 146127 - DNA, 268 bp, Homo sapiens
ctgggggtagagatgacggggctctctgcaccgtggagactgggggaagacctgagagacagtggcagaaatgtccacccattggggccagcgtgcactccaggctctcctaagaaagtgttcatttctccttttttctttgccctcctcctctgcagccagcttccctcccaacagaataccaataccaacccaactttttgggcracatttttaagccacagcaactgctcatctcactcaccctaaccttcctgcagcctgggag

SEQ ID NO: 146128 - DNA, 622 bp, Homo sapiens
tagagaaaggggctccagaaaattctagttctctcttttccagctgaatgtgattcctcaacagctgtgctggttggtgaatgatggtttcttcccagctgccttccaaaacgtgagataatggggatctcctgcaagtaacattcaggtttactccatccaaaagcagcctttagggttgggatggtaactggggtttcctgtgtcccragaccgcttcaagatcccacatctgtggcctccaggctaatgggaaacggagcaaccacatgacaagaacatccaacaaccttgcagatgcagaaagcttgggtccctcgatttttattccatttttggcccttctctgccctacatttctatggcttatttttgaaaaggcctagctgactttgaccctaattctaaaaactttactcacattttacctgcccctggccctttactaagctggcttgtgtcttcttcccaggccttcctctctaagtaggaggtgctcagaaatccctccagagagttgaggtccaaaatggtgtccaatttacagcttgtacacccctgtgactgtacaactagaattattcctacctaatctaaggttaatttagaacaagaaggcaat

SEQ ID NO: 146129 - DNA, 503 bp, Homo sapiens
gtatgtattacgtagttacctaattttgatcattgtactatggttatataagctgtattaataataggggaagatgagtaaagggcatatggggatgctctgcagcttttctcraagtatgaaagtatctgaaaatgtaaacaaagtagaaatttgcttttttatttcttactaaggtatctttaaatatatgaagtgatatgttaattagcttataaccatttcatagtgcatacatatatcaaaacatgtcatacattaactctatataatttttgtctgttaaaccctaataaaaaagaataaaagataaaagtttataaagatactgattgaccaagtgggaagagaaagaatatgactgttagctcagcaaagcataacaaatctgagtccacaaggaaagtattatatttacttcttggtgaagtaaagcaatttgcttctagcaaaatgatctgtttatggcctctctgtagcactttaccagtagcagctgacac

SEQ ID NO: 146130 - DNA, 674 bp, Homo sapiens
tacatcacagttctccaggatagaagtctgagcacaaagcacctgggttctctttcatggtcttgcaaagttgaaatcaagatgtcatccatgttgtggttctcacgcggagtttgggatcctctttcaagtatgttcagggtgttgactgaattcagttccatgcagttgtaggcacaaagacatactttcttgttggttgtcagccgggggctatcttccactcccttaaaagccacctgctagtccctgctacattgtcagtttgctctttcaaggtcagcaggagactcctgcagtggggtagtctgggctatctgctctgatgaaattttaagcaacrtaacataataatgggaatgagtatctcatcactttgctcacatggagaaactatcccatcatattcactaattcctacaatactcaaagggaggggattttatagggtttatacaccaggcggtgggaatcttgggagctgccatggcttgaatgttccttccaaaactcatgttgaaatgtaattcccagtgcaacagtgttaggagatagggctgaatgggagatatttaggtcataagggctccaccctcatgaactgattgtcattatcacacgagtaggttagttatctcaggagtgggttgttataaagcaggcacagtgccttg

SEQ ID NO: 146131 - DNA, 674 bp, Homo sapiens
tacatcacagttctccaggatagaagtctgagcacaaagcacctgggttctctttcatggtcttgcaaagttgaaatcaagatgtcatccatgttgtggttctcacgcggagtttgggatcctctttcaagtatgttcagggtgttgactgaattcagttccatgcagttgtaggcacaaagacatactttcttgttggttgtcagccgggggctatcttccactcccttaaaagccacctgctagtccctgctacattgtcagtttgctctttcaaggtcagcaggagactcctgcagtggggtagtctgggctatctgctctgatgaaattttaagcaacataacataataatgggaatgagtatctcatcactttgctcacatggagaaactatcccatcatattcactaattcctacaatactcaaagggaggggattttatagkgtttatacaccaggcggtgggaatcttgggagctgccatggcttgaatgttccttccaaaactcatgttgaaatgtaattcccagtgcaacagtgttaggagatagggctgaatgggagatatttaggtcataagggctccaccctcatgaactgattgtcattatcacacgagtaggttagttatctcaggagtgggttgttataaagcaggcacagtgccttg

SEQ ID NO: 146132 - DNA, 431 bp, Homo sapiens
tgccaaatttagatgtactatgtttgaacttgtgatttcctaggcaagtatattccaatctaatttagcagggagacatagtatagagtgagaatagcagctggaagagattgctacagagagcagagggaggtagaatagagatggaagaacatttgtagacattcaaacgtaagcaatctgtgtttgtgtacaaaatcaggctaattaacaatttaaaacagaacaggttagagtcctttttataacataaatacacattaggaatatatatatatatagtttctataacataaataaatgatattatatatgtatatacaattatatgaaagatagaaagttggtcacrttatgcccaatagcagccattatttaaaattgaaaatatgtttagaaataacacaggcataggaatgttacccccaaaa

SEQ ID NO: 146133 - DNA, 593 bp, Homo sapiens
aagaccccaaaattgaagtctttgtgtggatgtttgtaccttagaaggagatactttgtactcacaatcagaacgattgtttagtactaatactgtattttgatctgaaactgttaggactacagattagcacatactggagtggattgctatctgggagaagctgcagggtggacaggtctttagctaggggctgtccaaaaaggtgggggctatctctgaatccttgaagcaaaactgtccaagttaactgctgagttatttgagtgtctgggtcttgccattcaaaagcaaataaaaattgtctatccaggtgtacaggaatgaagaaaaaggaatccttaagatcaagtacagtaagcctccttaagattaagtacagtaagccaagctgtggtggagggaatttgttcaaaaagggggtaagggtttgggacaataggattaataggaataacagcttcattaataattctaaggtcctgtactagttggtaggagccatcttgtttctttacagctaaaatgggagtgttgcaaagcgagttacatgggcrcaataattcatggcttaaaagttttgttattagggg

SEQ ID NO: 146134 - DNA, 569 bp, Homo sapiens
ggggtctgatcactcactttttcaagtctactcttaggatcttctgtctgggaagccagctttgtcaataactgtttttctctgcctcagggccatgttggatctacctcaacagttttcagatgacagcaccaaacaaccctcccagcttctcccaaaggctgcctccaatttggatgtaatcagaatccaaactggctcctttccatgtctcctagtaggaagtgaccctggaagctgcaaagtcctcatttgcaaactgacagtcactttttcagtttcctaggccaagatgaaaaaggctcyttaccttccaagataaagcccccccgcccactagagcaaagagaaatcacacccacacccagctgacattcattttccattttcccagcctgtcactgctgagaaagagacagctgctgctgccaccacaggcagagagagagagagacagagagagagagagagagagagagagagaaaatcctttaacctcttaccatattaagtcacagaaattttcttgcaatgtgtcttcctgtcatttactcaggaaggtccctatg

SEQ ID NO: 146135 - DNA, 534 bp, Homo sapiens
cttacttcttcattctttctccctccagtcacatcaaacttacaatttcatcaaaatgtggcaggcctttcaaaattccgttcttctccatcatatgytttctctccctcatccaaatgactcctcctttctactctttaaggctcagctcaaatgtcacctcctctattaattcatttattcaataaaatatttacttatcattcattatatgccaagagttaggaacagacattccattgtcccctaggagctaattgttcatcctctcttgttcaccagtcaacattagaaaaatccttttgtgcattcccataggatttcttcttatctcctcatagaatccacccattccttgacatgcacttaccattctataccctgggcattcaatgatgaacagagcacatcactttgtgcttgcaccccgtgccactgtgttctcttgtaagccaatctggagaagcagagatgctacaattttcctcttgggatcacagtgaccaacccaaaggattggctgaagaaactaca

SEQ ID NO: 146136 - DNA, 445 bp, Homo sapiens
ctgaaccctttattaccattgctcagttgtgcaaatttaagcaaggtttttctcctctctgggcctcagttttcctacttggttaaagagtggggtaaattagaccccctgtatcagaatcgccaagctgatttattaaaatgtgcatttctaggccacagccaccccacagagattagaaactgtattagggccatgcagaagagtctgtgatctgcctttcctcagtgtccgccagtgactctcacayggagagcagaggccaaagaggcttccaaggcttcttccattcctgggggtaggaactggaccactcacatttttctcatgaaaactgtctccttcccagtgtctggccttagagaagaagagaggaaggagaagggggtggcatttcttgctacgacgggtgagtgccgctcccccaaatcccttgggttgtctg

SEQ ID NO: 146137 - DNA, 444 bp, Homo sapiens
tgaaccctttattaccattgctcagttgtgcaaatttaagcaaggtttttctcctctctgggcctcagttttcctacttggttaaagagtggggtaaattagaccccctgtatcagaatcgccaagctgatttattaaaatgtgcatttctaggccacagccaccccacagagattagaaactgtattagggccatgcagaagagtctgtgatctgcctttcctcagtgtccgccagtgactctcacacggagagcagaggccaaagaggcttccaaggcttcttccattcctgggggtaggaactggaccactcacatttttctcatgaaaactgtytccttcccagtgtctggccttagagaagaagagaggaaggagaagggggtggcatttcttgctacgacgggtgagtgccgctcccccaaatcccttgggttgtctg

SEQ ID NO: 146138 - DNA, 612 bp, Homo sapiens
taactcccctttgccataacagggctactggaggcaaygggcttatgtcacaaaaggaagtctgagacagacatacttaagcagggcaaatgctgccaactagccagctgtctagcttgagtgaggccactgcaccccctcaggcacccgtgtggcactttacctgcgcagtctactctgcaccagctgctataagatctgcaggaggcacaatcaaccttgcttgtgacctgccaaggcaacagagtcctccatgcaggtgagggaccaggattatgtcagttcggggtctccaggcagcagggatgccccaggctaccaggctggcaggattcctacacctttccagccagaatggtgggccctgtgtcatcttcttcactgagcaccatttttttttttttttttttagcactattcctttcaccaaggaaagaatatttctaccactccttgggttgattttgataacaatatttgaagtctgaactaaacaccagtggagcacagatttttgaacaggatgtaatacagagcatttttcaaataagttccctgacagattacaaaaagatatttttctatttttggataaaaagaccaccataataa

SEQ ID NO: 146139 - DNA, 631 bp, Homo sapiens
atcaaagcttctggggttagaggtaggtggggactctaactcccctttgccataacagggctactggaggcaacgggcttatgtcacaaaaggaagtctgagacagacatacttaagcagggcaaatgctgccaactagccagctgtctagcttgagtgaggccactgcaccccctcaggcacccgtgtggcactttacctgcgcagtctactctgcaccagctgctataagatctgcrggaggcacaatcaaccttgcttgtgacctgccaaggcaacagagtcctccatgcaggtgagggaccaggattatgtcagttcggggtctccaggcagcagggatgccccaggctaccaggctggcaggattcctacacctttccagccagaatggtgggccctgtgtcatcttcttcactgagcaccatttttttttttttttttttagcactattcctttcaccaaggaaagaatatttctaccactccttgggttgattttgataacaatatttgaagtctgaactaaacaccagtggagcacagatttttgaacaggatgtaatacagagcatttttcaaataagttccctgacagattacaaaaagatatttttctatttttggataa

SEQ ID NO: 146140 - DNA, 616 bp, Homo sapiens
agcgcagggtgagggggagtatggatggagaagacatattcatagtgtcttttaaatagtgaattttgcctttcatgtcaaatgcctctattttctagttctaacacaaggcacttaacttgtaggggcctcagtttcatcgcatatggagtagaattaaaatcttacctatgtattaatacattttaaggttactacgaggatcaaaaaaatcatgtgcytaaataatattgctggtacatattacttatctactacattttactctccaaaactcttagctccatttccatttctggctagaagagggacatgtacctctgtgctgagtttagaaaaaagaacactgcatcacagctgatataacaagcagtaaagaacgtctatatccaaactggtaaggagaattcagcacagttgttagaaaaaaggcaatgctctcttaaccaagagcaactgtaacaaaatgtaacttttaaaaggatacaataaaaaccagttatctagaaataaatctagtaagtgcaggagctgtatggagaaacttaaaagtgcactaaataatattatgctcaagagcacagtaggccaatcttccccaaatgaaatcaacgaa

SEQ ID NO: 146141 - DNA, 518 bp, Homo sapiens
aaaaatgagatgtgcacactgatacktgcacagagagacaaggatgtctgtctttggcaggtaaacaagacacaggcacaaataagttaaatataaaaagaaatgccttttaagaagggagcagcttaggattctcactagaatcatgggtactctccataaggggaaagttcaccacacagatccaagtatggtataccaatcatccactggggagagccatttccatagtgaagtgtttgacagagtggcctgcacagagttgtggagcaggagtgccagaggctggagcacagacctaagaaataaacagccttcttactaaaagtgcattttcatttagcatgatatgtctagtgaaggaatatatgccatctctctataaacattatgggcggaatattgaaataagggggatttttgggttgttcagaaggtgaatttttagctctttaagtggaggtccaagcaacacaaatggtgacaacttcctcctcttctcaagaagaaaacctgag

SEQ ID NO: 146142 - DNA, 569 bp, Homo sapiens
gcaatgcaaacccatgagagtagcacccaatctggctctgtaaatgagagagtgcagtagaatagacgtctattttcacatccttagaacaagaaatatttattgccatgaccattttgtgttgcttcaygaatttttctcctggaagtaccagagagaagtcaaagagagaagcatgtaatttacaagacttaaagaaaagtcttccaattggaaagaaattaaagttgaccgtgtcccttgtagtctttcttcacttcacattttataaatgtccttgtattcctttgttaattacttgattataaagtcttttcaaaaatcaaatactttacatggctaagtaataaaagtttaatttaaaagcatcagaccatgacatatttttagccaaaaatgagcctcttgggttaagcaaattatacttttttgttctgggtcacatactatcatatatacttttttatttaaaaccatgacttcaggcaacatctaaaattcttccacattttttctctttctttttgctaactttagattttaaactttaactcttattaaggaatcca

SEQ ID NO: 146143 - DNA, 469 bp, Homo sapiens
gaattcattcaattctgcttcattcaaattcctaatgtagtctactagcactgtggaactcatcaatggcaataatactcaagagcaacacatttttttctaatatcttttttcatgctttctagacagggattgaaattacaaatataccttctcaaactctccaaattccattttattgaccaaagacacattagggcaaaatagwctttgagtcctggtcaagagggaaggctatcataagtagatcccaaaatttgaggcatttctgtttcaaatgaagtcattgtaatttaatgcgggggaaaatgctgagtggttcatcacaggcaaaacagggagttcctaaaaagttagggaagtgctttccatataaaatcctcccagtgataagcaggagtgagagtaaggatgtactgcaggcacttggaaaattacttcaaaataagaacttgcagtttttcctaat

SEQ ID NO: 146144 - DNA, 563 bp, Homo sapiens
gattatcgtggcagaaaggagaaagcagacaaactataatgagtcttaaaaatcccaccagaagtgacacaggtccattctgatcatattcacctagccagaactagtcactaggtcagatccagcttcatggggttagggaagggcagtccttcaagatgtctgggaagagaattggaaatatttcgcaattagcaataatgactgccttatagaaatgatcatagtcactgtgaagcccagcagtaaacatgcagagggtatagaaatgatccctcttcttttcagatctcaactgaaatatactatccacagtaaagcagttttctttatcccttaarccagctgcttctcaaatttaatgtgaacaccaattatctggggatcttattaaagtgcaggtctagaaaggggcctgagatcctgtgttctaagtagctcccaagtgatgctaatgctgctggcttgtagaccatgctctgtgtagcctgtctacaggtttctcttaagtacaggcatccttcttattagcacctgtctccatttatacatttgcatgatcc

SEQ ID NO: 146145 - DNA, 410 bp, Homo sapiens
gcaattgaatcgtgggagtaggtctttcccatgctcttctcatgatagtgaataagtctcatgagatctgatggttttataagggtgtttccctgcacaasctctctttgcttgtctgctgccatgtgagacgtgcctttcacctttcgccatgattgtgaggcctccccagccatgtggaactgtgagtccattaaagctccttcttctgtaaattgcccaatctcgggtatgtctttatcagcagcatgaaaacagactaatacaaattgtattgaatgttccgatctacttaaataaaaagtgattcttcttagaaaaaaaaaagattgaaatctttcttcccatctcttggcctatagaacattgataatcaaactttaatgcatttaaggttcactcaagaattc

SEQ ID NO: 146146 - DNA, 410 bp, Homo sapiens
gcaattgaatcgtgggagtaggtctttcccatgctcttctcatgatagtgaataagtctcatgagatctgatggttttataagggtgtttccctgcacaacctctctttgcttgtctgctgccatgtgagacgtgcctttcacctttcgccatgattgtgaggcctccccagccatgtggaactgtgagtccattaaagctccttcttctgtaaattgcccaatctcgggtatgtctttatcagcagcatgaaaacagactaatacaaattgtattgaatkttccgatctacttaaataaaaagtgattcttcttagaaaaaaaaaagattgaaatctttcttcccatctcttggcctatagaacattgataatcaaactttaatgcatttaaggttcactcaagaattc

SEQ ID NO: 146147 - DNA, 594 bp, Homo sapiens
gataagaggttgtagagaccaaagttttaccatgcagatgaagcctccaggtagcaggcttcagggagaataaattgtaaatgtttcttatcaaacttaaagtctgtgttaatgttaatgctgaacggtatagtgaggcatatcccacccccacttccatcatggcttgaaacagtgtttcaggttaaattttagaatgacctggccaaggaggaagtccatttagatggttggagggccttagaattttatttttggtttacacatgtactggaataatatgtagcccatattgtatataccagtgagattgtggatgactatttttctttgccatttttattttgtggaaaattcttatgtaactttstaaggtatgttagaactcactgtgaaacctcaggtcctacttcttgtcataaggacaggaagttcatgctcatttgtttgcagggtctcatcagggtgtaggaagatagggagaaaagctgataccgagtagtaattgttaccacttgttttgtttggttgattggtaggttagtgggtgggttttattttttagcctattaaataaaagccttaaaattagaa

SEQ ID NO: 146148 - DNA, 182 bp, Homo sapiens
cctgagtctaggtaagaaccagtacgagctcggggtcacctccttacacagtttactgcttttacttaatgatcratagctgttatgcatgccaaacttgtgatgtgataggtcaaataatcccaattaatcatgctcagctcaggttacatggtgatttgacgtcccattgttcaacactc

SEQ ID NO: 146149 - DNA, 425 bp, Homo sapiens
ctacttagcccttcctgtaatcatgatcctgaattcacaggtctgaaagtcaatgtagagattctatcarttgccaagtgcctatctcaattatgcattcagaagttgaatctgcatccccactgaactgactgttagacaaaggttaacattccatttaccatctgacttctgtaagcatccactttgattgatgggtataatggcattttgggtccccagaaattaggatcactttagagccagtgactggatatcagtaataaattccctttcctaagtgcttagctatcataacacatggctacaaatccattttggaaaaaaacttggagaaagtactagcaatacatacttgtggcaatgttgcagttatttttcaagggaaactggaacccccttaaatcaaggagatacatgtctgt

SEQ ID NO: 146150 - DNA, 425 bp, Homo sapiens
ctacttagcccttcctgtaatcatgatcctgaattcacaggtctgaaagtcaatgtagagattctatcagttgccaagtgcctatctcaattatgcattcagaagttgaatctgcatccccactgaactgactgttagacaaaggttaacattccatttaccatctgacttctgtaagcatccactttgattgatggstataatggcattttgggtccccagaaattaggatcactttagagccagtgactggatatcagtaataaattccctttcctaagtgcttagctatcataacacatggctacaaatccattttggaaaaaaacttggagaaagtactagcaatacatacttgtggcaatgttgcagttatttttcaagggaaactggaacccccttaaatcaaggagatacatgtctgt

SEQ ID NO: 146151 - DNA, 425 bp, Homo sapiens
ctacttagcccttcctgtaatcatgatcctgaattcacaggtctgaaagtcaatgtagagattctatcagttgccaagtgcctatctcaattatgcattcagaagttgaatctgcatccccactgaactgactgttagacaaaggttaacattccatttaccatctgacttctgtaagcatccactttgattgatgggtataatggcattttgggtccccagaaattaggatcactttagagccagtgactggatatcastaataaattccctttcctaagtgcttagctatcataacacatggctacaaatccattttggaaaaaaacttggagaaagtactagcaatacatacttgtggcaatgttgcagttatttttcaagggaaactggaacccccttaaatcaaggagatacatgtctgt

SEQ ID NO: 146152 - DNA, 425 bp, Homo sapiens
ctacttagcccttcctgtaatcatgatcctgaattcacaggtctgaaagtcaatgtagagattctatcagttgccaagtgcctatctcaattatgcattcagaagttgaatctgcatccccactgaactgactgttagacaaaggttaacattccatttaccatctgacttctgtaagcatccactttgattgatgggtataatggcattttgggtccccagaaattaggatcactttagagccagtgactggatatcagtaataaattccctttcctaagtgcttagctatcataacacatggctacaaatccattttggaaaaaaacttggagaaagtactagcaatacatacttgtggcaatgttgcagttatttttcaagggaaactggaacccccttwaatcaaggagatacatgtctgt

SEQ ID NO: 146153 - DNA, 649 bp, Homo sapiens
tttcagatcataatatccaccaattttgtattttctgtttcatgcaacatttattagggaacattttcccttgccattcaatattgtttcatgttatttkattttagtataataatcaatcatgtttatataccaaagattaagagcatacttggaggtgatcattgaagtaactaggcttgaaaggatatgagaagaaattaaatttagcaagaattagccttaaatgagaaaaaagaacacccttttttctctcaaacaatagggaaagctgggataaaagaacagcaagaaattctataatgtaaagatagtagactgtaaagtttctctgttaattaaaaaaagaagataaagaggatatggtaagaggatttatacaagcattgaaaagcaggttcaagttttgttcttgctgctgtgggatatagagaaatgaagaaactggaaattcataaaattagagctcttattatgttatacattatgttattttagtggttattattactaggtgaaattgtagagattaaagaaaattattatcttttcaaaacatatatatatatatgtacacataacttttataattagaaaaataagccataaaattgtagaggcaaaaacacagaatcatctgaccagcagt

SEQ ID NO: 146154 - DNA, 594 bp, Homo sapiens
catgcaacatttattagggaacattttcccttgccattcaatattgtttcatgttatttgattttagtataataatcaatcatgtttatataccaaagattaagagcatacttggaggtgatcattgaagtaactaggcttgaaaggatatgagaagaaattaaatttagcaagaattagccttaaatgagaaaaaagaacacccttttttctctcaaacaatagggaaagctgggataaaagaacagcaagaaattctataatgtaaagatagtagactgtaaagtttctctgttaattaaaaaaagaagataaagaggatatggtaagaggatttatacaagcattgaaaagcaggttcaagttttgttcttgctgctgtgggrtatagagaaatgaagaaactggaaattcataaaattagagctcttattatgttatacattatgttattttagtggttattattactaggtgaaattgtagagattaaagaaaattattatcttttcaaaacatatatatatatatgtacacataacttttataattagaaaaataagccataaaattgtagaggcaaaaacacagaat

SEQ ID NO: 146155 - DNA, 588 bp, Homo sapiens
acccagttctttcaaagcatcctacataataaagggctattgttgaggcatatgtggtttgtggtacctgattctatactgggattttaccttttacgcatatgkaagtgatagaaacaaaattagcacagcacttcactgagaatgaaacaggagagtgagaaaacattactaacacacttttcaaaggctgttgagactttagtcttttcagtattactaaaattataaaaaaaagaattgtgattttaactgtaggtgtttagatcaaagatcaaatggagttaaggctcaaagttaaatgtttatattgaggtggtgggtaaccatggccttaagaagtgctggggaaaaaatatcagcacatcttaataggacaaactattgatcttaaaaatatcaccaactatttcactaatctttctctgtcattgtgtgagatgctacaaaggaaaaaaatgaatgcagagctagacactccttagaatccttccatcctatctgaattgcaaagaaaggcagtgaaaatttcaggaagtgatgccacaagaagggtgatgttcctgagccttttgaagtcacaaaaac

SEQ ID NO: 146156 - DNA, 570 bp, Homo sapiens
ctgtggctcacgcctgtaatcccagcattttaggaggctgaggcgggcagatcatttgaggtcaggagtttgagaccagcctgaccattatggtgaaacctcatctctaccaaaaatacaaaaaattagtggggcatggtgatgtacacctgcaatcccagctacttaggaggctgargcaggagaatcgcttgaacccagaaggccgaagttgcagtgagccaagatcgcgtcactgcacactacagcccggcaacagcgtgtgactaaaaaaaaaaaaagaaagcagatgtgtctacagttggcagaagagtttgttttatacagattataaaatattatgagatttatgattataaagaaattaatgcctcttttaggacaaagacattgttgtatacctcctctaggaactaaaatataaggttgacttctctgtttccaagtgttttgcattaaagcaaataaagcaggtaagggtgaaataatacacccttatctggatataatgtgatatacaactgaccaacattaattttagaattatattttacaagttttttgaaagat

SEQ ID NO: 146157 - DNA, 570 bp, Homo sapiens
ctgtggctcacgcctgtaatcccagcattttaggaggctgaggcgggcagatcatttgaggtcaggagtttgagaccagcctgaccattatggtgaaacctcatctctaccaaaaatacaaaaaattagtggggcatggtgatgtacacctgcaatcccagctacttaggaggctgaagcaggagaatcgcttgaacccagaaggccraagttgcagtgagccaagatcgcgtcactgcacactacagcccggcaacagcgtgtgactaaaaaaaaaaaaagaaagcagatgtgtctacagttggcagaagagtttgttttatacagattataaaatattatgagatttatgattataaagaaattaatgcctcttttaggacaaagacattgttgtatacctcctctaggaactaaaatataaggttgacttctctgtttccaagtgttttgcattaaagcaaataaagcaggtaagggtgaaataatacacccttatctggatataatgtgatatacaactgaccaacattaattttagaattatattttacaagttttttgaaagat

SEQ ID NO: 146158 - DNA, 570 bp, Homo sapiens
ctgtggctcacgcctgtaatcccagcattttaggaggctgaggcgggcagatcatttgaggtcaggagtttgagaccagcctgaccattatggtgaaacctcatctctaccaaaaatacaaaaaattagtggggcatggtgatgtacacctgcaatcccagctacttaggaggctgaagcaggagaatcgcttgaacccagaaggccgaagttgcagtgagccaagatcgcgtcactgcacactacagcccggcaacagcgtgtgactaaaaaaaaaaaaagaaagcagatgtgtctacagttggcagaagagtttgttttatacagattataaaakattatgagatttatgattataaagaaattaatgcctcttttaggacaaagacattgttgtatacctcctctaggaactaaaatataaggttgacttctctgtttccaagtgttttgcattaaagcaaataaagcaggtaagggtgaaataatacacccttatctggatataatgtgatatacaactgaccaacattaattttagaattatattttacaagttttttgaaagat

SEQ ID NO: 146159 - DNA, 570 bp, Homo sapiens
ctgtggctcacgcctgtaatcccagcattttaggaggctgaggcgggcagatcatttgaggtcaggagtttgagaccagcctgaccattatggtgaaacctcatctctaccaaaaatacaaaaaattagtggggcatggtgatgtacacctgcaatcccagctacttaggaggctgaagcaggagaatcgcttgaacccagaaggccgaagttgcagtgagccaagatcgcgtcactgcacactacagcccggcaacagcgtgtgactaaaaaaaaaaaaagaaagcagatgtgtctacagttggcagaagagtttgttttatacagattataaaatattatgagatttatgattataaagaaattaatgcctcttttaggacaaagacattgttgtatacctcctctaggaactaaaatataagrttgacttctctgtttccaagtgttttgcattaaagcaaataaagcaggtaagggtgaaataatacacccttatctggatataatgtgatatacaactgaccaacattaattttagaattatattttacaagttttttgaaagat

SEQ ID NO: 146160 - DNA, 600 bp, Homo sapiens
atatagtgtgggtattaatcccttatcagatacatracttgtaaatattctgttttttactctgatagtgtcttttcatgcacaaaggtttttaaattcttgtcaagcccaatttgtgtagttttttcttttgttgcctgtgccattgatgtcatattcacaaaatcattgccaaattcagtgttgttaagcttttgccatatgttttttcctaagagtttgtaattttagttcttatatttaggtcatgatctattttaatttttgtatatggtgtaagagaccagcttcattcttttgtagtggatatccaattttcctagcaccatttgtttaaaaaactgtctttatgccaataacacacttgttttgggtaatgcagctttgcagtaagttttgaaatcaggaagtgagtccttaaactttgttctttttccaaaattgttttggctatttgggagtccttgtaattccatatgaatttgaggatggagttttctatttctgcagaaacatcattgggattttgataaggattccatagaatctgaagattgatttatataatattaacatctaaacaatattaagtcttctaat

SEQ ID NO: 146161 - DNA, 395 bp, Homo sapiens
ccttttccttcctttcctctttccctccttcctttaatcatccatctatgcatgcatatattcatctcctacccatccatcccgccatgcatccaatctccacttttaagagctatttccaaccagttggcacagatacacactaatttacagaatatgtgtactcaacaatatctattacttaarccacttcaaaatatgtaacctttattttcttactctttaggtcacatttttctggagcataaattttaacccagaaatgaattgatcagattttcctttgtcattaagaaggccattttgaaatatcattttataagaaggccattttgaaatgtcactaagaaagccttacacacggttcttggctgacaatcatttatactttacaa

SEQ ID NO: 146162 - DNA, 417 bp, Homo sapiens
gaattcgttcactgtgttctttcattccttttccttcctttcctctttccctccttcctttaatcatccatctatgcatgcatatattcatctcctacccatccatcccgccatgcatccaatctccacttttaagagctatttccaaccagttggcacagatacacactaatttacagaatatgtgtactcaacaatatctattacttaaaccacttcaaaatatgtaacctttattttcttactctttargtcacatttttctggagcataaattttaacccagaaatgaattgatcagattttcctttgtcattaagaaggccattttgaaatatcattttataagaaggccattttgaaatgtcactaagaaagccttacacacggttcttggctgacaatcatttatacttt

SEQ ID NO: 146163 - DNA, 562 bp, Homo sapiens
tccctttggcataaacagccagggaatataactaacatcaaagatcccagactctcgacacaatatactactaatcgtaacacaattctagagggtcaaaaaaggtagagaagtttggaccgtggaacagacctggtggaatgtcgacacaaagcgtttcagggtagacaaagcctactcagaacaccctaaacgcggagttttgctaagttgggacgctaaaaggcaagggaatgacaggamgtccgcaggctaattcgccattaagaaacagaaccgcggcttcttccacctccagcgtcatcggcccccaattcgctgtaacaaacggatagtgtctcgcagcatcagacaacggacttggaaatcagtttgcgaccacgcatctgcgccttttctaggaaaagaggaaggcgggtccaacactggtaacggcagaaacatagttcacaagggccactgcaaacgccccgccagcagcggaaccgttatctcgcgagacgacggatccccataaggcacaaacctagcgccaaggttggctgtcaaggtagattccagg

SEQ ID NO: 146164 - DNA, 562 bp, Homo sapiens
tccctttggcataaacagccagggaatataactaacatcaaagatcccagactctcgacacaatatactactaatcgtaacacaattctagagggtcaaaaaaggtagagaagtttggaccgtggaacagacctggtggaatgtcgacacaaagcgtttcagggtagacaaagcctactcagaacaccctaaacgcggagttttgctaagttgggacgctaaaaggcaagggaatgacaggacgtccgcaggctaattcgccattaagaaacagaaccgcggcttcttccacctccagcgtcatcggcccccaattcgctgtaacaaacggatagtgtctcgcagcatcagacaacggacttggaaatcagtttgcgaccacrcatctgcgccttttctaggaaaagaggaaggcgggtccaacactggtaacggcagaaacatagttcacaagggccactgcaaacgccccgccagcagcggaaccgttatctcgcgagacgacggatccccataaggcacaaacctagcgccaaggttggctgtcaaggtagattccagg

SEQ ID NO: 146165 - DNA, 587 bp, Homo sapiens
aacttaaagcatcccaaacggagttcctggtcctcccccagcacagctaatggcagctgtactgtcccgcctctcatgccagacttggtcccagtgctccccagcggcaaacactgtgggttcctaccttgaaacagatccygattccagcaattttcatctcatccgctaccacccaaagccaagacatcagcccctctgtattgcaagtatcctgctttgtcagttttacctccaaagtcagtttcaacacagccaccagagtgaaggtttgggagtgtgccatggcttctctcagtgagaagcagagtcttcacaaagactcacgttgaggaacttacatgtgctgttttctccctgccttaccccatggccttatcctggcccttctctgaccgctctctttaaaatagcaaatcctcatcatactcatcttttttctgtttacccaaaccatgttcttatttattttgtctttcccacactggaaggcaagctctgagagggcagggacttttgtctcttttgtttactgttgtgtcctcagcaccacggcctggcatgcagaagggccttacatgtgttga

SEQ ID NO: 146166 - DNA, 587 bp, Homo sapiens
aacttaaagcatcccaaacggagttcctggtcctcccccagcacagctaatggcagctgtactgtcccgcctctcatgccagacttggtcccagtgctccccagcggcaaacactgtgggttcctaccttgaaacagatcccgattccagcaattttcatctcatccgctaccacccaaagccaagacatcagcccctctgtattgcragtatcctgctttgtcagttttacctccaaagtcagtttcaacacagccaccagagtgaaggtttgggagtgtgccatggcttctctcagtgagaagcagagtcttcacaaagactcacgttgaggaacttacatgtgctgttttctccctgccttaccccatggccttatcctggcccttctctgaccgctctctttaaaatagcaaatcctcatcatactcatcttttttctgtttacccaaaccatgttcttatttattttgtctttcccacactggaaggcaagctctgagagggcagggacttttgtctcttttgtttactgttgtgtcctcagcaccacggcctggcatgcagaagggccttacatgtgttga

SEQ ID NO: 146167 - DNA, 568 bp, Homo sapiens
ccctgcaaactaaacacatctgattcccaaaccatctccttgcagtcaggaatggcccatgcagtgacrcattcatggaggggctcccacagttcccagccctgccaaatcactgacatgcttccccagacactatgaatggtgccagcaagtcccgctggaagccgagtctcctcatgtcctgattctgttctgtcttcagacagactcagaggggaacatgagcatgaaacacacagcaatgtggccatcagccagggacatcagagcccaacccacttcttcttggggtgaagacagacctagcattgacagcagagggaggtgtgatttccccagcaaagtccagacttcctcactgggagctttagaaacctccaggtgtgaaggttacttaataggtgttgagtataggatcagggatccatgaggccaggagggtcaaagaaggaaagggagcctgggctagggaatggcctgagggtgaaggacctctccccaccaccttcatttctggactatttgatgaaggaaggagcaaccattgctcttcactggtgtcggcggg

SEQ ID NO: 146168 - DNA, 669 bp, Homo sapiens
gatttttttcagattttggaatatttgcctatacataatsacatatcttggggatggaacccaagtctaaacacaaaactcatttatgtttcatacatatcttacacacttagtcttaaggtaatttttatatttttaataactttgtgcatgaaacaaaattttgactgttttgactacatctcaccacatgaggtcaggggttgaattttccaattgtggtgtcaggttggcactcaaaaagttttagatggcgcgtcctcattattatagcaatgagtatccccacctgtcagaaagtttttagagtttggatttttggattaagggtgctcagtctgtacaaaccccttatgaggtacctagtctgtttctgatctattctacagcataaggagattaatcttcccaaataaatgatttctgataccattactactatagttaaaaatcttatggcttcctactgacttctgaattccataaagtcctgaatcctccaatcaaaactttcacaatatggccatgaactaattttccagacttttcctccactactattcaaacccattgtggccatcctttcaaaattattatttacttattcactgtttttcaaatatacttcatgctttgctctgttgctttgtctaaacagtgctgtccatt

SEQ ID NO: 146169 - DNA, 586 bp, Homo sapiens
tacattaatggtcagtagagtaagaactcttagtagacagcatttaccattaccaagaatataatgctggtttactttcattcagtttaattaatgcatgtgtgctagagttgaaaaaggaaaggcaacacaaatcaaaaagtcagttgctcatgattgttgtgttgaaaactgctaaatgtctaccaaaatctattcttttcttgcacacttggctagactacagctcttarcctctcttgctttaatatgtgactgagatcgggcgtagtggctcacgcctgtaatcccaacactgtgggaggccgaggcgggtggatcacctgaggtcaggagttggagaccagcctggctaacatggtgaaaccgcatctctactaaaaaaatttcaaaaaattagctgggcatgggggcgtgtgcctctaatcccagctactcaggaggctgaggcagaagaatcgcttgaaccctggaggcagaggttgcagtgagctgagattgtgccattgcactccagcctgggcaacaagagcgaaactccgtctcaaaacaaaacaaaacaaaacacacaaagtgagttttttct

SEQ ID NO: 146170 - DNA, 531 bp, Homo sapiens
acaacctgctgtgccagggaactgcaactaggcggggcttttctggcataaggaatatggggtggagtgtgggaagaggtgaaggtctggaggcttctgaccttccaggattcatgtggatgccttacatcttagcccatccatcacaatcctctggaaaactaaaataaattattattctttcttctattactaattagttttgttttaagcatatcaacttattgttaatcattcatacaggaggttacaaaaggaaaagtcaaagctgtttttgccacttctatatctaaccacctagtcctactcagctgtagaatatgttacaaaaactctcagaagtgcttataggtatcaagcattatttcttctgtctgcttattatgtatttatataagactattgacttatttatattaattttgtatgctacctstttaccaaattctcttattatttatattaatttctccatttacttttgttttcttttttctctcttttgagacaaggtcttgctctatcacccag

SEQ ID NO: 146171 - DNA, 593 bp, Homo sapiens
gccaccagatctgggatattttaaaatttttgyagacatagggtctcgccatgttgcccaggctgattctgaactcctgttctcaagcaatcctcctgcctggtcttcccaaactgttgggcttacaggtgtgagtcactgagcccagcttgtattcttttgattttaaaaaaatattctgaatgtgatccaccaaattaatttcaccatccactaataggtagcaacctgaatgaaaaatactgttataaactttacacaaaaccagagattataaacatttgcctccaaggagatgagagaggcaaaaggtacttgtttgctctgatgggccctgtttccttcagtgccaggaagagtggctctcagatctttcttctggcatccctcatgtatgcagtgttggttattattttcaaggccttggtaacaaaatgcccctagtgtgaccagtcagactgacagtccatatctgtaatatggtggtaagtttcctttgcatgtctttctttcttgcatcttagaccttttacctaggaaattttctttttgcttaaagtacatcattaagaattttcaatgaaggcagattc

SEQ ID NO: 146172 - DNA, 593 bp, Homo sapiens
gccaccagatctgggatattttaaaatttttgcagacatagggtctcgccatgttgcccaggctgattctgaactcctgttctcaagcaatcctcctgcctggtcttcccaaactgttgggcttacaggtgtgagtcaytgagcccagcttgtattcttttgattttaaaaaaatattctgaatgtgatccaccaaattaatttcaccatccactaataggtagcaacctgaatgaaaaatactgttataaactttacacaaaaccagagattataaacatttgcctccaaggagatgagagaggcaaaaggtacttgtttgctctgatgggccctgtttccttcagtgccaggaagagtggctctcagatctttcttctggcatccctcatgtatgcagtgttggttattattttcaaggccttggtaacaaaatgcccctagtgtgaccagtcagactgacagtccatatctgtaatatggtggtaagtttcctttgcatgtctttctttcttgcatcttagaccttttacctaggaaattttctttttgcttaaagtacatcattaagaattttcaatgaaggcagattc

SEQ ID NO: 146173 - DNA, 589 bp, Homo sapiens
ccagatctgggatattttaaaatttttgcagacatagggtctcgccatgttgcccaggctgattctgaactcctgttctcaagcaatcctcctgcctggtcttcccaaactgttgggcttacaggtgtgagtcactgagcccagcttgtattcttttgattttaaaaaaatatyctgaatgtgatccaccaaattaatttcaccatccactaataggtagcaacctgaatgaaaaatactgttataaactttacacaaaaccagagattataaacatttgcctccaaggagatgagagaggcaaaaggtacttgtttgctctgatgggccctgtttccttcagtgccaggaagagtggctctcagatctttcttctggcatccctcatgtatgcagtgttggttattattttcaaggccttggtaacaaaatgcccctagtgtgaccagtcagactgacagtccatatctgtaatatggtggtaagtttcctttgcatgtctttctttcttgcatcttagaccttttacctaggaaattttctttttgcttaaagtacatcattaagaattttcaatgaaggcagattc

SEQ ID NO: 146174 - DNA, 589 bp, Homo sapiens
ccagatctgggatattttaaaatttttgcagacatagggtctcgccatgttgcccaggctgattctgaactcctgttctcaagcaatcctcctgcctggtcttcccaaactgttgggcttacaggtgtgagtcactgagcccagcttgtattcttttgattttaaaaaaatattctgaatgtgatccaccaaattaatttcaccatccactaataggtagcaacctgaatgaaaaatactgttataaactttacacaaaaccagagattataaacatttgcctccaaggagatgagagaggcaaaaggtacttgtttgctctgatgggccctgtttccttcagtgccaggaagagtggctctcagayctttcttctggcatccctcatgtatgcagtgttggttattattttcaaggccttggtaacaaaatgcccctagtgtgaccagtcagactgacagtccatatctgtaatatggtggtaagtttcctttgcatgtctttctttcttgcatcttagaccttttacctaggaaattttctttttgcttaaagtacatcattaagaattttcaatgaaggcagattc

SEQ ID NO: 146175 - DNA, 573 bp, Homo sapiens
tctcgccatgttgcccaggctgattctgaactcctgttctcaagcaatcctcctgcctggtcttcccaaactgttgggcttacaggtgtgagtcactgagcccagcttgtattcttttgattttaaaaaaatattctgaatgtgatccaccaaattaatttcaccatccactaataggtagcaacctgaatgaaaaatactgttataaactttacacaaaaccagagattataaacatttgcctccaaggagatgagagaggcaaaaggtacttgtttgctctgatgggccctgtttccttcagtgccaggaagagtggctctcagatctttcttctggcatccctcatgtatgcagtgttggttattattttcaaggccttggtaacaaaatgcccctagtgtgaccagtcagactgacagtccatatctgtaatatggtggtaagtttcctttgcatgtctttctttctwgcatcttagaccttttacctaggaaattttctttttgcttaaagtacatcattaagaattttcaatgaaggcagattcttaaagtttttgttttccagaag

SEQ ID NO: 146176 - DNA, 561 bp, Homo sapiens
cagacatagggtctcgccatgttgcccaggctgattctgaactcctgttctcaagcaatcctcctgcctggtcttcccaaactgttgggcttacaggtgtgagtcactgagcccagcttgtattcttttgattttaaaaaaatattctgaatgtgatccaccaaattaatttcaccatccactaataggtagcaacctgaatgaaaaatactgttataaactttacacaaaaccagagattataaacatttgcctccaaggagatgagagaggcaaaaggtacttgtttgctctgatgggccctgtttccttcagtgccaggaagagtggctctcagatctttcttctggcatccctcatgtatgcagtgttggttattattttcaaggccttggtaacaaaatgcccctagtgtgaccagtcagactgacagtccatatctgtaatatggtggtaagtttcctttgcatgtctttctttcttgcatcttagaccttttacctaggaaattttctttttgcttraagtacatcattaagaattttcaatgaaggcagattc

SEQ ID NO: 146177 - DNA, 573 bp, Homo sapiens
tctcgccatgttgcccaggctgattctgaactcctgttctcaagcaatcctcctgcctggtcttcccaaactgttgggcttacaggtgtgagtcactgagcccagcttgtattcttttgattttaaaaaaatattctgaatgtgatccaccaaattaatttcaccatccactaataggtagcaacctgaatgaaaaatactgttataaactttacacaaaaccagagattataaacatttgcctccaaggagatgagagaggcaaaaggtacttgtttgctctgatgggccctgtttccttcagtgccaggaagagtggctctcagatctttcttctggcatccctcatgtatgcagtgttggttattattttcaaggccttggtaacaaaatgcccctagtgtgaccagtcagactgacagtccatatctgtaatatggtggtaagtttcctttgcatgtctttctttcttgcatcttagaccttttacctaggaaattttctttttgcttaaagtacatcattaagaatttycaatgaaggcagattcttaaagtttttgttttccagaag

SEQ ID NO: 146178 - DNA, 573 bp, Homo sapiens
tctcgccatgttgcccaggctgattctgaactcctgttctcaagcaatcctcctgcctggtcttcccaaactgttgggcttacaggtgtgagtcactgagcccagcttgtattcttttgattttaaaaaaatattctgaatgtgatccaccaaattaatttcaccatccactaataggtagcaacctgaatgaaaaatactgttataaactttacacaaaaccagagattataaacatttgcctccaaggagatgagagaggcaaaaggtacttgtttgctctgatgggccctgtttccttcagtgccaggaagagtggctctcagatctttcttctggcatccctcatgtatgcagtgttggttattattttcaaggccttggtaacaaaatgcccctagtgtgaccagtcagactgacagtccatatctgtaatatggtggtaagtttcctttgcatgtctttctttcttgcatcttagaccttttacctaggaaattttctttttgcttaaagtacatcattaagaattttcartgaaggcagattcttaaagtttttgttttccagaag

SEQ ID NO: 146179 - DNA, 426 bp, Homo sapiens
tagctagtggccttgcacagtggcaggacagatctattaggagcagcaaagtacaggggaaaagcatgtacttttcagacagctatgrgtttaaattttgttccaccatttaccagcttcaatttttctctcaaccagtgatgagattaaataacgtatgtagagcccagggcctgggtcataagaactcctcaataagcagtatgactatattctgaggggtgatttatcagtgagccagggtggaaatacctcatttgagtaatcctcaactgttctgcaacattcctagatgtttctggtgtctactttaaacaggaaaaacttcccatgccactttgccatctccacctgaaaactgtttagtagttcagtactataaatatcagttgaataatttaaattcactggttatctttagaattc

SEQ ID NO: 146180 - DNA, 426 bp, Homo sapiens
tagctagtggccttgcacagtggcaggacagatctattaggagcagcaaagtacaggggaaaagcatgtacttttcagacagctatgggtttraattttgttccaccatttaccagcttcaatttttctctcaaccagtgatgagattaaataacgtatgtagagcccagggcctgggtcataagaactcctcaataagcagtatgactatattctgaggggtgatttatcagtgagccagggtggaaatacctcatttgagtaatcctcaactgttctgcaacattcctagatgtttctggtgtctactttaaacaggaaaaacttcccatgccactttgccatctccacctgaaaactgtttagtagttcagtactataaatatcagttgaataatttaaattcactggttatctttagaattc

SEQ ID NO: 146181 - DNA, 439 bp, Homo sapiens
aatctgacaaggatagctagtggccttgcacagtggcaggacagatctattaggagcagcaaagtacaggggaaaagcatgtacttttcagacagctatgggtttaaattttgttccaccattyaccagcttcaatttttctctcaaccagtgatgagattaaataacgtatgtagagcccagggcctgggtcataagaactcctcaataagcagtatgactatattctgaggggtgatttatcagtgagccagggtggaaatacctcatttgagtaatcctcaactgttctgcaacattcctagatgtttctggtgtctactttaaacaggaaaaacttcccatgccactttgccatctccacctgaaaactgtttagtagttcagtactataaatatcagttgaataatttaaattcactggttatctttagaattc

SEQ ID NO: 146182 - DNA, 426 bp, Homo sapiens
tagctagtggccttgcacagtggcaggacagatctattaggagcagcaaagtacaggggaaaagcatgtacttttcagacagctatgggtttaaattttgttccaccatttaccagcttcaatttttctctcaaccagtgatgagattaaataaygtatgtagagcccagggcctgggtcataagaactcctcaataagcagtatgactatattctgaggggtgatttatcagtgagccagggtggaaatacctcatttgagtaatcctcaactgttctgcaacattcctagatgtttctggtgtctactttaaacaggaaaaacttcccatgccactttgccatctccacctgaaaactgtttagtagttcagtactataaatatcagttgaataatttaaattcactggttatctttagaattc

SEQ ID NO: 146183 - DNA, 556 bp, Homo sapiens
ggtaggtatcattattcaaactttacagacgatgaaacaggctcacagttgacaggtaatttttgcagaaatcacaaagtcaaattggcttctggagtctgctgctctatcatgatgcctccatgtcaccactattaactttgcctgaaggaaccatgacttgcagtttctaccccacgtggtcagtgaccatgaatacaaatgacccttactccaggtgattctgaagtttcaggragatgacagattccccctaaattttgaacagtaatattaattacaggtaataaaatataccaaaacatcactacaaaaatttagcattacttcatcaagaggaataaactgaaactgtcagtttcttggaagcgtgagaggatagttcatcctgctttctaatacccaccacctatttgtgactataaacttcccaccacttatttatggttcaagcctagggcaagagctagcattttattttaaaaaagatttgtttaataatttttccatttggacaatgtgatggttaatactaggtgtcaagctgattggatta

SEQ ID NO: 146184 - DNA, 556 bp, Homo sapiens
ggtaggtatcattattcaaactttacagacgatgaaacaggctcacagttgacaggtaatttttgcagaaatcacaaagtcaaattggcttctggagtctgctgctctatcatgatgcctccatgtcaccactattaactttgcctgaaggaaccatgacttgcagtttctaccccacgtggtcagtgaccatgaatacaaatgacccttactccaggtgattctgaagtttcagggagatgacagattccccctaaattttgaacagtaatattaattacaggtaataaaatataccaaaacatcactacaaaaatttagcattacttcatcaagaggaataaactgaaactgtcagtttcttggaagcgtgagaggatagttyatcctgctttctaatacccaccacctatttgtgactataaacttcccaccacttatttatggttcaagcctagggcaagagctagcattttattttaaaaaagatttgtttaataatttttccatttggacaatgtgatggttaatactaggtgtcaagctgattggatta

SEQ ID NO: 146185 - DNA, 512 bp, Homo sapiens
tatagcttggacatgatgacagtttgatatactgggttaaattaaacatattattaaaattaatcttccctatctcttttttcctgttttaaatggctactagaaaatcttaaaactacacatgctgcttacattgtatttctacaggatagcaccattctagatagtataataagccctgcttattgaatacgctcagtagaaagaaaccctggaatcctttcatttcaaacgatctcctgtcggccagscaactttcttcatttgcaggtgagattcttcatctgtaatgtagacaaaataaacccccctcacagactggtaaggactgagaacacaaagaaagcattttaagcgttcagcaacactaaatgtgttctcagtaaatgtcacttccctttctgtgggtgcattcagtagctggtttagtcatcttggggttagtcatggaacgtctggattccaaccctctttgttcctttttctccactctaatcacttccacagaattc

SEQ ID NO: 146186 - DNA, 512 bp, Homo sapiens
tatagcttggacatgatgacagtttgatatactgggttaaattaaacatattattaaaattaatcttccctatctcttttttcctgttttaaatggctactagaaaatcttaaaactacacatgctgcttacattgtatttctacaggatagcaccattctagatagtataataagccctgcttattgaatacgctcagtagaaagaaaccctggaatcctttcatttcaaacgatctcctgtcggccagccaactttcttcatttgcaggtgagattcttcatctgtaatgtagacaaaataaacccccctcacagactggtaaggactgagaacacaaagaaagcattttaagcrttcagcaacactaaatgtgttctcagtaaatgtcacttccctttctgtgggtgcattcagtagctggtttagtcatcttggggttagtcatggaacgtctggattccaaccctctttgttcctttttctccactctaatcacttccacagaattc

SEQ ID NO: 146187 - DNA, 622 bp, Homo sapiens
gaactgttctgtgcttatattttgttggtgtttattttcacttcatctattaaagatgtggagatttatacatgaaaggtgggcacttcaaatttaacttttgctgtacattttgaagtgctacagtggttccaaggaatatgtgaaggccctttcttatactgtggataaggtttgattacagtcatgtaccacataatgacccttcggtcaaagacagaccacatatatgatggtggctctataagattactatggagctgagaaatycctatcatctagtgatgtcattagctgttgtaaaatcatagtgcaatgcattatcttttctatgtttagatatgtttaaattcacaaatacttactgctgtgtaagtactgcctacagtatccagtacagtaacatgctgtacaggtttgtagcctaggagcaacaggctatactctatagcctaggtgtgtagtaggctatacaatccaggtttgtctaagtacactctatgatgtttgcacaatgacaaaattgcctaatgatgaatttctcagaatgtatccctgctgttaagtgatgtatgactatacttggattctgaatatctagtgcttacttgcaaaagaactt

SEQ ID NO: 146188 - DNA, 370 bp, Homo sapiens
gtcattttaattttgatgactaaatttggagggcttttgaaataatattacaccaacgaaaaattttattaaattatagatcaccagttatttaaaaatacacgggaaaagacagacatacaaaggtagtatcatayaactgatttctaaactcaatacttttgagatacaaaacaatgatcattacccccaaaagtcagtttactgacacgaattgatgtttaagttggtctgtaactcttttcattcaattctgtttataaatgttactgaatttttaaattttgtcccatatctgaactttgttttttttgacatgtttacttctcaaagtagtatatagttatttcttgcaattaatgtcagcaac

SEQ ID NO: 146189 - DNA, 583 bp, Homo sapiens
tgattattctaggagttcataaaagtggggtaacacagtatttgtcattttgtgactgacttatttcacctatcataaagtcttcaagattcatccaagatgtaatatatatcagaagtttcctcctttttaaggctgagtaatattccattgtgtgtrtatgtcacatttcttttaaccattcatcccttgatggacacttggattgcttccaccttctggctattgtgaatgctgctgctgtgaacatagatgtacaaattatctgtccaagttcctgcttttacttcttttgggtatatacccggaagtggaattgctggatataattttaatttttgaggaatctccatactcagatgatcttatttccttatttttcaagtgtgtgggtctatgtgtggttttggcagggaagcgagtctctgttattcccacatactccccatgactgttaagtgctgtgttagaagcatatggtttgatgagaattctaggagagacaaatgtttcaaaggatctctgtattttcaccggcaataactaataaatcatctggcttcgctgttccccctgtaaaaat

SEQ ID NO: 146190 - DNA, 256 bp, Homo sapiens
gggactcgacctctgggtctgaaacataaaaaaccaaastaggaaaagggaaaatcattcactgaggcatcactgaactcctttcaagtcactgctgtctgggtaaggctagaaacagtggccacactgaatctgcaccataacttacggttggctgactttttgctaatttgtctattaccccaagatgtttggaactaacttcttgcattgttaaatatttcagaatatatatagccaggaaagattcattctt

SEQ ID NO: 146191 - DNA, 543 bp, Homo sapiens
tagttcctatcattgtatcaaataagactagatgacggtatctccgtaaagccttcaatttcctccctggccccattagatgctctgtttgggttaaatgagaacagcttgcaaggtagttgtttgaacacgactgcattaatcagggtagaaaaaaacatgtagctgatttacagaaagcattagattaacaatttagagtaatgtgaggaaaaaacctcagtgccttataattatagataatatttataaatttcattgatttattaaaaatatatatatatayacacacacaaaacattcagattctagtatttgctatccaataggtacctttattttatattccaaaatgaaaatttatggtggaaatttcaactaaagtaggtatttaggcatacttggatagacgaactttgaaaatgccattaatatcacttacatatatggtggtaatcaaaactaaagctgaactaacttggcaaactctggaactgatattcatgtatggagtttgtcaatgagtaggaaaaatgtatcatt

SEQ ID NO: 146192 - DNA, 617 bp, Homo sapiens
ttattagtaaccttaactaatttgcaaaattccttttgtctcataacataatcagggtgtgatatctcatcatcttgacagttctagggatgagagaggacattttaggggagcatttgacaattccgcccaccacatatgtaaacacatagcacccaaaacagtaccaaatgcacataagtatacatggaaagatacctgcaatgagactactaaatttgtaataaggagttgtttccggggagagtagaccaaaatttgggagccaggtggtatttagccttaaaaggagtcttttaattatttaacaaaggaattttgttactgcagcaatataattagaaaataataccaaatactaaaatagaatttgagggatcaaaccctccggctccctgattctgtgtagaactcaccatgcatacaccaatccacartggctccctcctatatctctctcagctgtcctctgctttgtgactgccttaggattcacctcactttcacagtgccagtctaattcttcatggtattatccggcgacaatgttcactagttggtgcctttagagccacacagttacaatattaaaatacttccatattgcttggcaaata

SEQ ID NO: 146193 - DNA, 504 bp, Homo sapiens
attaataatctaggtctggcctgtcccagttgtctgcagtttcctcactctgctgctgagtagttacktgccatattagaaaggtggcattttgaactgtcttatcctgcctactgcaatgggcttcctacatcagcggattcactggtctcctagagcccttaatttgtcatacgagaagcccttagtaagagggagaagctggatcagcctgcttttcttcacagttctcttcaaccagtgtcatactgagtcactcaaatacatgcttcaagatgggcctggaaaagataaccagttcaggttctggacagagagcatcgtgttcagggcattgagttcaggcttcttgctcccagagtttgggtctatgaatcttcatggtgggccccaatgacaaggtcatccagacacagtctgaacatacaggatgagtgtctggcatagagtaactacttcacactttaaaaaatgaattagcaaaggattcatacaataatgtct

SEQ ID NO: 146194 - DNA, 564 bp, Homo sapiens
gagggagaagctggatcagcctgcttttcttcacagttctcttcaaccagtgtcatactgagtcactcaaatacatgcttcaagatgggcctggaaaagataaccagttcaggttctggacagagagcatcgtgttcagggcattgagttcaggcttcttgctcccagagtttgggtctatgaatcttcatggtgggccccaatgacaaggtcatccagacacagtctgaacatacaggatgagtgtctggcatagagtaactacttcacactttaaaaaatgaattagcaaaggattcatacaataatgtctagtgagtatgtattttatctacagttgagagagatacattagaaatatatggcatagtcctataccaaatgttgtcatttattccagaagataagacctgcatatacaaaatatttgagcattaaagtgaaggatttttaagtgatagagtaaatggtttgaagtatagggctataagaattcaaagaagcaggagatcaatgaggagwtatcttaggaagtgaaacttaaggtaaatttgaaaagagggt

SEQ ID NO: 146195 - DNA, 551 bp, Homo sapiens
ctggttccaccctaaggatttaatgggtctggggtgtggcctgggcatgaggattttttaaatttccrcaggcctattctaatatgaagcctgggttaagaatcattgcgggctgggtgcagtggctcacacctgtaatcccagcaatttgggaggctgaggcaggcagattagttgagtccaggagttccagaccagcctgggcaacatggtgaaactccgtctctacaaaaaaatataaaaaattagctgggtatagtggtgcatgcctgtagtcccagctacctgggaggctgaggtgggagtatcacctgagcctgggaggtccaggctggagtgagccatgatggccccactgtactacagtctgggcgacagagaccctgtctcaaaaaaaaaaaaaaagaaaaagaaaaagaaaaagaaaaaaaaaatcattgtactgcaaggcttggctgatttttcttgctcactatgtgaaagcttcctgtggctgtggtctcatggctgtgatctcattttcactaacccaacaccagcctctactgtag

SEQ ID NO: 146196 - DNA, 488 bp, Homo sapiens
gtcctcaaaaagtaaagcacttgcaatttagtacatggatcctaaggcaactgctttaacaacaaaacctttttaatttctttttagattttgatatagtttagatatgtgtccctacccaaatctcatggtgaattttaattccaaatgttggaggtagggcctggtgggaggtaactggatcacggtgatgaatttctcatggatggcttagcataatcttcytggtgctgcttagcacaatcctcttggtgctgttctcatgacagtaagcaagttctcatgagatctggtcctttaaaagtgtgtggcaccttcccctcgctctcttgttcctggtttcaccatgtgatgtgcctgctccccctttgccttccgccatgattggaagcttcctgaggcctccccagaagcagatgccactatgcttcctatacagcctgcagaactgtgggccaattaaactttttttatttataaattaccaa

SEQ ID NO: 146197 - DNA, 364 bp, Homo sapiens
tattctggggaggcacctgttcttagggtgatggatgggcacctcacactcagtgcctgcaagggctgggcaaggaaagcaagttgagggacaggccaagggagcagcccagcmgccgtgtttgtctctatctgaccacgcctgctgggcaccatggtgagcctgtgtcgaaaggtctctcagttctcagaagaaggtgtaaatccgaactttatagatatctccatatttttaaatggtggaaaggatctgggggctgcatgaggaccccaggatgaaagcttcacctctgattggaaaaacaagtgactcaaggtaagtacaaagcattctgactggtcatttggatgaagctaggttgaca

SEQ ID NO: 146198 - DNA, 605 bp, Homo sapiens
ggtgcctcactcctgtaatcccagcactttgggaggtggaggagggtggatttcctgagctcaggagttcaagaacagcctgggcaaagtggcaaaacctcgtctctactaaaatacaaaaaattagccaggcgtggtggcatgtacctgtaatcccagctacttgggaggctgaggcacaagaattacttgaacccaggaggcagaggtgtagtgaacygagactgagccactgcactcccgcctgggcgacagagcaagactctgtctctgaaaaaacaacaaacaacaataaaaaaactagagtttacacaatagcaaacatatccctggattaagcatcatgtgcatgtgtgcctgtgtatacacacttactgacacatatgtgagtagatgtgtatgcacttatatgtgtatatgcacacacatcattcacagagatatattagaaactttttcttcaaggctttagatataagcattctaacatatattcagccccaggaaaaatttgaagtggaagaatatctattttttcccattccactccccctgctaaggacccctttgttcatttctgggcctcccttccctccaggcccact

SEQ ID NO: 146199 - DNA, 615 bp, Homo sapiens
tttgtcttgcggacagtaaggatgggtccatggaaggttttcaatcaaataattgaaatgataaaaattgttgtttgaagagatggacctgctattgggtgaggatgatggagtgactcactagtcagggaaacaggttagaagactttaagagcagttcaaggacaggaaatagaggcattggtcaaggaaagaggaagctgttgattggaaggaattggcagtgcttgggaagagttgggattttgatgggaaagagaaagcagttgaaaagatgctccaggccattcatcctgtgactggggtggtatcattgtcagtcaggaaaatagagacctgtgaagacacttccaacacagaaggatgtaaaccaggatgtaggtgcctacacacacacaaaaaaagggttcaaggagcaaaagtccagagggcctctaatggctgtcaagttcaggctgagctgtggtccctgaattaggagcttgctgatgctacctgatatggtttggctgtattcccacccaaatctcatctcgaattgtaactctcacaatttccatgtgtcaygggaggaacccagtaagaggtcattgaattgtggagtcaggtctttcc

SEQ ID NO: 146200 - DNA, 665 bp, Homo sapiens
gtgatttactatgtaattcaggaagcaatttcttttcatggctatttctaaacttggaatttcttttcatggctttttctaaacttggaatcttcagaaagcattgttatttacattatactgtcctttgaatcacttgtgttttattgtcttttttgttcttattttagaaatctagagaaatgcaaagctttggagaaggaycaagttaacgttattttataatagcattgtcatcatcattatggatgttgtaatgtcatcatcattataatcattagtgttatattttagttggaggagaaatgatccaataaatgcattctactgttaatatttaactactggctataaaaaaaaattacaaaatatatgctgaatgtaccatgacaaaccctacgatctatgtcttttaatttcttttctagcaagagagaaaccaaggaaatcctcaaggaacaggtcattctgaaatacctaagggtagatcttttatgggagtgcttaattaaatatctgatatcttctgtagagggaaataaaatgaaattgctttgagtactacctttcagaaaaaaaccagcctttccttgtggctgagacatcaggaagaaaatggtaccagatccttctgagctcattgcaatgttgatgcatagtatatt

SEQ ID NO: 146201 - DNA, 604 bp, Homo sapiens
tgaacttttatagctggaagaaggcactgagatcattttacaagtaaggaagttagcctgacctgcccaatgctacacagtgataaaagaaaagcttcacccaggttaaatttaaaggtgtttaattgaacaatgaatgattcacgaatcgggcagcccccactatcacagcagattcacagagactccagcgcagccacrtggtagaagggaaaaaaaaagggaagtgacgtacagaaattggaagtgaggaacagatggctggattggttagagcttggcctattagtctattcgcctgttattaggcctattagtctgcctgttaagctaggttacagttcatccacaatcactcagatacagaagtatgcggtccttctcaggccatacttagtttgctttaacaacagccagtcagtggtgaaatcaggaccagaacagaagtttcctggctgcactgtcacaggctagcacactatttttctgttgtgaaaaatttctaaaagtcagggtagccagaggatggaaagcattacatttaggttgatttggaatggtgcaatagtattgaagagcacagattctggagccagagtacctg

SEQ ID NO: 146202 - DNA, 560 bp, Homo sapiens
cttttacttaagaaacagatatattttatacatgtgaaaggggaaaacaattatgagtcaacatgcaagaaagttcatgaaaatatggctctgtctcttctccataagaaagagtagaaggtatagaaggagaacttatcttggtgaacccctttgcccaacttcttaatattaaagcccattacctctgttcactgatgatatgatcttatgcctagaaaaccctaacgatgtctccaaaaactcttagatttaataaataaatytagtaaagtttcaggatacaaaatcaaaatacaaaaatcagtggcatttttatacaccaataacaagctgagaaccaaatccacaagtcaatcccatttaaatgaactgcaaaaaaacaaaacaaacaaaagaaccctgggaatacgtttaaccaaagagatgaaagatctctatgaggaaaattacaaaacagtgattaaggaaattgtagatgacacaaacaaatggaaaaatattccatgcacatggatcagaagacttaatattgttaaaatgactatactgcctaaagc

SEQ ID NO: 146203 - DNA, 174 bp, Homo sapiens
tggtctggcaatttgtattattagaaagatcccaggtgattcttatgaatgttaaaattttagaagaattgtggtgtgccatagtgaccctcttagattcaatgggatattgttaaatttttcttktgggccttagaatgctctgtttcagtttctgcccttgtttcagtttgg

SEQ ID NO: 146204 - DNA, 570 bp, Homo sapiens
cttttgcaggttacctgggatttttaaaaaaatgtagaaaattrtgccatctgcaaattgggtagtttctctctttcgttccaatctttatgtctttcattattttttcttgtcttatttcagtggctagaactgccagtactccattgaataggggtgatgagagtgaccacacttgccttgttaccaatcttatgaggaaagcatttagtctttcacaatgaagtatgatttcataatagtattagatttgttgtagatgctctttatcaagatgatagaattcctgtggtgaaaaaccaactcaaactgttttttttttaaattctgttctcatgacaatcaactcacaagacttctgtgaccaaatgtgtggggatttcttgccacacaccaagccagcaatcaattctgcagtggacgccagctaggtgtcctctaattcaattcaattctgacgtgatctaactggagctagcctcagacaccacaggttgaggtgtcagtcccataagattgtcctctctttctcaccagacacaagttcaggcctccaaaatttctgaacag

SEQ ID NO: 146205 - DNA, 576 bp, Homo sapiens
ttaaaaaaatgtagaaaattatgccatctgcaaattgggtagtttctctctttcgttccaatctttatgtctttcattattttttcttgtcttatttcagtggctagaactgccagtactccattgaataggggtgatgagagtgaccacacttgccttgttaccaatctkatgaggaaagcatttagtctttcacaatgaagtatgatttcataatagtattagatttgttgtagatgctctttatcaagatgatagaattcctgtggtgaaaaaccaactcaaactgttttttttttaaattctgttctcatgacaatcaactcacaagacttctgtgaccaaatgtgtggggatttcttgccacacaccaagccagcaatcaattctgcagtggacgccagctaggtgtcctctaattcaattcaattctgacgtgatctaactggagctagcctcagacaccacaggttgaggtgtcagtcccataagattgtcctctctttctcaccagacacaagttcaggcctccaaaatttctgaacagctggcttcaagttgggggttgccatgaac

SEQ ID NO: 146206 - DNA, 577 bp, Homo sapiens
tttaaaaaaatgtagaaaattatgccatctgcaaattgggtagtttctctctttcgttccaatctttatgtctttcattattttttcttgtcttatttcagtggctagaactgccagtactccattgaataggggtgatgagagtgaccacacttgccttgttaccaatcttatgaggaaagcatttagtctttcacaatgaagtatgatttcataatagtattagatttgttgtagatgctctttatcaagatgatagaattcctgtggtgaaaaaccaactcaaactgttttttttttaaattctgttctcaygacaatcaactcacaagacttctgtgaccaaatgtgtggggatttcttgccacacaccaagccagcaatcaattctgcagtggacgccagctaggtgtcctctaattcaattcaattctgacgtgatctaactggagctagcctcagacaccacaggttgaggtgtcagtcccataagattgtcctctctttctcaccagacacaagttcaggcctccaaaatttctgaacagctggcttcaagttgggggttgccatgaac

SEQ ID NO: 146207 - DNA, 439 bp, Homo sapiens
tcctctctttctcaccagacacaagttcaggcctccaaaatttctgaacagctggcttcaagttgggggttgccatgaacccctctttgggtttgatgaattttctagacttgctcacaaaattcaggaaaacacttaaatttactggtttgttacagataatttttattttattttattttawtttattttctttttcttttttttttttttttgagatagtctcgctctgttgcccaggctggattgcagtggcatgatctcggctcactgccacctccgcttcccaggttcaagcaattctcctgctgcagcctcccgagtagctgagattataggcgtgtgccaccatgcccagctaatttttgtatttttagtagagacagggtttcaccacgttgcccagtctggtctcagactcctgggctcaagcaatcca

SEQ ID NO: 146208 - DNA, 439 bp, Homo sapiens
tcctctctttctcaccagacacaagttcaggcctccaaaatttctgaacagctggcttcaagttgggggttgccatgaacccctctttgggtttgatgaattttctagacttgctcacaaaattcaggaaaacacttaaatttactggtttgttacagataatttttattttattttattttaatttattttmtttttcttttttttttttttttgagatagtctcgctctgttgcccaggctggattgcagtggcatgatctcggctcactgccacctccgcttcccaggttcaagcaattctcctgctgcagcctcccgagtagctgagattataggcgtgtgccaccatgcccagctaatttttgtatttttagtagagacagggtttcaccacgttgcccagtctggtctcagactcctgggctcaagcaatcca

SEQ ID NO: 146209 - DNA, 648 bp, Homo sapiens
tacttatatattttgtgccttctataagtcaattatgggatctgaaatgtatgagaaattcaccttgagttcaattttagacaatgatcatattacccctgattaaaactgtttagtgtttagaaagaattaaatccactcattttactatgatttatgatgtcctctgtaatctagcccctgcctgtctcactgatctcaatctgttcttcctttccttctataactatttgctgactaccagctgtatgccagacactcttcartgtatactgagcatccaagagttaaaagacaggcaccattatgtgcctgttctcctggagtcaacagtacagcagggagcattagatttatcaaatctatgaatccttgcttttctatgcatttataactatgaaacatcaaagatttaaaaaccccacttactttgtttcaaattgattaccagttcttaactgcagtcttgaataaaacaattagaggagattataatcagagtattataatcagggttagaataaagtacatacaaatattttcattttttatgtcactactttgaaagttcaagggaatatctgaggtgcaacattttgccacatgtccaccacttggtcagagtttggggcatcttgattgactgca

SEQ ID NO: 146210 - DNA, 648 bp, Homo sapiens
tacttatatattttgtgccttctataagtcaattatgggatctgaaatgtatgagaaattcaccttgagttcaattttagacaatgatcatattacccctgattaaaactgtttagtgtttagaaagaattaaatccactcattttactatgatttatgatgtcctctgtaatctagcccctgcctgtctcactgatctcaatctgttcttcctttccttctataactatttgctgactaccagctgtatgccagacactcttcagtgtatactgagcatccaagagttaaaagacaggcaccattatgtgcctgttctcctggagtcaacagtacagcagggagcattagatttatcaaatctatgaatccttgcttttctatgcatttataactatgaaacatcaaagatttaaaaaccccacttactttgtttcaaattgattaccagttcttaactgcagtcttgaataaaacaattagaggagattataatcagagtattataatcagggttagaataaagtacatacaaatattttcattttttatgtcactactttsaaagttcaagggaatatctgaggtgcaacattttgccacatgtccaccacttggtcagagtttggggcatcttgattgactgca

SEQ ID NO: 146211 - DNA, 621 bp, Homo sapiens
aaggcttatgatggaagcaattcctccaaccccctctcaaaatgctgcattacgttttatgtgcataaagcaggtagcaacaaaatgcaataccaaggaatgcataagtggggatgatttcagagtaatatgtaatataattaagaattagaatattttggtaggattacctaaatttattttctytattttttttttaattttaggtacttaggaattcaatttttccctttggagaacagagattaatataggttaattctatttacatctggctgagtgttctaagactgttcctatgggtttagaaattaatcacagatgaattcacacaaggcctttctttgctcgctctatatattcatttctgactttttacccttagaaaatagttaaaactcaattttctcagaaaaacagaacagcccactctaccagcttcagaattcttttttctttatttttggcacctgttggatgactcaggatagtaggattttttcatgtactctattattatttcctaagtacataatacatgattagtttgaggaatccacatgtataggtcccaaaactgtcttgtatgccaaaataatgattcaggagctaacattaata

SEQ ID NO: 146212 - DNA, 573 bp, Homo sapiens
ttgtattttatgctaatgtaatcaaagacttatttcttcatctggtttattgcatcaaattatttttctggctatgctagtttcctcaagagttgctaaggagagactgaactggatatttttcattgtagaaaggaacctgagaatgacttcctgaataccatcaaacatatgagaagcctttctagctcttatgtagtctataaatcactagagttttagaaaacccatagcaacatatccaygttgcatgtgacttcaggaacaaatgagagatatattcaagaaccagagagataaaaacccaaaataccatctttattactaataaattggccttataactgaggcaggtgagcatttcctgtgaattagcagatttactctacccctccaattattgatacagctagatgaggataggccttgccctaaagggacaggctcctaacagcaacaggcaagatcataagcctgtgtaaacttcggcaggaaattacaattaaaaggagaaagaagaagtagctgacactaacatgtccagttccttcttctaaagtcataaaggaggta

SEQ ID NO: 146213 - DNA, 573 bp, Homo sapiens
ttgtattttatgctaatgtaatcaaagacttatttcttcatctggtttattgcatcaaattatttttctggctatgctagtttcctcaagagttgctaaggagagactgaactggatatttttcattgtagaaaggaacctgagaatgacttcctgaataccatcaaacatatgagaagcctttctagctcttatgtagtctataaatcactagagttttagaaaacccatagcaacatatccacgttgcatgtgacttcaggaacaaatgagagatatattcaagaaccagagagataaaaacccaaaataccatctttattactaataaattggccttataactgaggcaggtgagcatttcctgtgaattagcagatttactctacccctccaattattgatayagctagatgaggataggccttgccctaaagggacaggctcctaacagcaacaggcaagatcataagcctgtgtaaacttcggcaggaaattacaattaaaaggagaaagaagaagtagctgacactaacatgtccagttccttcttctaaagtcataaaggaggta

SEQ ID NO: 146214 - DNA, 573 bp, Homo sapiens
ttgtattttatgctaatgtaatcaaagacttatttcttcatctggtttattgcatcaaattatttttctggctatgctagtttcctcaagagttgctaaggagagactgaactggatatttttcattgtagaaaggaacctgagaatgacttcctgaataccatcaaacatatgagaagcctttctagctcttatgtagtctataaatcactagagttttagaaaacccatagcaacatatccacgttgcatgtgacttcaggaacaaatgagagatatattcaagaaccagagagataaaaacccaaaataccatctttattactaataaattggccttataactgaggcaggtgagcatttcctgtgaattagcagatttactctacccctccaattattgatacagctagatgaggataggccttgccctaaagggacaggctcctaacagcaacaggcaagatcataagcctgtgtaaacttyggcaggaaattacaattaaaaggagaaagaagaagtagctgacactaacatgtccagttccttcttctaaagtcataaaggaggta

SEQ ID NO: 146215 - DNA, 484 bp, Homo sapiens
ggctttaacttttagtatgtctctccaaatcaattccctctgagaaaacattgttggaacaccttcctcttccaggaaagtagaaacaaagtagagtagacctgatggatataaaattgacctttattaaacaaaaaaagtatgaattttgctttatgcatcctgctgtattttggctaggtcctagagagtcttcttggaatagtttacttcctctcttagaagacacagcacttcctaaattatgtttgaacttaataccatttgtttatctattgttcaggaatggagaaagatcctgagggggcttgtttttttctagcaaagcagagtcctctacattctctccaaacaaaaagaaataagcacacaccttgtaccaagagaaaaaacaccaccacatgttcaagggttcaagragacctggaaacccaaaaatgttgagtgcctgcccccatctcatgtctgtaagtcccactctcta

SEQ ID NO: 146216 - DNA, 601 bp, Homo sapiens
gattacttgttcttctggttgtgaagaagttcaccatccactagtatctaccacaggaaaaaactctaaacaccttgccaatatcaagcagtggcatcaatccacttgcatgagtttggtgagacagaacgctcacacaagttaggtgaagcagctttattactcacagataggcagcaagggacaacaaaaacctaggattcatggagagctagttcccaaaggctcatgaaagctgcccagggaacagggaatttcatctgtscatgtctcatgtggcactgaagctgagggatcctgaaagccaactgcactgggtttatacctaggggcaccgtgatttgctgagctaaagtcttataggacatcttttttctggagcgactgaaacaaagcttcctaggctgtccctgacagtttctccttatctcaggttgttatatttccagttcattctacagttattctgagaactataagtaggaagacagaggaaggcctgagttggccaaggccatctgcaaaccatccagcaaggcttatgtaactcttattctgcattgcctaacagttacataggatcactgtaaaaatcaacact

SEQ ID NO: 146217 - DNA, 573 bp, Homo sapiens
gaaggtttagtttccagggatgtcaaacattattccaacaagcactgatccaggagagctaatcaacttgaagagtaggatgtagactaaatatccaaatccctgtgggcaagagaagcaaaacctatatacacacatataggtaagagttaaaggaaaattctcttcccccttaaggaatctcaagtctctttcctcttaggttataaagagtagtctgtgtccagagctgtgtagaatacaaaatattttttcctgctaactaaaaatgacctctcactgttagactatgtttgctatgaagaaagagaatttgttttggaaaatttctctttgtcatatcttgatcatcaatagcaagttgaaaatataaacaaagaaagtaccatctccctaagaatgaaaatgagtttgaagggaatgaatgaaaactactccctgaataatgagtttttaatttttaatttccaaaatctctcattgtgtgtgcattgtgtatgtwtatgcacaataatttgtatacatgtaagatttctctatgcctgatttacaaaagtagtcaaattagaggat

SEQ ID NO: 146218 - DNA, 458 bp, Homo sapiens
aacatgtgaaactctttgaagtgaaatattcttttatgaaaattttctaatagcatttggattgagtagcagtttatgtctctaattaatttaatatgtgcctttttaaaaaagttcactgttacttcatctgtttttcataatctaaaatattaggttctacagtatagctaccaaaaagacccactaaacwgtgagttcattcctctaaagattcaactgactggcaaattagagacatgttaagaaaataaatcacccccattgtaccctaattgtctattagttatcttgtcaatgaggtccaactgtactgttctttgggtgattgaacatgacctctggggtatgtctgttaaggcaaaggaaaatttcaacacagataattaatagtctgggatttctccctacatcttttccttcttttctggctctgtcctttcagatttaacactcag

SEQ ID NO: 146219 - DNA, 458 bp, Homo sapiens
aacatgtgaaactctttgaagtgaaatattcttttatgaaaattttctaatagcatttggattgagtagcagtttatgtctctaattaatttaatatgtgcctttttaaaaaagttcactgttacttcatctgtttttcataatctaaaatattaggttctacagtatagctaccaaaaagacccactaaacagtgagttcattcctctaaagattcaactgactggcaaattagagacatgttaagaaaataaatsacccccattgtaccctaattgtctattagttatcttgtcaatgaggtccaactgtactgttctttgggtgattgaacatgacctctggggtatgtctgttaaggcaaaggaaaatttcaacacagataattaatagtctgggatttctccctacatcttttccttcttttctggctctgtcctttcagatttaacactcag

SEQ ID NO: 146220 - DNA, 458 bp, Homo sapiens
aacatgtgaaactctttgaagtgaaatattcttttatgaaaattttctaatagcatttggattgagtagcagtttatgtctctaattaatttaatatgtgcctttttaaaaaagttcactgttacttcatctgtttttcataatctaaaatattaggttctacagtatagctaccaaaaagacccactaaacagtgagttcattcctctaaagattcaactgactggcaaattagagacatgttaagaaaataaatcacccccattgtaccctaattgtctattagttatcttgtcaatgaggtccaactgtactgttctttgggtgaytgaacatgacctctggggtatgtctgttaaggcaaaggaaaatttcaacacagataattaatagtctgggatttctccctacatcttttccttcttttctggctctgtcctttcagatttaacactcag

SEQ ID NO: 146221 - DNA, 611 bp, Homo sapiens
tatttactgttgtttaagattaagatacagtactaatagaattgtagtgatgaataatgagataatgcacacagtgcagtttgtgtttgcagcatgatgctggcaaacaaaaacactttataaattayagcagtaataattaatactaattattataccaagtgttcttttcttcttatttctatatatatttgtcaaatgttcataacctaaaacaaatgactttaatttgaatttgattgaaatttatattatgcaatatacctaaatatatgagacaacttaatacttgatttgtaaagattttacttctatatttataaaaggttgactcctggtttttcagagtggaaagcaaaattcatacagagattcttttaaagcaaaaaacaccaggtgttaaaaaatgaaattaatagcgcttttaaaaacacatataaatcactttcatagtctccattagatgcattatgtacacactaaattagtcaatattgcatgtgaacaagattccttatatttattctaggcatatgaccatatttgtgttgctttttatcttcaatatgcccacatgacaataaatgatcattttgttaatttaaagtgtt

SEQ ID NO: 146222 - DNA, 611 bp, Homo sapiens
tatttactgttgtttaagattaagatacagtactaatagaattgtagtgatgaataatgagataatgcacacagtgcagtttgtgtttgcagcatgatgctggcaaacaaaaacactttataaattatagcagtaataattaatactaattattataccaagtgttcttttcttcttatttctatatatatttgtcaaatgttcataacctaaaayaaatgactttaatttgaatttgattgaaatttatattatgcaatatacctaaatatatgagacaacttaatacttgatttgtaaagattttacttctatatttataaaaggttgactcctggtttttcagagtggaaagcaaaattcatacagagattcttttaaagcaaaaaacaccaggtgttaaaaaatgaaattaatagcgcttttaaaaacacatataaatcactttcatagtctccattagatgcattatgtacacactaaattagtcaatattgcatgtgaacaagattccttatatttattctaggcatatgaccatatttgtgttgctttttatcttcaatatgcccacatgacaataaatgatcattttgttaatttaaagtgtt

SEQ ID NO: 146223 - DNA, 611 bp, Homo sapiens
tatttactgttgtttaagattaagatacagtactaatagaattgtagtgatgaataatgagataatgcacacagtgcagtttgtgtttgcagcatgatgctggcaaacaaaaacactttataaattatagcagtaataattaatactaattattataccaagtgttcttttcttcttatttctatatatatttgtcaaatgttcataacctaaaacaaatgactttaatttgaatttgattgaaatttatattatgcaatatacctaaatatatgagacaacttaatacttgatttgtaaagattttacttctatatttataaaaggttgactcctggtttttcagastggaaagcaaaattcatacagagattcttttaaagcaaaaaacaccaggtgttaaaaaatgaaattaatagcgcttttaaaaacacatataaatcactttcatagtctccattagatgcattatgtacacactaaattagtcaatattgcatgtgaacaagattccttatatttattctaggcatatgaccatatttgtgttgctttttatcttcaatatgcccacatgacaataaatgatcattttgttaatttaaagtgtt

SEQ ID NO: 146224 - DNA, 611 bp, Homo sapiens
tatttactgttgtttaagattaagatacagtactaatagaattgtagtgatgaataatgagataatgcacacagtgcagtttgtgtttgcagcatgatgctggcaaacaaaaacactttataaattatagcagtaataattaatactaattattataccaagtgttcttttcttcttatttctatatatatttgtcaaatgttcataacctaaaacaaatgactttaatttgaatttgattgaaatttatattatgcaatatacctaaatatatgagacaacttaatacttgatttgtaaagattttacttctatatttataaaaggttgactcctggtttttcagagtggaaagcaaaattcatacagagattcttttaaagcaaaaaacaccaggtgttaaaaaatgaaattaatagcgcttttaaaaacacatataaatcactttcatagtctccattagatgcattatgtacacactaaattagtcaatattgcatgtkaacaagattccttatatttattctaggcatatgaccatatttgtgttgctttttatcttcaatatgcccacatgacaataaatgatcattttgttaatttaaagtgtt

SEQ ID NO: 146225 - DNA, 428 bp, Homo sapiens
gaattcaagacaagctccctagaagtttatagaaagaaaaaaataatagttacttacaaaagagtaagaatcataatatctttgaacccctcaacaagaacagtggaaactagaaagtggtggaggaaggctctcartattctgaggggaagtaatttcctaacttgaattatctatgtaaccaaactattaagaatgaaaggacaacaaagatatttcatcaggcaaggtctcaaaattttacctccttataccctttctcagaacatgttccaccatataaaagagtgatccagaagagaagtgagcacgaattagggaaagtacaagatccaaacccacaaagatgatataaccaacaaagatcataaagatgccagctctataccaagcacagaggcaacaagttcagactgaagcagatcaga

SEQ ID NO: 146226 - DNA, 515 bp, Homo sapiens
gtacaatttcattgagggcattaccacattaatagtcccacatgtgtcagaatttgcatgaaataagcagttatgagcaattacgattttgccaagaaacattctttaaactctcttcaaagccaatgacagatgtatgtttcctgattttaggatctaatggacttcaacactgggcagcagcgttcaaaaaatttattgtatatcttaaaaatcagttcacctaggtgtactaaaaggagggcttacygaaaggataaattcaaaaaataaatccaatgttcttattcaacaagtgtgaaaatgataaacttcaatttctctctaaggctgaaagacgaccccacccaccccccgcaagaaaaccccataaaaaccaaaaacaaccaaaagcatgcaatgctcctaaatgtttgagtttctttttcaataaataggaagacccagagagaagccaaaacataaagagtggctgccttgaaacatcacttacaacatgttgcatatttatcata

SEQ ID NO: 146227 - DNA, 515 bp, Homo sapiens
gtacaatttcattgagggcattaccacattaatagtcccacatgtgtcagaatttgcatgaaataagcagttatgagcaattacgattttgccaagaaacattctttaaactctcttcaaagccaatgacagatgtatgtttcctgattttaggatctaatggacttcaacactgggcagcagcgttcaaaaaatttattgtatatcttaaaaatcagttcacctaggtgtactaaaaggagggcttaccgaaaggataaattcaaaaaataaatccaatgttcttattcaacaagtgtgaaaatgataaacttcaatttctctctaaggctgaaagacgaccccacccaccccccgcaagaaaaccccataaaaaccaaaaacaaccaaaagcatgcaatgcwcctaaatgtttgagtttctttttcaataaataggaagacccagagagaagccaaaacataaagagtggctgccttgaaacatcacttacaacatgttgcatatttatcata

SEQ ID NO: 146228 - DNA, 582 bp, Homo sapiens
aatcaatgcctggcttcaaagcttcaaaagacaggctgactttgttcttaggggctgatgcagctggtgcctttaagttgaagacaatgctcatttacagtttgaaaatcctagagtccttcagaattatactaaatctacactccctgtgctctacaagtagaacaacaaaacctggttgacatcacatacatttattctatggtttactgaatattttaagcctactgttgagacctacatctcagaaaaaatattacttctcattgacaatgcacctagtcactcaagatttctgatggagatgtacaagaagattaatgctgttttcctgcctgttaacacaatatccgttctgcagcccatggatcaaggagaatttttaactttaagtcttactatttaagaaatgcatttcataaggctayagctgccataggtaattcctctaatggattggggcaaagtaaattaaaaaccttgcacgaaagattcaccagtctaggtgccactaacaacattcatgattcatgaaagaatcatgaagtcaaaatatcaacattaacaggagtttgaaagaag

SEQ ID NO: 146229 - DNA, 495 bp, Homo sapiens
tcatttgacatatgactggacttatattgagactacagatagcagctaaaaaagtcagaagtttgattctggaatattgaattccctattagaaatgcaaatggattgagtggaagttgaatggagatgaaatatatgtttggattcaaaggaaaatatctctgctggtgctacaaatttgggaatcatcaatatatagaaagtaggttatgttaaagctatgatacaggatgaartcactaagagaataagagtaggtagaaaaagagtaggtccaagtattgcatctcgaaacactaaaacactgagaggcagtagacataaagaggagattgataagaaaaggcaagaaggatgtgaataaagcccagggagtttagtgtcccagaagccaaatgaagaaaatatttcaaggaagagagaagagtcaactgtgtcaaatgcttctgataagcaagaaaaatgaggaactggctattagattttgcaatgtgg

SEQ ID NO: 146230 - DNA, 564 bp, Homo sapiens
ctctcactcttgcagagcaattaagtgttcactacattccctgaaataatgagagatggatattttacttaaattttgatagttgcaggaagtagaaaagaragttcacatcaaatactacattgatatgctcaaccaaatacttatgcattaattatttattgctgtgtaacaaattactccaaaaccctattaaataactaacttctattttcttgtagtttttatgagtcaggaatctggatacggcttagtgtgatgcctttgttttatggtctctcataaggctagaataaagatgttgactgagatagagtaatctcagtgctcaactagggaagtgtgttaggctgttcttgcattgctataaagaaatacctgagactgggtaatttattaaaaaaaaaaggtttaattagcttatggttctgcaggctgtacaggaagtatggcgctggcatctgctcgacttctagtgaagcctcagggagctttcagtcatgacagaaggtgaagtgggaacaggcaggtcacatggcaaaatcaggagcaagaaagtagcgg

SEQ ID NO: 146231 - DNA, 564 bp, Homo sapiens
ctctcactcttgcagagcaattaagtgttcactacattccctgaaataatgagagatggatattttacttaaattttgatagttgcaggaagtagaaaagaaagttcacatcaartactacattgatatgctcaaccaaatacttatgcattaattatttattgctgtgtaacaaattactccaaaaccctattaaataactaacttctattttcttgtagtttttatgagtcaggaatctggatacggcttagtgtgatgcctttgttttatggtctctcataaggctagaataaagatgttgactgagatagagtaatctcagtgctcaactagggaagtgtgttaggctgttcttgcattgctataaagaaatacctgagactgggtaatttattaaaaaaaaaaggtttaattagcttatggttctgcaggctgtacaggaagtatggcgctggcatctgctcgacttctagtgaagcctcagggagctttcagtcatgacagaaggtgaagtgggaacaggcaggtcacatggcaaaatcaggagcaagaaagtagcgg

SEQ ID NO: 146232 - DNA, 481 bp, Homo sapiens
acagccccaaaggaagtaaatgttgccaacttcagcattacaagcaggtttcaatgtttctggagaaagtctagtaataagtttggaagagttccaataggttttcattcaactttgtacttaacttacctcaagaagcctttgtctcctctttggaaaaaaaaaatgagaaattattcataccttgttactgagtctacctgatagacagtgggtgtttaacagctattagttttcttaacactccttaaatgattgaaataattctggaagtctggacggctcagcttaccatrttttcagagttatctcaaaaaaattatttttagattgctccttttattgtctttgccttttttcattttagcaccattttattatacacttttatatgtttttaaaatattcttgcatttagtataatttgtttttgtaatgtacactgttccactggccagtggctgtagtctgaatgcattaa

SEQ ID NO: 146233 - DNA, 660 bp, Homo sapiens
gaatgaatctttgcttgctccttggtgggtgagggatggattttgtatgaaaacctccgtaccccatgttaccttgtttcccttgctgctgatcctctcctgtgagtcctatactgtctgtagtttttcattttgtgataggtctttgttttcacgttttaggtccctggtgataatatttatacaatccttaatctttgcccctgcctgtgctcaaaactcactgtgagtgctctctttttgaaggcttcatttctttccatcattcttwtataaaatttggacttcctgattttttcctgttgatttttgaggaagtttttgttattttatttgaccctgcagatctaccagcttttaaacaggttatttgttttcttgctattcagttgtataaattccttgtatattttggatattaaccccatcaaatatgtaaattttggttcttactacaagtgacattctctctttcctctgcgtagttgatgaaatggatattttgaatccctttcttttctttcttgaggtcaaactgaaaaagatttctcccattgttctgtgccacgatgtttcctatgtgtcgttaataagcatcattatgccctgctagctagttaagagcaccatgatattaccatgtaattacattataccaag

SEQ ID NO: 146234 - DNA, 660 bp, Homo sapiens
gaatgaatctttgcttgctccttggtgggtgagggatggattttgtatgaaaacctccgtaccccatgttaccttgtttcccttgctgctgatcctctcctgtgagtcctatactgtctgtagtttttcattttgtgataggtctttgttttcacgttttaggtccctggtgataatatttatacaatccttaatctttgcccctgcctgtgctcaaaactcactgtgagtgctctctttttgaaggcttcatttctttccatcattcttatataaaatttggacttcctgattttttcctgttgatttttgaggaagtttttgttattttatttgaccctgcagatctaccagcttttaaacaggttatttgttttcttgctattcagttgtataaattccttgtatattttggatattaaccccatcaaatatgtaaattttggttcttactacaagtgacattctctctttcctctgcgtagttgrtgaaatggatattttgaatccctttcttttctttcttgaggtcaaactgaaaaagatttctcccattgttctgtgccacgatgtttcctatgtgtcgttaataagcatcattatgccctgctagctagttaagagcaccatgatattaccatgtaattacattataccaag

SEQ ID NO: 146235 - DNA, 660 bp, Homo sapiens
gaatgaatctttgcttgctccttggtgggtgagggatggattttgtatgaaaacctccgtaccccatgttaccttgtttcccttgctgctgatcctctcctgtgagtcctatactgtctgtagtttttcattttgtgataggtctttgttttcacgttttaggtccctggtgataatatttatacaatccttaatctttgcccctgcctgtgctcaaaactcactgtgagtgctctctttttgaaggcttcatttctttccatcattcttatataaaatttggacttcctgattttttcctgttgatttttgaggaagtttttgttattttatttgaccctgcagatctaccagcttttaaacaggttatttgttttcttgctattcagttgtataaattccttgtatattttggatattaaccccatcaaatatgtaaattttggttcttactacaagtgacattctctctttcctctgcgtagttgatgaaatggatattttgaatccctttcttttctttcttgaggtcaaactgaaaaagatttctcccattgttctgtgccacgatgtttcctatgtgtcgttaataagcatcattatgccctgctagctagttaagagcaccatgatrttaccatgtaattacattataccaag

SEQ ID NO: 146236 - DNA, 543 bp, Homo sapiens
gactcaaacctggagttttctgacccttgatgcagcaacagaaagcagtccaggtaagcttatcttcccctgtctctaatggaagtccatctgattgcatcaggtaagcctgacatcatgagcaaggagattgctgyggatcagccaacaataaacaactaactactattaatacttccctgctaggtttgagactcacctgttccaccagagagatcccaggagggtgggactgaggaaccccttctgctctgatacagtttggctgtgtccccacccaaatctcgtcttgaattgtatctcccatgatttccatgtattgtgggagggacccagtggaagataattgaatcatgggggcggtttcccctgactgttctcatggtagtaaataagtctcatgagagctgatggttttataaggggaaaccccttttgcttggttctcattctctctttgctgccaccatgcaagatgttcctttcgccctccgccatgattgtgaagcctcctcagccatgtggaactgtgagtccattaaa

SEQ ID NO: 146237 - DNA, 543 bp, Homo sapiens
gactcaaacctggagttttctgacccttgatgcagcaacagaaagcagtccaggtaagcttatcttcccctgtctctaatggaagtccatctgattgcatcaggtaagcctgacatcatgagcaaggagattgctgcggatcagccaacaataaacaactaactactattaatacttccctgctaggtttgagactcacctgttccaccagagagatcccaggagggtgggactgaggaaccccttctgctctgatacagtttggctgtgtccccacccaaatctcgtcttgaattgtatctcccatgatttccaygtattgtgggagggacccagtggaagataattgaatcatgggggcggtttcccctgactgttctcatggtagtaaataagtctcatgagagctgatggttttataaggggaaaccccttttgcttggttctcattctctctttgctgccaccatgcaagatgttcctttcgccctccgccatgattgtgaagcctcctcagccatgtggaactgtgagtccattaaa

SEQ ID NO: 146238 - DNA, 464 bp, Homo sapiens
tcatcatcatcatcatcatyattcttactttagttacatggataagttctttagtgctgatttctaagatattggtgcacctgtcatctgagcagtatacactatacccaatgtgtaatcttttatccctcaccctactcccattcttctcctgaagtccacaaagtccattatatcattcttatgcctttgcatcctcatagcttagcttccgcttacaggtgacaacatacaatatttagtttttcatttctgaggtacttctcttagaataatggtctccaaatccattcaggttgctgtgaatgccattattttgtttctttttatggctgagtagtattccatggtatgtatatacaccacattttcattatccactcatttattgatgggcatttaggctggtttcgtatttttacaattgcaaattagtgctgttataaacatgtgtgcgtaaatgt

SEQ ID NO: 146239 - DNA, 523 bp, Homo sapiens
tccaaccccatctccttcccagggaagttctcagggaacagaaaggaaatgagacgcagtgtccagagatgagactgcagagatgaagagagacttcctcctgatctgagggtggtggaggagagggaggcggtgggagggtggatagggattccagggtggggaggggatagtgctaatctcctcttcagtgcaggccgtagcagctggcagcatgtgcagtgaccgtgttcgtgggcactgcaygggtccatgggatgggtctgttctgaggaatcccagtgactcaggtgctaggctggctgtcagcctgagctcccagtagtgcttggctggttggagtgctgagtctgctgcaggcaagacctgggaaggtcagatgctctgcctaaagccctgaggtggctctgaaaccctggagtgtttcctgcataagacctgcataagacctcagcctcttccttcgtgtcaatccaagccattctcctgtttggcagcaattcagagggcctcatagaaattc

SEQ ID NO: 146240 - DNA, 615 bp, Homo sapiens
aatttccttgtcaattgtgtctttgactacggctgtcctgaaactttttgtcatccacaaacaattgtcttgtttaggtcctctttagaaggtggcttcataatcaactataaaactctaacaggtgctcttgaatgcaggtttctggtaactctggaggttgtaacatcagaatagaggaaaaactttcaggattcacagacagctgaaatgttcataaataccaagcagaacaagcattaaytgcatggactaaactaatagaagtctgaagtaatctttttaaatttttgcataaaacgttgctgatcctttgttttgtttttcagagtcaagggaacttttcttttgagctattgacagcttttaacaatttagtatactcctgtgaacagaatttggagcatacttgtttctctctacctgatttctctagaatttggaaactatttgtgagtattcttaacttatggcaatagagttatttgcataagtgcaataaaaatctgttttcatttgtaacagtacacaattggagaaactggttatttcacaaaggctttgagtggaatggtgtgctttcctttaaggaatcaaacttgacttatggagcca

SEQ ID NO: 146241 - DNA, 555 bp, Homo sapiens
tgcaaaattggccataacactttgtggctcatctcatcattgagaggtraaatttattttcccaccccttgaatctgggctagctttgtgactggctttgtcgttacaatgcagaagtgatgtagtgcccgttgcaaacctagaggccgttgcaaagctcaagaggccttgtagcttctcctctcactgtcttagaactctgaaatgagcgtgagatcaagcctgggttaaccaccctgagaatgagagattacatggagaaaggtctcaggcaccctgtctattcaccaggtggttgcaaatgtgtaagtgagtccacctgagaatagctgccctgtagaacccagcccaaattgctgaccttcagaattttgagctaaataaatggttgtttaaacaactaagttttgcagtgatttgttatgagcagaagctaactgatactggagcgcatggcatgcaatttcttttttcttttcagactcctcatttatggctgttctacatgtgctaggagcctctaagtgctcctagtattttcttgtaccaagaaaa

SEQ ID NO: 146242 - DNA, 555 bp, Homo sapiens
tgcaaaattggccataacactttgtggctcatctcatcattgagaggtaaaatttattttcccaccccttgaatctgggctagctttgtgactggctttgtcrttacaatgcagaagtgatgtagtgcccgttgcaaacctagaggccgttgcaaagctcaagaggccttgtagcttctcctctcactgtcttagaactctgaaatgagcgtgagatcaagcctgggttaaccaccctgagaatgagagattacatggagaaaggtctcaggcaccctgtctattcaccaggtggttgcaaatgtgtaagtgagtccacctgagaatagctgccctgtagaacccagcccaaattgctgaccttcagaattttgagctaaataaatggttgtttaaacaactaagttttgcagtgatttgttatgagcagaagctaactgatactggagcgcatggcatgcaatttcttttttcttttcagactcctcatttatggctgttctacatgtgctaggagcctctaagtgctcctagtattttcttgtaccaagaaaa

SEQ ID NO: 146243 - DNA, 409 bp, Homo sapiens
tgacccttcctccaccacacccctcctttgaggacgcccggggtctcccacaggcctgtgagttgcctcggcatatgacgcagaaccccaactgttacaacttagtttggatgtaagatgctctgaggaccctgcccacacccctgcgtgcattaggatgtcgctggcctttgctcacctcagaggggagaaaaggctaaagatttgcagtttgacagcccagcagggaggaagcatcacacagcgttargagccgtttccttcaggtgttaaggaaggggatgcccctgaggttctcctggctagtcagggtggcttcacccatcactggtgggttgcaggaacagcacccaggactctgaggagggacagagaagcaagggggctgctgaaatcgcagagacttttg

SEQ ID NO: 146244 - DNA, 409 bp, Homo sapiens
tgacccttcctccaccacacccctcctttgaggacgcccggggtctcccacaggcctgtgagttgcctcggcatatgacgcagaaccccaactgttacaacttagtttggatgtaagatgctctgaggaccctgcccacacccctgcgtgcattaggatgtcgctggcctttgctcacctcagaggggagaaaaggctaaagatttgcagtttgacagcccagcagggaggaagcatcacacagcgttaggagccgtttccttcaggtgttaaggaaggggatgcccctgaggttctcctggctagtcrgggtggcttcacccatcactggtgggttgcaggaacagcacccaggactctgaggagggacagagaagcaagggggctgctgaaatcgcagagacttttg

SEQ ID NO: 146245 - DNA, 569 bp, Homo sapiens
catgtcatccatatagataataacatttgtgcttttacgaacaytatgcctgcatatattacccttttcctaatttcataggctaatatttccaataagttgttaaataaaaatgaaaactgtgggctttcttgacttattactaactttggtgaagatgactctagtgttttcccattaaataagaagctaactttaggacatatatgtatttaaagttattatgacatagaactcactttttatacattttaatacctgacatctttcagcagaaaatctttttctcttaataatcatctttattttgtctatccatttatatttttaactcctggtcataaaaaattaattatttttgcagtttctgtctaccacatggaccatattttcatgttacaagctctttaaatgatttagatttattactcacaaattgtatgattcaaaacaaagaaaaacaggtgaaataatacataaaaagtataaagtttactataggaattaaaatgaaatccttcctcattagtgaaagaaaatgtaatcatttaaaaatattttttatggat

SEQ ID NO: 146246 - DNA, 569 bp, Homo sapiens
catgtcatccatatagataataacatttgtgcttttacgaacattatgcctgcatatattacccttttcctaatttcataggctaatatttccaataagttgttaaataaaaatgaaaactgtgggctttcttgacttattactaactttggtgaagatgactctagtgttttcccattaaataagaagctaactttargacatatatgtatttaaagttattatgacatagaactcactttttatacattttaatacctgacatctttcagcagaaaatctttttctcttaataatcatctttattttgtctatccatttatatttttaactcctggtcataaaaaattaattatttttgcagtttctgtctaccacatggaccatattttcatgttacaagctctttaaatgatttagatttattactcacaaattgtatgattcaaaacaaagaaaaacaggtgaaataatacataaaaagtataaagtttactataggaattaaaatgaaatccttcctcattagtgaaagaaaatgtaatcatttaaaaatattttttatggat

SEQ ID NO: 146247 - DNA, 613 bp, Homo sapiens
atttttaagactacaaacatatcaatttgttcaaaattatgatgaacaagaaaccaggcaaaaatgcaaattggaattagactatccatttgaaatatacttattaataatcttaacactgtatagttttcaagaatccaatactataattaaattagcactcttaatgcttttcatatttaaagtctaaaattgcaagcaataaccataaaataaagtagtaaataatgataataaccaattaccacagaaattgaacaaaacattgtaataatcacagtttttttattgacaacagcttctttatggcactccaaatgagtggataattctacaaagattactcttattatcagcaaaacttttggttccacctattaaataaaacaaagattttctctgcttacatgagagagctacctyattgtttacatttttaaaatttctgtgaactagtgccccctcacattttgtgacctaaattgtaggttataggagataaactaattgaagaccacttcaaagaattacatttaaagagttgaatgcattactaatgaaataattttgactggttataattacaaaagagtcatcatccaatacaaacacc

SEQ ID NO: 146248 - DNA, 591 bp, Homo sapiens
acccattttgcattctcttatcatcaagaatattatattttaagaagatcaaagtattacagatcaatttataggcctaaatttctatcactttttagtttacttagctgttccattagtcactactaaagagcccacgcctcgccccaccccttacgttggcattttacatttttttttagcagaaacattcrtattattttcttaactgatatttttggaggggtgttagttaatatctcagtgatttaagaatattcttaatattgtgatgtttatacttgagttgtcacacatatttggcatgattatttgtttttcctctgatagagtcagctttcctctattctgggttacagtacccctattttttcccatcaccatccagctacatgtaagttgtagcatgtagctgagacttaacttcatcggtataaccattctgaggccataatgataacgctgttgattagtaagtgccataaaaagaaccaatcaggccctaaccttgggattttgtttaatgttttggagaaagtgctgctgttaactatctgtcttaaagatggtggccaggtaaattgcccacat

SEQ ID NO: 146249 - DNA, 581 bp, Homo sapiens
ttagcatgatcattatgtatttgaaataattcaacttataatgttctaggattactgccttttgtattgtaatttttgacaaaaatccaatgtattttaagtttattggtatagttacatttttctggctttaagataatattttatgtttttgtagaaatcattcatattatcttttttcaaagttattttcataatgctaagttgcattttgctataatttttctttcttcttttgtttaatattcccagtgatggtacatgtacagtggaattggctcaattcttacacttttagaggaactataaatttattcagttttttttttctaaacagttcatctgaaatcataaatatattcatattatttgaaaaagttataccatttctgggaagtgatcccaaagcaataaacaattgtaagcaaaaagccttcaaaatggagatattcattttcccagtatgtattatagagaaaagtcagaaataatataaaaatttcactgaccrtcataacatttggagcatgtttatatatcaactaaatggtatggtcttcacattagggactgaggactaa

SEQ ID NO: 146250 - DNA, 582 bp, Homo sapiens
gcattatctcactcacactaaggagcctgactgatgctagtcatttctattgtggtacgtttgtgaaagttttctcaaataatttaagggtatgacaaaagtagagcttaattatttccccaatgtattatcttctaaaggcaataccatctcccattcaatgagttcacagtttataactgtttttgtaacccctatgcgtttttcataatttttatttcatttcttatatccaaactcagctgtgacttttgtattttctccagagctgattttggagaaaacaaatagcagccattctaatttgtcaagaacctttaatatcttttgcagttttccctaatttttaaaagcccccactgaacttgattccttcaaatgattgtttgggagttcagtcctttaatcctcaaatcaccaagaacacatttaagaattgtttaattatataaattagaatgcattaatattatttgtattatttccatgtttctcagtagacaatctgtaggattgcttttgcatytccttgttttcagaggctttgaaaattgtaattttcaattcaatatttcaattgaa

SEQ ID NO: 146251 - DNA, 600 bp, Homo sapiens
ccaaaagatggcatctctttctggcaagaggacaaaaaagtgggcttctgtgaagtggagagtagggttggtgggaaggagtaaagccttattttgttttgttttactttttttctttgattcttcctctcctcttctggacttcatccaaaggaagcccccatccaaaggaagtaatggagctgtgatatagctgaagcagcatcacattatgcaaaagtctaagaaattcctattccactgctcagaggaascagaaagttgcccacagcggttcaaagaatgtggtaagaattgtttttaattttttccttgtccctcttctccctcccctttgcctagagggtggtccaaactgtgctgaactatgtatgcaacaaaccaagggactcaaaatctgaggcaaacacatcattcttatcagataaataagaaaaaatattcttgggagttagagagtggagaaaatcctccaggagaggactgaagaaaggagatcattaattctaagtaaaccaaaaaatatcctctatctgtatatgtgcaaacaggtgccaagatgtatagcaaagattttaagaactaaactacaatataaac

SEQ ID NO: 146252 - DNA, 600 bp, Homo sapiens
ccaaaagatggcatctctttctggcaagaggacaaaaaagtgggcttctgtgaagtggagagtagggttggtgggaaggagtaaagccttattttgttttgttttactttttttctttgattcttcctctcctcttctggacttcatccaaaggaagcccccatccaaaggaagtaatggagctgtgatatagctgaagcagcatcacattatgcaaaagtctaagaaattcctattccactgctcagaggaaccagaaagttgcccacagcggttcaaagaatgtggtaagaattgtttttaattttttccttgtccctcttctccctcccctttgcctagagggtggtccaaactgtgctgaactatgtatgcaacaaaccaagggactsaaaatctgaggcaaacacatcattcttatcagataaataagaaaaaatattcttgggagttagagagtggagaaaatcctccaggagaggactgaagaaaggagatcattaattctaagtaaaccaaaaaatatcctctatctgtatatgtgcaaacaggtgccaagatgtatagcaaagattttaagaactaaactacaatataaac

SEQ ID NO: 146253 - DNA, 600 bp, Homo sapiens
ccaaaagatggcatctctttctggcaagaggacaaaaaagtgggcttctgtgaagtggagagtagggttggtgggaaggagtaaagccttattttgttttgttttactttttttctttgattcttcctctcctcttctggacttcatccaaaggaagcccccatccaaaggaagtaatggagctgtgatatagctgaagcagcatcacattatgcaaaagtctaagaaattcctattccactgctcagaggaaccagaaagttgcccacagcggttcaaagaatgtggtaagaattgtttttaattttttccttgtccctcttctccctcccctttgcctagagggtggtccaaactgtgctgaactatgtatgcaacaaaccaagggactcaaaatctgaggcaaacacatcattcttatcagataaataagaaaaaatattcttgggagttagagagtggagaaaatcctccaggagaggactgaagaaaggagatcattaattctaagtaaaccaaaaaatatcctctatctgtatatgtgcaaacaggtgccaagatgyatagcaaagattttaagaactaaactacaatataaac

SEQ ID NO: 146254 - DNA, 601 bp, Homo sapiens
ggccccactatctcttcctctgggtacaggtacttctttgatgagtattactatgtttgctgcataccacttacacatttttggccctgcagctaaggagatgccacaactaaaggctgttgatagatgagttcaggagaaatgcctctttcctattttggggatgttctcttatacttcagtctctcatggctttaaaaaaggaatttttaaaacatagatacttcccttttacaatctgtcacaaaaagaaactgaagctgaccagtaattgaaaaccgagtaaaaatattttactgcgatgaaagctagaagccactgttccaatgggaaagtgtakgtggacaaatttgttctgtctagcggcaacttcccttaggatttctccctactaagtgaaagaatctcatcattttctcattagacataaatgatcaattttcaactctgcaaaggatgcagaatttggcccaatctagatcccatccccaattcataaagtgtgtttaattatccctcttataaatgtcacaactactttgtgaacttgatctcataagtattgtcttcatttcaaagtttctttgatgttctaagcatt

SEQ ID NO: 146255 - DNA, 531 bp, Homo sapiens
ttgtcatggatttagccacctggctatgtccagaagtggtctgcctattacatcatattgatgataattatgttaacctctgtttctcttgtagatttaaaagaggcagtgcccctcttgcagcaacatttggcagcatgttgttgggccatcaacaaatccaaggtccaagggcctggattatctgccaaattcttgggagttatctggttgcgtaagacaaatgccatccagaggctatcaycgataagattcaggcgtatccccagtccaccacagtgaagcagctgcaaacttttgtgggcctcctgggatattggcaggcatttgtgccctatttggttcaaatgataaaactgtttcatatgttagcaaagaagagagctacctgtgattgggatgatgcagctaagaccaacttcctggcaggcaagcaggctattcagaaggcacaagctccatgggtagtttactagaggtgcccgtttgagctggatgtgcatatgagcacagatgcttttggttggggcc

SEQ ID NO: 146256 - DNA, 531 bp, Homo sapiens
ttgtcatggatttagccacctggctatgtccagaagtggtctgcctattacatcatattgatgataattatgttaacctctgtttctcttgtagatttaaaagaggcagtgcccctcttgcagcaacatttggcagcatgttgttgggccatcaacaaatccaaggtccaagggcctggattatctgccaaattcttgggagttatctggttgcgtaagacaaatgccatccagaggctatcatygataagattcaggcgtatccccagtccaccacagtgaagcagctgcaaacttttgtgggcctcctgggatattggcaggcatttgtgccctatttggttcaaatgataaaactgtttcatatgttagcaaagaagagagctacctgtgattgggatgatgcagctaagaccaacttcctggcaggcaagcaggctattcagaaggcacaagctccatgggtagtttactagaggtgcccgtttgagctggatgtgcatatgagcacagatgcttttggttggggcc

SEQ ID NO: 146257 - DNA, 577 bp, Homo sapiens
agacacaggacttaaaggaaccatgggagctgagaaggtgtggtaccattgcccagggcagaagcccttagaggctgcattgttatccagggatgaaaggttagcctgtattttgcctgagggatgtgatttatctccattagtacctgtgtcttctctgtcatttcatccataagttaacatgctccaactgcattgtggattggccccacacctctgctgtggtgaccaaggtttccaactgttgkatctgtacctcccttcaagcagcagctgcagatggcttgccttagcacatacattcagtgcctgcagagaactggagatggctggagacttggggttccatggccaatgcctgtaatgcaatgtgacaagctttggacaaagcatgccacaagacgcatgcatgcctgcctcctggctggcccacagcatttatgatgtgtggggctagctaattgggaaacatgtggtacccccagcccaggcaccacagtgcatagagcaacactggggcaacaccactgtggggcgggtacccatcgtggcctgtgtaaacataacagatgtcgcc

SEQ ID NO: 146258 - DNA, 577 bp, Homo sapiens
agacacaggacttaaaggaaccatgggagctgagaaggtgtggtaccattgcccagggcagaagcccttagaggctgcattgttatccagggatgaaaggttagcctgtattttgcctgagggatgtgatttatctccattagtacctgtgtcttctctgtcatttcatccataagttaacatgctccaactgcattgtggattggccccacacctctgctgtggtgaccaaggtttccaactgttgtatctgtacctcccttcaagcagcagctgcagatggcttgccttagcacatacattcagtgcctgcagagaactggagatggctggagacttggggttccatggccaatgcctgtaatgcaatgtgacaagctttggacaaagcatgccacaagacscatgcatgcctgcctcctggctggcccacagcatttatgatgtgtggggctagctaattgggaaacatgtggtacccccagcccaggcaccacagtgcatagagcaacactggggcaacaccactgtggggcgggtacccatcgtggcctgtgtaaacataacagatgtcgcc

SEQ ID NO: 146259 - DNA, 648 bp, Homo sapiens
aaaatgaaaatctaaatcatggaaaacgtagcaagaaatgaattgcattagtttgttgaaaacagcagcaaaagacttagcttaggtttttgactaaatgattgcaaatgctaagaaagataatatgtatttcaagagaacaaggtggagctacttagcggttagagaaaattatccaaccaacattatgtcaaggagataagagaagatatgggtatagaaagtagataataatggttggataacatctgggccataatcaacatgagttagcaaaagagaactctttctacaactttaaaaaagttttaaaatactgcaatagctagataaaaataaagttcaaaatatatttttataaaatgggaacaataaatacatattattggctaaagacaaggcactaactgtccaacagagtgaatatacaaaagagaaaggatatgttcaatgatgaaagttcrtaagttatgtggtcaaggagaacaacaatggcccagataggaaaagaaggactaatcgtttcaacaaatgagactagataaacaagacctatatgcagatgtttctaagtttgtgaaagacacaacaattttatgggaaattatggaagaaagcaacacattttttttttttgaaagtgcagct

SEQ ID NO: 146260 - DNA, 621 bp, Homo sapiens
tgtaagcaggagcactacctgaatcagaattgcttggggtttttatgattatgcacattctagagccctgttccagacccaattctctgagggtgatgtgtggggatcattattgttaacatagaaccagatgattgtaacaacagttgaaaaatctctaataataattgcgatcactaaggacatggcagaagctgaagtgaagttaactggagtttgggaattaaaagatagtgagagtagaattttaaaacagtgaaaccttagacattgatgaaaaaatgttggaatgaagagagtaaataaaatgaagtattatttccttaattcatcaaataagcatatgttgccacaagtatgagcttccttgctgatatttgctagtctgaatcaggtgacaagctggagtaaacaatgcacgtatacatagtgaaagttaagaaccaaagaatcagagatcaayggtaaaacctcaaatgcaatgctgagttctatagcgcagccactggttcttgccatatgtctcaatcaaatagcttcgacaaatttattattaatgtcaccaatctttgatatataggaatgttgaatattgcagaacatttaaaatactttaattca

SEQ ID NO: 146261 - DNA, 426 bp, Homo sapiens
atcaggtcccgaacttttcttcaatgggagactttttatggctttgatcttattactcattattggtttgttaagctttcccatttctccataaytcagtcttggtaggttgtatgtgttcaggaatgtatccatttcttctagactttctattttgttggcatatagttgttcataatagtctgcaataattctctgaatttcagaggtctcatttatgtctcctttttaatttctaattttaggtcttctttttttggtctagctaaagatttgtcaattttggttaacttttcaaataaatgactatttgtttcgttgatcttttgcattttttaatcccaattttatttgtttctgctttgatatttattgttcctttccctttactaattttggggtttttttttttcttgctttttgaat

SEQ ID NO: 146262 - DNA, 574 bp, Homo sapiens
actgcttatttatcttcagtcttctacaatgcccatcaattcacaattcttatagggtagaacttcccaaaacagaatgaaaaatatatttaagcaaaaatttaaaaagtatttaggttaatactttaaaactctttataaatattttaggagagtaaataatagccttgctgtgagaaaagagtaggcattttccctctgtaaaaccacagttttgaaactrggatctcagagaaaatatgcataaaaatagaaaacttttaagaatttaaagataaactattacctcagaaaatttggcttacagattgtgcacacatatacatgtgtgcgtgcaaacacacacacacacacacacacacacacacacactcccataattgagatttgggctgtaatttccaactgcattaaatattttacataatgaactgagaaagaaaaaatgagcttttctgaagacacttacagtaagctaaagcatggagctttttttttctctgccttaatacattacgtgtgagagaggtaagaaagtaagaaaccacaaaaatgcatttagcagctactgtga

SEQ ID NO: 146263 - DNA, 613 bp, Homo sapiens
tgaatataatactaatgtcaatagatatggataaattgtaattacaggataggagagtagaaataaaatgaatgagcaaagttcatgagaaagtaaaaagagaaggcatctagagctcagattgagggattggaatagttattttattaacagcaaaattggaagagaagacagatggagttgaagataatttctaaaaagaaacttaatatcacctgagattatcattcatataattcctttgatgttcaatatattatattttattaatgattttctgattgcaaaccatcctgttgtaccctatttagtaactattattatttacccttcaactttaaatgataaaggttgatgcagaaatgcttatctgaaccatattgtagagaaaaaaattaaatcctcaatgaattgagagcatgtaaaaattatgaggaaagaaraataccctaggaaaaaactaatcacatgagaaaagctggacgcattttaaaataattagttaatacatataatttagacgtctgagtagttaataatggtagagatgttgaaactgtcacccacattcatatgggtgaaaatcaccatgtttactagcaacctatggatg

SEQ ID NO: 146264 - DNA, 609 bp, Homo sapiens
ataacatagtgagagctaccatataagaaaaacttggatttaaattcttaccttttcatctgataatcaagtgatcttaaagtgattacttaacatatgaatataccacaataacctctaaaatatacaaattttcctgcctttttttgtaggaagagaatgagacttaaatgagtaatgtgtaaggactgatacattgtaaggatgcatttattattacctatacttaatttttttattgttcaaccagaaactatatattgccagatggtaaaacatattaccagatggtaatatgttctatgaagaaaataaaccagacaacataatagatagtgaatgagaattagcgttggaagagatttgaagaggctgacttagactacttgagttcatcagaatttaaatatgctcatacctaccatcaagtgtgatcccaccaagtgtcaaatacttccacactgtgacaagtagtattaataacaaaagccaatatattacaaagtttttctaygtgccaaactgtttgtaagattatttgctttaatcctatattagcaccaaaattgaactataatattgacaccacagacttctggacaaaaccaa

SEQ ID NO: 146265 - DNA, 602 bp, Homo sapiens
ctgttgggaaggtatgattggctttgaagtgtgaaaagggcttgagatttggtaggggccagaggaggaataatattgtttggctccttgtccacacccaaatttcatctcaaattataatccctatgttttagggacagacctggtaggaggtgattggatcatgggggcagtttcccccattctgttctcaagatagttctcatgagatctggtgataagtgtctggcacttcccccttctctctctttttcttgccrttttgtgaagaaagtacttgcttccccatgattttacgtttcctaaggcccagatatgcagaactgtgagtcaattaaaacttttttctttataaatttccctgtcttgggcagttctttatagcagtgtgaaaatgcactaagacacttattaagaattctctccatcacagtattctgtttccttatttaactacaaaatgacgaaatttagctcctaaaaccagccccatgagaatgacattcacttctgcatgacaatttttaagactacaaacatatcaatttgttcaaaattatgatgaacaagaaaccaggcaaaaatgcaaattggaattagac

SEQ ID NO: 146266 - DNA, 602 bp, Homo sapiens
ctgttgggaaggtatgattggctttgaagtgtgaaaagggcttgagatttggtaggggccagaggaggaataatattgtttggctccttgtccacacccaaatttcatctcaaattataatccctatgttttagggacagacctggtaggaggtgattggatcatgggggcagtttcccccattctgttctcaagatagttctcatgagatctggtgataagtgtctggcacttcccccttctctctctttttcttgccgttttgtgaagaaagtacttgcttccccakgattttacgtttcctaaggcccagatatgcagaactgtgagtcaattaaaacttttttctttataaatttccctgtcttgggcagttctttatagcagtgtgaaaatgcactaagacacttattaagaattctctccatcacagtattctgtttccttatttaactacaaaatgacgaaatttagctcctaaaaccagccccatgagaatgacattcacttctgcatgacaatttttaagactacaaacatatcaatttgttcaaaattatgatgaacaagaaaccaggcaaaaatgcaaattggaattagac

SEQ ID NO: 146267 - DNA, 434 bp, Homo sapiens
gtgccttggaagccacaggaagaatgtgtaggtcattttcatttagtgtcctggagatcagygtggatgagaactgagaatttaatttgtcaaggtgtttgtgaagtaatcaataggagagcactttgcagcccgaagaggacttttgaaatttacatgttagctttcattagtgttggatgtgagcactaatgtgattggagatgctaataaggagagaaggtgggttgatagggaaaagtgaaaggtgaggagagtggaaaggtgaggagaatggaagaggagaggagagagtcggaggaggataggtgtacatagaggactcaggtggagaatgtagagtgatgagatttaagggttcactgtggcaaatggttgacaaaggtcatggagctgacaagatcacttgtgttagatggctgtccgcatggatt

SEQ ID NO: 146268 - DNA, 380 bp, Homo sapiens
ctgtaaataagtcgtccttgaattattctaagttgagtgtgctawctcttttagttgaggccttgatggataaagttacttactgttctggaaactttatatccagtgaaatatatgagataatgcatgattgctttaattcattcattcttggtgattggcttgataagaaatcacttttggtgactggctaaaatctcaataacttacgtggtatcaaaaggaaaacaataactaagaatgactaattggcatcttagaacacgtaagtccatagcaaagacagaaatcaaaataaatattccatttgttcctctgcatttccaagccctcttgaagttagatgaggacatgtgagtagttctggccaatgaaatgca

SEQ ID NO: 146269 - DNA, 505 bp, Homo sapiens
actaaaatccattttcacataaattggtttcagtataggtatattatttcttgacattaagtgctcctttttaactrttagacattctttctgaataaaatttattagcaattactttaaaaatattatttattgacttcaaatatttgttaaagtttaatattcattgttataaatgaaaatatttatgtttatattcagttgaccctgatttgggatctaatttattcccaaatgacagccttaatgtggaataatgacaggtcaaacttttatggcgttatattataaaacagggttctttcggaagattaagttattgaccctgaggcttcactcttttgttgtagtattatggaaccatatgcttgttaagccttcaaggtggatgtacagtaatgtactcttctttttgacttttgacttggccatgagacttgctttgacaaatggcatagtagcagaaaataaatgtgcttgcatgactaagtttgccttgtgggag

SEQ ID NO: 146270 - DNA, 502 bp, Homo sapiens
gctgtggattttctctattttcttttgtttctccttccttctttccaacaaaatacctattttgagataaaactgacaatcaataaattgtacatatttaaaacatttaacttgatatcattttcacaatcaagataatgaacatactcaacagcctcaaaagtttcttagtgtctccctaaaaatctttctcctcttattcttgactgatttcctccgtacctaggcaaaaactgatctgctttctttcactatagattagttcacattttttgaatttyatataaatggaattatatagtaggcattctcttttttcttgtttcttttgttcagcataattattttggagtccatccatattgtagtgtatatcaaaagtttattcctttgcattctattctgtatggatatagaacagcttgtttatccattaacttattgatggacatttgggctgttctcagtttttagttcttacaaagaaagctgagatgaacac

SEQ ID NO: 146271 - DNA, 301 bp, Homo sapiens
tgatagcctgatggattaatcaccacatctggaatgaacttgcttatgagacagttttatcagctgaccagagaatggagagagaaaaagagttatcaagaagtgcagaagttctggattaattttagcccaagctaaaatcacctatcattgaatttgattcctgaggtacaaaatcaaatgcattaatatcagccactattctggcgtatcattcttctatttattaaaaagaatttattagyaaccttagaggttttcagtgttcaacatggtgaaatgctgctgggtactttggaag

SEQ ID NO: 146272 - DNA, 574 bp, Homo sapiens
aagctttttagttggttgcgatggttgtaggtgttgtggtcttatttcagggctctttattctgttctatttgtctatgtgtctgtttttatatcagtatcatgctgtttggttactgtagccgtgtaatagactttgaagttgggttaacatgatgtctccagctttgttctttttgcttaggattgctgtggctatccaggctgggttctttttttttttttttgttccatatgaattttaaagtagttttttwtaattctgtgaagaatgtcattggtagtttgataggaatagcatatctgtaatttgcttagggcagtatggccattttaatgatattgattcttcctatccatgaacacagaatgttttcccatttgtttgtgtcatctctgatttctttgagcagtgttttgtaattcctgttttagagatcttccacctccctgattaactgtattactaaatattttagtcttttcgtagctattgtgaatgggattacattcctgatttggctcttggcttgactgctgttggtatataggaatgctagtaagttttgtatctt

SEQ ID NO: 146273 - DNA, 555 bp, Homo sapiens
ttcttgtaagacaggtctggtattgattaaatcctccagcttttgtttgtctgggaaagtctttatttctcctttgtgtttgaaggatctttttgctggatatacaattctagggtaaattttttcttctttcagcactttaaatatctcatgccactctcttctggtctgtaaggtttccatggagaggtctgctgccagatgtattggggtcccattgtatggtatttgtttcttttctcttgctggctttcaggatcctttctttatccttgaactttgggagtttgattactaaatggcttgaggtagtcttctttgggttaaattcacttggtgttctataattagaggatactttctgttttattcattcattcaatagcttttgaagtacaagtcgtttttggttacatggttgaattctatagtggtgaattctgaggtattattgcacccatcacccagacagtgtacactgtacccagtatgtagtcttytatctctcaccccctgtttaccttcccactgagtccctaaagtccattatattac

SEQ ID NO: 146274 - DNA, 556 bp, Homo sapiens
aataatcgaaatgtttaaatttaaaataatatatttgctaaaaaaaaaaaagggtccaatcattttttaaagcccaagcatgagaataatagaggtcactatttatttaaattatggtctggatttggaattcagatcatttttaatttgttatttcacatgtaaccatgagtaaaattttcttagtcttttttatgcagtgtaatacaggtttgacattttaaaaaagtgatgatgtgtgacagcagcaagagtacttttgaatgtgactatatgacctgtcaaagaatttacatcaggtctttctgaagtgctgtcattctcattcacaatacaggccctcaagcccctcactgccccacagtaaaggctgtcacccagtcagcaccaatttcattcttgtgtgatattgctgatgtgtatcatgctcttgttaaattcactgtaggtcaactaactatttcttctaagtgactcaatcataaaacataaggcccacaaatacctagagargtatagtaactggcatgtttatgatagttgcattaggaacctg

SEQ ID NO: 146275 - DNA, 390 bp, Homo sapiens
agaaactagactttatcattactttctttgtgaccttgggcaagatattttatctctatgattcttattttctttactgtaaaatggagacaatcatattattcagatcataggtttaagattaaatgcgactatatacatatacaagttttaagaacaatgtctggcaaacaacagtcattgaataaatgttagctcttattatcatcatctgtaaaatcaggataatagcatcattactgtaagggtggaattagatgatattcgtaaagtgctaaatgaagtgccaggcacaaattgtagctataattcttattccctgagctttcccatctatctgtayttatgctagtccctctgatttaaggtccttttttagttgctgcatgt

SEQ ID NO: 146276 - DNA, 568 bp, Homo sapiens
ctctggcttcctttacaacttctggtgaagggtgtcaacttaaattaagctgtaatactatccttgttaaattcctcataaatattgctctgcttcttatgctgaagcagaaaatactctcaataatattttattatgaaataaattgttccttcaatcatttatttccaaagatcagttttaactctctattgatttctccmaattcgaaagactttgaactatctttgataagggtgatgtatgatgttaactattaagaagacaggactaataagtcactgagtaaaagacaaaatacctgccaattattacttattaaatgacatccactaaactaaaaattacatacctaatggcaggtatctttataataactgaaataagtgttatttccattgcgttgagaatatggaatcccagaaatgctaaccaaattctacaacatcacacagctggttagtagtgatacggacaggagacagggtgggaaacaccaggtggaagagggcggttccgggcaaaggccccaccctcaagcctgaagatccgcagccctaagtgaggg

SEQ ID NO: 146277 - DNA, 590 bp, Homo sapiens
ttgaacaaatagacattgctgatatttttcacttcactaattagaatagacaccggcaaccagtccagtactcttcttatagttgcctaagccaactggacagtccgaatacaagtaatggtttattttcttccaactgtataaattggtcaggtttgcaagagtgggttttttatccccagagatgctgaatggttagtggggttgatktataagtaatagaaggtctagttgtcagattcacactgatttctgtgattctttgatctgaatatgatattcagtgtgaccaaccagagccatcataaaagggaagttacaggtcaggactctggggccagactcccaggttttaaagtaacttcctcagttgaagtttagttgactgtggacaagttatttaatttctcaatgtctcaatttttctcacatgcaaattgtgaatgaaaatattacctcatgtggtgtaatatgaatattaagcaagtaaaatacatatgaagtgcttagaatatgtcatagcccaatagtaagcatttaatagatgtagtaattgctgatattagttctacctggtgacagaattgatg

SEQ ID NO: 146278 - DNA, 558 bp, Homo sapiens
aattgataaattgttctaaatatcgagaccatgattctcaacaataactaataatgtttatgtccaaaattgtaattccacatcagaaaattgtgcaaataacaagaactagataaagttcaacttgttaggagagatgacaaagrtcaatcactttctgcactgggagaatttgtcaattctgagcatggcctgaacattaggcataacctaagcagaagggctcagctggggaaaagagagaaagcggagttggttatggttgtgaaccctaacatgacagatcattatttaggggagcctcaaacacacatctgcctttccccaggagaaatttgttgacatctgtcatagaatagaaagctggagggctaagtctgcaacacctaaacagggcagagtaaaatctgtggtcttgtggttcttaggaatcaaagtcccactagaagaggatcccacgtcaaatacacaaagcccccttctctcttaagacatgtgctagattctgaagctttgtgggtggaggctaaggagctaaactcaagaccttcacaggac

SEQ ID NO: 146279 - DNA, 587 bp, Homo sapiens
aagcaatttttcttgaggcaggcctagtggtgatgaacttccttgacttttgtttatctgtggaagttttttcttttctcttttattcctgaaacaaagcttttttgagtaaaatatttttggttgtcaggtttttaccttcactactttgaatatataccactcactctctcctgcatagcagggtttctgctaagtccactgatagccatactagaactcctctatttttgatgtacttttatatcttgctgatcttgggatttttgtttgtctttgattttttaagaatttgattattatgtgttgtgataagcycctttttggattaaattttactgaagattaatgagctccctgtgtctggatgatggcttctttcttcagattaggaaagtttttcattattatttatttctttaatccattattactttaaatatgttttctggcccattttctctttcttgtactttttgaattcctattatatatgtagcttagatctcttgatgatgtgccatatttcatgtagcataggcacataggctttctatatttttcattcatttttttttggcaagttc

SEQ ID NO: 146280 - DNA, 531 bp, Homo sapiens
ttctgagatagcagagattttggtatggctgaagtttactgtgtgatggtcagggaagaggactgcaggaacagaaagtttagagacatgagtaggggtcaaactcatgcttccttcacagctatggcctcagggtctaggaagttacctatactttgtaaatggtcactttattaaaaataaattaatgaatggaagtattactgaaataaatttggaattttcccagaggaaatgagaaaatactgaaaaatgtacagtaggcaaataacataataagttttccagtttagaatgatcaacttagcagcattgcagtatcttgtgcattaataagatgaagaccaattaggtgattattgcaatattccgaactagcrtagataagaatcccaccaaaaaggataaaggttaaattagagatgtgcctaaataaatctattttaggtctatgtcaatgagtggatgttactcgtaatagctggggataactagaggaagaatgagaaactgaccaagatagaaatatag

SEQ ID NO: 146281 - DNA, 549 bp, Homo sapiens
ctgtctcaccctgggaggctgctccttgcattcccactgctctaattctagccatggctcaaagggccccaagcacagctctggccaccactctagagtatgcaagccataagccttagtgccgtaagccttggtaccataagtcttcgcggcttcaacgtggtgtcaatcctgcaggtgcacagaatgctaaagtgaaggaggyttggcagcttccacttagatttccgagaatgtattagaaagcctggatgcctacgtagaagcctgccacagaggcagagtgcacgcagagaaactctactagaacagtgacaatggaaaatatggggttgatgccctcatacagagtccccatttgggcacttcctagtggagctgtgggaatgaggctaccaccttccagactaaaaaatgatagagccaacagcagcttgtaccctgaacctggaaaagcctcaggcatacaactccaacttgtgagagtagccatgtagaatgcaccctgcaaagccacagggatgtagctgctcaaggcattggaagccc

SEQ ID NO: 146282 - DNA, 549 bp, Homo sapiens
ctgtctcaccctgggaggctgctccttgcattcccactgctctaattctagccatggctcaaagggccccaagcacagctctggccaccactctagagtatgcaagccataagccttagtgccgtaagccttggtaccataagtcttcgcggcttcaacgtggtgtcaatcctgcaggtgcacagaatgctaaagtgaaggaggcttggcagcttccacttagatttccgagaatgtattagaaagcctggatgcctacgtagaagcctgccacagaggcagagtgcacgcagagaaactctactagaacagtgacaatggaaaatatggggttgatgccctcatacagagtccccatttgggcacttcctagtggagctgtgggaaygaggctaccaccttccagactaaaaaatgatagagccaacagcagcttgtaccctgaacctggaaaagcctcaggcatacaactccaacttgtgagagtagccatgtagaatgcaccctgcaaagccacagggatgtagctgctcaaggcattggaagccc

SEQ ID NO: 146283 - DNA, 476 bp, Homo sapiens
ttgcatttcacggaacatgcgtaacacattccagcctctaggcctttgcacttgccttttcccctgcctggggctctcctattgcagaattatgaatggcttactccattcctccatggatgtatcctctgttccaacatcttttccttcgaaagacttccccaaatacctgaattaagataacaccctctacaaacccttgttctgtttttctttatatcacttaccacatcaacaaattatattgtaggtaacctagcaccctccctgttttttttgacccagctagtggttacrctatgtgttcactttgtgaaaatttatggaactgtacaattatcatttttgcatttttatgtgtgtatttatttatagtttttcagtggctcatacctctaatcccagcagtttgggaagccaaggcaggaggatcgcctgaggccaggagttcaagagcagcttgagcaatatagggg

SEQ ID NO: 146284 - DNA, 567 bp, Homo sapiens
caggaagatttcactgtgaggacagtatttgagtagagaaagtgagagtaaaaatgtgaggaagagcagtctatactcgactgataaacagataaagagaggacagtatttgagtagagaaagtgagagtgaaaatgtgaggaagagcagtctatactcaactgatgaacagataaagagcatattcttttggaggtccgtcaagtaagtgagactatctggaatgagtcaggaaagaaatggttggtaaaaatctagagttaatgaggaccggatcattaagagtctcctaagccattataatgacaacagctttcattctaaatgagatgggatgctacaaagcttttgagcagtggtctgatgtactctaattcatgtttttaaaacaccactcaaatttctcctttgagaataaactatacagggaggctaagcagaaacaaaaccacktaagggaaaattgctataaaccacatgagatttagcaaagacttgtacttttataggagcgaaagagttggtgcattttgaagataattgaaagaataaactttgatttgattt

SEQ ID NO: 146285 - DNA, 557 bp, Homo sapiens
gacatctcatgtgtcttgctaagcacaggcacgttttcatatcgaaaaggtgctgcaccttttgaaagtcaccctcttccttcaggggtactttataagcaatacagagagttttaaactaaactctaaattcgagattcaaacattagtccccagttttaggggaaaaaattgtttagaggacaagccaggacatcaatatttcaaagtgtaccccccagaaagatacctgttctcaaaacagggaaagctcatttcacagtttaaagaaaacaaagaaaagaaaaggcacaaaatgaaaaaagaaaaagtagtctgggtctactgtctgtccatccacccatctgcawtctggccttgcctgcctggactgtcctcctctcccttcaaggctggagggaaggtccctctggcaagagaatatcctcttccacccactggctgatgctcaaaattctactattaggacataatcactttagtttcagctttgatccctgttaaaatgcaaatacctctgggtggggtaatacttaaactgttatcagccctttaca

SEQ ID NO: 146286 - DNA, 595 bp, Homo sapiens
tatatgattctacttatgtgagattcctagaataggcaaattcacagacacagaaagtggaatagaggttaccaggggctggggagaaggaggaaagggaagttactgtttagtgggtacagagtttatgttgcggataatgagaaagttttggggatagataatgatgatgggtgcacagccttgtgaatatatttaatggcactgaattatacatttacaaatgggttaaaataataaatacagtcatgcattgcttaataatggagacacattctgagarattcgtcgttaggtgattttgtcattgtgtgaacatcacagagtgtacttagacttagatggtggtgcctactacacacccaggctacatggtactccctgttgctcctgggctccaaatgtgtatagcatgtgatcatactgaatactgcaggcaactgtaacacaatggtaagtatttgtgtatctaaacacatctaaacatagaaaaggtacagccaaaatatggtataaaaggtaaaaaatagtacagctctatagggcacttaccatgaatggagcttgcaggactagttgtctgggtaagtcactg

SEQ ID NO: 146287 - DNA, 496 bp, Homo sapiens
caagcataggaactgctcaggctccatccaaggatagggtctattattgacrtagagagatgctttggggaaagacctgcaattgtaacccagataaaaagggagagatagggtgccaccaagaggtgacagctgacagcagagggaggagacagaacaactaaaaccacagcagtcagggcccatttgttgcagaggaaaacatcctgcataccagcttgaactcaagctccatcaggacagcactaattgtgttttattcactgctgtatctctcctgccttttttggtccttgggacatagtaacactcaatagatacttgttgaatggatgaatgaatgaatggaaaagtgaatgaataaatacatctgaagagcaccaatggttctagaactcgaagcagttggtcattaagaaaattttaaaacggtgataatatataattattttatatatttcatataaattttacttaatgtatgtaaattttatac

SEQ ID NO: 146288 - DNA, 540 bp, Homo sapiens
ttattactatcattagttgagcacttactatatgccagattacatgtgttatcttaatttaatcattaaacaactcttagttgtctggggagctgtggtgttagatttgcctgagaaagttggctggagtatggcccaccgacagtagccatagaaaatagcaaagcaaactagcttcttaatctcacaatcactacccagaaaggaaagaataactttggacatacttaacctgactgaaatataaatctaatgtttgttaacctctgggaagaaagtataaaaaaggacaatatataaagaaagtataaaaacaacaaaaaagagttagaatattarctcctacagtggctcatgcctgtaatcccagcactttatgaggccaaggcaggagggttgcttgatcccaacagtctgaggttacaatgaactatgattgtgccactgtactctccagcctgggcaacagagtgtgagagaccctctctcacaaaacaaacaaacaaacaaacaaacaaaactcctgtatttccagcaaaa

SEQ ID NO: 146289 - DNA, 612 bp, Homo sapiens
gtgaattcaacaagaaactaactgcaggtggtagccacttaaaaaatgctaattcacttccttttaatttctcttcaagggatctgagtgaactataacttcttggccatcctagaccaagtgaggttgattttcctgacatctctaccctgtacccttttatctgagagttgtgcaggcatttctaccctgtgccctgtcatccaatgcttgcacagttcaaggcatactgttggtgctcagtgagcacttgatgacccaatttctttctctcacccttcactttcctgtccttcatcttacaagtttcatgccctctttatatgtccttgttcttatctcttttctttcacagctgaaaccaagagagcagtatttgcacatttaacctttgtgtggtgctaacmattagtgatcctataactaacaaaaaccatgagagtttaacagaaaataagtacaattatttaaaacttgagtttcacccctggtttctgtaatcagcatctgtattaagctttgattctttccctttccttgtcccaaaagagagctaaagaaaaatcattttcaacagctttattatccacatcattaaatcatgttgttgtt

SEQ ID NO: 146290 - DNA, 520 bp, Homo sapiens
agtggtgaataaggctactgcggaagaggccaaccaatatattgtgtggtttcatgcacaagctttgtatcccaaactayatccatacagatgactctttctgtttttcgtttttaaaatgtctttttttttaacttttaagttcaggggtacatgttcagggcatgcaggtttgttacataggtaaacatgcgtcatgggggtttgttgtatggattatttcatcacccaggtattaagcccagtaaccattagttatttttcccattcctctccctcttcccaccctccaccctccagtaggccccagtgtgcactgttcccctctaggtgtccatgtgttctcatcatttagctcccacttataagggagagcatgccatatttggtttcccatacagatgactcttctctgtatcagcagcccctagagtccagagttccctatgtatatacctaagtactttctggggacttcctcctgagcacctcaaagttgccattttcaagatcgaactaa

SEQ ID NO: 146291 - DNA, 520 bp, Homo sapiens
agtggtgaataaggctactgcggaagaggccaaccaatatattgtgtggtttcatgcacaagctttgtatcccaaactacatccatacagatgactctttctgtttttcgtttttaaaatgtctttttttttaacttttaagttcaggggtacatgttcagggcatgcaggtttgttacataggtaaacatgcgtcatgggggtttgttgtatggattatttcatcacccaggtattaagcccagtaaccattagttatttttcccattcctctccctcttcccaccctccaccctccagtaggccccagtgtgcactgttcccctctaggtgtccatgtgttctcatcatttagctcccacttataagggagagcatgccatatttggtttcccatacagatgactcttctctgtatcagcagcccctagagtccagagttccctaygtatatacctaagtactttctggggacttcctcctgagcacctcaaagttgccattttcaagatcgaactaa

SEQ ID NO: 146292 - DNA, 558 bp, Homo sapiens
acactgacacaaagcaagatctgcattaaaagtgtacttaaagcaatgaagtttctggtttagaaataggtagatcaatgggacaaagtaacatgtaaagaaatatacttgaatatatataagaatttatataatttaatgcggtatttcaacttgttcaagcaggcagataagctagatatgagcaggagggtgagtcccctgagaaaagggaggtttggaaaaatctcataacccagagaccayccaaaacatgcatcctagctatgagcagagaggaagggaaatacctatggagaaagagatgccccttgactcccagtaatcactcactccacaattaaactgtcctgtcagaatgtagctagctacatgctgttaagcgggtaaagagggaaaaaggagaaattcctaagagatacacaggtgcaataagcacagctttaaccactttccaaccttcctcaggtggtgataatgagtaatgcaggcattatatagaatttgtatccaacactggcctgcacatacatgtgaactaacagtaggggggaatcc

SEQ ID NO: 146293 - DNA, 718 bp, Homo sapiens
tgaacaaattctaatagagggaaactctacaaaatacctgaccagtttgctcgagactgtcaaggtcaacaaaattgaaaagtatgaaaaagtatcacagccagggagagtctaaggagacatgatgaatcaatgtaatagggtatcctgaatgagatcctggtacaaaaaggggatatttggttaagattaaggaaatatgaatcaagtatggactttagttgataataatatagcaatatggttcattaattataacaaatgtaccatatcttaatagaggaaactgggtatgaggtataagggaactctctgtactatcttcccaatttttctgtaaatctaaactgtcrtaaaatataaagtttatttctaaaaaatgatacctcacggctgattctccatgtaagttctcccactttccacagaatacctaaatgaaaacctagaaaccatcaataactaaaactgataacctactactagaatatgagaagaattttcaccaagtataaggcagatgcagctggactcagaaaaataactagtagcttaaccatgctttatctccacccccaaaatgaagcagtcccccttggtctgaaagaagatgggaaggcattgttctgaaagcagtctccagagggcagtgttcctttctgtactgtctgagctctcattcagagacccaggatctgtgctaaccagaaaattaacc

SEQ ID NO: 146294 - DNA, 489 bp, Homo sapiens
cctagctaagtgtccccagtaaaagggagccatcgtctgtggttctggttgcatgaccgtttggagttcgatggcctacaggggagaagagactaacttctctgatataaaatcagtcctaactcaaccacaatggaaaagtatataaatgttgacatctgtaaatcattttcagtgctccagtcatataaccaagttagtagtgttctaccttaccagaggagaactgaagaactttgaactgtgaaytttcccaaggaaaggtaagtcaaatttcaaatttagtgtataaaaactgaggagaactagagggtagtcagtgttaggatagccaagggagcagctggaaaggcacccaacgcagactaggacttcatttaaggatttaggagcctctaacctcaagaaggaatagaaaatacatggaaaatgtagcctggggaagagagttctaggcagctacagggaggtggtaagtttgggaatata

SEQ ID NO: 146295 - DNA, 566 bp, Homo sapiens
  misc_feature (1)...(566): n = A,T,C or G
gaaaactatgaaaggtaattaggaaattgagagttgttgggagatgatgaggaatgggattaggctgtcatggcagattaatggccccagtatttcgcttctgggacctggccgaaagcgacaagatgggtttcattcccaagaaatgagtataagagattatgctagaactgaatagaagaagtctcctaggagaatatactacaaagctgcttggtactgatatntaatcatcaggcgcagctgtaatagagagaaggatgagtggggaacgctgtccctagagaaaacaggggagaggtgtgaacagagcaatttcaaagcactgtggtattgctgccctctctacctattgatcattcattgtaygcactccaatacttaaaaattaagaacaaaatatgaaaatgcgaaggatcacttgtcagaaaggctaagagaataaatcaaattgtgctctaacgaaagccacactttttattgtagaggcattttgcattttatatagtaatttgtcccttgctaaatgtctcctgtttttttatagccttatatatgaaaaaaag

SEQ ID NO: 146296 - DNA, 566 bp, Homo sapiens
  misc_feature (1)...(566): n = A,T,C or G
gaaaactatgaaaggtaattaggaaattgagagttgttgggagatgatgaggaatgggattaggctgtcatggcagattaatggccccagtatttcgcttctgggacctggccgaaagcgacaagatgggtttcattcccaagaaatgagtataagagattatgctagaactgaatagaagaagtctcctaggagaatatactacaaagctgcttggtactgatatntaatcatcaggcgcagctgtaatagagagaaggatgagtggggaacgctgtccctagagaaaacaggggagaggtgtgaacagagcaatttcaaagcactgtggtattgctgccctctctacctattgatcattcattgtatgcactccaatacttaaaaattaagaacaaartatgaaaatgcgaaggatcacttgtcagaaaggctaagagaataaatcaaattgtgctctaacgaaagccacactttttattgtagaggcattttgcattttatatagtaatttgtcccttgctaaatgtctcctgtttttttatagccttatatatgaaaaaaag

SEQ ID NO: 146297 - DNA, 569 bp, Homo sapiens
ttgaactgttggatgtcaaaatatattttagttcaagagctcacatatctggaaaggcagccaataaactggaagctcaacaactcaaaatagatgtcacaaagtcatggaccagagtgtgatacagtggttaaagaatggcttctgaaaacagacagccctggtccaggctccagtctaccacatgaatggatttgggcaagtttacttaccttcctgaggctcagttcctcctgtaaaatggagacaagaatatcaactctaaagagttgatgttggtaagggcttaagacacagtaaacaataaataaactgtagttcttctcattgtctcaggaagtgttagttgcaaagaacagaagtggagtacaaccagcttcactaaaaggaaggctgattgaatgataccaggaactctgaagtagcccaattttcacaagcatggctgggtctcctagaaataggaacaaggatggagagagccaggsatcaagcctgtcttttttctgtctttctctcaggttacacagtctctccgttctgcttctctttgaatatcagctccatcc

SEQ ID NO: 146298 - DNA, 620 bp, Homo sapiens
ataacataatttcatatggaactcttttgcaagaaagtcaatagactctttcatacctataactagagattctaatgtgttatactgaagagaggttcagggctccagaataataagacactttctctgtcccttagactcctatgcaggataaggtgaatatacaatatgtatatgcacatayatgcgttcacatatgtttgtgtgtgaatacatgtacaaactgcatatgaagaataaatgcaactataattatgttttataattggactatggagtggatacattgtcttatatacaaataggcccataatactcattggttgacacctgaatgttctgcatgaatcagttcatccacttagagtgtgcataattcaatttacaatgtcaccacctgcaaggacacggtcaattcaggtatagtcacagttcaaggttgttttgtttgggcattttggtggaaatttaacattaagcaggcaggtctaattcctgcttattcactataaattagagttaatagttatcaccttattccctggctaacatttaatagatatacagcactataccaactaaccacttcacagtacatatacataatttaaataggaaat

SEQ ID NO: 146299 - DNA, 620 bp, Homo sapiens
ataacataatttcatatggaactcttttgcaagaaagtcaatagactctttcatacctataactagagattctaatgtgttatactgaagagaggttcagggctccagaataataagacactttctctgtcccttagactcctatgcaggataaggtgaatatacaatatgtatatgcacatacatgcgttcacatatgtttgtgtgtgaatacatgtacaaactgcatatgaagaataaatgcaactataattatgttttataattggactatggagtggatacattgtcttatatacaaataggcccataatactcattggttgacacctgaatgttctgcatgaatcagttcatccacttagagtgtgcataattcaatttacaatgtcaccacctgcaaggacacggtcaattcaggtatagtcacagttcaaggttgttttgtttgggcattttggtggaaatttaacattaagcaggcaggtctaattcctgcttattcactataaattagagttaatagttatcaccttattccctggctaacatttaatagatatacarcactataccaactaaccacttcacagtacatatacataatttaaataggaaat

SEQ ID NO: 146300 - DNA, 597 bp, Homo sapiens
ttatctatggtgtgaggtgggggataaagtttattctttctatatgaatattcaagtgttcatgatgatatttatcgtagaagtacctatcagtctttgagagttatctattttgatttgacccatgaatgtacatataaattttaaatgtcacatatgaaaaaataataagtatatgttataaagaaattttgactaatcatatatgtggattgactaaatttttaattttttgaacattagtactttatctaatatttctcctccaccrttcaccaaatacttggtaaaaatttattgattaaataattgaatgactgctgtggcaaagccattaatatttattgttttttgtccttttctatttactgcatatctttttagtccctttacaacatttgcacatgatttggcaactcaatgaagtcatcatgtgaaaatctgatttcttttcctgtgatattaataacatttcctcttgttttcttgtcatatatctcccccaagcatttcttgttacatgtatttttaatctgtccctgcctgaattccttcttctgcctttaaacaagctcatgtgaaaaaaaatattcattt

SEQ ID NO: 146301 - DNA, 580 bp, Homo sapiens
tatgaagaagtccacttaagtacacttgagtaatcatcagttatgcaaatatgtaattgatctaatattaaagggtaactcatttaaaaagactgggaatacctagtgctggcaatgaggtagagcaacttgaaacatacgtattgtaggaatacaaaatgaagcagtcactgtggaaaacctagcatgttctactaacggtaaatatgcatttcttatacagtccarcaatgccatttctagatagttacccaaaagtaatgaacacaatatgttaatacacagatttgtacactaacattcataagagctttattcttaatagccagactaaaagcaaacccaaattttcatcaaccaataaaaatataaacaaattatgatacaccaatacagcagaatactactccagagaataaaaatgaatgaataattgatacacacagcatcatgaatgaatctcaaaataattacactgagtaaaagaaaccagaagcctagtaaagtcaattcctgtagtcccagctacttgaaggctgaggcagggggattgcttgaatccaggaattctgggatgcac

SEQ ID NO: 146302 - DNA, 546 bp, Homo sapiens
tgttaatacacagatttgtacactaacattcataagagctttattcttaatagccagactaaaagcaaacccaaattttcatcaaccaataaaaatataaacaaattatgatacaccaatacagcagaatactactccagagaataaaaatgaatgaataattgatacacacagcatcatgaatgaatctcaaaataattacactgagtaaaagaaaccagaagcctagtaaagtcaattcctgtagtcccagctacttgaaggctgaggcagggggattgcttgaatccaggaattctgggatgcactatgccaatagggtgacctcctgggagtgcgagaccaccaggttgtctaaggaggggtgaactggaccaggtcagaaacagggcaggtcaaaactcctgtgctgattagcagtaggattgcatctgtgaatagccattgcactccagcctgggaaacgtagtgagaccctgcttcttaaagaaaaaagcagcagcrgaagaagaagacaccacagccacccgacaaaaagaatgtcat

SEQ ID NO: 146303 - DNA, 591 bp, Homo sapiens
aataatactccttgattaattcttaaattttaccttttaaattgtaaaactattaatatgccttcagaaaaaatggaatgacatcaagatttttaaggccataattaaaatacatttatatgcatgtggtctctccaatcattttcattaataagtttgaaactattattactttgagcatatttttcaagcattcatttatccattcattcttcaagaattatttttttaccatctactatgtgccaagtactgaagctaytgacacagagtttctctctcagaacttacttctagaaagctagaagacaaatattagtaaataaaagcaaaatgcatataattaaaagttaaattctatagcagaaaggaaaagaaagcaatgtctgattatccattcaaggaagccacaccagtttattttacatgtattggttgaaaaaagaagagttacttctgggctccttgtgaggaggagttgggatcatgaggataaaaagtacaagttgtgtctgtctcagctaatggtccccatgcccaacttcaagaactgactctattagagaaaaagattacatatctgggatatct

SEQ ID NO: 146304 - DNA, 528 bp, Homo sapiens
tacattttaaaatggtatgcttattctgctatctcttggtttattgatactggataccacctattggcctcctgttayggtgaataaggacttaggtgttttttatatatctgctccattttaccttaccctaagttaccaaaaatactgttttataatacttgtaacattaataatcaaggtttacatttttatgatcagacatacagtgttcattacatagctgaatagtgtatgaagattacatttccatgcctttgggttttttttattacccaaagtaatgaattactgcattttttactaacattatgttctgaatgtctatccaaattttccccctaagccccatttacatcttccaaatatcaatcagcacttcctcttttatgctggaaacctatcttggacctgtatctctggctcacattcagatctgttgctctccagatcttacacagctgtcatcctgaggctgcccttgaccacatttcctgttggattccctgtttctggattctatgacct

SEQ ID NO: 146305 - DNA, 280 bp, Homo sapiens
tttttgtcttactgaatatgggattgttccagcacagaaactgccttaattaaggccaccagtggcttccatgctgccaactttactggaaatgtttagtggaaatgttccactagtctttctgactgctctgcagctttggtaccagtgacatctttcttccrcttgacgccctctccacttctgttgtaggacaaacttctcctcctgactcccaattctctctgacatctttgctgaatactcgtccctgtccatctcctcaattgccagagttttg

SEQ ID NO: 146306 - DNA, 579 bp, Homo sapiens
aaggacatgaatagacaattctcaaaagaagacatacaaatggccaaaaaacatgaaaaaatgctcaacatcactaattattagggaaatgcaaatgaaaaccacaatgtgataccaaccttactcctgcaagaatagccatgatcaaaaaatcaaaaaattgtagatgttggtgtggatgcagtgaawaaagaacacttttacattgttggtgggaatgtaacctagtacaactatggaaaacagtgtggagattccttaatgaactaaaagtagatctaacatttgatccaacaatcctactactaggtatctacccagagaaaaagaagtcattatacacaaaagagacttgcacacgcaagtttatagcagcacaatttgcaattgcaaaaatatggaaccagctcaaatgcccatcaatcaatgagtggataaagaaaatgtggtatatatatcatggaatattattactcagccataaaaaggaacaaaacaatggcattggcagctagctggatggaatttgaaattgttattctaagtgaagtaacttgtgaatggaaaaccaaacattgc

SEQ ID NO: 146307 - DNA, 627 bp, Homo sapiens
ttaatgtctgagtatatgttatcaatcataactagggttattatgttattataaaccacagaaatarccaaatttctttgtcaatcaggtttttgactgtgactaccctaaaacattttgccattcacagacaattgttgtcttgttttgatcctcttgtttgatcctcttctaaagatagtttataatcagctataggactttgacagatgctcattagttgtttttaagtttttgtctgcattttagactaagcctgcttattcctgtgaccaaccagtgatctctaactgcagctcagaagaaacaaaagggatacataatgtaaaaatctggaccaatattctaattctgggcaattatcctgcaaacgctgccaggtgatggggttaaatgtggtcctcataacccgcaggtttcttttttgaaaaaataagaccaaggagctaactgaagccaatctccatgcacccaagtcttagcaagcacaactgtagctaccagttatctaggtgtgtcagcagcctcaggacttttgagctgtccttaccctcttgtttcattttgatctatgtcttctaataacccagttgtctcttcttgtcttcaggccatcacactccaaat

SEQ ID NO: 146308 - DNA, 609 bp, Homo sapiens
ttggagaaaatcaaaccctaaaatataatctgaacattggcaaatgatcaatgctgcatctcttccttctttggttccactctgtccttccccactcttcatgctgctgctagagactgatttgtttggacaccatcggcagggctataacctttggtttcctgtcagttcagmcagtaggaactctgcctgccaagacactaacaagcccaagaagagtgaggtctggatatttactctcctggctcctttcctgtaaggttacctcaggctaacttttccctcaatggaaggtcattactcctctcaagtgagtgttgaccaatgtgtattacacagaaaacagccatcacaaacaagacagaaaacaaaagtgtcatggtcccatttgcattccatgattccctccccactgtttcagaaaccattgttctgtgttttgatatgatagattagtagtttgcattctctagaattttatatctacaaaacaaaatagtatgttctcttttctgtatgaattttttcaatcagcattttgagattcatccaatatgttgtttgcatcagtaggttcctttggtttttgtttgcttgttttgttttttt

SEQ ID NO: 146309 - DNA, 528 bp, Homo sapiens
ttaggtctctggtcttcttatagactcaaaagagtattatatatattctggatatgtatgttttctcctactatgtggcttacttcttttgttttgctaaagttttctttcaaagtgcaaagttgttaaattctgatgaaatctaagttaccatttttttcttggattacttatactttcctttcatagaaacctttgcctacattaaggtcacaaaggtttctcttctatttctttgttgaaatattataattttacttttttacatttatattaataatccatttcttgttagttttttagcacagtatgaggtaagggtaaatgttcacttttcctcatgtatttatctagttatcctagcaacatctaaaagaaatgttcccttccccattggattgttttggggtacttrctgaaaatcaattggtcatatatgtataagtttatttctagaccctctattctattatattgacctttatatctatccttttgttgccaaaccacatttaaaatagtgcatgt

SEQ ID NO: 146310 - DNA, 573 bp, Homo sapiens
atgtggcttacttcttttgttttgctaaagttttctttcaaagtgcaaagttgttaaattctgatgaaatctaagttaccatttttttcttggattacttatactttcctttcatagaaacctttgcctacattaaggtcacaaaggtttctcttctatttctttgttgaaatattataattttacttttttacatttatattaataatccatttcttgttagttttttagcacagtatgaggtaagggtaaatgttcacttttcctcatgtatttatctagttatcctagcaacatctaaaagaaatgttcccttccccattggattgttttggggtacttgctgaaaatcaattggtcatatatgtataagtttatttctagaccctctattctattatattgacctttatrtctatccttttgttgccaaaccacatttaaaatagtgcatgtccaccaaattaattttctctctaaattgcccgcagtattctaggtcattttgatttctacatacatttttgagtcatctgataaatttatacttttttaaagtctgtggaaaatttg

SEQ ID NO: 146311 - DNA, 559 bp, Homo sapiens
ctgagttaaagaataattattgttgtgtttgaatgattttgcttttttcatttcatctcctaattagataaattatgttcacatattacatcaaattagtatgtcccatattaatagatttatagtattaagtcatccacttattcctaaaataaatcatagttgtggtataaaattatatcgatactatcaggttgagttaatagatattcctttataattttttttttttttttttgagacagagtctggctttgtcacccaggctggagtgcagtggcacaatctyggctcattgcaacctctgggtcctgagttcaagtgattctcctgcctcagcctctcaagtagctgggattacaggcacccactaccacacctggctaatttttgtatttttaatagagatggggtttcaccatattggccagcctggtcttgaacttctgacctcaggtgatctgactgcctgggcctcccagagtgctgggattacaggtgtgagccactgcgctcagccaattttgtatttactcataagtgaagctgatttgtggtt

SEQ ID NO: 146312 - DNA, 547 bp, Homo sapiens
tgtctagtctactcatatgtcctggcttctgctgcacactgggctacctctgatactgctgaaactttcctcttccagggaactggaatttcatttggatatacacctaactgttgcttgggagagtctagaattgtgataccatcacctcccctcataaaataccactttggaacaactactgttttgtctcaactattacagcgcatgctcttgggtatttagaacagccagaatcaagttcaagttaatcatacctctatggatccagagataaggatggtcactgactcccctcatctgtagccatgattacagttgagttaacttctcaacactgttcatgttctccgttccttttccattcctctaatctgctagaagatcctagcaygcttttgagcctaggtttcatatgctacatcatgctgactactatgaatggaaagcaaaagatagatggagttggaggagggattgaggggttctgcaggctcacttagtgactttgtttggctataggcgcaaggcagggagatacatctat

SEQ ID NO: 146313 - DNA, 308 bp, Homo sapiens
acagaacatgctttatttgtatttatggttgaacttcatagaaaawcttctctgtgagacattagataggtcctaactaaaatattgtatcatgtttactttcatccatcttttgaaacatgctatggaaaactgaaggtcctatggaaagaaatcaaaataaagaacatacttgcacaagtttccaagtgaaagcccatcaaagtttcttttggtcaattgcaactggctactattacataagagggacattttaatggcctgataagtgtgctaccatattacaaggtcagcttcacttcattgta

SEQ ID NO: 146314 - DNA, 516 bp, Homo sapiens
gtgttgcctatttgactcttaacatgtcagggatggtaacagagacccagtatcttctgacttttgcttttctaacctgtagccactacgtgtgagtgcatcttcatccaccttggcgaggctgatgtctggattggcaatgctgccgggagctctactacctggaacaaagcatccagcacgatagcccaatgccaagtgacaagaccactgggtaaggagataattgattctacgcctcttcagtgagcaggcaagtttgtgtccagggcagtgtttataaacctggaacccatagtcactgatgaagtttgcactgrcacctaccaccagctcttccaccctgagcagctcatcacagacaaggaagacgctgcccataactatgcctgggggcatcacgacattggcaagatcattggcctttggaccaaattcgcaagctggttcaccagtgcacaggtcttcagggcttctcggttttccacagctttggtggagaaactggttctgggt

SEQ ID NO: 146315 - DNA, 514 bp, Homo sapiens
gccatttgcaagtcaggaagagagccctcaccagaacccaaccatgctatcactctgaatttggactttccaggtwtcagaactgtgagaaataactgtctgtgtttaagccactcagtctatgatattttgttagagcacccaagctaagacactatgaaatagaaaactgaggtatattaacattggacaaaggatacctcagaacaagggtattattagggataaagaaggtcattacatgacgataaagaatacaattctctaagaggacaaaacagttttaatgtgtatattcctaacaccagagcttctaaatacatagaacacaaattgaaaaagctgagaggtgaaataaacaaatccacaattatagttggatacttcaccattcttctgtcagtaattgaacaaatagaaagtcagtaaggatagagaggatgagaggatctgaacaacactataaaccaaatatacctaatgaatatttagagaactttccacccagaaaagc

SEQ ID NO: 146316 - DNA, 364 bp, Homo sapiens
ctgattgtttcaccaaacaggtgggtgattaattaccatgacctagttaccatgagcaaatgaaatctgaagacttactatttctctgtaaatcttcattcttaaaggctctatctgacaaatattgaaagcaaataccatttttaaaacttcgtgttcttcaagtgatgaagaaagggactacccttagaagcagtgactcttcgattaagtcatataaatgagtaaagctagctgggtgctttaatgggacwgcaggagactgtggactgtataaagtaggaaatgttgtccctattcaaaggagatgcctgccactcattccaactgattgttgccatttggaaattaaggtccagtcttg

SEQ ID NO: 146317 - DNA, 647 bp, Homo sapiens
ccactgaatttgctgccctggagacattcagagctgtttaagatgcagacaaatgtttatttttacttataggaataaaaagtcactcaacacaactcttaaactgtagcccaaactgtaatttgtatgtgttaaaggctttaaatttcaattattccctttatccatgtgtaccaaagatgattttttggaagtgagatggtgtaattaaaagcacctcataaaaagctcagtttttttagtttgcatatcatgtgttgatagcagtgtctaaggaaaagagaaataacacatgstacagtagtattcaaaagaatcatcaggtagcccatgggaggaaatgaatatttatagcatataaaaatcccttctaataggcatgtcatatcatatagtaactttgggaattgtggaatgagtggaaggaaggagggggagaaggaagagaggggagcggaaggggaggggaggggagggaagagcaggtggaagcaggtaggggaagggaaagggaaaatatagaccctagtctttgctttctcacttcttagtcaacctttccctgttgtcattttccacacctgtaaagttggagcttgaaatatgacctctaactataccttagcttcacagtctccaattaactc

SEQ ID NO: 146318 - DNA, 386 bp, Homo sapiens
tttctgaaatgcgtatggagactataaagattttataaaaatgagaatgaataagtggagaaacaaacagaagaaaaatcctgtttctgaagtagaaatccaaaatatactaagaaaacaaagtcacaagacatgggcttgaatcatgtctgttactgactttatgtgmctaggcaagtatattttaaacctctttgtattctaggtactgctaaatttataaagtaaagggtttgtatgagttcttagtattggagaaagattattattttaaattataaaattgttatttgagttcaataactaaaactagaagttactgaactagaataactataaatatctattagatggtgaaatatctggtatctggttctataaatgtt

SEQ ID NO: 146319 - DNA, 322 bp, Homo sapiens
atagtattcttgtaatgtctttttctatgctggcttcatagaataagttaagtattccttctctttttttttttttttttggtggagcaagatggcagaatagaaggctccaccaattattccccctgcaaggayaccaatttaactactatctacacacaaagaacacctctataagaaccaaaagtcagatgagcactcacagtgcatggctttagcttcatatcactgaaagagacactgaagaggtagaaaaaaagtcttcaattgccaatgccacacctcccccatctccctgcagtcgtgggtggtgtggggagca

SEQ ID NO: 146320 - DNA, 575 bp, Homo sapiens
cttcaatgtgttgtaattctctgtatctgcctgcctgtctgtccaatctggaggaggagggcattcattttccctattgcctcatttctgttactgatgtaagaagtgattttgaktttttttttttagtttgtttaactttttacttgttaagatgaagtgatgacttgtaagctccttacatgtggaaccagaaaccaggagagagatatcaagttttaaactgaacaaaacaggtatatgcttatcatttttattttttactatgagaatcctttccattttaatttgcacttaattcattcatttaactaatattcattagcatataatagtgtagaactttacattgtgaaataaatgatttctactctcagggtacttacactttggtgggaagacacataaacctgtaaatcagaaattttaaaatagtgtgctaaaggatttttgtccaaagacgtgtaattataaaagtatgaaaataagatacaattattcttgcaataaaatacattaaattatgatagaaatgtgtaattaaaatagaaatgaatgcatatttataaaatagt

SEQ ID NO: 146321 - DNA, 565 bp, Homo sapiens
caggtaaggacacaaaggcctggtgaggagtgagtaacaggtgaataccctgctttgcaggcacagcatggtttcagaaaatcttaaaaggaacaactggccattgtccagagaaataggctaacagcaccaagcaaatctagtgagaatcaacagaccaaagtccgtgggtaaagaggaagggaacacagatatctgtccagtgcttggaagtgagataggacaccaaacagaacactcctggagaaatcactcaaagtagaaactcggtaacgagaactgggtggttaggcaaaaattgcttaacaaggaaaatgcaagagatggttatgaaarcaggttatgtacaaaaaagaactgattatttaaaaaataacattaatctacgggaatcaggtactaatgttatcaaaccactgaattccttgatagaatatttttaaaagtctccctagctatttgattccgaaatctgtggtagtgctgagcacgtacattaagcttacttagcatttggtttgggcatctggggaatgcaagacagagaaacgtgttagcttcctga

SEQ ID NO: 146322 - DNA, 411 bp, Homo sapiens
ctgtgtgatctggtcccactcttcatggccttcttgtccccccaccccaccaccacagtacttgccagctgtaagaagctgtacctaaagcacccctgcagaactttgcacagttgctcctccaggttgctctagcatggaatcctcttcctgcccttctctacctggcaaactcccacttctctgtcacctccagggtcactgccgtcttctccagatggctggaactcaccccaggctaggctccctgctggctcccacagctccctctgctctccctccttattcagctgcactatattacaaggataatgacaacacattggcaggcatgccctgctcccattgtscatggcagacatcactaaacgatcagggtgttcttcccccctgagcccggatatggcctca

SEQ ID NO: 146323 - DNA, 548 bp, Homo sapiens
cttattaaacagcagctcaggcagtctgccagatcctgaagagataaagatgaagagggaaggcacagttgtggctcttgagatcattatatctaatgacctcaattagatataatgaaatgaggacatataaatatgcaaattcaggacaatataatatttgctatgatatcctcatgcattgggtatgatgggaggaaagacagtcagccaatctgggagcartctgggagcagagtgtggggtgtggagagaattcagggaaggtgttctagaggagctaacatctgagctgaatcttgaagtatgagtaagagtttctggatgtagaaggggaggcatctaggcagaaggaacagaatgaacgcacatatggagaggagacagagcatggtgtgtgacgagctgctgataatttaacattgcttcaggatgaggtgtgaatcagaaagtgtctggaggggtggaagagactagatgttggcactcaacataagttgcctagtgtttagattaagttcagatatgaatgaatttagactttatcc

SEQ ID NO: 146324 - DNA, 548 bp, Homo sapiens
cttattaaacagcagctcaggcagtctgccagatcctgaagagataaagatgaagagggaaggcacagttgtggctcttgagatcattatatctaatgacctcaattagatataatgaaatgaggacatataaatatgcaaattcaggacaatataatatttgctatgatatcctcatgcattgggtatgatgggaggaaagacagtcagccaatctgggagcaatctgggagcagagygtggggtgtggagagaattcagggaaggtgttctagaggagctaacatctgagctgaatcttgaagtatgagtaagagtttctggatgtagaaggggaggcatctaggcagaaggaacagaatgaacgcacatatggagaggagacagagcatggtgtgtgacgagctgctgataatttaacattgcttcaggatgaggtgtgaatcagaaagtgtctggaggggtggaagagactagatgttggcactcaacataagttgcctagtgtttagattaagttcagatatgaatgaatttagactttatcc

SEQ ID NO: 146325 - DNA, 548 bp, Homo sapiens
cttattaaacagcagctcaggcagtctgccagatcctgaagagataaagatgaagagggaaggcacagttgtggctcttgagatcattatatctaatgacctcaattagatataatgaaatgaggacatataaatatgcaaattcaggacaatataatatttgctatgatatcctcatgcattgggtatgatgggaggaaagacagtcagccaatctgggagcaatctgggagcagagtgtggggtgtggagagaattcagggaaggtgttctagaggagctaacatctgagctgaatcttgaagtwtgagtaagagtttctggatgtagaaggggaggcatctaggcagaaggaacagaatgaacgcacatatggagaggagacagagcatggtgtgtgacgagctgctgataatttaacattgcttcaggatgaggtgtgaatcagaaagtgtctggaggggtggaagagactagatgttggcactcaacataagttgcctagtgtttagattaagttcagatatgaatgaatttagactttatcc

SEQ ID NO: 146326 - DNA, 402 bp, Homo sapiens
tattttgttcttttgattgcgttttattttcctgtttcttcatgttacttgtagctttgcattgatgtctttacatgtgacatccrtgtcttaatgacatgttctccactcttaatgaactggctttgatagggaaagacagcccagatagagtttctgggtcttgttcctaggtcctgatccaggtgttcagtctttttcttttcttttcttttttcttttcctttcttttcttttcagcactagcaatctcttgctccctctggttcccatgtcagtctcatctgtgctccatatgagatgagatagaaactagctcttcagggagctcactgaaaggctcaggacattagagtcatgatccactcctccttctttcctgaaggagaggccttagttcta

SEQ ID NO: 146327 - DNA, 568 bp, Homo sapiens
ctacagatctctccgagccttgccagccatgggaaggtgcccattctcctagctttcccaggcatctggactatgccatgtctttaagcactctgtaagaggcacaacagaagccagccccttgagggrtgtactgaaaggccagaaatgttggatgctcaccctactctctatcccctgccctccctacaccaggaaaggattgtagtctctctggtgctgagttgtactcgcaggtaaagtgaaatagcttttcttatctgtttcagtgtggctgattgtgattttttgtttgtctggggtactgaaatttcttaacttaatcctgaacttcttatgaagctaatttgttacttatatcactgttaaatctgtgtttctgttgggaaatgagggctggaacttcctattctgctatcttgctgacatcactctatccttgatgttcttgaggttatttatgtctattgtatctgtatgggggagatgtatgtattagtggtggttctggctcagagtctctaatgtggctgtggtaaacctcagatgtcagagatggagccctctt

SEQ ID NO: 146328 - DNA, 537 bp, Homo sapiens
cttgccagccatgggaaggtgcccattctcctagctttcccaggcatctggactatgccatgtctttaagcactctgtaagaggcacaacagaagccagccccttgaggggtgtactgaaaggccagaaatgttggatgctcaccctactctctatcccctgccctccctacaccaggaaaggattgtagtctctctggtgctgagttgtactcgcaggtaaagtgaaatagcttttcttrtctgtttcagtgtggctgattgtgattttttgtttgtctggggtactgaaatttcttaacttaatcctgaacttcttatgaagctaatttgttacttatatcactgttaaatctgtgtttctgttgggaaatgagggctggaacttcctattctgctatcttgctgacatcactctatccttgatgttcttgaggttatttatgtctattgtatctgtatgggggagatgtatgtattagtggtggttctggctcagagtctctaatgtggctgtggtaaacctcagatgtcagag

SEQ ID NO: 146329 - DNA, 537 bp, Homo sapiens
cttgccagccatgggaaggtgcccattctcctagctttcccaggcatctggactatgccatgtctttaagcactctgtaagaggcacaacagaagccagccccttgaggggtgtactgaaaggccagaaatgttggatgctcaccctactctctatcccctgccctccctacaccaggaaaggattgtagtctctctggtgctgagttgtactcgcaggtaaagtgaaatagcttttcttatctgtttcagtgtggctgattgtgattttttgtttgtctggggtactgaaatttcttaacttaatcctgaacttcttatgaagctaatttgttacttatatcactgttaaatctgtgtttctgttrggaaatgagggctggaacttcctattctgctatcttgctgacatcactctatccttgatgttcttgaggttatttatgtctattgtatctgtatgggggagatgtatgtattagtggtggttctggctcagagtctctaatgtggctgtggtaaacctcagatgtcagag

SEQ ID NO: 146330 - DNA, 528 bp, Homo sapiens
aggtgcccattctcctagctttcccaggcatctggactatgccatgtctttaagcactctgtaagaggcacaacagaagccagccccttgaggggtgtactgaaaggccagaaatgttggatgctcaccctactctctatcccctgccctccctacaccaggaaaggattgtagtctctctggtgctgagttgtactcgcaggtaaagtgaaatagcttttcttatctgtttcagtgtggctgattgtgattttttgtttgtctggggtactgaaatttcttaacttaatcctgaacttcttatgaagctaatttgttacttatatcactgttaaatctgtgtttctgttgggaaatgagggctggaacttcctattctgctatcttgctgacatcactctatccttgatgttcttgaggttatttatgtctrttgtatctgtatgggggagatgtatgtattagtggtggttctggctcagagtctctaatgtggctgtggtaaacctcagatgtcagagatggagc

SEQ ID NO: 146331 - DNA, 583 bp, Homo sapiens
agaagcttgttaatacctgaaacccaccccagacctgatgaattcataggggcttaagaatctgcacattctataaactctctacatgattctgttgcaagcaaacgttagagagtgaaaaatccaaaccttttattttatagattagggaaacaaacaactaagctgtaaaagagaaccccctgcccaacaagtgagaccacatagtaggcatgattttacacattacaatttttttttctccaaaataaaattttttaaatccagcaatcagggtggatatataatcttttgtataattgcctatgaagccacaaacaagtaatacatrtgccagtaaagttggtacagctgacctacacctaaaaatagcccagaaattcaaagaccaagttttcattccaaaattttttattttggagaaaatagaacgcatatcctttgttcaaagagacagctaaggaacaacacaggacttcaatgaaaaatatgttgtttatgtgtgtagttactagtcagtatgccccacctagccacaaattagtgtggttactctaaattgctaacatgaaaatcttaacct

SEQ ID NO: 146332 - DNA, 609 bp, Homo sapiens
gtgtaaatcatggcttcatacttgctgtgtgaactttgtaaagttatttgacctctctgtgcttcaggttcttcatctgtaatatggaagtgataatatctacctcataggataaggattgaatgagttaatacatataaagtacttgaarccaggacctggaacttttattaccatttcagtgtaattttttggtactctctgttatgtagctcagggctaggtggacacatttacatatccactaaacatttggtgcatctttgaaccaatattgtcatcagtcacttggaggacaaattgagcccatcttggaggaaaggtgaagaactgctgtcagcagccctctattccttctctattgttctgggtatttctgctttcatatgtcccctacatgtagtgtctttcctaagtgagagctcgcaaagtaccatttctccatttcattctagttgctgggtcattccagcagctcttggcccctggaagctgccggctggtttattccttaagctggcttcgataccctatagactcaactcataccaactcttttgtgctcctaaacataccattttctaacaattttatgtcttcagatgagtt

SEQ ID NO: 146333 - DNA, 609 bp, Homo sapiens
gtgtaaatcatggcttcatacttgctgtgtgaactttgtaaagttatttgacctctctgtgcttcaggttcttcatctgtaatatggaagtgataatatctacctcataggataaggattgaatgagttaatacatataaagtacttgaagccaggacctggaacttttattaccatttcagtgtaattttttggtactctctgttatgtagctcagggctaggtggacacatttacatatccactaaacatttggtgcatctttgaaccaatattgtcatcagtyacttggaggacaaattgagcccatcttggaggaaaggtgaagaactgctgtcagcagccctctattccttctctattgttctgggtatttctgctttcatatgtcccctacatgtagtgtctttcctaagtgagagctcgcaaagtaccatttctccatttcattctagttgctgggtcattccagcagctcttggcccctggaagctgccggctggtttattccttaagctggcttcgataccctatagactcaactcataccaactcttttgtgctcctaaacataccattttctaacaattttatgtcttcagatgagtt

SEQ ID NO: 146334 - DNA, 554 bp, Homo sapiens
gcattgtagcaacaaaatgattgtctcttttttcagatttccttcccatgttctttaagtagatgagaagcctgtttttcagctaactgccacaagatggctggatttccctcccttcgaatatgaccttgaaggtcttggtgcatgttaagaagggcatggaagtgattagagaaatggaggctatgggaggaagtgagataaatactcatggaaagctttcatatgcgagtgaaayggcaacatttatttgccctcttaacataaagtagtaacctccggaggacttgaggcttgaggtaagaactcacaagtggcaaaggaagaattttccctcctttcaaaggagtgttaactcaaaaaaagcaaataagtgagatccttaaagggccacagtgaggacctatgcagacacacaaagtacttaaaaagtcactggaaaacagccctggagggtaacagggacaaaaagtatacaataaatcataagggctgggattccaatttgtatctatcctggcaatgcgccaccagacaggggatgagttggaggt

SEQ ID NO: 146335 - DNA, 572 bp, Homo sapiens
atgtattcattttgaattaggtgttgctaatttttcctccaatgatacactgatgtatcccccctgcycacagtgtgtggtcatgcctgttctctcaccctcttaccagtactggacattaataagcttttaaagatttgctactcaggctaaaagtgtctctttgttttagggtgcatttcctcatttaatgaagtgaagattcttccttgtttagtgaccatttgcctttatttttctgtgaactgcttgtgaatggcatttgtcgttcttctgttgtctttttagtcttttttctaaagcacactttgtagccctttgttgtaaaatgttggaaatatttttcccagtttgtcatttaatctttgactttgtctttctattccccagtaggaggtacttaatttttatatactcatatttggcaggctttttctttataggttcttttggctttaagtgatacttttaaacccagctattgctcatttaaattagaaccttttccatgagaaccacactgacgatttctttaaatatagcttgaaaaaatttttcccctattgttcttt

SEQ ID NO: 146336 - DNA, 572 bp, Homo sapiens
atgtattcattttgaattaggtgttgctaatttttcctccaatgatacactgatgtatcccccctgcccacagtgtgtggtcatgcctgttytctcaccctcttaccagtactggacattaataagcttttaaagatttgctactcaggctaaaagtgtctctttgttttagggtgcatttcctcatttaatgaagtgaagattcttccttgtttagtgaccatttgcctttatttttctgtgaactgcttgtgaatggcatttgtcgttcttctgttgtctttttagtcttttttctaaagcacactttgtagccctttgttgtaaaatgttggaaatatttttcccagtttgtcatttaatctttgactttgtctttctattccccagtaggaggtacttaatttttatatactcatatttggcaggctttttctttataggttcttttggctttaagtgatacttttaaacccagctattgctcatttaaattagaaccttttccatgagaaccacactgacgatttctttaaatatagcttgaaaaaatttttcccctattgttcttt

SEQ ID NO: 146337 - DNA, 417 bp, Homo sapiens
agctaccacaatacctggtagttgagtgcgtgataacacaacatctgccatagcttggtttgtttgacccctccaaatctcatgttgaaatttgacccttagtgttggagatggggcctaatgggaggtrtttatgtcatgggggcagatccctggtgaatgtcttagtgccatccttactgtaatgagtgagttttgctcttagtcccctcaaaacctgttgttaaaaaaaagcctggcacctcccttcttttgctctggctttctctctcaccatatgatctctgcacatgctggctcccctcaccttctgccatgagtggaagcagcctgaagccctcaccagaagcagatgctggtggcatgcttcttgtgcagcctgcaaaaccatgagctgaataaacctcttgtctttat

SEQ ID NO: 146338 - DNA, 446 bp, Homo sapiens
ctcaagctactgtagccaaatggccacagtgggcagggaggaggccggcaggggagggtaggtggggtgcaggagctctgcagaactgtgctgggaccagaggactgttcctgacttgagccaggctctggaaagcggaatttggtcagaagggaagggaggtattggtgggaggggtgcccaaaggaccagcagttagaggaaagaggcccatctggaagcccawctgggctggaaccacccaccctttggaatgcatttatgctaattagataccatgtcttaaagtagatttagaggttcataatgtttttattaaaagaaaagaaaaaaaaagaaaccatgtcaaataggtttgggatctgatgggctttagggtgggaaaatcagaaggcctggggtacctgatggagaggaagcaaaggtgaaatttgtggtttcttagg

SEQ ID NO: 146339 - DNA, 438 bp, Homo sapiens
aagctactgtagccaaatggccacagtgggcagggaggaggccggcaggggagggtaggtggggtgcaggagctctgcagaactgtgctgggaccagaggactgttcctgacttgagccaggctctggaaagcggaatttggtcagaagggaagggaggtattggtgggaggggtgcccaaaggaccagcagttagaggaaagaggcccatctggaagcccaactgggctggaaccacccaccctttggaatgcatttatgctaattagataccatgtcttaaagtagatttagaggttcataatgtttttattaaaagaaaagaaaaaaaaagaaaccatgtcaaataggtttgggatctgatgggctttagggtgggaaartcagaaggcctggggtacctgatggagaggaagcaaaggtgaaatttgtggtttc

SEQ ID NO: 146340 - DNA, 536 bp, Homo sapiens
gagattgggcagcttgaaagcctccagtgaaaatttctaaactctaccccttggggaagtggactaactgtcattttgtgcataggaaatattttgtttctccctggagtctcacaggagcaatggatcaagtgttttgtttttaaacatatttgagcccatggactgttacttcccagagaccttgtagcagatgtattgagtgccctgactcttgccctcatcctgatttcagacatggctggggtgggccatttcctgtgggtctcaactcattgcactgtggatgcatcttcctctctgttrggggaattgtgaaggagctgataactccgaggcaacccttgataggtggcagctaagaacccatggatgaatgctccatctgccatcccactcttccagaggcatcccacactcttataagaggtcctagggggatgggcatgtgggggctccctccatgatgtacccctgtagtggctttcctgcctccctaactctctcaccactccctccctcactcacgctccctc

SEQ ID NO: 146341 - DNA, 583 bp, Homo sapiens
agggccgtttgtgtgcctttatcccatcaaggcagcagcaggagctgctctcctgacgaggttctccacrgctgcctgcgaccttccctctgtcccagtcacaggtaccttccaggtctcagagcacaaatcctcccctaccttcccccgcactgccagacctctacccaggggccactagagcagaccttgtcagacacctggggccagggaggaagcctccctcaaggtcacaagtgaggtggtgaccttatacagagaaaaaaaagcgacttccctgaaacacgctttccatgaaaatcatttttctcctcttgggggaaagagaggaaattttaaaactgagaatcatcgtagaaaaaggcagtttccccacatcatatgaagccatccaggtgcttcttatttttacaacatgttgccatagatgggtagatggggaagcttaggtgcttccctttggcaaatcgaggcttcggcaagaaatatgttcctttcgcagtctgtatattattcaagttttgatgattagcactggttttgatgattaaagctggttggaacagcatgaaccgaagagatt

SEQ ID NO: 146342 - DNA, 582 bp, Homo sapiens
cacctctgcttgagagcctcctggatttggtttgtgtgtttaagatgatttaatctgcatttggtttaagtgtatttcattttaaaccacttggaaggccactgaggaaggacaatataaaggaaaacatactttccatgaaggaaaatgtcagttctccccttttacagaactgaatataaaaggttagaatttactccactgtagtccccttaaataaatcagtccacctgtgcacattaggcccaggaataattaaaggaccccgtaggcatgggcattagagcagccctggttccttgatgtccctccccttgccccatcagccacacccaggtactgcaccctggcacccagggtttccctggagctaattgatggacaacgtatttggactcaattttcagctttggttccaaaactctagcccctacctgatacyaggagaggccaataagatagaaaggaagatccttagaatcatagaaagctcttagagattgtattgtcaaacacctaataatgctattgagaaacataaaatgcaaaagggaaaggaacttgcctagggccacactgaga

SEQ ID NO: 146343 - DNA, 546 bp, Homo sapiens
ctccattttacatgcccttcatagagtagatatcccacaaatgtttgtctatggaaatgtttgatcagccccttctttcagaaagcacagattgatcactgccatccctggctcagaggcacatagactgcctaggaaaatccaggacaggaggtgaaggaagccagggagaaggcccatgtctgtaggagtgacagattttctgtctaaatgctaggaaagggaagaagtaaattctagttgattccaaagtaacatcaggcaattaaactcagggggactgttgtaaggtcagaagtcagcaaagccaaatttccaaacaaagctggaatacatttaaagtagtgcttraaaatctccaaagacaaaaataaatagctgaagaatgatgtttcaaaactcagatttaactcggcaagtgacagttcagcaagatgagctatgagccgggcagtgagacaagggcatgagctcatcttccggccacccacagcctgacccagcctgctgcaggccagagtggtgcaagctcaggctggcttttta

SEQ ID NO: 146344 - DNA, 505 bp, Homo sapiens
cagtaggcctgggttgggggctaagatcctgcatttctaaccagctccctggtgatgctgatactgctttgggtagcaagagtctctgcaattatctgctcctggctgaagccccagcagagaccttgaacctctgccctagcgggactctggacaatggagcactgtcaggatgccctagggtatcaatgtttcctgaattgagtgtgatgccactaaagtctctaagacaagcatgcccacctaaccaggggctgggactgggactttctctggtatcaggcaggggtggcaactgatgagatggtgcctctttcatctctgaatccccacagcccaaacagcctagggccatgtacacagtaagcatccttcaagtgagggagtgactgaaccagagccatcagttctccggggaagcagagggaagacagtggcrtgcaccaagagcctgggggaagatcagtgccaatcaggccatgatctgtgaccgtcagacaaaccc

SEQ ID NO: 146345 - DNA, 401 bp, Homo sapiens
agtaatgaaataaacacatgatgggtagccagacagttattgtttataggaaggttattacaataattaagattaatagcaattacttgtcatgtttgtggatttytttttccttgggaaataactgtagccatattaaataactaattaacacatctccatgtctggctaagactgcatggattcacaagttctcccatattctctagtactccatagccaaataaataaatcagcactgtaaaacaaccagctcacattttgaaaggaaatttcaaaattaaaccagttaccagatcagtgatgagggcctaacataaatggggatctaacatcaagactttctcctattcatgttctttggaatcttggtaaacccactgatggctgacaaaacgtag

SEQ ID NO: 146346 - DNA, 539 bp, Homo sapiens
gaattccttcacgagatttaaaggatttcttttttttaaatctcaaacatcaatgctttgttaaagcaaaaatacattttctaagaggccattaaacagtcctcaattcacttcggcgtgtctaacttagcaatgcaagttctgattatcttaaacagcatcatcacaaagataattattctcctttctaaayttttgtacgatttgctaatgactgagtgattttttttttaatagtcatcgcccagaatctgcctctttttctgctcccagggaaccatcacctgagattgacgggcagcaattgaaaataataaaattatgtaagatgagcttgtaatcaccagcatttcacaggaagcaaaacgcatttcgttctggctgaggaacagaaagtttcttcctcattttaaatctgtatcagaggtaaagccttctattaaaacacaattctctgtacacttacagcctctggcaggctgccaaggagactatcatggaaccaccgctgcagagaagtaggcagtcaaaggcatcga

SEQ ID NO: 146347 - DNA, 604 bp, Homo sapiens
tttcggattacaccccacaaggctcccgtgttcaataaractgtgacacaaacactgggaacaattctggtgaatttaggaagaaaggaattgattgacgggacactgggtggctcagagtcactgggtgggctggagaaaccacttcagcaattgggagaccacaaagggaaccgcgggctccagaatgtggagatgatgccaccaccttcctgatgcccacgagactctgtgttgctgttgtcccctctaccaggatgcatttttcactgtcccccttcctgagtcacttgtccctatggcatggtctgggtgtgatatggtatggctctttgtccccacccaaatctcatctcacattgtaatccccgcatcaagggaggagcctggtgggaggtgattggatcggggggcagtttctcccatgagtcgtcactcatgagttctggttgtttgataagtgtctggcacttccccgccgtgctctctctctctctcctgccacatgtgagactaacacgtgccttgcttccccttcgccttcggccgcgatggtaagtttccagaggcctccccagccacgtggaaccgtgagtcaattaaa

SEQ ID NO: 146348 - DNA, 604 bp, Homo sapiens
tttcggattacaccccacaaggctcccgtgttcaataaaactgtgacacaaacactgggaacaattctggtgaatttaggaagaaaggaattgattgacgggacactgggtggctcagagtcactgggtgggctggagaaaccacttcagcaattgggagaccacaaagggaaccgcgggctccagaatgtggagatgatgccaccaccttcctgatgcccacgagactctgtgttgctgttgtcccctctaccaggatgcatttttcactgtcccccttcctgagtcacttgtccctatggcatggtctgggtgtgatatggtatggctctttgtccccacccaaatctcatctcacattgtaatccccgcrtcaagggaggagcctggtgggaggtgattggatcggggggcagtttctcccatgagtcgtcactcatgagttctggttgtttgataagtgtctggcacttccccgccgtgctctctctctctctcctgccacatgtgagactaacacgtgccttgcttccccttcgccttcggccgcgatggtaagtttccagaggcctccccagccacgtggaaccgtgagtcaattaaa

SEQ ID NO: 146349 - DNA, 425 bp, Homo sapiens
ttattagatgatcaagtcatttacagatagggwtagttttatttttacctttcttatctgtatgcctttaatttccttttcttgacttactgccctggctagagcttccagtactatgttgaatagcactggtaagagtgggcatccttgcctggttcccaatgttaaggagaaagcaccagtcttacaccaagtatattagctgtaggttccttgtagatgttctttatcaagttgaggaagttctcctaaattcctagttttctgagagttttcatcataaactagtgttgaattttgccgaatgctttttctagatcagtcgataggatcatatgattgaatattaaaccagcctcgctggaataaatccctcttggtcatcatgtataacctttgtatatattgctgaattctatttgcta

SEQ ID NO: 146350 - DNA, 508 bp, Homo sapiens
ttattagatgatcaagtcatttacagatagggatagttttatttttacctttcttatctgtatgcctttaatttccttttcttgacttactgccctggctagagcttccagtactatgttgaatagcactggtaagagtgggcatccttgcctggttcccaatgttaaggagaaagcaccagtcttacaccaagtatattagctgtaggttccttgtagatgttctttatcaagttgaggaagttctcctaaattcctagttttctgagagttttcatcataaactagtgttgaattttgccgaatgctttttctagatcagtcrataggatcatatgattgaatattaaaccagcctcgctggaataaatccctcttggtcatcatgtataacctttgtatatattgctgaattctatttgctaatatttttgttaagaattttcgcatccatattcatgccatatataatcatctaaacatttaacatcagtattttctgaatgaa

SEQ ID NO: 146351 - DNA, 415 bp, Homo sapiens
agcaactatattatagcacttaccaattgcaatgcagggaattactcactgtcttttcctccaagtatacactaagtttatcagaggtagacactgctttattagatattgatatgttctcactcctcattgcttagcacatttccctatccacgattggtattcagtcttatttcttgaatgaagatgtcaactgcatgtgtgtttgtcttctccactagagtgtgagctcaatggtataaggagctttatcttatgcattcattcatcacagctctcgagcatttctgacmcacagtaggtgctcaataaatgtttggagaatatcatcttgtggctgtattattttcccctctcatccacaatcatggtttgactttgataagtgacaagacgagaactgattttggtataa

SEQ ID NO: 146352 - DNA, 411 bp, Homo sapiens
ttgacttgcacaaattttgtctggaaggtgcattagaaggaagagataaatggctattatattattaactgctgttggactctccagcttttataagctgaaccatacttgcaagatccggatattttctttagacaaccatttatccaccagggggaaaagwctgatgaagtcctgaatgaaagcaagcagtgtcacagactactgatgcaaaactgtctttattaaaattctggttaaaaatgctagaatgttatagctggaaaagatgtcagtgaacactatcattttgagcagcctgagaaaaatagatatggaggacagaaaattggagaaccaatatggattatgaatatttctgaagaaaattccagaatggaaaagaagcagtatttagagaatagttttctg

SEQ ID NO: 146353 - DNA, 646 bp, Homo sapiens
ctttgggtaatacaaaggtcttcccatcaggtctagttgtagctgtttatgttctggtgacttataaaataaaagacaatccatctgataaacaatgactgaataggttaacacaattatagctcttgttcagcaaaggggaatatgagaagcatgcagtcatcactggtccatagtggtcaccaagtcyagttggggaggaggagtggagtcttccagccctagcagtggggtaagctgcctggttagtccatctggcagccccaggttcttccttctgggaggaacatcctaatctattgtccgttgtgaccatcactttgccttctctgaggctcttccctatcccttttcccccatggtcacatctgagtgggcataaaaattatgcttcttggagctgcataatgtttacactctgtttcctgctgatgctgatttagggcctgggtatgccttagggagtttaattgtcacagatccaatattccattgtgttaatattaccacaaattatttatccaacccactgtttgatgggtgttttggggtagttacctgtttagggttagtacaaataagtgctgctatgaatattttcaggtttgtcttttgatgaatttacatttctgttgggtattgttcc

SEQ ID NO: 146354 - DNA, 553 bp, Homo sapiens
gttaatttataaaggaaagaggtttaatagactcacagttccacctggctggggagacctcacaatcatggtggaagacgaaggaagagcaaaaagatgtcttacatggtggcaggcaagagagtgtgtgcaggggaactcccctttaaaaaaaccatcagatctcaggagacttactcactatcacaagaaaaagcacaggaaagacccacccccatgattcaattacctcccaccaggtccctctcatgacacgtgagaattatgggagctacaattcaagatgagatttcrgtggggacacagccaaaccatatcactttgctagtgattcttttaaggctagatatatattcatcacgtgatcaaggaaagccagtccctcttttctcacagttgtgtcaggatctgtgcacagaactgtgacagacattttgctaccctgaggtggacggacttccactctgtagatgacaggatagacacatgaaagggacctgcattctcgaagatattatggagctcttcagttaacaaaccttggagtcaacct

SEQ ID NO: 146355 - DNA, 508 bp, Homo sapiens
tgtggcttataaattactcagtctaaggtattttgttgtagcagctgaatggactaagacaacctcttagaggcactgggcatgttattgttcacctctcctcagggaaatgctacctttgtattttttttttttttttctgagacagagtttcgctcttgttgcccaggctgctggagtgcaatagcgcaatctcagctcacctcaacctccgcctcctattttttttgtatttttagtagagacagggtttctccatggtggtcagggtggtctygaactctcaacctcagatgatctgcccgccttggcctcccaaagtgctgggattacgggcatgagccactgcacccagcccacttttgtattttacaacaccacacaccttcacttccttcctgcttctcagattctttctttatcctctgcccattcttttagtattggaaggtcgcaagctctgtgcaggaccctcttttcattattcatgcaaacttcctgagagata

SEQ ID NO: 146356 - DNA, 576 bp, Homo sapiens
ttcatttaagtcagaaccttaaacatgtggatatttttgccaacaactcagaagctaacaaaacagctaacaacttagctgttttcattgaaccaacaatattaaattagtcttatttgtcaaaaaattcacacaaagatcattctctttttgactgggtttatagtctwataatcttttgtgccaaatcctgataccttaaaacacctagcggaggcaaatataaaataatcagtaaacccagactaaaaaaaaaatgtatgctgacaattctgaagacatttctagttttattttaccaataattttaaaaccattttatttaccagattactaagttcacatgaatctgaaaagtatttggacttacttaatttatgagtataatttacttataaaccagtttggtaccatgctagatacaacacaacataatacatgttcatatacaaacatttaaacacatacacacaaagatcttacagcttttactctggaaccttagccatgagatggtaatacagactcaccacttaacaaaagacagctggatccaaattatttctgacaaaattg

SEQ ID NO: 146357 - DNA, 576 bp, Homo sapiens
ttcatttaagtcagaaccttaaacatgtggatatttttgccaacaactcagaagctaacaaaacagctaacaacttagctgttttcattgaaccaacaatattaaattagtcttatttgtcaaaaaattcacacaaagatcattctctttttgactgggtttatagtcttataatcttttgtgccaaatcctgataccttaaaacacctagcggaggcaaatataaaataatcagtaaacccagactaaaaaaaaaatgtatgctgacaattctgaagacatttctagttttattttaccaataattttaaaaccattttatttaccagattactaagttcacatgaatctgaaaagtatttggacttacttartttatgagtataatttacttataaaccagtttggtaccatgctagatacaacacaacataatacatgttcatatacaaacatttaaacacatacacacaaagatcttacagcttttactctggaaccttagccatgagatggtaatacagactcaccacttaacaaaagacagctggatccaaattatttctgacaaaattg

SEQ ID NO: 146358 - DNA, 576 bp, Homo sapiens
ttcatttaagtcagaaccttaaacatgtggatatttttgccaacaactcagaagctaacaaaacagctaacaacttagctgttttcattgaaccaacaatattaaattagtcttatttgtcaaaaaattcacacaaagatcattctctttttgactgggtttatagtcttataatcttttgtgccaaatcctgataccttaaaacacctagcggaggcaaatataaaataatcagtaaacccagactaaaaaaaaaatgtatgctgacaattctgaagacatttctagttttattttaccaataattttaaaaccattttatttaccagattactaagttcacatgaatctgaaaagtatttggacttacttaatttatgagtataatttacttataarccagtttggtaccatgctagatacaacacaacataatacatgttcatatacaaacatttaaacacatacacacaaagatcttacagcttttactctggaaccttagccatgagatggtaatacagactcaccacttaacaaaagacagctggatccaaattatttctgacaaaattg

SEQ ID NO: 146359 - DNA, 615 bp, Homo sapiens
tgaagtcaggagccattgctcatataagaactacttttttacaattcccttgctcttggaatccaatartgttttcttggggcattgagagtaagatacactgtctaagttttcatacttattctgtgatagaaacatctagtttctctcttctgtctgtggtaaatctctacaagtctcttagataaattgcacttattaattctactttttaaaatagctttattgaagtaaaatcttctactataaaatatactggtaagtataatttgatgatcttttgtaaattatagagttgtgaaattatcaccacagttcaaagaacatttctctcacacccaaaaattcctgggacctgttcatagtcagtttgggtctggagtgcacacaggtggtgggaggttgcaaggtgatgctggcctacatgacttgttctgataatcctgagttattgcaccatctgttgaatgggctggcgccatcttgggcctgacgagttgtaaattagctgcagccttcaagtaataacccggtggtggaacattctatagatacctggattgtctctggaacttctaagcaaacataattagacaagctagcaatgcagtggag

SEQ ID NO: 146360 - DNA, 615 bp, Homo sapiens
tgaagtcaggagccattgctcatataagaactacttttttacaattcccttgctcttggaatccaataatgttttcttggggcattgagagtaagatacactgtctaagttttcatacttattctgtgatagaaacatctagtttctctcttctgtctgtggtaaatctctacaagtctcttagataaattgcacttattaattctactttttaaaatagctttattgaagtaaaatcttctactataaaatatactggtaagtataatttgatgatcttttgtaaattatagagttgtraaattatcaccacagttcaaagaacatttctctcacacccaaaaattcctgggacctgttcatagtcagtttgggtctggagtgcacacaggtggtgggaggttgcaaggtgatgctggcctacatgacttgttctgataatcctgagttattgcaccatctgttgaatgggctggcgccatcttgggcctgacgagttgtaaattagctgcagccttcaagtaataacccggtggtggaacattctatagatacctggattgtctctggaacttctaagcaaacataattagacaagctagcaatgcagtggag

SEQ ID NO: 146361 - DNA, 509 bp, Homo sapiens
gacaatttgtttattccctaagactgttaaatggccacagatagtaaagaataygagtaaacataaaatggatggttttaacaaatcgttaacaatgtatttacctttccttttggagcggtgtgctgagggacagctcatgaaagtaggagggactccaaggagaagcttcacgaaagccaactgcagctctgcagatacgccctgccaggaacccaggaggatgctgtgcaggacactgcctgcttgctgcccatggagctgcttcaaccccatccacagctgtatccatccaactggctcttagcagtcaatgagaagactccagagcagtgactctcggagaatggctcagtgcttaccaaaggattttgcctgaaatgactgccaggaaagtctgagctccctatttgatacagcacagttccagagttgaggatgatgtctttagacttggttataccagagggttgtacaattactgacacaagctgcctcgacagacaaag

SEQ ID NO: 146362 - DNA, 526 bp, Homo sapiens
ccaaggacaatttgtttattccctaagactgttaaatggccacagatagtaaagaatatgagtaaacataaaatggatggttttaacaaatcgttaacaatgtatttacctttccttttggagcggtgtgctgagggacagctcatgaargtaggagggactccaaggagaagcttcacgaaagccaactgcagctctgcagatacgccctgccaggaacccaggaggatgctgtgcaggacactgcctgcttgctgcccatggagctgcttcaaccccatccacagctgtatccatccaactggctcttagcagtcaatgagaagactccagagcagtgactctcggagaatggctcagtgcttaccaaaggattttgcctgaaatgactgccaggaaagtctgagctccctatttgatacagcacagttccagagttgaggatgatgtctttagacttggttataccagagggttgtacaattactgacacaagctgcctcgacagacaaagcatctcttagct

SEQ ID NO: 146363 - DNA, 498 bp, Homo sapiens
ttattccctaagactgttaaatggccacagatagtaaagaatatgagtaaacataaaatggatggttttaacaaatcgttaacaatgtatttacctttccttttggagcggtgtgctgagggacagctcatgaaagtaggagggactccaaggagaagcttcacgaaagccaactgcagctctgcagatacgccctgccaggaacccaggaggatgctgtgcaggacactgyctgcttgctgcccatggagctgcttcaaccccatccacagctgtatccatccaactggctcttagcagtcaatgagaagactccagagcagtgactctcggagaatggctcagtgcttaccaaaggattttgcctgaaatgactgccaggaaagtctgagctccctatttgatacagcacagttccagagttgaggatgatgtctttagacttggttataccagagggttgtacaattactgacacaagctgcctcgacagacaaa

SEQ ID NO: 146364 - DNA, 392 bp, Homo sapiens
ttgggtacattgtaggtgaccactagaacaccattacattaagtatttaaaaaccagaaaggacttaatcaaaacttgttgggtttctgatgttactatgccccctcatttcccattttctcctcctatgacttttctgcctctgttcaccagcagcctttcttcccaatcgaatccagtctatttctctatccactgccacttcccatcccccttccctttttcccacmtcttcaaccttggccacgtcacctgctcctatcagatgagccccagtcatcttcccctgtttcttcggtacgctgccacccaagaaatcaataagaaatttgtagagcagggagcagaggaagggctgtgaagagtggatttgaatgaggtagtttgtgctt

SEQ ID NO: 146365 - DNA, 383 bp, Homo sapiens
atacagcccagggttgggtacattgtaggtgaccactagaacaccattacattaagtatttaaaaaccagaaaggacttaatcaaaacttgttgggtttctgatgttactatgccccctcatttcccattttctcctcctatgacttttctgcctctgttcaccagcagcctttcttcccaatcgaatccagtctatttctctatccactgccacttcccatcccccttccctttttcccacctcttcaaccttggccacgtcacctgctcctaycagatgagccccagtcatcttcccctgtttcttcggtacgctgccacccaagaaatcaataagaaatttgtagagcagggagcagaggaagggctgtgaagagtggat

SEQ ID NO: 146366 - DNA, 609 bp, Homo sapiens
aagctttagaagctgcctaagaatcaaaacccttctaayaccttgtcctgtccctgcctccccaagaacagggtgagtttctctttcaatttttcttatctgatcaggaaaacttttttccaagagaaatgcaattgtcttaagactccctttttagaaatatcatcaaagaaccagaaatgatcaaccaccagagaaaagcagagactggggtcaccatgcccagaaaaactttttatttatttattttttttgagaaagggtctctctctgtcatccgggctggcgtgcaatggtgaaatctgggccactgcatcactgcagcctcaacctcctgggctcaagccgtcctcccatctcaacctcccaaagtgctgaggttacaggcatgagccactgcacccagccccagacagacttttcatctgttcttctgagggcagctccaagagatcacttgggggactttatctgcataaagcaacgtgcgacacagttccacttctccccttcccataatgtctgccttccacctccctgacccattcattctccccaatgatttactgcccttcaaaagaatctgcattcctcgtctcctccttcccc

SEQ ID NO: 146367 - DNA, 609 bp, Homo sapiens
aagctttagaagctgcctaagaatcaaaacccttctaataccttgtcctgtccctgcctcyccaagaacagggtgagtttctctttcaatttttcttatctgatcaggaaaacttttttccaagagaaatgcaattgtcttaagactccctttttagaaatatcatcaaagaaccagaaatgatcaaccaccagagaaaagcagagactggggtcaccatgcccagaaaaactttttatttatttattttttttgagaaagggtctctctctgtcatccgggctggcgtgcaatggtgaaatctgggccactgcatcactgcagcctcaacctcctgggctcaagccgtcctcccatctcaacctcccaaagtgctgaggttacaggcatgagccactgcacccagccccagacagacttttcatctgttcttctgagggcagctccaagagatcacttgggggactttatctgcataaagcaacgtgcgacacagttccacttctccccttcccataatgtctgccttccacctccctgacccattcattctccccaatgatttactgcccttcaaaagaatctgcattcctcgtctcctccttcccc

SEQ ID NO: 146368 - DNA, 456 bp, Homo sapiens
ctcccggttttggtggatgatatagatactttcctgactctgaactcggagaataatttgtcgttgagaatttaaaggagagacactgaacaacataatgaggtcctgtgttttcaaaaagcaagttttcaaatggatgtgtttcacattttgcctgatgaaagccagggacatagcattacactcttgctctgtaaagttaattattcaaaaggccagagtgacatagtccaaagaagtaacctaaggacagtctcaaaggtggaaaacctgtgatgaactactggccatgccacttattagtggagccactttagccacgtcycctttcattctctgagcatatgtttttttaattttaaagaaggagggataatatctccgttttctaattgtatgtgagaattgaattaaataacctgtgaaagtacctttaactctttagatataaacata

SEQ ID NO: 146369 - DNA, 381 bp, Homo sapiens
gtgccacctgggaaggtgcaaaaacttgagaaagacattggactttatcaggccagaaaaatgggggttgatcartgcatctctggaggtacagggtgaccctggttgaaatggaggtaaccttttgcatgcatacgtatagagctctcagcactcttacctttaccctcccatattctaatgtgctttccccagggaagaaaatgagtagccgcaatgagtatacctggaattacatgtaaccctgaaatgtccatgggactatgtggtttgtgactgtttgtacaatgcctatcaaatcaagaaaaaggctgagactcatcgtttgtgtttttcatttgaaatcctaatggttaaacttgaacctggtggtcaaactaa

SEQ ID NO: 146370 - DNA, 511 bp, Homo sapiens
caggcaagtcaaacaaaatcagaaaaattagtcaccccttgaagttgaacattgtaaacaagaactcctcaaagtagtacgcatccttgagaatagcacatatcttcttggtataagtacatgataaagacatttcagttagaacttttctgttaactgctgcatgatcatttgcaaggctatgcatctttgatytctcagaaacctggctaaccacccctaggaaatcagctattgtttcagggtagcagggaatccacaataagcttcctgacaaggaaggcctctaatggagctgtgcatctactggcatgaccatttgcctgcctttgacccttggcagggatttgacctccagcttgaggtttctatttcctagcttttgaccaggggtaaccacacttgacctctggcctcagtgtgatctctgactgccaacccccaacttggctttgattgttctgcacaatctgtagtcccccagggtccagaaaaatctcttccactagct

SEQ ID NO: 146371 - DNA, 518 bp, Homo sapiens
gcattccagcctgggcaacagagcaagaccctgtctgaaaaaaaaatacaactgccacagctgttgtaattttacattttgaatatattgacgacagtgtcagagaggaaaagctgggcastgcttttctctaaaatctccaatccggagtgtgttctagagagcagtttttctcaagagaaagggatgcaggtagagcaccacctttaggagtagcatgatgaggccatggtcacaggcctattccctgaacccaatacagctgttcacagcagtaacttggctcagttctggacatttctggaaattgtaaggaaaccaggtgacagggtgagctaatgagccaatgcaaagccatcaccatggccagaagaacaagccagggtttatgttcagctgatgacagcctgggaggccatcttcacatcggaaggctaacccactgttgtatgccttcttttctgcagcataaagatagggaggtggtgatggagcacccctcttctggaagtgactgg

SEQ ID NO: 146372 - DNA, 518 bp, Homo sapiens
gcattccagcctgggcaacagagcaagaccctgtctgaaaaaaaaatacaactgccacagctgttgtaattttacattttgaatatattgacgacagtgtcagagaggaaaagctgggcactgyttttctctaaaatctccaatccggagtgtgttctagagagcagtttttctcaagagaaagggatgcaggtagagcaccacctttaggagtagcatgatgaggccatggtcacaggcctattccctgaacccaatacagctgttcacagcagtaacttggctcagttctggacatttctggaaattgtaaggaaaccaggtgacagggtgagctaatgagccaatgcaaagccatcaccatggccagaagaacaagccagggtttatgttcagctgatgacagcctgggaggccatcttcacatcggaaggctaacccactgttgtatgccttcttttctgcagcataaagatagggaggtggtgatggagcacccctcttctggaagtgactgg

SEQ ID NO: 146373 - DNA, 515 bp, Homo sapiens
attccagcctgggcaacagagcaagaccctgtctgaaaaaaaaatacaactgccacagctgttgtaattttacattttgaatatattgacgacagtgtcagagaggaaaagctgggcactgcttttctctaaaatctccaatccggagtgtgttctagagagcagtttttctcaagagaaagggatgcaggtagagcaccacctttaggagtagcatgatgaggccatggtcacaggcctattccctgaacccaatacagctgttcacagcagtaacttggctcagttctggacatttctggaaattgtaaggaaaccaggtgacagggtgagctaatgagccaatgcaaagccatcaccatggccagaagaacaagccagggtttatgttcagctgatgacagcctgggaggccatcttcacrtcggaaggctaacccactgttgtatgccttcttttctgcagcataaagatagggaggtggtgatggagcacccctcttctggaagtgactg

SEQ ID NO: 146374 - DNA, 560 bp, Homo sapiens
catactcatcactgagaaagcagttggggcagggctatgggtgctgcagaactctgcagcctgttagtcctctaccaacatcattttgtacatgaaggattacctggctcagagacctctaggcacttgtcctaggtcacacagcatgttcatggcagggctaggattggcacactcagtgcccctaaccccctgctggtgacagctcccccagtgccagagtgccaaaagagtgataggcacatagtaggtrtttagaaaatgtttatggctcaaccagttttgaggatctttgttggataccaggccctggtagccatctgggaggcaggttcaccattgtactggtgaacatgcagacaggcccgaagaggccaagcggattccccaagcttacacagacagggagaggccacaccctctatagccgcaggtccaggaagagcagttgcagttccctggaccctatggccactgtctccagatcctgtccctgccccagtccaagggagccccagaggagacctcagcaggacccacccactcccctcttccctccc

SEQ ID NO: 146375 - DNA, 560 bp, Homo sapiens
catactcatcactgagaaagcagttggggcagggctatgggtgctgcagaactctgcagcctgttagtcctctaccaacatcattttgtacatgaaggattacctggctcagagacctctaggcacttgtcctaggtcacacagcatgttcatggcagggctaggattggcacactcagtgcccctaaccccctgctggtgacagctcccccagtgccagagtgccaaaagagtgataggcacatagtaggtgtttagaaaatgtttatggctcaaccagttttgaggatctttgttggataccaggccctggtagccatctgggaggcaggttcaccattgtactggtgaacatgcagacaggcccraagaggccaagcggattccccaagcttacacagacagggagaggccacaccctctatagccgcaggtccaggaagagcagttgcagttccctggaccctatggccactgtctccagatcctgtccctgccccagtccaagggagccccagaggagacctcagcaggacccacccactcccctcttccctccc

SEQ ID NO: 146376 - DNA, 560 bp, Homo sapiens
catactcatcactgagaaagcagttggggcagggctatgggtgctgcagaactctgcagcctgttagtcctctaccaacatcattttgtacatgaaggattacctggctcagagacctctaggcacttgtcctaggtcacacagcatgttcatggcagggctaggattggcacactcagtgcccctaaccccctgctggtgacagctcccccagtgccagagtgccaaaagagtgataggcacatagtaggtgtttagaaaatgtttatggctcaaccagttttgaggatctttgttggataccaggccctggtagccatctgggaggcaggttcaccattgtactggtgaacatgcagacaggcccgaagaggccaagcggattccccaagcttacacagacagggagaggccacaccctctatagccgcaggtccaggaagagcagttgcagttccctggaccctatggccactgtctccagatcctgtccctgccccagtccragggagccccagaggagacctcagcaggacccacccactcccctcttccctccc

SEQ ID NO: 146377 - DNA, 375 bp, Homo sapiens
cccagctacttgggagcctgaggtgggaggatcatcttagtccagggaggtggaggctgcagtgagccatgatagtgccactgcactccagcctgggtgacagagcaagamcctgtctcaaaaaaatatatatgtatattcatttagacatatgctgttgcacacttagactatagtatggtatcagcatacgttttatatttactgggaaaccaacaaaattcgtgtgacttgcttcattgtggtctgggaccaaagctgtaatgcctccaaggtatgcctgtatatttctattgcaaaatgtgaatctcgaaattataaaagctacaactaggacaaaaagcaaccccaccaaatagccctatatcaaagaat

SEQ ID NO: 146378 - DNA, 621 bp, Homo sapiens
tccagcacttcattcaacacaggcaatcatttattcttccaaatcacaaactaaaacttcctgggctaatgggcaaaatagacacaaaaacagactaccgaaactacatgtaacttggtaagaaggctgttaacaaaaacactgataatagaaaaataccagcatggtttttaaaaggttaaatgcctttaaaaatggatatagtaaatataagacttaatcttgaaagaaagaggggagttggtttgatggaagagagtgtgagaaaggttaagtactgagtttttaaaaaccacaaatattgggaaaaactgcacaagcacrtccaagtcaaaatacctggtcaaactaagctaagatgaacctggacagaacagacatgggatactgcattgtgctatatggctggctgttttcagcagcatgagggcaagttacattcagtgagggctgctcagtagtgcaaaagattaaagggctgatgtgagcccaaaatgatccaacataacttctatgttttactaatattattccgctagcggccagctagataggcactatgtcacatttagaaatacatgtcatgatatcgcagaactaaatcaatcatccagatggcat

SEQ ID NO: 146379 - DNA, 621 bp, Homo sapiens
tccagcacttcattcaacacaggcaatcatttattcttccaaatcacaaactaaaacttcctgggctaatgggcaaaatagacacaaaaacagactaccgaaactacatgtaacttggtaagaaggctgttaacaaaaacactgataatagaaaaataccagcatggtttttaaaaggttaaatgcctttaaaaatggatatagtaaatataagacttaatcttgaaagaaagaggggagttggtttgatggaagagagtgtgagaaaggttaagtactgagtttttaaaaaccacaaatattgggaaaaactgcacaagcacatccaagtcaaaatacctggtcaaactaagstaagatgaacctggacagaacagacatgggatactgcattgtgctatatggctggctgttttcagcagcatgagggcaagttacattcagtgagggctgctcagtagtgcaaaagattaaagggctgatgtgagcccaaaatgatccaacataacttctatgttttactaatattattccgctagcggccagctagataggcactatgtcacatttagaaatacatgtcatgatatcgcagaactaaatcaatcatccagatggcat

SEQ ID NO: 146380 - DNA, 531 bp, Homo sapiens
cttttaaaataacccagtcagaaaaaaaaagagaatgaaaaagaatgaaggaagcctgtatgacatataggaaaccatgaagcaatcaaatattctaattttgaaagctttagaagaagaaacaacgggcaaaggcatagaaaacctatttaactatatagyagctgaaaacgtcccaagtcctagaagaaacagacatccagatacagaaagcacaaagatccccaaatagatttaacccaaataggtcttctccaaaccacattatagtaaaactgtcaaaagtcaaagataaagagaaaattctatgaacagcaagagcaaagtgttaagtcatatataatacaatccctatcagactaacagcagatttctcagcagaaatcttataggccagaaaagaatgagttgttattttcaaagtgctaaaagaaggggaaaaatcctgctagccaagaatactatgcccagaaaatctatccttcaaaaataaaggagaaataaaatctttcccagacaagcaaaaactga

SEQ ID NO: 146381 - DNA, 594 bp, Homo sapiens
aaaatactattaggtacatccaggctgaggtttggtttactcttcaagaaaattttaggaaagactagcgtcagccaactctcaaacagtgccataacaaatattgaaattacaaccttaaagtttaccttttaaagaacaaatgcttctttctaaaaagacgagaggcaagtgtcatggcccaccactactgagaaccaactgtaaatcattactgtgtgtctcactcattgaagagtagatgataaacactttcatcttcgagattatgtgtactcaagctgtgggcttattatgtaaaacaaagttgacagcatgtgttgggagaaatttgaaatcaagaagaaaattagtttcctttatccctagaatttccaaacacttgtggctgtaggtgtgttctctattttttatattagggaattcctatcttttctggttgaaagaatatgagaaaattgcctcrgaatctttagtgctaaatttccaaagaaaaagtcagagaacagaagcagaaagagtatgacctgtttcattgggctaaataatttattctcctgagatgtatttttgagggactggccacccaaagga

SEQ ID NO: 146382 - DNA, 662 bp, Homo sapiens
tgctgcaaatagcatgaactttccaaggccccaccctgttctcccagtgctcaggtggacattactcagaaagaatccgtcgggaaagagcgggcttcattcgggaccagcagtctggtttttcagttttcaggctgttttaggcttaaggtggggtttcaccaggggcaggagttggctgcctcctgtctccatcagtgctaggcagaataatggcctccaagagatgttcatgccctgatcctcagaacccatgaatatgttaccttacatggtgtgatactgtgatataataagatatacattttggtcttcatccacagttcttgccttatagctcctaaaacccttataatttcctaagtgattagagcaataggaatatcttttattataagatttggtcttttgtccttggttcctggaacagccctggacyaataaaggtgaaaaaaagtcttgttatttaataacaagcccctttcaaccacatctgagtttatgttaataaggtgatttctggaaagctactagataaccaccacaggatcgggggcggttgctagggggcacaaatcatgtgattagagggttagaaccttcagcccgacatcccaacctctgggtagggaagagggactgaagattgaattgatcaccaa

SEQ ID NO: 146383 - DNA, 612 bp, Homo sapiens
aatcggttggtgtggggggaaaaagaactacacatgtggccacagaagtgggctgactatgaatactagakaggaaacaggagtttcacatggcaaagaggacattgcacatgggattaagaatcttaaagtgaggaagttctcctggattacgagatgagcctgatatagtcacaagggtccacaaaggtgaaaaacgagtcgggagagtggaacggagccatgagcccaggaaggcagctggagagacaagggaaccaattctctcctagagcctccagaaggagcgaagtcctgccagatggcaaatattttaagctttgcagccatacggtctctgtcacaatgattcaactctgtccttggagcacaaaggcagctatagacagttcacaagtgaatggctgtgttccaataaaactatttgtagacactgaaatttgaattgcatataattttttacaaactgcaaaacagtattcttgttttaattttttccgcaaccgttaaaaaatataaaagtcattcttagcttgcgggtcacacaaaaacacgtcatgggctgggtctggcctgtaggctgtggtttgctgaccatccccgataccgtat

SEQ ID NO: 146384 - DNA, 559 bp, Homo sapiens
tactgttttggctctctggggtcctttgtggttccayaggaattttaggattttttttctatttctgcaaaaaaaaaaaaaaaaaaaaatgccactgggattttgactgggattgcactgaatctgtgaatcatctttgataatatgaacattttaacaatattacattttccactctatgaacatagaatgtctttctatttatgtctcctttaatttctttcagcagtgttttgtagttttcagtgtaaacatcttttacctaagtgttttattctttttgattctattgtaaatagaattttcttaacttccttttttgattgctcattgttagtgcagagaaatgccaactgatttttttgtgtgttgaatttgtatcctgcaactgtgctgaatttattagttgagcagcttttttggtagaatctttagtgtttcctacgtactaggtcatgtcattggttaacatagataatcactcttttcctatttggatgtcttttatttctctttctcgcctggataggacttctggtcttatgttgaatagaggtgg

SEQ ID NO: 146385 - DNA, 559 bp, Homo sapiens
tactgttttggctctctggggtcctttgtggttccataggaattttaggattttttttctatttctgcaaaaaaaaaaaaaaaaaaaaatgccactgggattttgactgggattgcactgaatctgtgaatcatctttgataatatgaacattttaacaatattacattttccactctatgaacatagaatgtctttctatttatgtctcctttaatttctttcagcagtgttttgtagttttcagtgtaaacatcttttacctaagtgttttattctttttgattctattgtaaatagaattttcttaacttccttttttgattgctcattgttagtgcagagaaatgccaactgayttttttgtgtgttgaatttgtatcctgcaactgtgctgaatttattagttgagcagcttttttggtagaatctttagtgtttcctacgtactaggtcatgtcattggttaacatagataatcactcttttcctatttggatgtcttttatttctctttctcgcctggataggacttctggtcttatgttgaatagaggtgg

SEQ ID NO: 146386 - DNA, 529 bp, Homo sapiens
atcagcagggtgtgattgcacttgctgtggtcccagcaacttgagaggctgaggcaggaggatcacttgagcccaagaggttgagggtgtatatatatatatatgaggggggaaaagtagcatgcattttttaggcctcattacactttattatttttgagtattatttctcctgtggataattatattaaactgtagctgtaaaaataagcacagtgctaggttcatgtcatggcagagtggattgatggtgtatttcctaattttgcaaagaatgtgtgatttctgagctggacacagtgacttatacttgtagtcccagctactcaggaggctgaggttggaggaccactttggcccaggaattcaagtccagcctgggcaacrtagtgagacccagtctctttaaaaaaaaaaaaaaaaaaaagtgatttctgttaacaatgattctctttctcttccccttcccccaccccccatttttgaggtgaaaaatggttgtatggctgttggttttaccgaccaaatg

SEQ ID NO: 146387 - DNA, 613 bp, Homo sapiens
ctgtacggtattgtcaatggacttaaagccactgaactgtgtatttaaaaacggttaaggctgggcgtggtaatcctagcactttgggaggccaaggtgggcggatcacctgaggtcaggagtttgagaccagcctggccaacatggcgaaaccccgtctctactaaaaatacaaaaattagccaggcgtggtagcttgcgcctgtaatcccagctactcagaaggctgaggcaggagaatygcttgaacctgggaggcggaggttgcagggagccgagactgtgccactgactccagcctgggtgacagagaaagactccatctcaaaaaaaaaaaaaaaaaaggttaaaatgatgaattctatgacatatatataaaacaataaaaaactcccataaatggtagcatatcacttaaaactgttttgcatctgaattttgtcacaaaataatatgtcttggaggtcacggcttgtatgaatgtactaagtttattcaactagttccctattgatgggtatctatgttgtttcccaatgtttgctcttctgctgacgctaaataatgctgaaataaataatttaagacatatcaatttgcacgtaggtgaata

SEQ ID NO: 146388 - DNA, 527 bp, Homo sapiens
cagcagggtgtgattgcacttgctgtggtcccagcaacttgagaggctgaggcaggaggatcacttgagcccaagaggttgagggtgtatatatatatatatgaggggggaaaagtagcatgcattttttaggcctcattacactttattatttttgagtattatttctcctrtggataattatattaaactgtagctgtaaaaataagcacagtgctaggttcatgtcatggcagagtggattgatggtgtatttcctaattttgcaaagaatgtgtgatttctgagctggacacagtgacttatacttgtagtcccagctactcaggaggctgaggttggaggaccactttggcccaggaattcaagtccagcctgggcaacgtagtgagacccagtctctttaaaaaaaaaaaaaaaaaaaagtgatttctgttaacaatgattctctttctcttccccttcccccaccccccatttttgaggtgaaaaatggttgtatggctgttggttttaccgaccaaatg

SEQ ID NO: 146389 - DNA, 486 bp, Homo sapiens
tgttgatttagtcacagagacaaaacaacagcagttgaacaaagtggatgtttatttctcatgtaaaagtctaaatggggtgttggcatgttgtgggctgtggtagcaagcttggccccctctggttgctatgggacctgctgtgggcctcttgctggttagtcactcagtgtgggtttgcattgtgggtrgtgaagggggccagacaaggaaacgagagagctgacctcaattccaactgagaactgaagagtcaggagccgcaggaggtgaagaacagaacaccagggacagttgccaggcctggcggagcctgatgtggcttctggtcacatacagagtcacagggcccttaattccttctcatcggggctcaggggcaggcattcactgtcttggtgccacagtccctcttgaaatatttccttaacgaaaatcagaaaagattctgatcatctatctgttcagagagtctggaatcctttg

SEQ ID NO: 146390 - DNA, 487 bp, Homo sapiens
tgttgatttagtcacagagacaaaacaacagcagttgaacaaagtggatgtttatttctcatgtaaaagtctaaatggggtgttggcatgttgtgggctgtggtagcaagcttggccccctctggttgctatgggacctgctgtgggcctcttgctggttagtcactcagtgtgggtttgcattgtgggtggtgaagggggccagacaaggaaacgagagagctgacctcaattccaactgagaactgaagagtcaggagccgcaggaggtgaagaacagaacaccagggacagttgccaggcctggcggagcctgatgtggcttctggtcacatacagagtcacagggcccttaattccttctcatcrgggctcaggggcaggcattcactgtcttggtgccacagtccctcttgaaatatttccttaacgaaaatcagaaaagattctgatcatctatctgttcagagagtctggaatcctttgc

SEQ ID NO: 146391 - DNA, 437 bp, Homo sapiens
tacttggcattctattatgctgccatgacacattgcactacttaccagtaactgattatgacactttcaggctgattctcatcctggcaatgatgcagaaaggttttcagtactgtgtgctcagacagcactatacttggaaaggaagcttttgctgctgctgcgaaattggaccaagagtacmaagttctccatgaaccaaaactacctcagctttcttactcttttagcactggtcataaaggcagtgcaggatagtcataggaacatgggctgggatcagggggctttaggttagaatcgcaggcctggagcatctgctcctcttccccatcctaatagactgatgtactgaatctatggaagactcccttaccttatctgattgactggtcaagaaaggctcaatacagagacatgttaagaaccaagaaagg

SEQ ID NO: 146392 - DNA, 379 bp, Homo sapiens
tggaactgtgagtcagttaaatctcttttctttgtaaattacccagtctcaggtagttctttatagcaatgcaagaatagactaatacaataattatgatggcgaaccctccatagtggtaaccccgtgctrtgtgctttgcttaatttatctcaattaatcctcacaacactaggtagactcaattatatccccatttacatggatgaggaactataaagcacagagatcttgaatgttcaaaaagtatttcctagatatggatgaatacattcagccatgatgaatatatattgggtaccttgatgtagtcccagtcctcatggaaattgtgtcttattacatagcaaagaagggcaggagggaggaaatgagtgaa

SEQ ID NO: 146393 - DNA, 607 bp, Homo sapiens
gtgttttagttacacattattaactgagcattattgactactctgctatgggggtctggagatgagaatcactcgttcagtgtaacaatgattgcagatgtctaaaccagtttaagtgagaaaggctatagagcccttgaatccattatctccatttgatgagatctgctaaggtgtgctaacacactcattasattaatggggtcacctaggaggaagcagtggcttacgcctgtaatcccagctactctgaaggccgaggcaggaggattgcttgagtgtgggagtttgaggttagcagtagtctgggcaacatagtgaaaccttgtttctaaaacaacaataacaacaaaattggttatgtcaatattattataaattgttcattatctcaaattttaagaaacttacataagaccttgtaagagtacttgatattggccattttaatttcacaatgtgggcagattatgcaaatgattggcatactgtttaggattacttctattaaataactgcacgaaacaaaaacttttaaatattatggcttaaataatatagaagtagttgtttcctcttacactaatagagattcagagatatgatg

SEQ ID NO: 146394 - DNA, 547 bp, Homo sapiens
agatgaaaatggttaacaagtacaaaaaagaaagaatgagtaagacctactttttgctagcataacaggttgactgactgtagtcaataatttaattgtacttatttcaataactaagactataattgaattgtctgtaacagaaaagttaagtgcttgagggaatagctaccccattccccatcatgtctttattatgcattgcatgcctgtatcaaaatctctcttgtacttcataaatatatatacctactaaatgcccacaaaaatttaaaaaataagttattgtaaaaataagtagttaattaacattaaaaatgctttacatctcaaaggggcagaaaggattacaactttctttaagccaargggaacattaaggtcctcttgataagactagggcccttaaaataaagagaaatcttacctaagaaaacagctttcccctcttcagttcctgtttactgttatagcttccattattgccctagtccctacaagattcatttgtttttcatgttttttccaaagtaatctctttttagta

SEQ ID NO: 146395 - DNA, 474 bp, Homo sapiens
ttgaggtttattcactgtgggctccaggaagtgattttctcttcagcctcaagattaacagcttcaattcttttcaaagatatgacaaggaattttaaatatctggatctaggggctggacattgggactcacgcctgtgatcccagcactttgggaggttgaagtgggcagatcacttcaggtcaggagtttgagaacagcttggccaacatggtgaaaaccagtctctactaaaaatacagaaattatccaggcatggtaatgwgcacctgtaatcccagctaattccatagggtgtggctgtaaaagctactcaggaggctgaggcaagagaattgcttgaaccttggagatggaggttgcagtgagctgagattgcaccattacactccagcctgggcaacagcatgagactgtctctaactaactaactggatctaagaacactaaatctgagtgtttggcagcacaag

SEQ ID NO: 146396 - DNA, 474 bp, Homo sapiens
ttgaggtttattcactgtgggctccaggaagtgattttctcttcagcctcaagattaacagcttcaattcttttcaaagatatgacaaggaattttaaatatctggatctaggggctggacattgggactcacgcctgtgatcccagcactttgggaggttgaagtgggcagatcacttcaggtcaggagtttgagaacagcttggccaacatggtgaaaaccagtctctactaaaaatacagaaattatccaggcatggtaatgagcacctgtaatcccagctaattccatagggtgtggctgtaaaagctactcaggaggctgaggcaagagaattgcttgaaccttggagatggaggttgcagtgagctgagattgcaccattacactccagcctgggcaacagcatgaractgtctctaactaactaactggatctaagaacactaaatctgagtgtttggcagcacaag

SEQ ID NO: 146397 - DNA, 581 bp, Homo sapiens
gcagtggcaggatcttggctaactgcaacctcygcctcctgagttcaagtgattctcctgcttcagcctctcaggtagctgggattacaggtgcccgccactgcagccagctaattttgtgtattcttagtagagacagggtttcaccatcttggccaggttgatcttgaactgctgacctcgtgatccactctcttcggcctcccaaagtgctgggattacaggcatgagccaccatatccagcccagatatcttgtaagtgcaaccattgcttaatgtcccctaacttagtttctaaggaataaaatgtgtatttcacatctgtcctatctactattggttttaacttttagttttttaatgacaactgattaattactttaacaatttaaattacatatttattcatcacattttttaaacaccagccacgttccatgaactgtcatagatgctaaggatatgagatgcagaattcttctcatcaaggagatcacaaacaagagaaagaaacaaagactgaaatcaggagagggaaaaatgcccatttgacccatgctcagaatggtcttaatataca

SEQ ID NO: 146398 - DNA, 375 bp, Homo sapiens
acttaatattataaattccaaacccataattttccccctggtctaaattggcatgataaacagctattgtttctatttctttctctgtgtcatagttgtcatcacattaatgcaagccatttattcatttatttaaatagtgctcactgaagacctattatgcaactgatattgttctaagtattacggatgtattagcgaactatgcaaacaaaaatccttggactcctggaatttatattctagcagttagaaagacaatgaataatagacatagtaatagataatgtatgctgcatggaagaratggtttctgttgtgggaaaaacacaaactggcaaaagagtgattggcgaaggaattaccattcttagt

SEQ ID NO: 146399 - DNA, 523 bp, Homo sapiens
agcatttccttagagctgagacatcctgagacatggacttttgatgggtaatcaaggtttagaaaaatgagttcacagaaggtttacaatatcaggacagatctttcccaggctttccagaccatttaatgcttgttttgtgaatcaaagagcgcaggcacagaggctggaggaagcaaactaatagcttacaaagctacaaaacgaaagggagacaataaggcttgaaaagaaacacttacaaaaataaaataaaatacccatttcctctctgtctctttctcctgcttctgtgagtactgctagacagacgccatcgacatttcagcagcagtgacatcccagacagcttgtctatagcccttgactcagttttttggtatttcttttagtagaatattccagagcatgtggtcttttacctttccttggcctccagactgtgctactcctggatgmtcacttcctctaaactcatcttcatcatgatgttgaatatcattacttctttgcaacccaaagc

SEQ ID NO: 146400 - DNA, 522 bp, Homo sapiens
ttcagcagcagtgacatcccagacagcttgtctatagcccttgactcagttttttggtatttcttttagtagaatattccagagcatgtggtcttttacctttccttggcctccagactgtgctactcctggatgatcacttcctctaaactcatcttcatcatgatgttgaatatcattacttctttgcaacccaaagcaaggaattttgaaacgattatctctcacttgacaaagtaaatctatttatrtagccactggcttggcactacaaaaaaatcaagttcttaataaatgctgtcaatgattgtattttggggggaaatattaaccgcttttcaatttatgcataacctttccaggcccaattgtgtttcacagttataacctgtcatctctctttagtctcctttcccaaatccagcttgttctgtatatagtagctccactgaggagcagggaggaaagacggatgagtggagtacacatggtggatgctgccatttaggcaaaggcaggcat

SEQ ID NO: 146401 - DNA, 522 bp, Homo sapiens
ttcagcagcagtgacatcccagacagcttgtctatagcccttgactcagttttttggtatttcttttagtagaatattccagagcatgtggtcttttacctttccttggcctccagactgtgctactcctggatgatcacttcctctaaactcatcttcatcatgatgttgaatatcattacttctttgcaacccaaagcaaggaattttgaaacgattatctctcacttgacaaagtaaatctatttatatagccactggcytggcactacaaaaaaatcaagttcttaataaatgctgtcaatgattgtattttggggggaaatattaaccgcttttcaatttatgcataacctttccaggcccaattgtgtttcacagttataacctgtcatctctctttagtctcctttcccaaatccagcttgttctgtatatagtagctccactgaggagcagggaggaaagacggatgagtggagtacacatggtggatgctgccatttaggcaaaggcaggcat

SEQ ID NO: 146402 - DNA, 551 bp, Homo sapiens
gtcaacagtggaatacattattacttcattatatttatcgcccctgcgagtaggtatgttataaatatcagattttagtgaataactttaataaatgcatttgaagttaaagtgaagttgatatgggcattgacaagaatattagaaaaataagaaagttagtaaaggtgaagagagggaaggaagggaagtaaatttgcatacaagagctatactgagatctttaaagtaaatgtatttgttaagcaggtaaatggaaaatatcaagggaaagtaatggttagtattgtattcattgccacagatgtgatggctgagatgtgagaataaattatctagggtagtatgcatggaaagaaaaaaagcagatrtctatgaactaaatcccagaggacatccacaagagagaaagaagcgggagaagttgtaggaggtgaaaagtataaagaggctgggagaatacaatgtgtctgaagagaagttatactaggtgaaaaggtataaagaggctgggagaatacaatgtctctgaagaggagaagttatacgag

SEQ ID NO: 146403 - DNA, 551 bp, Homo sapiens
gtcaacagtggaatacattattacttcattatatttatcgcccctgcgagtaggtatgttataaatatcagattttagtgaataactttaataaatgcatttgaagttaaagtgaagttgatatgggcattgacaagaatattagaaaaataagaaagttagtaaaggtgaagagagggaaggaagggaagtaaatttgcatacaagagctatactgagatctttaaagtaaatgtatttgttaagcaggtaaatggaaaatatcaagggaaagtaatggttagtattgtattcattgccacagatgtgatggctgagatgtgagaataaattatctagggtagtatgcatggaaagaaaaaaagcagatatctatgaactaaatcccagaggacatccacargagagaaagaagcgggagaagttgtaggaggtgaaaagtataaagaggctgggagaatacaatgtgtctgaagagaagttatactaggtgaaaaggtataaagaggctgggagaatacaatgtctctgaagaggagaagttatacgag

SEQ ID NO: 146404 - DNA, 634 bp, Homo sapiens
tcaattcataacaaccacaaataaaacagcacaaacaaaaatgaagtcgtatcagaaagacccatcagagccatacaattacatggaagttgaacttgacaccaaatgacttttaggtaaagaatgaaattaagtcagaaatcaaaaaaagtttttgaaaccagtgaaaatggagacacaaaataccagaatctctgggaaacagctaaatcagtgttaagaggaaagtttttagcacttaatgtctatatcargaagtcaaaaagatcttaaattagcaacctaacatcaaacctagaggaactagaaaaaccagagcaaaccatccccaaacatagcagaaaataaccaaaatcagagctgaactgaatgaaattgaactgctaaaatccatataagagatcaataaaaccaaaagttgatgatttgaaggattaaataagattgatagactgtgagatagattaattttaagaagacccaaataaagacacttagaaatgacaaagctgacattacaacctatccaacagaaatacaaaaaatcctgagagtattatgagcacctctgtatacacaaactagaaaacctaggagactagataaattcctagaaatacacaacatctcatat

SEQ ID NO: 146405 - DNA, 585 bp, Homo sapiens
ctaacatcaaacctagaggaactagaaaaaccagagcaaaccatccccaaacatagcagaaaataaccaaaatcagagctgaactgaatgaaattgaactgctaaaatccatataagagatcaataaaaccaaaagttgatgatttgaaggattaaataagattsatagactgtgagatagattaattttaagaagacccaaataaagacacttagaaatgacaaagctgacattacaacctatccaacagaaatacaaaaaatcctgagagtattatgagcacctctgtatacacaaactagaaaacctaggagactagataaattcctagaaatacacaacatctcatattaagccaggaagaaattaaaatcctgaacagaccaataagttccaaaattgaatcggtaataaaaagcctaccaaccaaaagtcctggaccaaatgtattcaaagccgaattttaccagatgtacaaaaaagagctagtacctatcttactaaaatgattcccaaaaatttgagaaagagggacttctctctaagtcactttatgaaaccagcatcattctgatattaaaacc

SEQ ID NO: 146406 - DNA, 585 bp, Homo sapiens
ctaacatcaaacctagaggaactagaaaaaccagagcaaaccatccccaaacatagcagaaaataaccaaaatcagagctgaactgaatgaaattgaactgctaaaatccatataagagatcaataaaaccaaaagttgatgatttgaaggattaaataagattgatagactgtgagatagattaattttaagaagacccaaataaagacacttagaaatgacaaagstgacattacaacctatccaacagaaatacaaaaaatcctgagagtattatgagcacctctgtatacacaaactagaaaacctaggagactagataaattcctagaaatacacaacatctcatattaagccaggaagaaattaaaatcctgaacagaccaataagttccaaaattgaatcggtaataaaaagcctaccaaccaaaagtcctggaccaaatgtattcaaagccgaattttaccagatgtacaaaaaagagctagtacctatcttactaaaatgattcccaaaaatttgagaaagagggacttctctctaagtcactttatgaaaccagcatcattctgatattaaaacc

SEQ ID NO: 146407 - DNA, 543 bp, Homo sapiens
attacccaaaaggaaataaatcattctgtcaaaaagacacgtgcatgcatatgttcattgcagtgctattctcaatggtaaacacgtggaatcagccacgatgttcaccaatggtgaactggctaaagaaaatgtggtacatatgcaaagtgagacactatgcagccataaaasagaaaaaaaaaagaatcacgtcttttgcagctacatggatgcagttgaagaccattatcctaagtgaagcaatgcagagacagaaaaccaaatgctgcatgttctcataaacgggagtgaaacactgaagacagtgacacaaagtagggaacaacaggtgccgggtactacctgagtggggagggtaggagaggctcatggattggaaggctatctgtcaggtactgtgctcactacctgggcgacaggctcattcctaaatcaagcctcaacaacacacagtttccccatgaacaaacctgtacgtggataccctgaacctaaaaacattttcaaaaaagaaaaaaataataaaactttaaagatgaa

SEQ ID NO: 146408 - DNA, 543 bp, Homo sapiens
attacccaaaaggaaataaatcattctgtcaaaaagacacgtgcatgcatatgttcattgcagtgctattctcaatggtaaacacgtggaatcagccacgatgttcaccaatggtgaactggctaaagaaaatgtggtacatatgcaaagtgagacactatgcagccataaaacagaaaaaaaaaagaatcacgtcttttgcagctacatggatgcagttgaagaccattatcctaagtgaagcaatgcagagacagaaaaccaaatgctgcatgttctcataaacgggagtgaaacactgaagacagtgacacaaagtagggaacaacaggtgccgggkactacctgagtggggagggtaggagaggctcatggattggaaggctatctgtcaggtactgtgctcactacctgggcgacaggctcattcctaaatcaagcctcaacaacacacagtttccccatgaacaaacctgtacgtggataccctgaacctaaaaacattttcaaaaaagaaaaaaataataaaactttaaagatgaa

SEQ ID NO: 146409 - DNA, 543 bp, Homo sapiens
attacccaaaaggaaataaatcattctgtcaaaaagacacgtgcatgcatatgttcattgcagtgctattctcaatggtaaacacgtggaatcagccacgatgttcaccaatggtgaactggctaaagaaaatgtggtacatatgcaaagtgagacactatgcagccataaaacagaaaaaaaaaagaatcacgtcttttgcagctacatggatgcagttgaagaccattatcctaagtgaagcaatgcagagacagaaaaccaaatgctgcatgttctcataaacgggagtgaaacactgaagacagtgacacaaagtagggaacaacaggtgccgggtactacctgagtggggagggtaggagaggctcatggattggaaggctatstgtcaggtactgtgctcactacctgggcgacaggctcattcctaaatcaagcctcaacaacacacagtttccccatgaacaaacctgtacgtggataccctgaacctaaaaacattttcaaaaaagaaaaaaataataaaactttaaagatgaa

SEQ ID NO: 146410 - DNA, 543 bp, Homo sapiens
attacccaaaaggaaataaatcattctgtcaaaaagacacgtgcatgcatatgttcattgcagtgctattctcaatggtaaacacgtggaatcagccacgatgttcaccaatggtgaactggctaaagaaaatgtggtacatatgcaaagtgagacactatgcagccataaaacagaaaaaaaaaagaatcacgtcttttgcagctacatggatgcagttgaagaccattatcctaagtgaagcaatgcagagacagaaaaccaaatgctgcatgttctcataaacgggagtgaaacactgaagacagtgacacaaagtagggaacaacaggtgccgggtactacctgagtggggagggtaggagaggctcatggattggaaggctatctgtcaggtactgtgctcactacctgggcgacaggctcattcctaaatcaagcctcaacaacacayagtttccccatgaacaaacctgtacgtggataccctgaacctaaaaacattttcaaaaaagaaaaaaataataaaactttaaagatgaa

SEQ ID NO: 146411 - DNA, 593 bp, Homo sapiens
cttaataaaatgaaatggagagccgacgttatgtatctttacttcatataaagttttactttttcctgctttagcttataccttaatggctaatactgacaaaaaaatatctctttttggacaagtagaaggttagagaaatgcacatagaaaaatgctaatattcagtaaatggactttgcactgagatagaaagggcttttcttccacctcagccacctactgccatgttcaycccagaccttgccatgacctgtagctatatcgtgctgaacctttgaactcttatgtcttcagtcataacatttccatcacggcaatgagtttatattagcggagctaccacttttcgtcatcattactcttgtgaaatccacacttcccttcttaacttgcatggcctccacagtccacaatcgtaaatatttattttgatcaattcagtttacttgaccctgttcctccactacaattgcttggcagtccaacaacatgaattaaaaaacaatatttgtctattatgtaaccgtaaagaccttaggcgtttgaaaaatacataaaaacatacatacatacaaagtaatgattatata

SEQ ID NO: 146412 - DNA, 593 bp, Homo sapiens
cttaataaaatgaaatggagagccgacgttatgtatctttacttcatataaagttttactttttcctgctttagcttataccttaatggctaatactgacaaaaaaatatctctttttggacaagtagaaggttagagaaatgcacatagaaaaatgctaatattcagtaaatggactttgcactgagatagaaagggcttttcttccacctcagccacctactgccatgttcaccccagaccttgccatgacctgtagctatatcgtgctgaacctttgaactcwtatgtcttcagtcataacatttccatcacggcaatgagtttatattagcggagctaccacttttcgtcatcattactcttgtgaaatccacacttcccttcttaacttgcatggcctccacagtccacaatcgtaaatatttattttgatcaattcagtttacttgaccctgttcctccactacaattgcttggcagtccaacaacatgaattaaaaaacaatatttgtctattatgtaaccgtaaagaccttaggcgtttgaaaaatacataaaaacatacatacatacaaagtaatgattatata

SEQ ID NO: 146413 - DNA, 569 bp, Homo sapiens
aaaacctccaaagtgcaatgtgcctgaagccttcccctcttccaccatagggctttccctctcccctgagtttgagcggctgctaagctcaaatcatggcagctgccttgcttgttctggcaaacctgagtcaatagcctctgttctcatctgggtatgtccaccagcttctgccgagagcttcttttcagatgtcttagaaccctgaggctcccatgaagaatactgagatagtctccttgagcagaaagcacattaaaagagagacctagtcaacaccaagcatcaatcctaaacttgtgagtgggtaagtgagtcccagggtttkgggggcaatgcgacctggtgggacaccatgggtctgcagctgcatgagtgtccaaggaaagaccagcagaatctgtacagttgagtcaagtccagattgctgaccactgaaactgtcatgggcatttttgtttcaacgtgttaagtcttgaggttgctttttacacagcagatcgttctaacatttttcaatttacttgtgaggatataaactgaagagttatttgcatgtagctgataat

SEQ ID NO: 146414 - DNA, 569 bp, Homo sapiens
aaaacctccaaagtgcaatgtgcctgaagccttcccctcttccaccatagggctttccctctcccctgagtttgagcggctgctaagctcaaatcatggcagctgccttgcttgttctggcaaacctgagtcaatagcctctgttctcatctgggtatgtccaccagcttctgccgagagcttcttttcagatgtcttagaaccctgaggctcccatgaagaatactgagatagtctccttgagcagaaagcacattaaaagagagacctagtcaacaccaagcatcaatcctaaacttgtgagtgggtaagtgagtcccagggtttggggggcaatgcgaccyggtgggacaccatgggtctgcagctgcatgagtgtccaaggaaagaccagcagaatctgtacagttgagtcaagtccagattgctgaccactgaaactgtcatgggcatttttgtttcaacgtgttaagtcttgaggttgctttttacacagcagatcgttctaacatttttcaatttacttgtgaggatataaactgaagagttatttgcatgtagctgataat

SEQ ID NO: 146415 - DNA, 569 bp, Homo sapiens
aaaacctccaaagtgcaatgtgcctgaagccttcccctcttccaccatagggctttccctctcccctgagtttgagcggctgctaagctcaaatcatggcagctgccttgcttgttctggcaaacctgagtcaatagcctctgttctcatctgggtatgtccaccagcttctgccgagagcttcttttcagatgtcttagaaccctgaggctcccatgaagaatactgagatagtctccttgagcagaaagcacattaaaagagagacctagtcaacaccaagcatcaatcctaaacttgtgagtgggtaagtgagtcccagggtttggggggcaatgcgacctkgtgggacaccatgggtctgcagctgcatgagtgtccaaggaaagaccagcagaatctgtacagttgagtcaagtccagattgctgaccactgaaactgtcatgggcatttttgtttcaacgtgttaagtcttgaggttgctttttacacagcagatcgttctaacatttttcaatttacttgtgaggatataaactgaagagttatttgcatgtagctgataat

SEQ ID NO: 146416 - DNA, 569 bp, Homo sapiens
aaaacctccaaagtgcaatgtgcctgaagccttcccctcttccaccatagggctttccctctcccctgagtttgagcggctgctaagctcaaatcatggcagctgccttgcttgttctggcaaacctgagtcaatagcctctgttctcatctgggtatgtccaccagcttctgccgagagcttcttttcagatgtcttagaaccctgaggctcccatgaagaatactgagatagtctccttgagcagaaagcacattaaaagagagacctagtcaacaccaagcatcaatcctaaacttgtgagtgggtaagtgagtcccagggtttggggggcaatgcgacctggtgggacaccatgggtctgcagctgcatgagtgtccaaggaaagaccagcagaatctgtacagttgagtcaagtccagattgctgaccactgaaactgtcatgggcatttttgtttcaacgtgttaagtcttgaggttgctttytacacagcagatcgttctaacatttttcaatttacttgtgaggatataaactgaagagttatttgcatgtagctgataat

SEQ ID NO: 146417 - DNA, 432 bp, Homo sapiens
ttctgctagcttctagacattattaatttattagaaagaaaacaaaaaagaacacattgtcattctgttttatatagtatatggattatatttaaattttactatgaggtttaaaagtgcttagctaagaaaatgttaagaatacataaataacttaaaaaggaacaaaataatgttcagaataattctatcacttagccrtagagcatatggctagaggctttagtttcattcttcagtaaaaatatacaagtctgctattaaataatttccctatttctcaaagttttaaagtttatcaggtatattcacatatttaatgaccaaaagtaattaaaagtttataattcttcaaaagttaattgaaagaaacaaatatatttaaataactatttttattcattgttcagactgaatgataataattttacc

SEQ ID NO: 146418 - DNA, 580 bp, Homo sapiens
tattcatttacaatttgtgtagttccactaacaagaagtttctcctttcacttgrgtggcagcaaacacaggttaaaggcaaggatcctaaagacaatcttcccagactttgtgggtttaaatcaaggtgttaccatttattagcatcatactatgtgtatcacattacctttctgtatatcaagtcattcatccataaaagcgggaaaagaataatgccttttgggggaaactagtatgaagaataaatgtgacataccacctaaatcctgaagcgcaatttttggataacaatccatgtaagaaacttttttgttatgaattattctaaaataatgtttagtcacttgtcctaaaatatcctatgcccaatctgactgtcactggaaaggctttctaatatttattcctttacttttacaagggaaaataattctatgttttcgagttttctttgtaagattcatttcctaccttcatcactctgtttaccttctagacacaaaacatttgctactgtgtcttctaaaatatggtgcccagaacaaaaagaacgaaaagtcatttcagatacgctctc

SEQ ID NO: 146419 - DNA, 536 bp, Homo sapiens
ttaagatgaaaaagatgagaactagacgatgggcaaaaattaatgcatgtattattcaattttaagaattgctataaaatagtataatcagaaaacatggcattggtgaaatagacatactgatgaataggacagaacagagactgcagaaagaaaagacctacatgagtagagtcaattgatttcaacacatatatggagaaaactcaatgaagaatggattctttcaagaagtggtgctgggayatttgaacatcttgtgcaaagaagaaaaaaaaaaaaaaaagaatctagaccagaccttacacctttcacaaaaactaatccaaaatgaatttaagacataatacaagataaaaaggataaaacctcaggaagaggacacagaagaaaatttatatgactttaagcatgttgatgagattttagataaaacttaaaagcacaatctgtgaaagaaaaagtaataatttggcttattgaaattaaaaacttatctgcaaaaggcactgtaaagataaaaaggaggaaatatt

SEQ ID NO: 146420 - DNA, 544 bp, Homo sapiens
ctcacacaagctggcatcagagatggcaccacacatgaccattagaactaagggagatattatcagaggytcctcgttattataggagataagtgttacaaggtaggatgagaagagatacacagcgtatcaagagtgatgttttaatgaaaaggatatattatgtttctgtgttacatctgaaaggaaacaaaactatgacatattttaggcatgctgcccaacacatatggccagtgtgcataaaagataagcttggttgtgctacaaagtgctgtggcttagagacaggctggttgggcacagttctagagagcttgctaggggtggtgatgttggcgcacatcaagggaggaaggctgaacacagcagaggatggctatgtgtaatataaaacatcgcatcagatgctgcagagtaagcggcttctgcctctacacacagtgaagagccacatactggcataagaaatttaagattttcaaatgaacctgtttcatattatttcactttttcacatactctttatgcacttctttatttt

SEQ ID NO: 146421 - DNA, 594 bp, Homo sapiens
ttttttgtaaattacagacacacctatgtgtttatgtattatctggaactgctctctcactacagtggcagaattgagtagttgtaactgggtcataaggtttggctctctgtcaccacccaatttttactttgaattgtaatctccataatccccacatgtcaagagcaagaccaggtggaggtaattggatcataggagcagtttccctatgatgttctcatgatagtgactgagtgtcagggatctgatggttttataagcatctggcatttcctcagcttgcactctctctgtccaaccactctgtgaagaagctgtctgcttctcttttgcttcctgccatgatttaagattcctgagaccttcccagyaatgtggaactgtgagtcaattaaacttctttccttcataaattaaccagtctctagtatttcttcatagcagtgtgagaacaaactaatactgtaatttagtgcaccagtaccaaggtagtggggtgctgctataaagatatccaaacatgtggaagtgactttggaactgtgtaacaggcagaggttggaaaagtttagagggctcagaagaaaacag

SEQ ID NO: 146422 - DNA, 498 bp, Homo sapiens
aatattttttaatttaggctgtttattttaagcttctaaattaataagcctatgataaattttgattctattttttctttgtatggtgtgagataaaggtccagtttttatttttataatttttatttttcatatggctatcaagtagtctaatacactttgttaataaacaaggcaaaaaatattcyttttaaaaaatatctccatgaaatattaaagccacttttgtggaaaattaaatgactatgtatatcttcacagtaagccttgaaatcaggtactttaaggtttctgttttcttcattttcaaaattattctaggtctttcacatatgctaaaaaatttataatcaaaggttaaatttccacaaacaaaatctaatgggattttgatggtgattgccttaaatctgtagatcaatttcaagaaaaatgacactaacaatattgacttttttgatctatgaacatggcatctccctttctcacagcaagatt

SEQ ID NO: 146423 - DNA, 585 bp, Homo sapiens
ccttcaatacctctttaatacaatagtaaatcactctcttttgcctgttcttgtttataaaagtgggtcactctctagtccttgccattgagttgctgggggatgtatactgtactctatactcttgcttggcagttyaggttgaagtgaataaaagaaagagagattagccacttaggtcatgaaaagagtaagccaaaattttgtcctttgccccttaagattttaaaactgatttgtattgtattaggtttgtaccagaataacatatacatatcttattatttagtttattattccctggttctaataggtctgttatctcaccactgttagacaataagataacatatgctggtgaggatgtgaagaaaaaggaacccttatacattgttggtgggaatgcaaattaatatagccattatagaaaacagtttctcaaaaaaacccaaaagaactaccatatgatctaccaacttcactactagatagttatccaagggaaaggaaatcagtatgtcaaaggcatgcctgcacccccacatttattgcagcattatttacaatagcatgaaatggaatcaa

SEQ ID NO: 146424 - DNA, 531 bp, Homo sapiens
tccttcagtatggctgaattgacttaattgtacaaatagaaagtaatttgttgtatataggtctgctwtatcgatgtttaacttatataaataaaatatttacagtgacaaaattattttattcatacattttctttgaatagtatttctaagccccaaatacattgctcttaccatctcaaaataattgacgtctatggctcatcttaacagacatacaagggacgcttttaaccttaagcattaaaggtttaatatccccaaaagctgataacatctctgaaaagaggagagtgtaagaagctaatgtctgacaatctactaccagtaaatatgggttgaatttaaaaccataatcctgggtgagtcactttattctttgaatcagaaataataaaggtgtcaacaacaaccaaaaaaaaaggtttcttaaaaaagcattttgatttaactctattctgtttgtcaccagtagatactgtctacactgcattgaaatcagaaaatggatgacccatctcctgcatgaga

SEQ ID NO: 146425 - DNA, 607 bp, Homo sapiens
gaaacgcgacttcatacctctttacagacaacttggcaggaatgtgttagaatgtgggctccctgaaagcggaagaaggcctatttactgttgtatcctgtgtgtacagcaggaacctggtaaacagtggggctcaataaatatctcctaacagagggaatgaccaaaacatggacctcacacccaaagaaaatcatccttatttcaacaacatagatttggctggttatgagggtcttgaagtattcacaaatatttcagaaagtctaagggaaatcatgtatttaccttaagataagatggcacagggcaactaaaagtcaagtttgcttgacttctgcaaacatatcaagtcattgtaacaaggctgattgtttcaggaacatcagaagtttggatattatacaatgacatggggagggaaaggctcccttactcctctaagcccctcttgcggggttgggggggggatacattaatctaactgggacagatttactaattttagaaggtcaaactcacatagggctgtggctctctcaggctgtgttagatggggtatcactatgttgcccasgttggccttgaactcctgggcttaaagctt

SEQ ID NO: 146426 - DNA, 558 bp, Homo sapiens
aacaatcaaaccatagcacttgcactgcatctgctctgcactcttttagccctggatcaatcctagaacccgccttcctgcccgctatactcaggatgatgtgccggactggaaaaaattcatccaactgtgtgggctggtggtcttttacttgttaaatatctctacayagctcctcccccattcttcacagaagtgcctgttaatgtttgtattgctcctcaagacccttactaccatcctctcactctttcagaaaatgtctttactgcctgcttctcagagaaaatgtagctactaagcagcttcttactgctcacctgtagatgtgtctattcatgtgtcttccctcttgttttaaataaacagacatcctttctctcctcctgtcaaagagatattgtttccagctgtcttggcacatgcctgtagtcacagttacttggagggctgaggtgggaggattccttgagcccaggagttcaaaaccagcctgggccacctagtgagacaccatcttaaaaatcatctgttacgattaattttatggtgtcgact

SEQ ID NO: 146427 - DNA, 558 bp, Homo sapiens
aacaatcaaaccatagcacttgcactgcatctgctctgcactcttttagccctggatcaatcctagaacccgccttcctgcccgctatactcaggatgatgtgccggactggaaaaaattcatccaactgtgtgggctggtggtcttttacttgttaaatatctctacatagctcctcccccattcttcacagaagtgcctgttaatgtttgtattgctcctcaagacccttactrccatcctctcactctttcagaaaatgtctttactgcctgcttctcagagaaaatgtagctactaagcagcttcttactgctcacctgtagatgtgtctattcatgtgtcttccctcttgttttaaataaacagacatcctttctctcctcctgtcaaagagatattgtttccagctgtcttggcacatgcctgtagtcacagttacttggagggctgaggtgggaggattccttgagcccaggagttcaaaaccagcctgggccacctagtgagacaccatcttaaaaatcatctgttacgattaattttatggtgtcgact

SEQ ID NO: 146428 - DNA, 506 bp, Homo sapiens
ggcagacagggtttttcaggctggagaaccgttttcagactggaatctgagttctgtctagggagcagaggcatgccttaggcaacagcgtgtaaccctttctatctgagatcaaggactgtcaatgacttctagaatattcaagggttccttcaaaagaaaaagttctggagttctatcagatcttcccttttcctcttttcagttctctttctctcttcccttcccctcacctgtagtgataagataatgcatataagattgttttgttaaccatagtcactccacaaccttagaaagtaatgctggtttttgtgaatttttttctgaccagattccttgggtcttcctaaaargtaccagactggaaatgcagtgaatctttgagcaatgaaagcaatttgtggagtagctcttgacatgaaagaaagcctttctcttcatgcaaccatgggcatctttcctatgttttggaagtttctaaaagacttttgggttactgtttt

SEQ ID NO: 146429 - DNA, 584 bp, Homo sapiens
gtctgttatggccctattttacatgccaagataacaatggagatcaaaacaggcaaaaattcctgtccttgtagaacaaactttctagtaggggagacaagaaacaagttaaaaaattaaaatcatttaacatgttagtggtaagtgatgagaaaaaaaataaagcaggggagatttggagtgtgtgtaagtagtaggggaggtaagcagctacartcttaggcccagggaagccctctgtttgaaggtgacatctgaataaagatctgaaagaagtggggtgagggacctagctctctaggaaggcagcctactcatcagagaacggcaagtgcaagggccattaggcaggagagtgtcaggttaattgaaaaaacactggagagaccattgtgactaaagtggagaaaggtgagggcagagtgggacaagatcacaccaggccttgtaggtaattgtaaggacttttactgaatagagaatttcgtgatctggacttaacaatttctctggctgcttagttgagaattgactatgggggaaaggacaggatcagggagactaggaggcttttgtagtaatcc

SEQ ID NO: 146430 - DNA, 526 bp, Homo sapiens
agttatctctctttgctgatgctatgatgttatacttggaaaactctaaagagttcaccaaaagattactagacctgataaagatttttaaagtagcaattatgaaaatgctccaagaagtaagagtagatactctcaaaatgtaaaaaaatcataaagtctcagcaaagaaattgaagatataaagaagaaataaatgaaaaatttagaactaaaacacacaaaactgaaaaagaaagcgatcagtgggctcaacagataaaacttacacttttttctaacttagatgacctgaagacacatcaataaaatttacccaaagtgaacaacagagaagaattgttttaaaaaatgaatagagcgtcagggatctgtgggatgataccaaaagatctagcatttatgttgtcaragttccaaaaagggaggataaagagagcagcacaaaaaaaagtatttaaagatataatggcttagaaatctccaaatttggtgaaagacataaatctacagactcaagaagctc

SEQ ID NO: 146431 - DNA, 569 bp, Homo sapiens
tgagagcgagaacatgctaagaatgtcaggctaaatggaagagttggaggatggatgctttcctaaattaaatgataaaactgtcacagagacaaggtgtaatattgatgggcactagaactatttagacatctgttctaaatctctacaacaagcttagaatttaatgcattcttgacttgytttcctgataatttcatctttcaaaagggacgagaaggaatgacaggaactgctactctacactcaattctgaccagcaaggaaggacttgttggtgatgtttatatgatagaaatcttcgcttcaacaaatatacaacataaaatgcagtctttgccttcctgaagatgaaagaaaggagtcatgtcttcccagattctgtaatatagaaaaaaagaaagaacctctggttatagtagacatgtaattgaggctttaggaaagcaaacttcaaaaagttcacagaaatataattataaccccaaggtcagaggcaatagaaagcaatacatttttaaaattttgaactctgaaaaataaaactttatactgcagaaaccaatatg

SEQ ID NO: 146432 - DNA, 523 bp, Homo sapiens
gaggcactcaatttctcctttcttctccagcaaggaacatagtcttcatactgagaagggtagaaccaatatcacagagagggaattgaggcacaacccaaatgaggagagagtcagagaygacctggaatataggctttgcagaccgaatgaaagattataggtctcagaaccactgcctcttatctctggaaaatagaaaatgggccaggtgccagaaatctaagcaaggcaaaactagtttttttaaaaggaggaaaaaatggattatggaatttatagtgtgagcttagcattactttcagcaatactctagaatgcatattaagaaacatttgtaagctaataattaagacaagctaaacagccttcatattattttctggaagagctaaaagatggactatgggaataccaggcatgactaatctttttttcagcacaatgctttgcaaagatgctcataatattcatttgaacatgatggagggatgttactcggtttgtaaactagttgggggaa

SEQ ID NO: 146433 - DNA, 517 bp, Homo sapiens
aggcagaaaggagtgaaaagtgaggagaaaagagaatgagtggaaagagaaacattggtgtatcacctaatgggcaaaaattattgattctgactaccagagcagtaccagagacctgcactcccccaatttcatttaatttttgcctgagtatacttatgtgagccctgttgagatgtcagggtctgctactcagcatacatggcacactaaaagtatttggcatgaagaygatgaattttcaaactagttcaagagtaattgaaaacggaattctgcgaaaagctaacgtgtatccttatctccacgtaaacacatcaatactcattttaagcctgccagctatctatccgctaggaaacactcaataccgctccttgtacattgagcagatcattgagttttctctcaaaactaatagtacaatcatttgcaacaagaaattcttctttgtctgatgaaatagtaccagccctgagccgctcacttatatttcaggagatatgggagctcagtc

SEQ ID NO: 146434 - DNA, 490 bp, Homo sapiens
gaattcccacttccctcatttcttccccattttctcacatttcacttcttctctttctccctcaagcctcatgaatccagttctcaacaaaacatagttcctattctccccagtagtaacacattcccatagttaagctttcttttctccttmaacatactgaaatctttatccgttagggatagtttctgttaggagatatatcgcttcttcaaatgtaaatagttgataggtcttagctttactatatccccaaaggagggcttattaacaacaacagcatcaaaaaaaaaaaaaaattcaagggagagaagcttggagtctggagcctcatattgtttcaaacaggaacactaggcaaagcaaagcaaatagaatacttgaagtcaataagtagtgttttagtccgatgtttctcctgatcattgttagaactctgtgtgaaccttgagaggcagccaaataacagtcctctatgctggacttgaat

SEQ ID NO: 146435 - DNA, 501 bp, Homo sapiens
gaagggcataacataatcataaagggttcaattcaacaagaagacctaagtatcctgaatatatatgccacaaacacaggaacacccatattcataaagcaagttcttagagacattcaaatagacttaaastcccaaacaataatagtgggagtatgcaacatttcactaacagtattagacagataattgaggcaaaaaattgacaaagatatccaggacctgaactcaatattgaaccaaatggacatgatagacatctacagaactcttcacccaaaacaacagtatatacattcttcttattgccacgtcgtacatactctaaaatagaacacacaattggacatagaacaatcttcaataaatacaaaagaaccaaattgtaccaaaaactctctcaggtcaaagtccaataaaaatggaaatcaatactcagaaaatcgctcaaaacaatacaattacaaggaaataaaacaaccagctcctgaattaattttg

SEQ ID NO: 146436 - DNA, 594 bp, Homo sapiens
ttcacccaaaacaacagtatatacattcttcttattgccacgtcgtacatactctaaaatagaacacacaattggacatagaacaatcttcaataaatacaaaagaaccaaattgtaccaaaaactctctcaggtcaaagtccaataaaaatggaaatcaatactcagaawatcgctcaaaacaatacaattacaaggaaataaaacaaccagctcctgaattaattttgagcaaataatgaaactaaagcagaaatcaataagttctttaaaactaatgagaaataagatacaacaaccagaatattggaggcacagctaaggcaccattaagagggaaatttatagcactaagtgcccacatcaaaaagtaagaaagatctcaaattaaaagcctaacatacaactggaaaaccagggaatcaagagcaaaccaaccccaaagttagcaaaggacaagaaataaccaaaatcagagctgaagagactgaaaattaagaaccattcaaaaatcatgagatcaacagatacaagagatggagttttttgagaaaattgttaagatatatagaccactggactaatgaagaaaag

SEQ ID NO: 146437 - DNA, 597 bp, Homo sapiens
gtaccacgaacctaagataaatgtaaaatattgtctttatttgatgtgttgtatcgttaaacgcatttttaaaatgtattttatttaagttaatagagtttaaagtaggaatatttaytgatttaattaggaataacatgctgtgggttaaattttagttacattcactaaactatgttcatgggctttagattcccaattgcagtactggcactgtgaaattggtatgtatgtttatccttttaggcagtaaactttttaatgtaatgttgtgagatagttttcatggtgtttctacatgtcttgtgaccatttctgtcctgactacctttgctatacaaacatccttggaagatagagctagtgtcttcctcttgagcaaaggaaaatttgtttccataccagaactataaagataatgttttcctctggtgcaaatttgggcaggtttgctagtagatcccttataagatttggagtttcctaaacttggtactcctcagctgtgacatgaaatcactgggtacacagcatttatctgggccaactgcggcatcatccccacgggactttgggagcaacgagggacaatgcaag

SEQ ID NO: 146438 - DNA, 409 bp, Homo sapiens
tcaggcattacctgcttcccagctggttrgatgattatccagcttagcatcaggtagttaagttgtactgaggcaaaatgaaaacatgagaggataatgctagaggatccagctgggccacagacaaagttttcattcctctattcactcatgcattcattcagcacaaatttatcatgtatccagtataagctaaacattatcccagatacaaagatgaataaaacaatgcttctcaccctcaaaggattaaatctagtaagtgtagacaaacaaatgaacaaagttaatgcaaaagaatatcgagggtactctgatagaagtggggggtcagtgctactttgaacttgaatgactttttgaaaaattcccttccaattaagcaaggcagtcttttctatattcctag

SEQ ID NO: 146439 - DNA, 392 bp, Homo sapiens
ccagctggttggatgattatccagcttagcatcaggtagttaagttgtactgaggcaaaatgaaaacatgagaggataatgctagaggmtccagctgggccacagacaaagttttcattcctctattcactcatgcattcattcagcacaaatttatcatgtatccagtataagctaaacattatcccagatacaaagatgaataaaacaatgcttctcaccctcaaaggattaaatctagtaagtgtagacaaacaaatgaacaaagttaatgcaaaagaatatcgagggtactctgatagaagtggggggtcagtgctactttgaacttgaatgactttttgaaaaattcccttccaattaagcaaggcagtcttttctatattcctagg

SEQ ID NO: 146440 - DNA, 389 bp, Homo sapiens
ccagctggttggatgattatccagcttagcatcaggtagttaagttgtactgaggcaaaatgaaaacatgagaggataatgctagaggatccagctgggccacagacaaagttttcattcctctattcactcatgcattcattcagcacaaatttatcatgtatccagtatawgctaaacattatcccagatacaaagatgaataaaacaatgcttctcaccctcaaaggattaaatctagtaagtgtagacaaacaaatgaacaaagttaatgcaaaagaatatcgagggtactctgatagaagtggggggtcagtgctactttgaacttgaatgactttttgaaaaattcccttccaattaagcaaggcagtcttttctatattcct

SEQ ID NO: 146441 - DNA, 392 bp, Homo sapiens
ccagctggttggatgattatccagcttagcatcaggtagttaagttgtactgaggcaaaatgaaaacatgagaggataatgctagaggatccagctgggccacagacaaagttttcattcctctattcactcatgcattcattcagcacaaatttatcatgtatccagtataagctaaacattatcccagatacaaagatgaataaaacaatgcttctcaccctcaaaggattaaatctagtaagtgtagacaaacaaatgaacaaagttaatgcaaaagartatcgagggtactctgatagaagtggggggtcagtgctactttgaacttgaatgactttttgaaaaattcccttccaattaagcaaggcagtcttttctatattcctagg

SEQ ID NO: 146442 - DNA, 536 bp, Homo sapiens
tatcatgtatccagtataagctaaacattatcccagatacaaagatgaataaaacaatgcttctcaccctcaaaggattaaatctagtaagtgtagacaaacaaatgaacaaagttaatgcaaaagaatatcgagggtactctgatagaagtggggggtcagtgctactttgaacttgaatgactttttgaaaaattcccttccaattaagcaaggcagtcttttctatattcctaggatccttgctacatatctagacagaatctgggggatgaatactaatatttaaattaccagaatatacataattaaatgacaaattgtgtggcacatacaaaatttctcaaggacatatataagaggagaggaataatgaggaccagagtactaagatatattatcaaatcagaggcagaacaaaatttaaagagaggaaaataatctctacataaagaaatacatatatcagatttatactgacatmtgtatacagagatatgtatacacacgacaagcttaataggaaacaacatttc

SEQ ID NO: 146443 - DNA, 536 bp, Homo sapiens
tatcatgtatccagtataagctaaacattatcccagatacaaagatgaataaaacaatgcttctcaccctcaaaggattaaatctagtaagtgtagacaaacaaatgaacaaagttaatgcaaaagaatatcgagggtactctgatagaagtggggggtcagtgctactttgaacttgaatgactttttgaaaaattcccttccaattaagcaaggcagtcttttctatattcctaggatccttgctacatatctagacagaatctgggggatgaatactaatatttaaattaccagaatatacataattaaatgacaaattgtgtggcacatacaaaatttctcaaggacatatataagaggagaggaataatgaggaccagagtactaagatatattatcaaatcagaggcagaacaaaatttaaagagaggaaaataatctctacataaagaaatacatatatcagatttatactgacatctgtatacagagatatgtatacacaygacaagcttaataggaaacaacatttc

SEQ ID NO: 146444 - DNA, 360 bp, Homo sapiens
actatgcacttatctatcatttagctgcagccttcatttttgagcaagtatgatcatatttcagscttctctatagaaataatcttatttttctctttctatgatgaaataatgtagtaaaattcaaacattttttactcacgcatctctttcatcagatgaaactttatgtgtattcctaatacacaaatgatatgaaagcaaggatgttctgtttcaagtgcaggaggggaaagatgaaagaatgcccttctgttgtctgctctgcatctgtccctcaaactccaaactggccctcgagcagcctcggaggattttttggtaacttttaaaaaacccaaaccttaccccagacctatg

SEQ ID NO: 146445 - DNA, 360 bp, Homo sapiens
actatgcacttatctatcatttagctgcagccttcatttttgagcaagtatgatcatatttcaggcttctctatagaaataatcttatttttctctttctatgatgaaataatgtagtaaaattcaaacattttttactcacgcatctctttcatcagatgaaactttatgtgtattcctaatacacaaatgatatgaaagcaaggatgttctgtttcaagtgcaggaggggaaagatgaaagaatgcccytctgttgtctgctctgcatctgtccctcaaactccaaactggccctcgagcagcctcggaggattttttggtaacttttaaaaaacccaaaccttaccccagacctatg

SEQ ID NO: 146446 - DNA, 605 bp, Homo sapiens
ttaacatattacaatcataggttctgtcaagttattattccttcacatgtataattcattgtgcatatatatgatgattcataggaggtctagacacttcaagctgataaatctcatatatttaagcttttttaactgattatttgcagtatattttatagcaaagaaacaatatttttttctggtttaccagtaattctattgattttacaaccattattaaatatacattgtcaaatgtctacattataattgttaaatgtgaaatatagggaaactattacctagatgagtgaatatgaaactatatataccgctatagcaaagctacaaggaaaaactctttcaatgaaagcagctarcctagaagaagtgaaaccaagacctccagggagagaacccggtgaaataaaaaccctgcagcaagggagccttcagttagtcctgtccctgaacatataaattatgtgaaaaaatatattccacgttgttgaaactaaactattttgcacagttgtttgttacttgcaattaagagtcctgacagtttgcccatttcatcaaatgagcataaataatttttatataatactcatctactaaca

SEQ ID NO: 146447 - DNA, 605 bp, Homo sapiens
ttaacatattacaatcataggttctgtcaagttattattccttcacatgtataattcattgtgcatatatatgatgattcataggaggtctagacacttcaagctgataaatctcatatatttaagcttttttaactgattatttgcagtatattttatagcaaagaaacaatatttttttctggtttaccagtaattctattgattttacaaccattattaaatatacattgtcaaatgtctacattataattgttaaatgtgaaatatagggaaactattacctagatgagtgaatatgaaactatatataccgctatagcaaagctacaaggaaaaactctttcaatgaaagcagctagcctagaagaagtgaaaccaagacctccagggagagaacccggtgaaataaaaaccctgcagcaagggagccttcagttagtcctgtccctgaacatataaattatgtgaaaaaatatattccacgttgttgaaactaaactattttgcacagttgtttgttacttgcaattaagagtcctgacartttgcccatttcatcaaatgagcataaataatttttatataatactcatctactaaca

SEQ ID NO: 146448 - DNA, 591 bp, Homo sapiens
acaattacaatcatcttgacatggcgatgccacagtatcacatagtatgtgtttgtccagactaagacaactgctcaacaagatcacaaagcaatgaaaatggaaacttttctktctttccttttattcattaatcattaaagtatcagcactcaaaaggaaatctatctctcccccagagtaagttgcttatttttccaattgttttgattttggattaaagaactgttaatgcccagaagcacaagaacaacaacaaaaaatgtttacagtcttcacagtctctctgtcaatattatagtaacttacattaaaataagtaagagtaatatttacttggaaataataagtgcttgagaaaaaaatcaaagaaatggttaattcactaattaggcaaatatttgttgaacacctgtaattaccaaaaagattgttggtgttgaaaatacaacaataaacacatcaaagtctctgttccatggtgcagatagcttagtgctggaaatcaaaataagcaagttaacacaaaacaacttttatgatctgaaatatagtacacaaataaataaaaagcaaatagagaagattgga

SEQ ID NO: 146449 - DNA, 591 bp, Homo sapiens
acaattacaatcatcttgacatggcgatgccacagtatcacatagtatgtgtttgtccagactaagacaactgctcaacaagatcacaaagcaatgaaaatggaaacttttctttctttccttttattcattaatcattaaagtatcagcactcaaaaggaaatctatctctcccccagagtaagttgcttatttttccaattgttttgattttggattaaagaactsttaatgcccagaagcacaagaacaacaacaaaaaatgtttacagtcttcacagtctctctgtcaatattatagtaacttacattaaaataagtaagagtaatatttacttggaaataataagtgcttgagaaaaaaatcaaagaaatggttaattcactaattaggcaaatatttgttgaacacctgtaattaccaaaaagattgttggtgttgaaaatacaacaataaacacatcaaagtctctgttccatggtgcagatagcttagtgctggaaatcaaaataagcaagttaacacaaaacaacttttatgatctgaaatatagtacacaaataaataaaaagcaaatagagaagattgga

SEQ ID NO: 146450 - DNA, 604 bp, Homo sapiens
gtggccaattttaaccctgacttatgtgaatatacttgctagatattaactattgcaggtacagcataagatttattgaaaaagatgcatgaaggccaaaaaagatcatgttaaatagatagcaaattaaccagagatctggtttgtagattataagacaagctaagtttttgtgaaattacttataaaaatgaacttaagacaatgttatatagtggtacaaattggctagcaaataataataacagcctcttctamaatttttactgagttaagcctctttctaagctctttccatttaataactcatttaaactttccagtaatcctatgaagaatttacagacagaattccagtttttccaataagcaaatagaggcttagtgaaattaatgaactagtaagtagtacaccaagattttaaatccaggcaatctagtccaagaatctgtgacctgatatgccaatgattcaaagtacagtaataataaaatcaaatgattattagaaaaaatgtttttgttaatattctatttgtctttttgtaatgatacaagaaaaaatgaatttaacatatacatatttgcaagagctatattggtc

SEQ ID NO: 146451 - DNA, 666 bp, Homo sapiens
tttcttaataacattttattttctcaggtttactttatcataagaatatgatacaaaatatgtgttaatcaactgtttatgccatttgtaaatctcctggtcaatagtatgccattaagagttaaatttaaggggagccaaaagttatattcagatttttgactctatgtggggacagcatcccccaacccccaggttttttaggggtcaactatatattctttccttgttctgcgaattatctttctgagtggtctcatctacttatggagctttctattgttatttctattcttaaagcacttaaatcttaattttagatgtttgatttgagtctcaggctcaattttttagtctrtattacacttgtcaacctaaaagtatgttaagaatttcaaactcagtatgccccaaactaaattgttgatatgtattccaattccagttatcaagactactacttctattttctttcaatatcctaatggcatcatcttgtacttaaacactgaagcttgaattctgaaaaacaaatgtaacaacttctccttccaccttccagatttaatcagctgctaaatcctgttgagtctaccaaatccctctcctaatatttccccagctcttgctctaatttattagacaaattttattataccaattgtt

SEQ ID NO: 146452 - DNA, 478 bp, Homo sapiens
ctgaatatgtgcccaggcctttgcatatgcccaagatatatacatatgaataaggcacaatgtctgtccttaacaaacatacagcctagtgagaaacagagtgaacacaaattgtcaataaatttgtataggtcttataaataaataagcaaatgaaaacaaaacwtgccacacatgccgctatttaacttcttcagtagattggctctaaacctttcctgtattatggacacagacgcttgtagactctttctccttccatttttttcttctttttgtatagaattgactatttttttcgttggtcataaatttattcttttgaacttaatgtcttctaatttcctgttgttatttgaatattaaaagattccttttaatatgataaattgttcttgtagtaaacatacacttatttctccaacttcatatttgtcatttattgtcctgttatatttatttgcctactttaatactt

SEQ ID NO: 146453 - DNA, 478 bp, Homo sapiens
ctgaatatgtgcccaggcctttgcatatgcccaagatatatacatatgaataaggcacaatgtctgtccttaacaaacatacagcctagtgagaaacagagtgaacacaaattgtcaataaatttgtataggtcttataaataaataagcaaatgaaaacaaaacatgccacacatgccgctatttaacttcttcagtagattggctctaaacctttcctgtattatggacacagacgcttgtagactctttctccttccatttttttcttctttttgtatagaattgwctatttttttcgttggtcataaatttattcttttgaacttaatgtcttctaatttcctgttgttatttgaatattaaaagattccttttaatatgataaattgttcttgtagtaaacatacacttatttctccaacttcatatttgtcatttattgtcctgttatatttatttgcctactttaatactt

SEQ ID NO: 146454 - DNA, 478 bp, Homo sapiens
ctgaatatgtgcccaggcctttgcatatgcccaagatatatacatatgaataaggcacaatgtctgtccttaacaaacatacagcctagtgagaaacagagtgaacacaaattgtcaataaatttgtataggtcttataaataaataagcaaatgaaaacaaaacatgccacacatgccgctatttaacttcttcagtagattggctctaaacctttcctgtattatggacacagacgcttgtagactctttctccttccatttttttcttctttttgtatagaattgactatttttttcgttggtcataaatttattcttttgaacttaatgtcttctaatttcctgttgttatttsaatattaaaagattccttttaatatgataaattgttcttgtagtaaacatacacttatttctccaacttcatatttgtcatttattgtcctgttatatttatttgcctactttaatactt

SEQ ID NO: 146455 - DNA, 422 bp, Homo sapiens
tgtctgcttatttaaacaaaacagtttcagcagtccaatggcaatcctcagggagaagtgcaggtgcaggctataggcaaaagcacagagattccagaggagaaaaagaaggatgcacagaaatgactagagacagagacggtttcttgatggagcagtgatagtgcttgctatagactatacctggttaaaaaaaattattggggtttcagataatgtgcttttatggaatgatgaatcttcagttggttatctgtcctacttggggattaaaataataaaaatgctgttagtatcaaggaattttcatatggaagaccatggcttgcagggagaggcagcatagaataatagttaaaagcatagactgtgaaacctaactgcaytggtcaaatatcatctctgtgatttctagagggtga

SEQ ID NO: 146456 - DNA, 575 bp, Homo sapiens
gtaggtacagatctaatctgaagcacaatgtcttttgcttagtaaaacactacgattccatacatcccttttgagagcaagagagtaggaggyagactagaaggagaaggacgaggacatgacttgtaattaggaaatgtgcatcattctgtcactcaacctgtgtgtcccccatactccttcctctcagtctttcctgtgactacatatatatttacttgctgcagatcgcatttagacacaaacttatccagaatgtaagtccttttcagtgctagttcaaccctcttaccagggctctaggggaattgcaaatgcacttccttattgtggcaaacaaccttccttcttttcaaatgttattgccagtttactcatagatagatgttgctcggcgattggttctcagttgcttctgtgtttggatgtgacccctttctctggcttttcacaagaattgaaatcagtggcgcatcataagccaaggaattcacagatccagctctacaaagtcatatgttaactgacctaagctatgtcactcttcagccaaagctctttttgacaaatttggg

SEQ ID NO: 146457 - DNA, 569 bp, Homo sapiens
gttcaaacccaaaaagattggagaaggtggaggatttggggaggctgcctattttatgtgaggccctctcttttctacataccaaggatamaacagggaagaaaataggaaaactccgtgttttcatggagcttacactctcatgggaatgaaatttaaaggcagcaagaccaattttaggaaaaacttacccactcattctaactgtaagcaaaagatgacaagtggtgcatttaggcttctaaatcttaggaaacacaaggtctttataaactcaaaaagagtgaagacaatggccacccaggagcagagtggcaggttggtgagtggacaatgagtcagcaaggatccctgacccccagtgaggtctggactagacgtccctggcccatccatggaggagctggtgatctcacattctcatttctaatgtcattttctctgttggacatagaaacacatggatgtgctgagcacagtgcccagggacaaatgctgatattacagctgctggagtcaacacctcttctttctaccctttcttgttcaaggctgtgaagataaatgta

SEQ ID NO: 146458 - DNA, 591 bp, Homo sapiens
cactgtctctggccaatttgataatatatcttcttcagtattttgctcgttagaagacaatgtctcagaaaggagtaggggtattttagccactagaaagaaatatcctttactgaaaagtaacatattttctgtctggtttgtacatttcaatgagcttgaatggcaaaagttcagcattcytgttttcagccaactctggtgcactaataaagctaagtgtaagatcctggctggtagcctaccacaaatcaacttcacggttgctcctaagtcatctatattaccatagaagtttattttaaaaaccatctctccattgccataggaataatcttgggggccataatttctaaaggcatttacacaaactttgcagaaggtacttaagaaatgtgtttacattggaagcattcatatcttcagaatttccagcatttcacttgtgatagagcacacaggaacagaaatagaacgtgagaaataaggttgtgtattaggttgctagggctgccatcacaaaataccacagcctcagtggcttaaacaacaggcatttattttctcacagttttggttgcaggaaggtct

SEQ ID NO: 146459 - DNA, 558 bp, Homo sapiens
tttctccttttcaggtctcaaattttaaaacagaatcataaaatgctagagccaggaggagcctctggagtcctgtcacatccagccctctgttttaaagatgaatagatcgaccaaggcagagactcaaatacatattctaacatttggtaccagattgcgaagtcattggaaccragcataaaaagctatcaaggagagataaaagatctgaaggaaaggttgcgtatcaatttctggaaagctggactaaacttttaatggaaaacaattattttataaaaaggtaaagagaaaaggtgaaattttaaaaataggttaagtaatacttcaataatatttaacctacatatcaaatatactattatttcaccatgtagtcagtaaagacacctgtgaataagatcttttgcattctttttctgtactaaatctttgagatctggtgagtattgtacagttatagcatatctcaatttggacaagccatgtctcaagtgcttagtagccacatgcagccagtggctactgtgttggatggtgcagaattgaaaaaca

SEQ ID NO: 146460 - DNA, 572 bp, Homo sapiens
tgttattactgtctcagatttacacctgaggaaaccaaaatatacaggtcacaaaacccaccagtattacacagtgagtcattggcagagctggagtttgaacccactgctattcggcttcagcacctgagctggtaatcactaaactatgtgacttctcttacataaaaatatcttcccagaattcaggaaaggctaattcgccactgcacactttccaaggactgcacaattctttggtggtgttggttatgcatgacagtaactgttggaagggactggtgtcggtcattggcgtagggcagcagggtgagtatcaggaaaargcaaaaggacccaggtgatctgcaagtccttgagcccccacctctagcactgcccttaaccacctcggcctctgccagggaaccaggaagaggatgggcaaataggagggcaattctgggctgctttgggtaaaataaaaagggggcaggaaatgaaaggattcaggctgttaaaagaagcgactcaacagatcttgccttatcctttcttccttactggaaggaagcgggtcttactgtcgcatg

SEQ ID NO: 146461 - DNA, 572 bp, Homo sapiens
tgttattactgtctcagatttacacctgaggaaaccaaaatatacaggtcacaaaacccaccagtattacacagtgagtcattggcagagctggagtttgaacccactgctattcggcttcagcacctgagctggtaatcactaaactatgtgacttctcttacataaaaatatcttcccagaattcaggaaaggctaattcgccactgcacactttccaaggactgcacaattctttggtggtgttggttatgcatgacagtaactgttggaagggactggtgtcggtcattggcgtagggcagcagggtgagtatcaggaaaaggcaaaaggacccaggkgatctgcaagtccttgagcccccacctctagcactgcccttaaccacctcggcctctgccagggaaccaggaagaggatgggcaaataggagggcaattctgggctgctttgggtaaaataaaaagggggcaggaaatgaaaggattcaggctgttaaaagaagcgactcaacagatcttgccttatcctttcttccttactggaaggaagcgggtcttactgtcgcatg

SEQ ID NO: 146462 - DNA, 390 bp, Homo sapiens
aggtttaattgactcacagttccacatggctggggtggcctcaggaaacttatgataatggcagaaggcgaagggcaagcaagcaccttatttacaaggtgacaggagagagcgtgagcaaagggggaaaagcccttataaattatcagatcacatgagaactcagccactatcatgagaactgcatgggggaaactgcctccatgatccaatcatctccctccctcaacatgtggggattacaatttgagatgagatttgagtggggcmacagagccaaaccatatcaagcagattatgcttcctagtgtgggtgtgggtgggcctcatccaatcattggaggcattaacagaacaaagtctgacctccccaagaacaagcaggaattc

SEQ ID NO: 146463 - DNA, 658 bp, Homo sapiens
ttgtttagtatttttctgtcacttttttaactttgtttaccatgcttttattaatacagaattttttttcttaatgtttatattsacaaagatgtagttaaatgtttttctttatgtcttcagggtttatttgttgtctttaagagcttcccaattaatgtattataaaaatgcacattttaatttacccactttgaataataattttatgttttcctcaaacccagatgacaattcttttgtaaatgtgtgatgtatttacataaattacattttctgcaataagatatgctaatttgccaatacattttatgagaagccgaacttctttttcctaactggttcaaactgtcacctgtaccatagtctaaactcacatttacataaaagtcttcttctggactacttgctttgtttcattaatctatgtgctgctttcagagccaatgtcacattgttcagattccaatgtctttttagcatatgttgatatctggaacggtgagtagcatacagttgttcttaccccttttttccccaaaaacagaaaaaaatctatttaaccaagggggcggggcaatgtctttttcgcaaaatgttggtttaaatgttgtaaagctttttgtcttttttttaggtacagattttcaagaaggat

SEQ ID NO: 146464 - DNA, 658 bp, Homo sapiens
ttgtttagtatttttctgtcacttttttaactttgtttaccatgcttttattaatacagaattttttttcttaatgtttatattcacaaagatgtagttaaatgtttttctttatgtcttcagggtttatttgttgtctttaagagcttcccaattaatgtattataaaaatgcacattttaatttacccactttgaataataattttatgttttcctcraacccagatgacaattcttttgtaaatgtgtgatgtatttacataaattacattttctgcaataagatatgctaatttgccaatacattttatgagaagccgaacttctttttcctaactggttcaaactgtcacctgtaccatagtctaaactcacatttacataaaagtcttcttctggactacttgctttgtttcattaatctatgtgctgctttcagagccaatgtcacattgttcagattccaatgtctttttagcatatgttgatatctggaacggtgagtagcatacagttgttcttaccccttttttccccaaaaacagaaaaaaatctatttaaccaagggggcggggcaatgtctttttcgcaaaatgttggtttaaatgttgtaaagctttttgtcttttttttaggtacagattttcaagaaggat

SEQ ID NO: 146465 - DNA, 526 bp, Homo sapiens
ttttttaaacagcctctgcaagaagttaaaaatagttttgctgatttagagtcatcctcctaagaacctagtaactagtcaattttggagttaagtagcatttctttttttctgtgaatccgagacaggggttatgtttgagatttttttttttttttttttgatggaatatcgctctgtcacccaggctggagtgcagtggcacaatcttgactcactgcaacctccacctccygggttcaagcgattctcctgcctcagcctcccaagtagctgggactacaggcacttgccatcacgcccagctaattttttgtatttttagtagagacggggtttcactatgttggccaggctggtctcgaactcttgagctcgtgatcccccgctttggcctcccaaagtgctgggattacaggcgtgagctaccgtgcctggcttttgagacgtttattgtgatgtttcattggaatcaatacccagtggggaaagggaaagtgggaggagctgctgacctgacaatttt

SEQ ID NO: 146466 - DNA, 492 bp, Homo sapiens
tcccctgtgggctctttccaactacaacaatgaaagtgtcactcttggactctccctaaattcatctgtaatcattttttcacttactgtaagttctcatggatacataatagttattcagctactgctcggttgcaatagctcaactacttatatggagctcccaggatggtacggtttgaatgtgtcccctccaaaatttargtgttgccaatgtcatagcattggtgtggtgtttggcaggggattaggccatgaggcctctttcctcatgagtgggattaaggtccttatgaaagaggcttcatggggagttggctcgtttgccttctgccttcctccaggtgaggacacagcatccctccccactgtgggacgcagcaatgcgactgagagcagcgctatccaaacaaccaaatctgctgatgccttgatcttggacctctcagctccagaactgtgagaaaattgatttctgttctttctaaatta

SEQ ID NO: 146467 - DNA, 492 bp, Homo sapiens
tcccctgtgggctctttccaactacaacaatgaaagtgtcactcttggactctccctaaattcatctgtaatcattttttcacttactgtaagttctcatggatacataatagttattcagctactgctcggttgcaatagctcaactacttatatggagctcccaggatggtacggtttgaatgtgtcccctccaaaatttaggtgttgccaatgtcatagcattggtgtggtgtttggcaggggattargccatgaggcctctttcctcatgagtgggattaaggtccttatgaaagaggcttcatggggagttggctcgtttgccttctgccttcctccaggtgaggacacagcatccctccccactgtgggacgcagcaatgcgactgagagcagcgctatccaaacaaccaaatctgctgatgccttgatcttggacctctcagctccagaactgtgagaaaattgatttctgttctttctaaatta

SEQ ID NO: 146468 - DNA, 492 bp, Homo sapiens
tcccctgtgggctctttccaactacaacaatgaaagtgtcactcttggactctccctaaattcatctgtaatcattttttcacttactgtaagttctcatggatacataatagttattcagctactgctcggttgcaatagctcaactacttatatggagctcccaggatggtacggtttgaatgtgtcccctccaaaatttaggtgttgccaatgtcatagcattggtgtggtgtttggcaggggattaggccatgaggcctctttcctcatgagtgggattaargtccttatgaaagaggcttcatggggagttggctcgtttgccttctgccttcctccaggtgaggacacagcatccctccccactgtgggacgcagcaatgcgactgagagcagcgctatccaaacaaccaaatctgctgatgccttgatcttggacctctcagctccagaactgtgagaaaattgatttctgttctttctaaatta

SEQ ID NO: 146469 - DNA, 474 bp, Homo sapiens
tgaccatagttatttcataacatcttttcctaagtgattgaaaagacacatatgtttagtctattaagagagacagcaggcacactctgggaataggagagagtttcagttacaccaatttaggagataactctcaccccggtcaccacctcgtcttttctgttaagctggcttcagactccagtatctaatggcagcacgactcctcagagagcttcagaagcaagtggkagctcagctactgaccagccctggatgtctgtgacacagtatcatgtttcaggacaacgacacaaatgctagtctcatttgatgacacaactgcctattttgtttatgtgttatttcattttctttttaaaaatggcgcaatctatttttctaacatctgggcatacattttaaattataataaacaatataaaatcttcccattctaatgagcatggaaatcaagctctaaaacatgaagag

SEQ ID NO: 146470 - DNA, 583 bp, Homo sapiens
gtatgttatcattgatttgatgactaacaaataataaatgaatcctcataaaataaatctacatatgctaattctaacaaatgcaaaggctaaaggctatcatggctggcctacccagaaattctgattgcccgtagctgctctttagatttgagataatatccaacaaagccttctgtttcaaaattgaattctgtagcctgaaatgcaaggcatcttgagcccagtaatttatcacctaccacctacagtccaataaaactagctggccaaatttctatgacagcaagtrtaagatgatggaagccctaagcttctgtatttgtagattccaaagttccctcaaaggaaaaaggcccagttgactaacagtgctctataaatttcctttcactgttaagatgccaaattattcttctatttcaatgtcttgtgcctaggattggcatgaatgttttcatgctacctcatcagaagtactctttagtatttctatgtattacaggtcaaaatctctctacaaagctatgtattctcttttgttacttgtaggctcctggcaatatatgttgtcaaaacaact

SEQ ID NO: 146471 - DNA, 514 bp, Homo sapiens
ttccctttgtaggagaggaaatatgatttggtgacctaacaggttgttgttcccaacttcaacagctaaaaccttagactcgataagggctccctcatgaatcctataacctgtctctgcaggcccaacataaaacaacrtgagcagcgtttcagaaaacacgaattttcctccggtgatcagattttcacacagactctgtctccttacaaagtagtcctttacccctctttcactctaacgttgcaggtggcagcagtaagcattcatttcaagggcagagggatcttttcattcagtcaggcacttttaaaccacaggactgttctccctgtaccactgccaaattcttcccggcaggagtttgagggaagcctaacagggcagagatgtatcttgtttgctggctggatttgttctcacctaacacagctaaggcaaagccatctattattgtctcctggttttgaatgttgtctgaggaatatggatagatagctcaagttccagcaaa

SEQ ID NO: 146472 - DNA, 514 bp, Homo sapiens
ttccctttgtaggagaggaaatatgatttggtgacctaacaggttgttgttcccaacttcaacagctaaaaccttagactcgataagggctccctcatgaatcctataacctgtctctgcaggcccaacataaaacaacgtgagcagcgtttcagaaaacacgaattttcctccggtgatcagattttcacacagactctgtctccttacaaagtagtcctttacccctctttcactctaacgttgcaggtggcagcagtaagcattcatttcaagggcagagggatctttycattcagtcaggcacttttaaaccacaggactgttctccctgtaccactgccaaattcttcccggcaggagtttgagggaagcctaacagggcagagatgtatcttgtttgctggctggatttgttctcacctaacacagctaaggcaaagccatctattattgtctcctggttttgaatgttgtctgaggaatatggatagatagctcaagttccagcaaa

SEQ ID NO: 146473 - DNA, 546 bp, Homo sapiens
ttaaatttacagaaaagttggaagaactmagaacacccatatatatattctctaaattcaacaatttatatttgctacatttgtattttaaattatttatatttatctatctgcctatattcttattcattaatcaattaatctctttttttggtgggagggatcttttaaattaagtttcagacatttcggctgagtgcggtggctcacacctgtagtcccagcactttggaaggccgaggcagaaagattacttgaggtcaggggttcaagaccagcctggcctacatagtgaaaccttgtctctactataaaaaaaaaaaaaaaaaagaaaaaggaaaaggaaaaataaaccaggcatggtgatgcatgcctgtagtcccagctactcaggaggctgaagcaggagaatcacttgaacccaggaaacggaggtggcagtgagctgagattgtgccactggactccagcctgggcaacagagtgagtgagacttcatctcagaaataattaaataaatagaaagacctcagtactttatacacc

SEQ ID NO: 146474 - DNA, 522 bp, Homo sapiens
ctggggctagagtagtgtgctacccttctagtgttatggcccttgcagcaattgctgcaatatctctcctcatttcttctcatttcctaccagcacctgccatcataaactcaattagtagccaaaagtcaaggcagcctgtatgatgcaagccatggatgtttaccttgggataaagcacaccagctaagtttgaaaaatgtatttgaaaggacaaatagaaactaccagcacaataccgtgaatttaaatgagctactgtcttggtccatttttatttgtcttttaaatgttctcaattttaattgactttcttaccatgtacttctttataatgtctatgtattcatacttttggtttactaattatttggctcactyatgattcatgagttatgttcactttgtgattgattattttgcttcatttcctgtaaacaactgcctgattttttacaatttcccaattctgctttctaagttgaagaatctctttgaatcggatcttcattgttttgatag

SEQ ID NO: 146475 - DNA, 522 bp, Homo sapiens
ctggggctagagtagtgtgctacccttctagtgttatggcccttgcagcaattgctgcaatatctctcctcatttcttctcatttcctaccagcacctgccatcataaactcaattagtagccaaaagtcaaggcagcctgtatgatgcaagccatggatgtttaccttgggataaagcacaccagctaagtttgaaaaatgtatttgaaaggacaaatagaaactaccagcacaataccgtgaatttaaatgagctactgtcttggtccatttttatttgtcttttaaatgttctcaattttaattgactttcttaccatgtacttctttataatgtctatgtattcatacttttggtttactaattatttggctcactcatgattcatgagttatgttcactttgtgattgwttattttgcttcatttcctgtaaacaactgcctgattttttacaatttcccaattctgctttctaagttgaagaatctctttgaatcggatcttcattgttttgatag

SEQ ID NO: 146476 - DNA, 527 bp, Homo sapiens
aaggaaaattttaaagaagccacaagggggaaaaataccttaacctatagaygagcaaagataaaaattgcatctgaattttccaaagaagccacacaaacaagaagagagtggagtaaaatatttcaatttttgagagaaaaatactcaccaacttaaaattctgtattctgtgaaattatcctttaaaaaatgaggaaagcatttctcagacaaataaaaacagaattagtcaccagcagacctgccttgaaataaatttacaagagtctcttaagagaaagaaaatgatatacatcagaaattcagatccacataaagaaataaagagcaccagagaataaataagttttctttttcttaattgatctgacagataacagctacttggaaacactaatagcaaaatgtatccaagtgtgtatgtgtgggtttgtgtctccccttctcattcatgaatatcattgatatgtttcaaatcaccataaatgtacctactaagtatagtcaaaagtccaaaagttctt

SEQ ID NO: 146477 - DNA, 527 bp, Homo sapiens
aaggaaaattttaaagaagccacaagggggaaaaataccttaacctatagacgagcaaagataaaaattgcatctgaattttccaaagaagccacacaaacaagaagagagtggagtaaaatatttcaatttttgagagaaaaatactcaccaacttaaaattctgtattctgtgaaattatcctttaaaaaatgaggaaagcatttctcagacaaataaaaacagaattagtcaccagcagacctgccttgaaataaatttacargagtctcttaagagaaagaaaatgatatacatcagaaattcagatccacataaagaaataaagagcaccagagaataaataagttttctttttcttaattgatctgacagataacagctacttggaaacactaatagcaaaatgtatccaagtgtgtatgtgtgggtttgtgtctccccttctcattcatgaatatcattgatatgtttcaaatcaccataaatgtacctactaagtatagtcaaaagtccaaaagttctt

SEQ ID NO: 146478 - DNA, 582 bp, Homo sapiens
tgagagaaagtaagagaagagaacaaaagaggctctacttaactgcaattttgattttccaagttaatatcagtatgacatattccaagttgtcatgatgtaagtctccgtggtatgtgtaatactcaacttggtcaaactcctgacaggtaataaaatactacgacaattcaagggcttttttagaattttcagaagctaatatttttaatattggtctggtataattaaatatagatggctgtctattttacgtaaaaatactctcttaaagatgcccaccaaacaattactggcgagtactataaaaccctttgttakctaggtcctttacaaatctaaataaaatataatgcatgtttcaacccttagagaacttacaaagataaattaaatgaaatcatcagtaaataatttaatagtaacttaatttagttaggaataggaaaatgaaatggagatattcctgtggagatactgtagttcatttatatatcgtcacatccactatgttaaaaacaattaacaatgatatattaaacatcaagataacattcaaaatgacctatagagaagaaaaac

SEQ ID NO: 146479 - DNA, 613 bp, Homo sapiens
aacgtcgctaatattaaaaacaactttatcattctgaaaggcaagttatttcaagcctgagtctctctggaaaactttgataaagtcattttgattctggaacatgttgtttcttgctaagttttgccagagatcaccagctctataatatagaaatttcattgagtaattaggattttataagaaattaccatcataaatatcatattttattgttactttatgacatacttactatgttctatatttggttttagatgtattaatactgaatataccctcaatatggcatcactacgaattagattcagttaaccacagcaaaaaggaatagtaacrtcaatttaaattttcctagaatattgtggcaattctatgtttacattcaaaatccagtaacaaaaaattgattgcaaaactcatctacaatttagaatatggggagattaaactaattttatctctaaataaactcaaagttgcattttaatatcaaaactcatcagttcccttcctgctttggtatcattagcctttacagcttatccccagagaatgaagaaatggaaaccctgagcagaccaaaaatgggttccaaaactgaatcagcaaa

SEQ ID NO: 146480 - DNA, 613 bp, Homo sapiens
aacgtcgctaatattaaaaacaactttatcattctgaaaggcaagttatttcaagcctgagtctctctggaaaactttgataaagtcattttgattctggaacatgttgtttcttgctaagttttgccagagatcaccagctctataatatagaaatttcattgagtaattaggattttataagaaattaccatcataaatatcatattttattgttactttatgacatacttactatgttctatatttggttttagatgtattaatactgaatataccctcaatatggcatcactacgaattagattcagttaaccacagcaaaaaggaatagtaacgtcaatttaaattttcctagaatattgtggcaattctatgtttacattcaaaatccagtaacaaaaaattgatygcaaaactcatctacaatttagaatatggggagattaaactaattttatctctaaataaactcaaagttgcattttaatatcaaaactcatcagttcccttcctgctttggtatcattagcctttacagcttatccccagagaatgaagaaatggaaaccctgagcagaccaaaaatgggttccaaaactgaatcagcaaa

SEQ ID NO: 146481 - DNA, 569 bp, Homo sapiens
acccactcacatgaaactatgctcttagcttagactttggttgctctcctcttttccattgggtgcattcctctcttctagtgaggataagactccaaatccatgcagctcttaaaagaaggatcatgaatttctgatgtcccaaaactccaagagaataagaatcatacaggattctagaacactgctaggcaggaaaagtgagaacagtaatggcaaaagtctgacactgaaggctcccatgagaactccaggcgtggaggagtaggatctgtggtgtaaaatctaccctctttggttacaccgtaagttgagtccayaagaattgtggggaaatgggtgcacccctcttgtataccagcttagaagagttaggttgaaaataaaagcactcttctcatatcttatttcaattttcttagtttagagtataagaatgcaacaaagcatcgagttattcataaaatactgtatttggtgtattagtagttaatagttactattaatttttgtttgtttgtttttgagatagttttgctcttgtttcccaggctagagtgcaatggaat

SEQ ID NO: 146482 - DNA, 497 bp, Homo sapiens
ctttcacagcagataattctaagttacaggatttcattaagaaaagaaaaaaaatccccttccaacaatgtggagtgctggaaatgttatttgtttagcctgttaatttgtaattttctaaaggtattgcatttaaggattttacttgtttacattacataaaaattacataatattttgaatgttatttatctgaagctaatgctcatctatatatgttcactggaggaggaaaaaaagcaaatgatacatttcatcttaatgtgtcaagacaaggaggktcacttacaataaaaataagaaaaaaaaggttgagttacataaataaatgacgtatgaaaagtgtagctttaaataagcaagtcaatgaattctgattttgatatgttataaggtactggtgatctaaggaaagtctcctttaatttaatcttttcattgttttttctactctaaccagaactcaattagaacagacatctctcagttcccaggta

SEQ ID NO: 146483 - DNA, 426 bp, Homo sapiens
caaatcttattgttgtctaggaaattgccacagctaccctaaccttcagcctccaccaccwaatcagtaagcagccaccaacattaaggcaagactctatcagcaaaaaaacgatgactcactgaaggtttagatgattattcgcattttgaatcaataaaacattttaaattaaggtatgtacattgtttttgagacataatgctattacacacttaataaccacagtggagtgtaatcataacttttatatgtatagggttatataaacccagtgcatatacaagtttattttattgcaatattattttttcaataattattgcaatattcactttacaataaatttgcaactttattacaatattcactttattacagtggtctggaactgaacccacaatatctctgaggtatgcctgtgtt

SEQ ID NO: 146484 - DNA, 603 bp, Homo sapiens
agtttttaaataataaacttacattgacagaaactttaatgcacagtyagattggagagggctgaagtggtctctctagaggccaagagactggatgagtccccatggcaacatgatttcaagtcagtgaaataaccatgaaatcaaagagtaagggagcagctgtgggatctagcacatttagcacaactaatcaaaccgaggtcagcagctggtataagctgtaaagggaaaaaataaactccagtgacaggttcttaaaatattgtccacagacacgtaaaaacaacggtattgtgttgaggtattgcagaaagggtgttgctcagttcagcaatgtttgccaccatggacagctaaactgtcttaatgagcagcttccaaaatgaaatataatagacagaagagatggactgttggaaaaataagtatggcaactccaaatgtcgtgctgacaataaatcctaatatctcctgttcattctatggatggatttattgaactacatttcatcccatttcatacctaagactacacaagttattttaaatcactttctggggaacactgtgttttctaaactatgccataaaaatttactt

SEQ ID NO: 146485 - DNA, 486 bp, Homo sapiens
ggcataaattagttaaatataacaataatagcatctatcttgaaacagtaacagctaatctttattgaacacatgtgtgtgaaagtaatgctcaaggaatgtctagaagctatttatattaaagttcttatgttagtatttatttaatcaacccaacgacttctcccaatcagcaaatgaggaaamcagtgcatggagagattaaatcgcttacagaagtgacagatttctggtcacttttgccatgttctaatagttagaaacaagtaacaggctctgcttctgttcaaaggattattacacaggaacgtgactaccaaattgagtcacgaattgagttcccaatttgagtgactaccaaattgggaacaaattgagctgtgttgtagtctctccatcacagcccatctgttgaccccagtgatctgtgtccttcttatagaaaaaaaatacattcatctcctcccagtgtccctgagtcccatc

SEQ ID NO: 146486 - DNA, 617 bp, Homo sapiens
tcagttcttctattataaacaattgtccttttcagtctatttagtgccacgttgttcacactttttgggtttttgtttgaaatggctcccaaacaatgctgattttctgtcttgtgttactaagcacaagaaagctctgctgtgtgttcaagcatgrgttggtactggccatcagttcagtgttaacaaatcaacaatacagtacatccagaaaaagaggaaattcacagatgtgtatgtgaggccactctagaaagtcctaaaataacatccgaaatagatgacaaagttatgaaaaagatggaaaggcagctggattggtggattcataagatgatgaatgagtttatcttcctgttttgggggattttttttttcctttctcttggcttctcaatatgataaccaagtttttaaaaaaccatagtggacagcattgttgtgaaactgaaagccaaagaaattcatgatcatgttacccagggtcaggaaaatggtaaacactcctcaaatagtgttttgttatcaagaaatactgcgaagggccaaggacggtggctcatggctctgatcccagcactttgggaggccgaggcgggtgatcacttgagaccaag

SEQ ID NO: 146487 - DNA, 617 bp, Homo sapiens
tcagttcttctattataaacaattgtccttttcagtctatttagtgccacgttgttcacactttttgggtttttgtttgaaatggctcccaaacaatgctgattttctgtcttgtgttactaagcacaagaaagctctgctgtgtgttcaagcatgggttggtactggccatcagttcagtgttaacraatcaacaatacagtacatccagaaaaagaggaaattcacagatgtgtatgtgaggccactctagaaagtcctaaaataacatccgaaatagatgacaaagttatgaaaaagatggaaaggcagctggattggtggattcataagatgatgaatgagtttatcttcctgttttgggggattttttttttcctttctcttggcttctcaatatgataaccaagtttttaaaaaaccatagtggacagcattgttgtgaaactgaaagccaaagaaattcatgatcatgttacccagggtcaggaaaatggtaaacactcctcaaatagtgttttgttatcaagaaatactgcgaagggccaaggacggtggctcatggctctgatcccagcactttgggaggccgaggcgggtgatcacttgagaccaag

SEQ ID NO: 146488 - DNA, 559 bp, Homo sapiens
aaatagatgacaaagttatgaaaaagatggaaaggcagctggattggtggattcataagatgatgaatgagtttatcttcctgttttgggggattttttttttcctttctcttggcttctcaatatgataaccaagtttttaaaaaaccatagtggacagcattgttgtgaaactgaaagccaaagaaattcatgatcatgttacccagggtcaggaaaatggtaaacactcctcaaatagtgttttgttatcaagaaatactgcgaagggccaaggacggtggctcatggctstgatcccagcactttgggaggccgaggcgggtgatcacttgagaccaagagttggggaccagcctggccaacatggtgaaacaccatctctactaaaaatacaaaaattagccaggtgtggtggcgggcacctgtaatcccagctactcaagaggctgaggtaggagaaacacttgaacccaggaggcagaggttgctgtgagccgagatggcaccactgcgctccatcctggatgacagagcgagactccttctcaaaaagaaa

SEQ ID NO: 146489 - DNA, 542 bp, Homo sapiens
ttatggtgaataggttaaacatacaagagggttttagtgctacagcaacacttcctaagatcttttagttttagcaactaaaatgaaaatttttaagaaaacagtgaagggtaaacaggttttcaaaaaatgacaactacaaaccatatttataatttttcactgtctctggcatgccagccttaaaaatgtgatcattagcactaggactacatttcaatacatcatactagaatgaatgggagggtgggcaagagagaaatgagaccagcagtttaaggawttttttttaaaagaatggccctttgttcttctttcttttgtagactccaccaccttgtattacatgcagatttttctctgctggattatcttattttacttctcactttcaattcctagcactgagcctcgcagcaaaatgggtgtttgttgaatgggtgtgcaagagccaagtgggtactctctgtctggacatgggcgctcattcacgcaggactttattcctaaagaatgagcctttgcagaaacaaaataatatt

SEQ ID NO: 146490 - DNA, 551 bp, Homo sapiens
aagtctaagtccctgatacagctatgaaatatgacactcactggaccgtcactatttaatgcaacattgtttgagttcaagcttamgtgtgataaaactttctaactatccctgacctttgtttgaaattgaatgcttttgggtcttatccagaggtgtaagactataattaacttcatcagatccccaaactctcataacctttcatgtaccatgactttggaggactactatgtttgagtggatatttttctgttttttctaggaaaaaaagcctcagatctgtgcttaggatttattgtcaaaaactatggggaaggagagaagaaaatacaattgtatttgtgttacaatctcctttataactttttcaagactgaccttttctaatcagatcagagtttaaatcattttaatttttaccagatgcactgtaagtctcatatcctggcatttgacccctgaatcccaattgtcctcttttcctccattttaaaacacataggagcaaaacacaacacattttaaaagatataaaaaataaaatttta

SEQ ID NO: 146491 - DNA, 551 bp, Homo sapiens
aagtctaagtccctgatacagctatgaaatatgacactcactggaccgtcactatttaatgcaacattgtttgagttcaagcttacgtgtgataaaactttctaactatccctgacctttgtttgaaattgaatgcttttgggtcttatccagaggtgtaagactataattaacttcatcagatccccaaactctcataacctttcatgtaccatgactttggaggactactatgtttgagtggatatttttctgttttttctaggaaaaaaagcctcagatctgtgcttaggatttattgtcaaaaactatggggaaggagagaagaaaatacaattgtatttgtgttacaatctcctttataactttttcaagactgaccttttctaatcagatcagagtttaaatcattttaatttttaccagatgcactgtaagtctcatatcctggcatttgacccctgaatcccaattgtcctcttttcctccattttaaaacacataggagcaaaacacaacacattttaaaagayataaaaaataaaatttta

SEQ ID NO: 146492 - DNA, 398 bp, Homo sapiens
gggttcaggcaatcctgctgcaacctctcaattatctatttattcttaagtgaactttggcagtttggaaaaattagagatcacattgcatttaagctgtcaaccttartatttacagaattgtttgtattcctcttttattatccttttaatttctgtaagacttgacatgttttcccttttgtttccaatacagagaatatttatctggttttttttttttttggttttatatgctaccccttttaaaacttaagaaaagaaaaaaccgtaatgcttcaaacgaatagaaaagcatacacagtgatataagatacccatatatgctcaccacctaatatttgctttagttttaattgaatttttaaaacaatgaacatttagcgttgctttaaaag

SEQ ID NO: 146493 - DNA, 596 bp, Homo sapiens
tctctcgctcaaggaaaatgtcaaggttggagtggctgtctcttagccatgagaacaccatggattcatcagacagaaacaagaatcttaaccaacccatgaagttctctctgcaaatacaagtgatgctaattcctggcagtttacaataagtaaaacatgaacaaataaaataaaacgagtctgtgagagctcaattccaaagaccttcaaagccataggagagctttgcaaatgacagctcagaaacatcctcatttctattcacatctttcagctttcccagcaaaattcctattctttccactctctcatctaccaccttctcagcttctaatcatgacctcagagctctctccaaactgcagcactttttaactggtccttgaaagtgtcctgtgacctgtcataaacaactttattcatttcagtgatttgaagcatctgggaaataaattttattaactccactaattgggtctgatgtgaatagtttgctattggatctatatatagacacacctggttgagcactggatygtgttagattttgtatcatttaaaaatatttgctgagaaaattatgctaccaatag

SEQ ID NO: 146494 - DNA, 588 bp, Homo sapiens
caaatagttcaaaaggtcatatgtttaccagaggtaggacaaatttgtggcacaatatgtagccatcttcagataggacccattagtcaaaaaacaacaagtaatctatgagagaaaaaatgacaagcaaattgatctgtggctattaattagacaaactaggtaacaaagtttctcctgcctcttctacacagaaccaattagcactgagactctgagcagaggtcaaagacaagaacattggcagaagcagagtcctgctttttctcaaatttctgtagcatataatcaaaggcaccaaataaktgatttatttctcagaaattgaggcaacatttttctctcacaacaataatgttatattttatatgtgtttggcacatcattttaccaagtgtgttttctctgccacatttaatgcttacaataagtctgaaaggtaggcagggcaggtgtgagccctgttttatacacaaggatcaggacatctagagaagttcaatgtctttgctcaaagcctatcattaagcggaagaaagagccagagatggaattcacgttcaatagagctacaaaaaaaatgttttg

SEQ ID NO: 146495 - DNA, 440 bp, Homo sapiens
tcctggatcctagggacctgagttgraatcccagttctgctatcttcttggcttgtggacaattgagactctctgagtctcaattttcttaccaatcaagtggttataatatagtctacctatagggtaattgtgaagatttaatgatataatatacacagaacagccaatagagtacaaaattaaatgttaggttccctccccatccagggcaaaggtttgaggtgggaagaggttcagtgacatctctccaatttaaattcacccattctggtctttcctttttcctgggttgggagaactgactgggttgacccaactggtaccagctccaagaaaaatggaataaactgggggtggggatgaggcaagaatgtcctttccctggcttgcttgccgcctgagtcagattgcatccaagaaagttctgaggtcaaagc

SEQ ID NO: 146496 - DNA, 404 bp, Homo sapiens
ggacctgagttggaatcccagttctgctatcttcttggcttgtggacaattgagactctctgagtctcaattttcttaccaatcaagtggttataatatagtctacctatagggtaattgtgaagatttaatgatataatatayacagaacagccaatagagtacaaaattaaatgttaggttccctccccatccagggcaaaggtttgaggtgggaagaggttcagtgacatctctccaatttaaattcacccattctggtctttcctttttcctgggttgggagaactgactgggttgacccaactggtaccagctccaagaaaaatggaataaactgggggtggggatgaggcaagaatgtcctttccctggcttgcttgccgcctgagtcagattgcatc

SEQ ID NO: 146497 - DNA, 404 bp, Homo sapiens
ggacctgagttggaatcccagttctgctatcttcttggcttgtggacaattgagactctctgagtctcaattttcttaccaatcaagtggttataatatagtctacctatagggtaattgtgaagatttaatgatataatatacrcagaacagccaatagagtacaaaattaaatgttaggttccctccccatccagggcaaaggtttgaggtgggaagaggttcagtgacatctctccaatttaaattcacccattctggtctttcctttttcctgggttgggagaactgactgggttgacccaactggtaccagctccaagaaaaatggaataaactgggggtggggatgaggcaagaatgtcctttccctggcttgcttgccgcctgagtcagattgcatc

SEQ ID NO: 146498 - DNA, 404 bp, Homo sapiens
ggacctgagttggaatcccagttctgctatcttcttggcttgtggacaattgagactctctgagtctcaattttcttaccaatcaagtggttataatatagtctacctatagggtaattgtgaagatttaatgatataatatacacagaacagccartagagtacaaaattaaatgttaggttccctccccatccagggcaaaggtttgaggtgggaagaggttcagtgacatctctccaatttaaattcacccattctggtctttcctttttcctgggttgggagaactgactgggttgacccaactggtaccagctccaagaaaaatggaataaactgggggtggggatgaggcaagaatgtcctttccctggcttgcttgccgcctgagtcagattgcatc

SEQ ID NO: 146499 - DNA, 404 bp, Homo sapiens
ggacctgagttggaatcccagttctgctatcttcttggcttgtggacaattgagactctctgagtctcaattttcttaccaatcaagtggttataatatagtctacctatagggtaattgtgaagatttaatgatataatatacacagaacagccaatagagtacaaaattaaatgttaggttccctccccatccagggcaaaggtttgaggtgggaagaggttcagtgacatctctccaatttaaattcacccattctggtctttcctttttcctrggttgggagaactgactgggttgacccaactggtaccagctccaagaaaaatggaataaactgggggtggggatgaggcaagaatgtcctttccctggcttgcttgccgcctgagtcagattgcatc

SEQ ID NO: 146500 - DNA, 390 bp, Homo sapiens
gaattccagggtcatataaatttggaaaacaccatgcactaaacatgtccctcttaaaaagctattgatggctctgaaaagccctgctgtaatcaactttctttcacccagatttcccggatttayttgaccaggcagaaaacctgtttatgaagaaaagtttatggaaatactgccttagtatatttttctggctttgtacctgaaattaagccactccagataaaaaacaaatcagaagaccagaagcactagtttatggtggaaattgggaagtaaggataatgcctcatgcctcaccctggcagtgttagcccaaaggactcacagtttgtttgccttaaggtaaaaataagtgtcaccctaaaaaaataatttttttacctaatt

SEQ ID NO: 146501 - DNA, 390 bp, Homo sapiens
gaattccagggtcatataaatttggaaaacaccatgcactaaacatgtccctcttaaaaagctattgatggctctgaaaagccctgctgtaatcaactttctttcacccagatttcccggatttacttgaccaggcagaaaacctgtttatgaagaaaagtttatggaaatactgccttagtatatttttctggctttrtacctgaaattaagccactccagataaaaaacaaatcagaagaccagaagcactagtttatggtggaaattgggaagtaaggataatgcctcatgcctcaccctggcagtgttagcccaaaggactcacagtttgtttgccttaaggtaaaaataagtgtcaccctaaaaaaataatttttttacctaatt

SEQ ID NO: 146502 - DNA, 390 bp, Homo sapiens
gaattccagggtcatataaatttggaaaacaccatgcactaaacatgtccctcttaaaaagctattgatggctctgaaaagccctgctgtaatcaactttctttcacccagatttcccggatttacttgaccaggcagaaaacctgtttatgaagaaaagtttatggaaatactgccttagtatatttttctggctttgtacctgaaattaagccactcyagataaaaaacaaatcagaagaccagaagcactagtttatggtggaaattgggaagtaaggataatgcctcatgcctcaccctggcagtgttagcccaaaggactcacagtttgtttgccttaaggtaaaaataagtgtcaccctaaaaaaataatttttttacctaatt

SEQ ID NO: 146503 - DNA, 589 bp, Homo sapiens
aggaagcctcaaagaaaaagacagmctattcctctaacattttatctttgggtaaaatgaatggtttaataaagctttcaaggcaaagaattttgttagctaaaagtgagagtggagaaggcgaaatcaccaccatttaccaccatcccctgccatggcctgttagcacaaaaaaccctggggaatctgagttcatatcagaaaagtggctttttcatagcccagattatatttcaatatctcagaagtcttttttgcagagaagacttcacattgaaacaaaactgttgaagacctcaaatgatattaataaagaataaaaatgtatcatgggctttttgacatctgttttttccacttgtctttaattagaactcttttattggatattttgttctgaagtacacaggaaagataataatcaaggtctagaaatatgattatttaggcacttaaacactgtagctcattttacttaaggagaacaatttttaggtgattcacatttctatggtaggttgatctcatagtgttccatgtttctatgttgatctcatagtgttccatatccaaaagtatacagaagcaa

SEQ ID NO: 146504 - DNA, 410 bp, Homo sapiens
gaattcctttgtacatagtggatgatgacagcaagactatacaatcagtacaaaraaatggagagacagctctgttgctgtggccacagcttgagcaaaactcagttccaatgcaagccactctgagctgggagctgtgcaccctccagcacacagtgtggcaagctggaaagcccctggcacttccagttttcagcagcttccagcttttcgtctgcttatcccacagagcactgggaaatgtggtgaacaacctataggaaaaactggtaagctttctgttttggttctggttttttgtgttttttattgtggcaaaatatacattacataaagtttaccatgttaaccattgctaagagtgcaattcagtggtattaagcacattcaccttgtgcaaccatcaccac

SEQ ID NO: 146505 - DNA, 461 bp, Homo sapiens
atgcataaacattcacacatccaaaaatcccaagttaaaaaaggaaaaaggaaaacattccaattgagggacattctgcaaagtatgtaaccagtactcctcaaaactgtaggtcatcaaaaacaggaaaaagtctgagaaactgttacagcctaaagaagccgaacagacacgacaactaaatgtagtgtgctatcctggatggcaggctggaagaaaaaaaggagggtaggtaaatacgaaggaaaactgagtaaacaatgaataatgtatcagtattggttcattaattggaacaaatataggaatgtgagagattaataagagaaatgggtgtagggcttacaaaaactatgtmatttttctgtaaatctaaagctgatctaaaaaataaagtttttaaaaaaactttttaattaaaatgacaagaaggatgggagagaaaggataaaacaaagctt

SEQ ID NO: 146506 - DNA, 461 bp, Homo sapiens
atgcataaacattcacacatccaaaaatcccaagttaaaaaaggaaaaaggaaaacattccaattgagggacattctgcaaagtatgtaaccagtactcctcaaaactgtaggtcatcaaaaacaggaaaaagtctgagaaactgttacagcctaaagaagccgaacagacacgacaactaaatgtagtgtgctatcctggatggcaggctggaagaaaaaaaggagggtaggtaaatacgaaggaaaactgagtaaacaatgaataatgtatcagtattggttcattaattggaacaaatataggaatgtgagagattaataagagaaatgggtgtagggcttacaaaaactatgtcatttttctgtaaatctaaagctgatctaaaaaataaagtttttwaaaaaactttttaattaaaatgacaagaaggatgggagagaaaggataaaacaaagctt

SEQ ID NO: 146507 - DNA, 589 bp, Homo sapiens
aggaagcctcaaagaaaaagacagactattcctctaacattttatctttgggtaaaatgaatggtttaataaagctttcaaggcaaagaattttgttagctaaaagtgagagtggagaaggcgaaatcaccaccatttaccaccatcccctgccatggcctgttagcacaaaaaaccctggggaatctgagttcatatcagaaaagtggctttttcatagcccagattatatttcaatatctcagaagtcttttttgcagagaagacttcacattgaaacaaaactgttgaagacctcaaatgatattaataaagaataaaaatgtatcatgggctttttgrcatctgttttttccacttgtctttaattagaactcttttattggatattttgttctgaagtacacaggaaagataataatcaaggtctagaaatatgattatttaggcacttaaacactgtagctcattttacttaaggagaacaatttttaggtgattcacatttctatggtaggttgatctcatagtgttccatgtttctatgttgatctcatagtgttccatatccaaaagtatacagaagcaa

SEQ ID NO: 146508 - DNA, 368 bp, Homo sapiens
ggaacagttatcatctgccctattgtgtagatttagaaactgagtctcaaagaggtaaagtgactttacatggcaaagtttgtcaccagttgatatcagtacctggcatcccctaggaatttcaataactatcccaaattttttggatcccagtcagccaaartaggagatgaaaccagttgtcctttctacaacaggggtcttcttaatttccaaattatattccacacatatttttcatttaatcatttttcctcatcaatcttctgaagatcaaatagcaagaattattatccctatttattataaaactaaggctcaaatagtatttgtgattggccaaaagtataccatttaacttaaaatgg

SEQ ID NO: 146509 - DNA, 334 bp, Homo sapiens
ttatatgttaatactcagatggttcgtaatgactcatggtttattctttaaattagatagtaattataatcatctctgggtatccagagggaattggttctaagatcacccccttggataacaaaattttaagatactccagtcccttatataaaattgcacagtattggcatataacctaaacacatcctcctgtatgctttaaataatctctagattacttgtaatacctaataagatgtaaatgctattcaacagttgttatgctgggtttttaaaamttcaagttattgttgtattgttattttttattgttttgggtttattccaaata

SEQ ID NO: 146510 - DNA, 463 bp, Homo sapiens
aatgaattctttcattgtatcaacaactttaaatagctatatcagttattctctaacaagattaaatctagttgcttattgactccactgtagtgtttgtaggaagaagtctttctataagcacacatacatacaaacaccacagatttccatgctttctgatttttttttctagaaacatgtaatttacagaaggaggcaatataggctagctcaaaagatacttatggcaatactaattataaaataaccagtagacatgtacatyggtaaaaatcagctgctgatacttgcattagtttgaagtttattggaatgcttatataccctggaatgaagatatacttgaaataaaaatgacagtaaaaatgaattaaatgaattgtcacttatatattcctgacattttttggtatttagtaacttatcacaatcaatcaataaacaaacacacaaataaatt

SEQ ID NO: 146511 - DNA, 463 bp, Homo sapiens
aatgaattctttcattgtatcaacaactttaaatagctatatcagttattctctaacaagattaaatctagttgcttattgactccactgtagtgtttgtaggaagaagtctttctataagcacacatacatacaaacaccacagatttccatgctttctgatttttttttctagaaacatgtaatttacagaaggaggcaatataggctagctcaaaagatacttatggcaatactaattataaaataaccagtagacatgtacattggtaaaaatcagctgctgatacttgcattagtttgaagtttattggaatgcttatataccctggaatgawgatatacttgaaataaaaatgacagtaaaaatgaattaaatgaattgtcacttatatattcctgacattttttggtatttagtaacttatcacaatcaatcaataaacaaacacacaaataaatt

SEQ ID NO: 146512 - DNA, 441 bp, Homo sapiens
tatttgttttccttgattttcctctgagcccaaaatgaccaggactagaggaccaaaagcagtcttgtcctagctcaccttcttctgtaaacacagcacagatatattattcatccctaaattttgcatctgccaccagtacaattccagatgtcactgagagacacaaagaaggcacaaatattggcmatagaaagaactgggggaaaagaaggagaaaaatataaaaggaaagcaagaaaattcaagtaagccataaggaagatataagtatagatgtgagggtggaatggagagggatggaaaaaaaaaaaaaaaaaaaaaacagaagtaggagggaaaaggagaatttgggcttgtgtacatatctttgttttcttgattatttgtttggtgattttttattcaaaagaaaagacttgctcaaatttaaaataattt

SEQ ID NO: 146513 - DNA, 540 bp, Homo sapiens
ggcatgccaccaggcccagctaattttttttattgctattttgtagagtcaagcgtctcactgttttgtccatgctggtctcaaactcctgccctcaaacaatcttcctgctttggcctcccaagctctgggactacaggccacggtgcctggtcaccttcattaactttttatggatggatttctytcctaagaaaaatttcaatctgtcttagtgctgtggctcacacctgtaatcctcattgcagtttgggaggctgaggcgggcagatcacttgaggtcagaagtgcgagaccagccttggccaacatagaaaaccccgtctctactaataatataataattagccaggggtggtggtgcatgcctgtaatccaagttactcaggaggctgagacatgagaagacgaaagttgtgtgaactgagattgtgccactgcactccagcctggaaaacagaatgagactctgtcaaaaaaaaaaaaaaaaaaaaatcaatccacaaacaagcttatcaatcaactgaatttagtatgacc

SEQ ID NO: 146514 - DNA, 540 bp, Homo sapiens
ggcatgccaccaggcccagctaattttttttattgctattttgtagagtcaagcgtctcactgttttgtccatgctggtctcaaactcctgccctcaaacaatcttcctgctttggcctcccaagctctgggactacaggccacggtgcctggtcaccttcattaactttttatggatggatttctttcctaagaaaaatttcaatctgtyttagtgctgtggctcacacctgtaatcctcattgcagtttgggaggctgaggcgggcagatcacttgaggtcagaagtgcgagaccagccttggccaacatagaaaaccccgtctctactaataatataataattagccaggggtggtggtgcatgcctgtaatccaagttactcaggaggctgagacatgagaagacgaaagttgtgtgaactgagattgtgccactgcactccagcctggaaaacagaatgagactctgtcaaaaaaaaaaaaaaaaaaaaatcaatccacaaacaagcttatcaatcaactgaatttagtatgacc

SEQ ID NO: 146515 - DNA, 399 bp, Homo sapiens
cggtgcctggtcaccttcattaactttttatggatggatttctttcctaagaaaaatttcaatctgtcttagtgctgtggctcacacctgtaatcctcattgcagtttgggaggctgaggcgggcagatcacttgaggtcagaagtgcgagaccagccttggccaacatagaaaaccccgtctctactaataatataataattagccaggggtggtggtgcatgcctgtaatccaagttactcaggaggctgagacatgagaagacgraagttgtgtgaactgagattgtgccactgcactccagcctggaaaacagaatgagactctgtcaaaaaaaaaaaaaaaaaaaaatcaatccacaaacaagcttatcaatcaactgaatttagtatgacctg

SEQ ID NO: 146516 - DNA, 399 bp, Homo sapiens
cggtgcctggtcaccttcattaactttttatggatggatttctttcctaagaaaaatttcaatctgtcttagtgctgtggctcacacctgtaatcctcattgcagtttgggaggctgaggcgggcagatcacttgaggtcagaagtgcgagaccagccttggccaacatagaaaaccccgtctctactaataatataataattagccaggggtggtggtgcatgcctgtaatccaagttactcaggaggctgagacatgagaagacgaargttgtgtgaactgagattgtgccactgcactccagcctggaaaacagaatgagactctgtcaaaaaaaaaaaaaaaaaaaaatcaatccacaaacaagcttatcaatcaactgaatttagtatgacctg

SEQ ID NO: 146517 - DNA, 660 bp, Homo sapiens
aaattcaaactcacttgcttctaagcaactcttacttaaacaaattaagaacatcttttagacatttctgccaggaaaaactttggcatctgctaagggacttcctcagttataataaggataacgatgttccttatttgtatcctttttgtttgggttgccaggaaacttcgcactcaataatcgtatatatctctttcctcttcctgttagtgctcttggtttactatttctagttcgagtttttcatattcattgtaaagyatattttttgtaagttacttcagaacttctgtgggaaaatccagggcgcataaattgtacagaggccaaaacagtttataaatgtgtttatgtgcttgatagcaccataaatgttccagtatttgattatcttctacctatccacatttatctttattcatgtttcttgagtcaaatccaatgtaagtctatagtgctttctgtgacatgtgacaagctgcccaagaatgtgaatgacatgttaccctagggccattcataagcagtgggttaatatgacaggcccaggttactttccaagatataaaattatttgctccctgtttccaaaattttgcaaaacttaaatatatatgcaaaaagcaaatacaaggctttaaatattgccagtatatt

SEQ ID NO: 146518 - DNA, 272 bp, Homo sapiens
gaatggcctaaattctactttaggactttacttgtttacatggcattaggtagtgaatgtagctaatggaagttcaaattgtaattctgtattttagtactgaagctttagtactatttagcatagttctcatttaagtggctactttcyatcttttttttttttttttttttttttaactctacctaacaatcacgtctgaaaccctattgtcactcgttgggtcctcctagatatcatggcctggtagacaccaagagaacgcttttaaa

SEQ ID NO: 146519 - DNA, 574 bp, Homo sapiens
aattttacaaaacatttattggaaaatatatctatcccatgagataggacacagtcaaaggaccacccactttctccattaacatgtggatagctgtctgcttcttactgcactttcattctctaaaaataaccaccaaggtcttttagtgaaaataagtaagttggaaccaaaaacaaaggcacaacattcttctccaaataagttgctcagaaatgctttttcgtgaaacatagtttctagcatcttccattttcttgctatttatccatgcttggaattacttcattcattagttctgacaasggattgtatttgtatcattgcttgacaaatgtgttacatgtttcagtcttaaaatattccactctgagctcagtgctgcatacttgggagataatgttaaatcagcctcgcgacacactgctgtcatcatgccaaataactcagggaaaaatgataagggtataaagagatcaataaggcaagaaaatctgtgctttcaaaagtaaggcaaaatatgagaaagactatcagtcaagcatcggggcataaataaagcaagaatatgcca

SEQ ID NO: 146520 - DNA, 574 bp, Homo sapiens
aattttacaaaacatttattggaaaatatatctatcccatgagataggacacagtcaaaggaccacccactttctccattaacatgtggatagctgtctgcttcttactgcactttcattctctaaaaataaccaccaaggtcttttagtgaaaataagtaagttggaaccaaaaacaaaggcacaacattcttctccaaataagttgctcagaaatgctttttcgtgaaacatagtttctagcatcttccattttcttgctatttatccatgcttggaattacttcattcattagttctgacaacggattgtatttgtatcattgcttgacaaatgtgttacatgtttcagtcttaaaatattccactctgagctcagtgctgcatacttgggagataatgttaaatcagcctcgcgacacactgctgtcatcatgccaaataactcrgggaaaaatgataagggtataaagagatcaataaggcaagaaaatctgtgctttcaaaagtaaggcaaaatatgagaaagactatcagtcaagcatcggggcataaataaagcaagaatatgcca

SEQ ID NO: 146521 - DNA, 576 bp, Homo sapiens
tgactcttcagttactcatctggatatggctaactagtagagttgttgggaggctagctagaagtttcccgtataaaagtcttagctcctctttggcccgcaagaaggacttacaagccaggtttggggaaccattaataaacatctgaggaaacatgtatattcatggtataggataataagtacattatttccaaattggtgtgatgaagatattaacacttaaaacattgttttttaagaaaaagattttcaaaaatgagttaggattgagtggtccccaaatatagatatttagaggaaagtggaaaatgatggtttatttggcagaggggaggacatggatgctgctgggcaggaagaaatgatagccacccaccagcattatatttctctctgtgggcaagattccatttaacattttctcttcacttataatctgaattaaaaaaytaaaatactgcacatgtactttatagtccatcacccctaaaagtgcttcagcactcctttcgttttgagaccttcacaggtaacccagggacttcatgggtggaagttacacttataacttta

SEQ ID NO: 146522 - DNA, 555 bp, Homo sapiens
agaagaatattgcattgtttggggtaggctaggctgtgctgcctgtggtagtcagcctcaaggacggcccctgggaatccagctcctgatattcatgccctggtgcgtttcccatccccttgaatgtgggctggatttagtgacttgcttctaattaacagaataaggcagaaatgatgggatgtcacttgtaatattagrttataaaaagactggcttccatcttgtttcctctctctatgcccctctgtcttttatcctcacgtctctctctttctggggaagtaagctgccttgtcatgagcaaccctacggagaggttgctggtttttagccaacagctatcaaggagccgagacttaccaacagccaggtgggtaggcttagaagcagattctccagccccagtagagccttgagatgcctactgccttggccaatactttgatggtagcctcatgaggggttctgagccagaactcctcctgggttcctggtctgtgaagtaatacatatttgttgcttccagctgctaagctttgggggtgggggctg

SEQ ID NO: 146523 - DNA, 555 bp, Homo sapiens
agaagaatattgcattgtttggggtaggctaggctgtgctgcctgtggtagtcagcctcaaggacggcccctgggaatccagctcctgatattcatgccctggtgcgtttcccatccccttgaatgtgggctggatttagtgacttgcttctaattaacagaataaggcagaaatgatgggatgtcacttgtaatattagattataaaaagactggcttccatcttgtttcctctctctatgcccctctgtcttttatcctcacgtctctctctttctggggaagtaagctgccttgtcatgagcaaccctacggagagsttgctggtttttagccaacagctatcaaggagccgagacttaccaacagccaggtgggtaggcttagaagcagattctccagccccagtagagccttgagatgcctactgccttggccaatactttgatggtagcctcatgaggggttctgagccagaactcctcctgggttcctggtctgtgaagtaatacatatttgttgcttccagctgctaagctttgggggtgggggctg

SEQ ID NO: 146524 - DNA, 551 bp, Homo sapiens
tctctcatgtgctggagcatgatataatactgagtgtctcaaagttcagttcttggctctctttatggtttttgtcatatcagtgtattgcctgcacaaattttttttttttttttttttttttaaattagagacagggtcttgctatgttgctcargctggagtgctgttcctattcataggtacaatcatagatcatactgcatcgcaatctccatctcctggcctcaaatagtcctcctgactcaacctcccaggtagctgggactgtaggtgcacaccaccatacccagcatgtgcacaatttttaatttaaaacttttccctacattaacccacattttaaaagtttacatactactttagcctcatcttacgtaataatatccatgtatctgagatttagtgtgccatttgtttaccttatcttgttagctctatggtacacatttctccataagttaatatctttgaagtcatgaggaatcatacaatggatgccagttcccatccttgggctttctatggatcgggcagcaatcaggacatag

SEQ ID NO: 146525 - DNA, 551 bp, Homo sapiens
tctctcatgtgctggagcatgatataatactgagtgtctcaaagttcagttcttggctctctttatggtttttgtcatatcagtgtattgcctgcacaaattttttttttttttttttttttttaaattagagacagggtcttgctatgttgctcaggctggagtgctgttcctattcataggtacaatcatagatcatactgcatcgcaatctccatctcctggcctcaaatagtcctcctgactcaacctcccaggtagctgggactgtaggtgcacaccaccatacccagcatgtgcacaatttttaatttaaaacttttccctacattaacccacattttaaaagtttacatactactttagcctcatcttacgtaataatatccatgtatctgaratttagtgtgccatttgtttaccttatcttgttagctctatggtacacatttctccataagttaatatctttgaagtcatgaggaatcatacaatggatgccagttcccatccttgggctttctatggatcgggcagcaatcaggacatag

SEQ ID NO: 146526 - DNA, 549 bp, Homo sapiens
ttagcaacttaaagcaaaagagttagttataaaagataggaagcacatgtgatccaccagcatacaaatttatgcatataattcatgcacattcatgaatgcatttctagtaacytgagaaatattagcagtagattaatttgggtagggatgaggcaagctatgaattattctgagggttggggctaaaaacaggagaggggggaaaggaatatcttctaagctgtagttgctttacatatgttctctaatataatttacaagtatcaacttattaaagaggtattattcccattgtgttgatgagtaaactgggcctagcatcacagacaataagcagtagagcccagattcaaatctaggactgttctgtgtttgaagccacatcctatccattagcaccataatctactttcctttaaaaatagtaaaaaaacctgctgtgatatcaagctaaatggaagttttgtatcagtaagttgcactgagataacacagtatgcccactctcgtcatgctcactgaatgataattctgcaggttctggcc

SEQ ID NO: 146527 - DNA, 395 bp, Homo sapiens
aaagcactttgctaaagtgaagtaagttcagcatttgcaatgtaattcaaattgcacttctaattcaggtcctggaattaacccactcaaccaaagcttgaaaagatttagatttactcagactagcaacaatacaataccgccttacaattgcacaaccaccctgtcttttggtgatacatccaatacaytctaaattataattctaaaactcagtttgttgttaaaaaaaaaaatctgtgcatcatatcagagtttgtcttgttgcaatttaaaagggggagaagggactcacaaccagttttaatcaggctaggataacacctgagctcttcttataaacactttttaaaaaatgatttttaccacaatttttaactgtaaagaggtgaatt

SEQ ID NO: 146528 - DNA, 569 bp, Homo sapiens
gccacctacactgtgtctttatcatttggtatttatatcaggcatcttctcattaagccttcagcaacccaacaagataggcataattattatcagtccaaatgtaaagatgaggaaaatgaggctgagctagacgaagtaccttgctcagaatcagatacatcaaggtggcaggtcttggactgatgcccagaagtgtttgaaggccacacccataatcgcaaccactcactgttctgctcattacccagaaagcccaggcttcatgttgacacaagcagaggacaactggaggagggaagaagccccactggaactaagaagtcaagaagctaggaagtagccaaatactccgggccatggggtgtccccaaagggaactagaacaaagtgagactcactgcatggttcatacttgataccatcagtcacacccacctgcaagctttcagggctrgaaaaactgaaatgtctttgcctgctgtgtttgaaaattggcatcgcttctccatttctgtacctccttcctctctaaacacatttcttctttctttcaatcaatgccatgc

SEQ ID NO: 146529 - DNA, 569 bp, Homo sapiens
gccacctacactgtgtctttatcatttggtatttatatcaggcatcttctcattaagccttcagcaacccaacaagataggcataattattatcagtccaaatgtaaagatgaggaaaatgaggctgagctagacgaagtaccttgctcagaatcagatacatcaaggtggcaggtcttggactgatgcccagaagtgtttgaaggccacacccataatcgcaaccactcactgttctgctcattacccagaaagcccaggcttcatgttgacacaagcagaggacaactggaggagggaagaagccccactggaactaagaagtcaagaagctaggaagtagccaaatactccgggccatggggtgtccccaaagggaactagaacaaagtgagactcactgcatggttcatacttgataccatcagtcacacccacctgcaagctttcagggctggaaaaaytgaaatgtctttgcctgctgtgtttgaaaattggcatcgcttctccatttctgtacctccttcctctctaaacacatttcttctttctttcaatcaatgccatgc

SEQ ID NO: 146530 - DNA, 587 bp, Homo sapiens
catcatggaaattgaaaaatgttacaaatactatcttctccttccccctgagagccagttgttaaacatttagcagcacataccacttaataatttcacaattaattggtatgatagtgagacacacacacacacacacacacagagacagtacagagctcttaagttctgtgatatattatttaatatttaatattaattatggcagtgatttattcacttttcccatctcatcctttctcacctcaaatataattattagttatggatcctacattttcaaggatatagataaaktatagtatgttgaaagaagataggagagtaaccaaaatgaggagactcaaaatcttgtaaaatgaaaactagctcaagagatgtgtagcataccgaagacttggggaggatgcaggatttgtattaaaccacttgctaaaataatatgtgaaagtaatattattgttggtggccccaaggcatccaaacagggctaaacaggtgaaccttatagggagacaaacatcagtttttataggaaagaatcccaacagttgttaaaagttaaaaatgaaaagcttggaagtaac

SEQ ID NO: 146531 - DNA, 530 bp, Homo sapiens
aaacttacatctgagtgaggacagtaaataatattagtgtggcaagtgccactaaaatactgtatcctgcgtgttatgggacccagaggaggtgagcaagtctcttctgggagttcagagaaggctgctcagggaagtttactttttgtctggttacygagttttcaagactcatatgaagtgggtaaagatttctaagtatatggaacagaatggcttcaagaatggaaacaagatggggtgttcattgaacgacttcttccttacattataaagtgtaaaatggggagaggtagaagatactgccagaacagtatcaggagtcattaatttgagcttgagctttgttcttcagaccattctttctcgaagtgtgatccaaggtcactgtgccaaccttatcccaaaacgataactatacacattgcagattctaagcacttcctcccatctaccaagtccaatgatctgttaaagaggtacagagaatctgcatttttaacaagttcctcaggcggttcttttgtgtg

SEQ ID NO: 146532 - DNA, 530 bp, Homo sapiens
aaacttacatctgagtgaggacagtaaataatattagtgtggcaagtgccactaaaatactgtatcctgcgtgttatgggacccagaggaggtgagcaagtctcttctgggagttcagagaaggctgctcagggaagtttactttttgtctggttactgagttttcaagactcatatgaagtgggtaaagatttctaagtatatggaacagaatggcttcaagaatggaaacaagatggggtgttcattgaacgacttcttccttacattataaagtgtaaaatggggagaggtagaagatactgccagaacagtatcaggagtcattaatttgagcttgagctttgttcttcagaccattctttctcgaagtgtgatccaaggtcactgtgccaaccttatcccaaaacgataactatacwcattgcagattctaagcacttcctcccatctaccaagtccaatgatctgttaaagaggtacagagaatctgcatttttaacaagttcctcaggcggttcttttgtgtg

SEQ ID NO: 146533 - DNA, 459 bp, Homo sapiens
agatctgatggttttataatgggaaacccctttctcttggatttcattctctctcttgcctgccaccaatgtaggatgtgcctttcgtcttccatcgtgattgtgaggcctccctaaccatgtggaactgagtccattaaacatctttttctttataaattacccagtcttgggtagcatggattatctgaattttataatgataatgtagcatggattatctgaattttatactgataatacaaggattatctgaagagttttaaattggctaccattgcttcttcttacagttgtgtwttagtccattttcatgctgctgataaagacatactagagactgggaagaaaaagaggtctaattggacttacagttccacatggctggggaggccccagaatcatggcaaaggcacttcttacatggcggcggcaagaaaaagtgaaggagaagcaaaa

SEQ ID NO: 146534 - DNA, 566 bp, Homo sapiens
ctttccctggttttacctttgcccaaaaagaatgggtaagttcagagtgataactaaagcagggagtccggtccacagctatgtaggtctgaagattacaacgtttaaaaattgtaccattaaaagcagctaaaaatgaagggaagaatcctgataagtcttctgtagtataaaatctggtcttggcactttccagcactaattatgtgatttgtaaatgctagagatgagttaatatgtaatctttagtattttgtgcaaaatctttgatcatcatggtgagtgtcaaagacaaatgaatggctggggccagctggtcactccaattaccatgttccatttagagtaaatagtcacattcctcatctagcggatcaacctccctctgagacagttattacttaggaagrggctatagagtctagaagattgaagtgtgattttcaacaccaggtgacatagaacaagtgagtagaagcaatgacctggagctggcaaatgaggaaagcctggaagtgctagtgtgacggctgaaatccagcaaggcgaagcgtagaatatgcttg

SEQ ID NO: 146535 - DNA, 546 bp, Homo sapiens
ctcaccccaacacatccacagtggtaaaggaggccaacagtttccatgatctttctctagtctaatatgaccgataaatactttccagccccaaagatcctcaaagataaagtttcttctgtgtccatttaaaagattgggtttactcctttagaagcgcctcggtttaaccaatgatgtttgtcatccaagggtccaaatayggactgaaccaccgtgtgctccttgggagaaaacctactccatgagagtggtctgaggaatgttttggcatctgaccatcagattgagaaagtaatgactggacttttaccttgatatacatttccccaaaatcagatactacaatatggtaggtgactattctagatattttaggtctacttctttcatcgtatccctaaaattctatgaatatgatgccagattatattaattaacattgttattggcatattccagctctggataaatcgtatgcttcttttcattttgaatctttattctaacacacaactgtcccaggggccagacattgaggtttag

SEQ ID NO: 146536 - DNA, 673 bp, Homo sapiens
tattcatttatttgattaaaaatgtgtctggtcagtgaaagcaaacagcactcttctctgccttaaatgttacagattctgacagaaaaatatcttaattaatcagactttatcatgggcattcaaaggtgattgaaacaataggtgaagttcaacttgaaggtaatcacaaagggcaatttacagtgtttcttagagttgggtaggtactgtcctcttggttagattcagaaatgctgcctgtcgtttctttctgggttgaggtatctagtagccttgcctgctcttatgtgacaagcacaaattactccrctgtgatgaatctcatgggatcacagaaggtagaggtgacaaggagatctatcacatcatatcaggtccaaattcccaggtgccctgtactgcatttcctctgccttccactgtatttcattttaacctgggttaaagtagcagcatcttccactgggctgtactgttcggaaatgggtggctaccatgggttgctttaggattctacagctgcctggaggggcgtggacagacaatctaagagggtgcaacagggttaaggggaaaaataggtacaaagagaaaatctaagaaaataatttctgtgaatatcaggcttaaaaattttagatatgattattactttaatacctatggaaat

SEQ ID NO: 146537 - DNA, 550 bp, Homo sapiens
cgagaaaaggtggtatggaagatatacaagttagatgtgattactcagcaatcctcacacttatttgtaatcaccaaatcacaaattagaggattatgagaattaaaatatttcagtttgatcatctcacaccattctacttggaagggaaattgtagttcttaagatatcttcaggggaagaaagtattctaggaaggctttttgcctttctttgtaaaacatgttcaacataaatattctatcctggtggcacatatacagtgaaataacttttgaaggyttttttttcccctgttttattttgtttttccagtatgagttagtagaatcttttggaatttggaatagaaaccagaagccatttacttaaaatggtcccttcttactggtgcatgatgaatgtgtgtgtctctcagataaagtggagatgaacatttctatagccttgaaaaaaatgttctcttccctggtgtatgacaaagtgaaggatataatttagatatgtttaagcactgtatccatgcctgtagtatacccttctgccaatt

SEQ ID NO: 146538 - DNA, 587 bp, Homo sapiens
atcactttttcaatatagttctggttgtgttccagtgagtgctattgattcctaaagtgattttttactcaaaagcagcaccataatttgacaggccccaggaagccaaggcacacaatgactgcaaaatgagttgtcccagtaagagatggagattgcatttatttacacacatgcaagtatataatgcaaggcttttttgttataacaatattttaaaaattaactcccaaactgagttaaatcttcacagttggctttttaacattctgctggcactggaggtgaagggggtgatagatgggaggaattatctacacttttatttcctcttcctcaggatagtgcaacgatctcttaaattcttagatatgatagcatttgtagtaattttagctatctctggattttcattctccagtaactcttatgccattttgyctatgaagcctaccataatcaaatgctaactattcaaccttagttactaattttagaggtctccacttattttctttctgcataaaatatccacttcacctcccgcaatttgaacataacatgttagaatttgataaaacagtaat

SEQ ID NO: 146539 - DNA, 293 bp, Homo sapiens
tgggcatactggcttgggcctataatttcagctacttgggaggctaacacaggaacatcacttgaggccagaagttccagaccagcctgggcaacatagccagactaggctgggccacatagtgagaccccyacctgtaaaaaaaagtgaaaacaaaaacatactgggtaatgtgtagtaactttactgattttatatgtttctatgacaatagaaacaaatgatacgaagcattcttaaccaattttgagtctgtaatggtaaatctgtaaatttagacaagaaagatcgca

SEQ ID NO: 146540 - DNA, 531 bp, Homo sapiens
ctaggctgggccacatagtgagacccccacctgtaaaaaaaagtgaaaacaaaaacatactgggtaatgtgtagtaactttactgattttatatgtttctatgacaatagaaacaaatgatacgaagcattcttaaccaattttgagtctgtaatggtaaatctgtaaatttagacaagaaagatygcaataccatatggttgccatatgaagaacaagttcttgatagatgtctttggagtttccacggctttggataaaagtgccaaagaagtgtataaacatgaaagtgcataaaggtcaccaaaggcgcttatttaaaatgctgactctagggcttggtgcctaaaggtcctgatgtagtagttacagggtgagatccagatattttaattttttaagctcataattttatagtacttgctatatgccaggcagtaatttacagatagttactaacttaatcttagtacaaagaggagaaggaaacagacacagagaggtctaagagctagtgagtggtaatgccag

SEQ ID NO: 146541 - DNA, 445 bp, Homo sapiens
ttgctctgcactgcccagcaaccatgctagacagatgctatccagtgaaactgctggtaccatgacagccttccttgacaaaacctttggtcctgttgctgaactccagtttttggcccagaatcctcattttctactggcaattttaatttacttgattacttaatctatcctacacctgggccttactcctgccactgtggtctcctctatatcaacaagacttcctaatgctgaattttgagaagtaggaacagtaggaatgggaactttcactttttttcttccaaaaargatgaagttttctcatacaagtttatctgcctttccccagtaactagttctactgaggcagtttttgctaatccagaaacaaacaaacaaacaaataaatagtctggttacaacttccttgatgacaaaggctgcagctcacattaccttt

SEQ ID NO: 146542 - DNA, 627 bp, Homo sapiens
gtgcattttaattatactgattcttccaacccatgagcatggaatgttttccatttgttggtgtcactataatttctttcagcagtgttagagatctttcatctctcttgttagatgtattccttggtattttattctcttgtgtggctattataaatgacattgcattcttgatttgactttcaacttgaacattagtatataaaaatgctactgatttttgtacattgatttttaccctgaaaattaccgaagttgtttatcagttccaggaaacttttggcagagtctttagggttttctaggtatagaatcatatgagtgaagagaggtagcttgacttcttcttttcttattttagtgcctttcatttcgttctctttcctgattgctctgggttggacttccagtactattttgaataaaagtgttgagagttaccatccttgtctggttctagttctcaagggaaatgtttccagtatttgccttttcaatatgatgttggctttggatttgtgatagatggctcttattattttgaggtatgttcttcaatgcctaktttattgagggtttttatcatgataggacattagattttattacaagctttttctgtgtcta

SEQ ID NO: 146543 - DNA, 577 bp, Homo sapiens
tttgcaaactatgcatccgataaaggcctaatatacagaatctataggtaacttacacaaatgaacaakctaaaaacaaccacattaaaaaatgggcaaatgacatgaacagtcacacagacacttctcaaaagaagacgtacaagtggtcaagaaatgtatgaaaaaaggctcagcatcactaatcatcagagaaatgcaaatcaaaaacacaatgagataccatcttacaccagttagaatgactgctattaaaaagtcaaaaaacaacagatgctggtgaggcttcagagcaaagataatgcttatccattgttggtgggaacatagattagtccagctgctgtggaaagcagtctggagatttctcaaagagcttaaaatagagctatggttcaaccccacattgccattactaagtatatactccaaagaaaaataaatcattctacccaaaaacacatgcacttgtatgttcatcactgtattactcacaatagcagagacatggaatcaatccaggtgcccatcagtggtagattagataaagaaaatgtggcacatatacaccatggaa

SEQ ID NO: 146544 - DNA, 577 bp, Homo sapiens
tttgcaaactatgcatccgataaaggcctaatatacagaatctataggtaacttacacaaatgaacaagctaaaaacaaccacattaaaaaatgggcaaatgacatgaacagtcacacagacacttctcaaaagaagacgtacaagtggtcaagaaatgtatgaaaaaaggctcagcatcactaatcatcagagaaatgcaaatcaaaaacacaatgagataccrtcttacaccagttagaatgactgctattaaaaagtcaaaaaacaacagatgctggtgaggcttcagagcaaagataatgcttatccattgttggtgggaacatagattagtccagctgctgtggaaagcagtctggagatttctcaaagagcttaaaatagagctatggttcaaccccacattgccattactaagtatatactccaaagaaaaataaatcattctacccaaaaacacatgcacttgtatgttcatcactgtattactcacaatagcagagacatggaatcaatccaggtgcccatcagtggtagattagataaagaaaatgtggcacatatacaccatggaa

SEQ ID NO: 146545 - DNA, 521 bp, Homo sapiens
gtgagaacccctgtggccaccacctctataactgttctgggtcagacctgaagccagcataatactgggtctcaccaaaggcctgctgtaactacaccctggctactgactatgcttgcctaatgccctggggctctacaatcagcaggtggctaagtcagccaggtttctgtccttcccttcaatgtggtaagatcccccagaggtgctatccaaaagccagggactaaagtcaaaagccttagaagtctatttcgtgttctrtgaccaagttggaactcaaaccacaggatgcagttcttcccactctttcttctccttcccaaaggcagaggagttagaaaaagaataaaagaaaccctcacccaatatttaagaaggaaatgaattccaaataaaattttaatgagatttatttttggactttaatgatgggattcaacaacttatctaataaaataattgggtgataatagctatgaaattttggaaatagattaattggcatatgtgtgcatgtg

SEQ ID NO: 146546 - DNA, 439 bp, Homo sapiens
gcgctttctcacagcagggcagttttagggtagttggacaatggctggcttcctgtagaccaaggtagaggttgcaagctcctttgacctacctggcattttcaatgccatggcatgtcaatatggcatcattatatggcgcttcagtaatgttyaatgggcatcattatatggcgcttcagtaatgttcaatggtatgatcagatgatcaagttctcttttttacaagaatcttgagaattcataaagtcaggaataagatgattaaaatgtactaccactgatgtcaggtgaaagcaaattgcttctggttttctctgctcaccggataatgaaaaaaggtagtattttctgattaatagtgaattattagttgcctaccaggtgccaaaagatgtgtttatgtgctcaattaaagagcttacatttggaatagcag

SEQ ID NO: 146547 - DNA, 436 bp, Homo sapiens
gggaaatctggctccatgatccaatcacctcccagcaggtccctcctccaatattggggattaccatttgacatgagatttgggtggggacamaaatccaaaccatattatgactatgttaactttttttcttgtagacaatcacaatatttggaggagaaagaatgaaaataaaaggaggaaaatacaggtatagaattaactaggtcttctttcaccaatcctatttaacatagcattagaagttctagccaaggcaatcaggcaagtgaaagaaataaagcgtattcaaataggaagagaggaggtcaagctatcttgacaaatgacatgattctatatctagaaaacccaaaaacttcttacactgataagtaacttcagcaaagtcttaggatacaaaatcagtgtgcaaaaatcacttgcattcctatac

SEQ ID NO: 146548 - DNA, 436 bp, Homo sapiens
gggaaatctggctccatgatccaatcacctcccagcaggtccctcctccaatattggggattaccatttgacatgagatttgggtggggacaaaaatccaaaccatattatgactrtgttaactttttttcttgtagacaatcacaatatttggaggagaaagaatgaaaataaaaggaggaaaatacaggtatagaattaactaggtcttctttcaccaatcctatttaacatagcattagaagttctagccaaggcaatcaggcaagtgaaagaaataaagcgtattcaaataggaagagaggaggtcaagctatcttgacaaatgacatgattctatatctagaaaacccaaaaacttcttacactgataagtaacttcagcaaagtcttaggatacaaaatcagtgtgcaaaaatcacttgcattcctatac

SEQ ID NO: 146549 - DNA, 436 bp, Homo sapiens
gggaaatctggctccatgatccaatcacctcccagcaggtccctcctccaatattggggattaccatttgacatgagatttgggtggggacaaaaatccaaaccatattatgactatgttaactttttttcttgtagacaatcacaatatttggaggagaaagaatgaaaataaaaggaggaaaatacaggtataraattaactaggtcttctttcaccaatcctatttaacatagcattagaagttctagccaaggcaatcaggcaagtgaaagaaataaagcgtattcaaataggaagagaggaggtcaagctatcttgacaaatgacatgattctatatctagaaaacccaaaaacttcttacactgataagtaacttcagcaaagtcttaggatacaaaatcagtgtgcaaaaatcacttgcattcctatac

SEQ ID NO: 146550 - DNA, 436 bp, Homo sapiens
gggaaatctggctccatgatccaatcacctcccagcaggtccctcctccaatattggggattaccatttgacatgagatttgggtggggacaaaaatccaaaccatattatgactatgttaactttttttcttgtagacaatcacaatatttggaggagaaagaatgaaaataaaaggaggaaaatacaggtatagaattaactaggtcttctttcaccaatcctatttaacatagcattagaagttctagccarggcaatcaggcaagtgaaagaaataaagcgtattcaaataggaagagaggaggtcaagctatcttgacaaatgacatgattctatatctagaaaacccaaaaacttcttacactgataagtaacttcagcaaagtcttaggatacaaaatcagtgtgcaaaaatcacttgcattcctatac

SEQ ID NO: 146551 - DNA, 204 bp, Homo sapiens
ctgtctacctgggaaacatttatcttcaagacctagtcrtagaatgtgaagcattctctggtccagcctccctcttcagggtcattatgtggtgttttggtacttagttcttgccacttttatgaggttaatgctatctattgaaatgtcctattatatgtttacctttcctgttagacagtaagcttcttgaacgcaggtatt

SEQ ID NO: 146552 - DNA, 443 bp, Homo sapiens
tactctggttatgctctatgaaggaaaacaaagcctggggggacagcaaatctgttcatggcttggcttactgaacatttttagcccactcttgagccacactcctcaaaaaaagattcttttaaaaatattactactcgttgacaatgcacctagtcacccaagagctctgatgaaaatatacagggtgattaatgttgttttcatgcttgctaacacagcatccattctgcagcccatgaycaaagaataattttgattttcaactcttaccatttaagaaatacatttctttaggctatagctgccattgatagtgatttctgtcatggatctgggaaaagtaaatcgaaaactttttggaaaggatttactattaaaaacattcacgatttatgggaggaggtcagaatgtcaacattagcagaggtttggacaaagtt

SEQ ID NO: 146553 - DNA, 443 bp, Homo sapiens
tactctggttatgctctatgaaggaaaacaaagcctggggggacagcaaatctgttcatggcttggcttactgaacatttttagcccactcttgagccacactcctcaaaaaaagattcttttaaaaatattactactcgttgacaatgcacctagtcacccaagagctctgatgaaaatatacagggtgattaatgttgttttcatgcttgctaacacagcatccattctgcagcccatgatcaaagaataattttgattttcaactcttaccatttaagaaatacatttctttaggctatagctgccattgatagtgatttctgtcatggatctgggaaaagtaaatcgaaaactttttggaaaggatttactattaaaaacattcaygatttatgggaggaggtcagaatgtcaacattagcagaggtttggacaaagtt

SEQ ID NO: 146554 - DNA, 629 bp, Homo sapiens
gttttccagcaggaggggtggaggttgtggtaacagctctcaaggaaaaagctgcctatgaaatgactgcatgaaaagggaatctctctgtcacggtccttagcagcatggggtggtttgagggaatggttcagacactaagcatagtagacaggggtactaggacaggctacaattattctcatggtcatgatccttttaagcagcatggaatggtttgaggaaatggttcaggcattgagtacagtaggcaggggtcctaggacaggctatattaattctcaccagcagacatcctccctccactgtggatctgaagagcaatgaaatatgagatatatattcaattatcaggatgtaaggggaattaagggaggaaaggaacttagtagtaattcagttaaagtgaggtagcctggtgaggtaagaggggaagtgaatattttacttgattctaacacatttaatttgtctttcaactaatacacagagataacaatttcagacaatagaacattctatttcagtctctgattagaccttgccactggattttmccccccgagggttaacaagaatcagtcatagcagtaatttcctatgaaaaagaaatcctatcaggctcatgt

SEQ ID NO: 146555 - DNA, 594 bp, Homo sapiens
cctttcatttccttggactagaggttcaaggactagagctttctttggaactctttttattgcacccagaagatagttctgtgtttctggctgcaaatgcaggatgggagatatcaggggaaaaaagaaatgttaaactcaaatctggttcggtggtcctttragttctctttagctgttctatgcattcatccaggggttttagttgcttttagtgggtgggacacattggagtgcactcagtccatcttgaataaaagcagatttctccttttcatttattactcttgttttgttcctgagaattctttaaagtggtgatgatgaaggagatgggtatagggttaaggggaaatagatgtgggaaaagaaaacaaagaacgtttattgcccattcctccctatccaaatattatataatcgacttttattctgcagttaagagaagtctttgcaaagtaatcacaggcataagaaacaacctaatttacatctttttctctttttttgagacagaatctcactctgttgcccaggctggagtgcagtggcatgatctcggcccactgcagcctctgcctcccaggttcaagc

SEQ ID NO: 146556 - DNA, 487 bp, Homo sapiens
caattccacacctttctttgccttttatgacagacatttttgaagcatacaatctcttatctttttgtttttaaagatatttgtttctcatttgacatttatctgatgttaacttatgattagattctcattaggtgttcttgctcagaatactacataagtgaaatcrtggccttctcagaatatgtcatcgaaggcacaccatgtccatatattcctcattggtaatgttagtattgatcaccctgttagtatgttgtctgatgttaccattgcatagtatccagtttcccttgtaactgataaacaatctgaagggagacaatttaagatcatacaaataatctgttcctcataaacatttctccccagatatgttacctattgatcattcctgaataatccaacctttactatgatgattacaagtgctgatttttcagcttctacacttcttcctcatttgtgagtcagtattacaatgtac

SEQ ID NO: 146557 - DNA, 487 bp, Homo sapiens
caattccacacctttctttgccttttatgacagacatttttgaagcatacaatctcttatctttttgtttttaaagatatttgtttctcatttgacatttatctgatgttaacttatgattagattctcattaggtgttcttgctcagaatactacataagtgaaatcgtggccttctcagaatatgtcatcgaaggcacaccatgtccatatattcctcattggtaatgttagtattgatcaccctgttagtatgttgtctgatgttaccattgcatartatccagtttcccttgtaactgataaacaatctgaagggagacaatttaagatcatacaaataatctgttcctcataaacatttctccccagatatgttacctattgatcattcctgaataatccaacctttactatgatgattacaagtgctgatttttcagcttctacacttcttcctcatttgtgagtcagtattacaatgtac

SEQ ID NO: 146558 - DNA, 522 bp, Homo sapiens
ggagttaaatttaatgaattaacttgaccttcatcacgaggggaaagaggacaagaatcctggcggctttaacccctgctttatgtctttccattttttgtttaatatattctgccaaacattgcattccttttttttttttttttgagaaagagtctgtctgtgycaaggctagagtgtagtggtgcaatcttggctcactacaacttccgcctcctgggttcaaggattctcctgcctcagcctctcaagtagctgggattacaggcacacgccaccacacctggctaatttttgtgtttttagcagagacgggctttcaccatgttggccaggctggtcttgaactcctgacgtcaagtgagctgctgcctcagcctcccaaaatgctggaattacaggcgtgagctaccgtgcctagctcaaacatgtattagtaaaacatgagaaagttcctcccctaccttgacatcctgaggctttcatcaatgcatccttcattcatgtgccttaggtgctcag

SEQ ID NO: 146559 - DNA, 522 bp, Homo sapiens
ggagttaaatttaatgaattaacttgaccttcatcacgaggggaaagaggacaagaatcctggcggctttaacccctgctttatgtctttccattttttgtttaatatattctgccaaacattgcattccttttttttttttttttgagaaagagtctgtctgtgtcaaggctagagtgtagtggtgcaatcttggctcactacaacttccgcctcctgggttcaaggattctcctgcytcagcctctcaagtagctgggattacaggcacacgccaccacacctggctaatttttgtgtttttagcagagacgggctttcaccatgttggccaggctggtcttgaactcctgacgtcaagtgagctgctgcctcagcctcccaaaatgctggaattacaggcgtgagctaccgtgcctagctcaaacatgtattagtaaaacatgagaaagttcctcccctaccttgacatcctgaggctttcatcaatgcatccttcattcatgtgccttaggtgctcag

SEQ ID NO: 146560 - DNA, 434 bp, Homo sapiens
gtgcgtctccaaagaacagtgtagtaattttagattactaggggagcagtcttgccattaatctgctgagattttgactactttctttctctcttcacttgctacattattgaagtgggtcagctctatttctccataaagcaatagagaaaagcatgttttgattacaactacacttttaatttgcatgtatatrttcagatgctgcactaaggacagtatgcactactcattttatgcctacagaattaatatttcctgagagaaaaaagtgagtagctttcagaactttacagccacaaaggactttggacttcatctttagtttaattagcatcttccctacttgggctatttataatttgtgctaagcactataccaagtgtgtggcacatggattatcttattaaatctttacaataagcctaagagg

SEQ ID NO: 146561 - DNA, 434 bp, Homo sapiens
gtgcgtctccaaagaacagtgtagtaattttagattactaggggagcagtcttgccattaatctgctgagattttgactactttctttctctcttcacttgctacattattgaagtgggtcagctctatttctccataaagcaatagagaaaagcatgttttgattacaactacacttttaatttgcatgtatatgttcagatgctgcactaaggacagtatgcactactcattttatgcctacagaattaatatttcctgagagaaaaaagtgagtagctttcagaactttacagccacaaaggactttggacttcatctttagtttaattagcatcttccctacttgggctatttataatttgtgctaagcactataccaagtgtgyggcacatggattatcttattaaatctttacaataagcctaagagg

SEQ ID NO: 146562 - DNA, 453 bp, Homo sapiens
ttgagttttagactctcccatcatagaacaaaaccaaaagcaagactaaaaggtaacttgattttataaattctttatgaaagctgtagcatggtggcagctggtatagatgattatttgtagcaggaaaactgttttatttgtgatcaacaaattttggtcatgcgtacgtactcaaatctgtgaaacttgctacagggataacagcacatctcaaaaatcaatgaaatcaatgcccgtggtatactacctgagttgttttccctcccccatcrtacccctttctctctctccatttttaaagggttaaactgggtgtttttcagagttttacaagagaactattagtgaaaaacaatctgatacattcaagttactaaggccctactctttccctctaatctttcagcaggacccaagggaggctaaagtttagatcagtctattctccac

SEQ ID NO: 146563 - DNA, 566 bp, Homo sapiens
agtctattctccacaagaactttgattcactattaaattccgtctaatgaagatgactttgccatcccacggccatcagcagactatgtgtgggacaatgcaaaacccaccttgtatagagggacattgttctttcttcttagttactccagttgaatagaatctcatggaaattcacatgcacaagagacctgtgaaatcagtaacagtactaatctctagggtgccatggtgagtcaacttaaggaaataactattttacttaagtacacacttgttcatgtcttacatcatgtcatgtttatgataagagaaaacagctctctctcacacacacatgcacactcwcacacacacacacagagacttttcttaatcataaaggtaaagttataacataaaatatactgtaactagttgaggagtatgcaatgattacttcttgacttgcagataagaaatttaaaagaatgtataagcctgagatttctggagcttactttaatgcagaaaggatttctaatatgccaatcgtagatactaaaaacatcacaaattatgaaact

SEQ ID NO: 146564 - DNA, 488 bp, Homo sapiens
caatatctgtggaacaatatcaaacagtctaacagatagttaattagagtgtaaaatatattaccaataatggctcaaaagatcttaatttacagatttaaaagtctataaatcttataaatctaaagatcttatttatagatttaaaagtctcactgctgaaaaaacataaaaccacacctagatacattatactcaacctgctaaaaattaaagataaagagaaaatattaacagagtcaaaggacatatggtatacaggggaacaagaatataaatgatttattatcaaaaacaatggtatacaaaaaacagcrgtataccatctttaagacactgaaagaaaactgtcaactcagacttctatttcaatgaaaatatcaggtatttagaaaattgctcaaatgttggaaagtaaataatatacttctaaattaccatgactgaaggaactcactagtgaatttagatattttaactgactaaca

SEQ ID NO: 146565 - DNA, 458 bp, Homo sapiens
ggattacaggcgcaagccactgcgcccggccacgtacttcatttcttggctcaaaaaatattccattgtagagtggaatatgcttttgaattaattgctaagtaaatcattcacagactgtagtactattattagcaacaattaaataagataatctatgtaaggtatggggcacgtggtgtgcaatcagttagcattcacttttcatcatcaacaaaaattcctcatagcacacctcgctggtggtggtgtcatcacaccttacttgggaatcaataggctggaggtgtcatccagatcccatcttctgagtacatgaatcaaaacatttctgcacaagtattacatattcccccagttctccaatgtrtgcggacctctggcgagtaaaccttccttatgcagtaaccattataagctagcaaaacactggaacccttcttcaagtaatcttgcca

SEQ ID NO: 146566 - DNA, 326 bp, Homo sapiens
tcagtggtagttgctacatcggggttggtgagcagggaagtccccttagctgcattcctgccaccatggctactctgttaatgggcccattgaggaagcaccagagtggccaaggacagaggcttgcttactgcactggatgagtcatccctgccacctggttgctctgcacctgctttgtgatggatattctctcayaggccttggtatgagacacaaagagttgcacattttgttgcctaattccagaggccacttgcctgcttcttctctaggcctctttgtcttcagtcttctatttatttttattttatttgttttagatt

SEQ ID NO: 146567 - DNA, 537 bp, Homo sapiens
agatctatacaaggagtatggcctgcctttgtaaaagaaaagaataaatacttgttctaagaaaacaaatcaaagcatggcattaaagctaaaaagtctgacagataaagctagaaagactgaaagatggtcagaytgatctaagaaaaaaatttaaacttgtgggtatcaaaaccttgaagaaggttaaaagatacatgacaaactggaaacatatttgcaatttatataacaaagagcaattagctatatcaaaagagcttccacaaatcaaaagaaaaatacatattccagtatttaaaaaccagttaaagaacatgaaattcaaaaaagagtggctaaatggccaataaacatttggaaatacacccagccttaaaactactgaaaaaaatgcaaaactttaaaatgtaaacctttcagttgggcaaaatttttaaagcacaaatattcttgatattggcaagcatgggacaaaacagcactgttggggaaaaaaaaaacagcacaacctttctggaggaaatttggcatttt

SEQ ID NO: 146568 - DNA, 576 bp, Homo sapiens
ctctggcttgccgaagtgtattttgtataggtcctattgcacaaatggataaaaaaacaaataaacagtattcctcaaatacaattgtatctaagacatagaagacacataaattgtagcaaaagccaaagattattttattaacattagctatcatcttattttctgtcataaatgtctacatgcaaggaatcataaacatacatgttccagtattatatcacatttgtagatctttcaaggatattaggagccttaaaactacatgcaaaatactacatacgcatgcattttttcatgaggagagggtccatagtcctcattagattctcatacaggttcataacattgatcttgtccaactgccacattctccatgtaaggaaaccatggtccctggaagttcactgacattcctaaagctattcaagtagaaaccaggacagctgcacagatctcttcaycctactctactctgtcatgtattatttaggggtgtctcacagcatgggaaacaaaatgaatgcccaatatgtgctagtgatctgatgacaacacagaacagggctgggtgtt

SEQ ID NO: 146569 - DNA, 561 bp, Homo sapiens
cttattcccagtcatgttaatgggtacactgacagttgtaagactaaacctggggtctaatctttgtggaaccaaataaccacaacaaaattgttcaactttgctaagcctctgtaaaatgggataacaacaatatctgccttatacagttgatttgagaattaagtgaaattatgtcacayattttacaccttgtctggtatctactaagctattgatgatagttttaaatactgtcaagtaaattaaaagtacatgctattttttaagacagcatccctatttctaagaaagcttaccttgtttgctgcactcatcccaaatatggcatctcatccagtattgatagaatttgttgatttcttaaatgattatgtcatcactagaccatttgacatgacttgaaatgacttctgccatgtgactctgacaccctcacttgttagtcatctctatgagagacaggatttcacaactggtactatgcttgggaataagtttcaccacactcttataccatcagcatttcattacttagctttcccagtctaagccattgga

SEQ ID NO: 146570 - DNA, 561 bp, Homo sapiens
cttattcccagtcatgttaatgggtacactgacagttgtaagactaaacctggggtctaatctttgtggaaccaaataaccacaacaaaattgttcaactttgctaagcctctgtaaaatgggataacaacaatatctgccttatacagttgatttgagaattaagtgaaattatgtcacatattttacaccttgtctggtatctactaagctattgatgatagttttaaatactgtcaagtaaattaaaagtacatgctattttttaagacagcatccctatttctaagaaagcttaccttgtttgctgcactcatcccaaatatggcrtctcatccagtattgatagaatttgttgatttcttaaatgattatgtcatcactagaccatttgacatgacttgaaatgacttctgccatgtgactctgacaccctcacttgttagtcatctctatgagagacaggatttcacaactggtactatgcttgggaataagtttcaccacactcttataccatcagcatttcattacttagctttcccagtctaagccattgga

SEQ ID NO: 146571 - DNA, 453 bp, Homo sapiens
atatcaagaattatagctataccacgtccttttatataatctttttaagtgctgtmaaaataaacaaaccggtaagctgattgtggcaactctatattcttatgttaaaaaagaataaagaaaatgaatcgaaaacgataaaatcaagagttaaaaatagagaaacatttgtttcaaccaacaatttctcaggagttagttgcctactctaatctactatatacatttgatggtgcacacagtatactgaatattttatacatattaagtaatttaatcctcacaactgtatgacttacatactatagtatctccattatgcaaaagaagaaattgagactaagttcctatataacacccacattcaaagtgatgcaaaagacacattaataaacatttaaaatttctgttgagcttaccattctttcaatctgatgactcctttctataaac

SEQ ID NO: 146572 - DNA, 454 bp, Homo sapiens
aatatcaagaattatagctataccacgtccttttatataatctttttaagtgctgtcaaaataaacaaacyggtaagctgattgtggcaactctatattcttatgttaaaaaagaataaagaaaatgaatcgaaaacgataaaatcaagagttaaaaatagagaaacatttgtttcaaccaacaatttctcaggagttagttgcctactctaatctactatatacatttgatggtgcacacagtatactgaatattttatacatattaagtaatttaatcctcacaactgtatgacttacatactatagtatctccattatgcaaaagaagaaattgagactaagttcctatataacacccacattcaaagtgatgcaaaagacacattaataaacatttaaaatttctgttgagcttaccattctttcaatctgatgactcctttctataaac

SEQ ID NO: 146573 - DNA, 453 bp, Homo sapiens
atatcaagaattatagctataccacgtccttttatataatctttttaagtgctgtcaaaataaacaaaccggtaagctgattgtggcaactctatattcttatgttaaaaaagaataaagaaaatgaatcgaaaacgataaaatcaagagttaaaaayagagaaacatttgtttcaaccaacaatttctcaggagttagttgcctactctaatctactatatacatttgatggtgcacacagtatactgaatattttatacatattaagtaatttaatcctcacaactgtatgacttacatactatagtatctccattatgcaaaagaagaaattgagactaagttcctatataacacccacattcaaagtgatgcaaaagacacattaataaacatttaaaatttctgttgagcttaccattctttcaatctgatgactcctttctataaac

SEQ ID NO: 146574 - DNA, 454 bp, Homo sapiens
aatatcaagaattatagctataccacgtccttttatataatctttttaagtgctgtcaaaataaacaaaccggtaagctgattgtggcaactctatattcttatgttaaaaaagaataaagaaaatgaatcgaaaacgataaaatcaagagttaaaaatagagaaacatttgtttcaaccaacaatttctcaggagttagttgcctactctaatctactrtatacatttgatggtgcacacagtatactgaatattttatacatattaagtaatttaatcctcacaactgtatgacttacatactatagtatctccattatgcaaaagaagaaattgagactaagttcctatataacacccacattcaaagtgatgcaaaagacacattaataaacatttaaaatttctgttgagcttaccattctttcaatctgatgactcctttctataaac

SEQ ID NO: 146575 - DNA, 312 bp, Homo sapiens
tcccttccattttcttgacatacttcttgatctcctacagtgtcggtggacagagtgtgaaaaccttggtctaccaaaagaagtcctccttagttccttttccttaggcccatatcytaatttaggtccttggtattttactatgctagcagcgaaaggaagcaagggtatatgaaccagtggaaagagagatctgcttttacatagatttatttgtgtttctcttttaaaccatgtgatctagttatatcttggaccacccacattacttctccttcccccatgaagggaagtgagtggagggagaccatg

SEQ ID NO: 146576 - DNA, 605 bp, Homo sapiens
cattactagtgcttgcaaattatacactttatgaatcaagcagccatagcagaaactacacatatgaaagaaagcatttgaaagaaaaaatgatgtaaaaatatgctttaataaatttggaaaataaagctctaaccagtttccaaaatagtccatataaagacaataaatataggtaccgtgtaatagtaatggtgctaaagtttttgaaattcaccacatctrtttcttatttgtttgtttttgccatatttataatgggacatctgatttcatctcttatttattttgattttgtattttatttcatatctctgttcaaatgaaggataggtttatattttttgctttgttgttttactgagatactcaccatctaatttaagtgctccccatccagtgacaaacactttactcttaggcaaggcttcaaaagtagcttctggaagacagactctgtgcacctcattggaaaatatgatgggggtgaagagcttcactacagcgatatcatcctcgtgtttatgggcagcatagttctcatgaataataattgactccccctttcttctcattagtgagggattcgggttattccaaaacta

SEQ ID NO: 146577 - DNA, 606 bp, Homo sapiens
gagggattcgggttattccaaaactagccatccagagtttgggtttttcttcactgatcacagagtaaaaggaatacagttggttcatttctaatttaaatttgcccaggactgtggatgggcaggggacataaatgtgggagaagggcaaattttttaaggtaataattgattgggaccatcccaccttcttatctgaggcttctctcctaagactgctttgctttcatctacttgctaacaaaccgccattccaaggtagcttaaattactgtccttgagggaagcttgtatttttatattattccacattatcctatattattgccatttttgactataaaaataatacaaattaatttaagaaaacaaataattataaagtagacatatatacacrtagattcacatatacactcatatcaaggcacaatcatataaatgtatgtatagttataaagagaaagagaggtaaaattggagcgatattttatatatttatattgtttccttatgctttctttttatttagcatcttatccagaatattctcccattttatataaattttactagggttactgtatctctttattatttccaagt

SEQ ID NO: 146578 - DNA, 441 bp, Homo sapiens
gccaaggcctggcagtccattctgccagcagcagtgacagccgaaagcccttgaccatcccaatccacacttcaaaaccaggaactacctggcagactgatacacccacaaagacagtggcagcagagacctgcatctactcagaaacataagaagactcaggcccagtgcacccctccacaaagggtggcccactgattcaaggcagccgagrgaagcatgttctactcccacaaaaggcacgggaaacagtaattaagaggaagtgcagaatagtactggaaggatatgaaaactaaattgtcactgaaacaacaaaagtaagaatctgtactctaaacctaaacaggttgcctattggttaaagtagaagaattaaatagaaccagaagtctcctaatgtaactaaaatgttcaggatacaaagaaaaattgctcacc

SEQ ID NO: 146579 - DNA, 441 bp, Homo sapiens
gccaaggcctggcagtccattctgccagcagcagtgacagccgaaagcccttgaccatcccaatccacacttcaaaaccaggaactacctggcagactgatacacccacaaagacagtggcagcagagacctgcatctactcagaaacataagaagactcaggcccagtgcacccctccacaaagggtggcccactgattcaaggcagccgagggaagcatgttctactcccacaaaaggcacgggaaacagtaattaagaggaagtgcagaatagtactggaaggatatgaaaactaaattgtcaytgaaacaacaaaagtaagaatctgtactctaaacctaaacaggttgcctattggttaaagtagaagaattaaatagaaccagaagtctcctaatgtaactaaaatgttcaggatacaaagaaaaattgctcacc

SEQ ID NO: 146580 - DNA, 514 bp, Homo sapiens
cttccagatgccctaccacattggttcttattctctgaacattcgagactttgtcagtgtcttccttaaaatatgcttccaataactaaatacaccaagacagatgtgtgactagtgtcacacataacaaaataaagcaggaagtcttctgaaaaatacaaataatgtaaattggtgggagacagtgttttataaagggaagagcagagagaggcaggcasatatgtgatgtgaatcaaatagtttaacctatccaggctttattttccttaagtataaaacacagtctttactagatgatctttcattgctactaaatgatttttccgattcctgtatgtaccataatccacccattgcccaagcccacaagctagaagtcaaccgcatttaccacatttgatcatctctcaaaggactatgcagtcatctaatagactttaccacatccattcttgaccttcaagaatctactccccagaaagaaccaacatgttttttaaaaatgtaaatg

SEQ ID NO: 146581 - DNA, 513 bp, Homo sapiens
atgatctccgagaagccagagtgaaaatcataagtgatgatgtctgcaagcaaccacaggtgtatggcaatgatataaaacctggaatgttctgtgccggatatatggaaggaatttatgatgcctgcagggtaagttggagggatttttttatattactaactcaaaaatttgtctctggctcagaatatattatatgttctttacataaggacaaaacatagatatcatgtcagctcaaaaaagttacaaatgcaaatttcacagcacaaaatacttttaaatgttttattaagataaatgaagtaagagtttctctgatgctatcaaacaaacaaaattagaatttcttaaccagaaatccaaagattaataaagcagtttattttctcaagyggctcacattcaagaaagaaaataatcataaacagagaagtataaagtgatgttatgaataatataatgaaaagcaaatatttttcttgaaggaaacatttttggaacaagtatcag

SEQ ID NO: 146582 - DNA, 527 bp, Homo sapiens
aggtctgggatggggcctagcaatctgcaagatgattctaatgttggcggtctgaaaatcatgtttttagaaatggagaaatgatccacaaaatcccttccacttgcattattctatgataaaaagaagtttacctgactcaccaaattttcrgtcgtctctcgtaagtccttaagttgatatgtgttgctttgtccgaaattgttattgatttgtggatctaaaattttaaaggagccatgatagtactcctttttttggtctgcaatggaaatgaaaaataggaaactaaatggtttggacaaagatttcagaactcaattacaatggggccaatataaatcttgaatatgtccctgagcctcttcataattgagttttatttaaaaaataacagttaatgttttatatcaattataatagctgccatttattgagtttctacaatatggcaggcactgtcctgtgcactttttatgtattagcccatttaatccccacaccagctctctaagattggtatcacc

SEQ ID NO: 146583 - DNA, 409 bp, Homo sapiens
cagatcctgaatggtttattgtgtcctatttgtaagcaaatgattattttcaccaaagagttttaggtctctccaagaggaataattattttctgatctcgaccttgggtcacagcccagatacttggtggcctcactatcttgagacatgtatcatgtaactcaggcatatctctccctcgtggtctgctgggtgactccactgcaagtggcatttctccatggctattccccatagtactagaagttcctaattgcactgctacacactacttttacgagttttggggctctttcagattcctggatcttggatgaaaataataaaaktatttcttagtattttttgctctctcttttcaagcttctatttttctcacatgccacattggccattgtgatgtgaatt

SEQ ID NO: 146584 - DNA, 559 bp, Homo sapiens
agatcttgcttatattactttcatatctccagtgggtcaatttcttgtcattgccagagatatttcagaaacatatctatgaatctgttgggaataaggagatatggatagcttcagtttaatgtccagtaactctgtgatctgaggcaacattttccccctataaaatagggcaggsacagggactaactcatatgaagattgtaagaaataaatgagataatttgcacgaaatgattcaaatttagtaagtgtataataaatggtagctgttgatgcactacaaatgaatcatcacccactgtggaatcatatgcttatctgatcataaattcttacaaactaggcttccaagtactttatacacatttctgtcatcctctctcttttatctatcaactattattccttatatggcagtgatacagtttggctctgtccccacccatatcttagcttgaattgtacctcccacaattcccatatgttgtgttgtgggagagacccaatgggaggtaattgaatcatggaggtgggtctttcccatgctattctcatg

SEQ ID NO: 146585 - DNA, 584 bp, Homo sapiens
aatatggttttaagtaggttgttgtcttaatcataaaactggtttggtccaacaatatactttgcagaacaccatgtaagtttagcttacttcactttttttttttttttggcatccaattgatgtgagataagatcttgcaattcttattattgaattacagaaattaagcataatttacttacttagggctttgaggattcttggtctgatttaacctaagtttctagtttaatatctaaaatattggtgagattggcaggaatagggctgaggtaataatgaatggtggtaggaggaggatctgttttatgttttaaaattrcaattttaatgttattagttgttgggaacatcattagtgatgtggaataaattagatgtatataaaagtacaggttgagaagagctatgatagcaatgaatgtaggtataatgaggctattattttttgttatttcttgaatgatagctcatttgggtaaaaatcctgttagcaggggcagttctcctaaggatagtagaataacaaggattatagatgttagtgatggtcatttatttcacatacaggatagtgataa

SEQ ID NO: 146586 - DNA, 553 bp, Homo sapiens
tggctagaggcagcttagctgtgaatgactgcactagcttctgccaagaccatcctgagttttcactgtttacatctccatgtgtggactttaccctcaccacacgatggcagatggaaatctgataaaaacgaagcaatgcatatagatacatgcacatgtatttatacatacacacrtgtgtatatacacacaggtgtgtgtgtgtgtatagatataccacaaaacaggagacctttatgttttgatgatgggattcaagtgtttcaacaacaaaatacaaccagtgttttccaagttggactctgtaaagtcccagaaatccacaagattttcattccttatattcatgttggacactgttactgaagaaccacgttccttttatcctggaggaaagaggacgggtcatgtggctgtacctgcacctcatcgcccttggcccaaccccagtttaaaatgagtgatattgcagtctgctaagtggcttgtctatgaagttcatcccaagtggaaacagccctccatcgtgttcagtgagggattattccaa

SEQ ID NO: 146587 - DNA, 553 bp, Homo sapiens
tggctagaggcagcttagctgtgaatgactgcactagcttctgccaagaccatcctgagttttcactgtttacatctccatgtgtggactttaccctcaccacacgatggcagatggaaatctgataaaaacgaagcaatgcatatagatacatgcacatgtatttatacatacacacatrtgtatatacacacaggtgtgtgtgtgtgtatagatataccacaaaacaggagacctttatgttttgatgatgggattcaagtgtttcaacaacaaaatacaaccagtgttttccaagttggactctgtaaagtcccagaaatccacaagattttcattccttatattcatgttggacactgttactgaagaaccacgttccttttatcctggaggaaagaggacgggtcatgtggctgtacctgcacctcatcgcccttggcccaaccccagtttaaaatgagtgatattgcagtctgctaagtggcttgtctatgaagttcatcccaagtggaaacagccctccatcgtgttcagtgagggattattccaa

SEQ ID NO: 146588 - DNA, 514 bp, Homo sapiens
tctgccaagaccatcctgagttttcactgtttacatctccatgtgtggactttaccctcaccacacgatggcagatggaaatctgataaaaacgaagcaatgcatatagatacatgcacatgtatttatacatacacacatgtgtatatacacacaggtgtgtgtgtgtgtatagatataccacaaaacaggagacctttatgttttgatgatgggattcaagtgtttcaacaacaaaatacaaccagtgttttccaagttggactctgtaaagtcccagaaatccacaagattttcattccttatattcatgttggacactgttactgaagaaccacgttccttttatcctggaggaaagaggacgggtcatgtggctgtacctgcacctcatcgcccttggcccaaccccagtttaaaatgagygatattgcagtctgctaagtggcttgtctatgaagttcatcccaagtggaaacagccctccatcgtgttcagtgagggattattccaa

SEQ ID NO: 146589 - DNA, 558 bp, Homo sapiens
gccacatccacgcatctgcgttctcgtctgtattcagagctgcagctggataggctcctagaagccactgattttattttcctgggtttatgttcctcamacctttcacacagaaatcagctacgaagaaagcctctccttggagctgtgagaattcctgaaatatttcataatctttgccatcaaaaccttgtgtgtactttccagctaaaagggagaaggtctttcccagcaaacagctccacgctccagagccctcttgtgaccatcgtcaccaatctgaccatacagacaagctccgggacacctcagcccggaaaaatccaagctctaaattaaggcagtgacgtttattctctttctaaaactcattcatgttcttagtaactatgtctccagcacagacctccattttaaactgaacacactaacaccatcagccttcattcctcctgggctgccaccccaaatctcctggcaaatgtaaatttttccctgtttttccactgctgttccctgttcttccttttcctgacacgtatcaggagatgatgtctg

SEQ ID NO: 146590 - DNA, 558 bp, Homo sapiens
gccacatccacgcatctgcgttctcgtctgtattcagagctgcagctggataggctcctagaagccactgattttattttcctgggtttatgttcctcaaacctytcacacagaaatcagctacgaagaaagcctctccttggagctgtgagaattcctgaaatatttcataatctttgccatcaaaaccttgtgtgtactttccagctaaaagggagaaggtctttcccagcaaacagctccacgctccagagccctcttgtgaccatcgtcaccaatctgaccatacagacaagctccgggacacctcagcccggaaaaatccaagctctaaattaaggcagtgacgtttattctctttctaaaactcattcatgttcttagtaactatgtctccagcacagacctccattttaaactgaacacactaacaccatcagccttcattcctcctgggctgccaccccaaatctcctggcaaatgtaaatttttccctgtttttccactgctgttccctgttcttccttttcctgacacgtatcaggagatgatgtctg

SEQ ID NO: 146591 - DNA, 479 bp, Homo sapiens
gttcttgctcctgctgcttaaggccccctctccaactctctccacgtgttaggatgtttcccaaacttcaaggcccagctcagttcctaactcctacaggaaagttcctctgagccatccacctgtgccaccctctttcttcttatatgcyagcaaggacagaaaactaagtggtcggccacaagacaagcgtttgaagctgaaaatcagagacagtgcaatgttaggctgccagaaaaaaaaagaagaaaatcaaaacatagttagtggtgtatatatatatatatgatggaatactactcagccatagaaaggaatgggttaatcacattcacagtaacctggatggcattggagactattattctaagtgaagtaactcaggaatggaaaaccaaacatcgtatgttctcactcataagtgggataggagctaagctatgaggattcttatgcaaaggcataagaatgatacaata

SEQ ID NO: 146592 - DNA, 623 bp, Homo sapiens
aggcacgaccacccggtcattccagagtctatcccagggctgcctttgaggagcagactccttctgccagagcggggcttgtgcccaccctaaaagcaaggcaatcagaccccagaatctgacaccgtaatttccatcagaacccctcacccagaaccagaaagttccccacccttacaaggtgattttagaagcactgggaatgccactgctggtcccccaaaatattcaccatcactaccaccacctcacgaatgcctgaagtgcctttggttgtggaatagaacttgatggacatttcatggactccacttccctcccatcagcactgctataattgcccctccttgctcgtccagtggaaaccggcataggggaggagtggccaatatctgatagaagctctgtgtacacccttcatgacctttgcgccactacagaggacctaagagaygcaaaaccctactgcaggagaaaagacacacacaaaaacatcgagcatgtcatcagtggacagcgagtcagtaccaagtttccaggctggaaatgtcgatactattcctggctgtcactgatttgtctctgtgatgttggacaagtgcctaaacctctctgtactttca

SEQ ID NO: 146593 - DNA, 584 bp, Homo sapiens
gtcattggtgttggactactagagggagggaggtagaagagtagaggcgttggtcaaagaaagggaggcatgagatggagattaaggagatgtaattattggtgatgacaaagttgcaaatgtaactaggggtggaggacaaagaaayaagaagagcttaagaaagtgaggagacaggacttactttgggtaacatgacaacaagcaataaggaagctgttgggggggcaattatcgacatccataatgtagaatgccattttcacatttcatatctatgacttttatcttcctgagtttataaattcaggatgggaatagctgttttaccacatctgtagtaaatcctgtacacatctgaggggtaggggtgagatatacttacaaatccttgcagaggatgacttcagttcagaggttctttggtggttcttaatgacctacataataaggtactgaacagctgtctttcatttcagaggacatttatgaagttctactctatgtctactccatcctttacccaaaatggctcaagcccacctatgcagactcactgtgaatacatgaaagccacatgccac

SEQ ID NO: 146594 - DNA, 589 bp, Homo sapiens
tctaataaccacactatagttatgtaagaaagtatccttagaaaatacacattgaagtatttaggagttaaaaggcacaatgtctccaatttactctcgaagggaatgtatgtgtatatatagagagagacagaacaagagacagataacagagcgagagacaaacagagaaatggtgagacagagaaatggtgaagtgaaaattggagtagccaaaaacatagagacagaaagtagaatggtgggttgccaggggctgaggcaaggtggaaacacagtgttatcacgtcataggtatagagttgcagctttgcaaaatgaaaagagttatcagatggagtgatggatggtgatgatggctgcataacattatgaatataattactactactgaactgcatacttaaaaatgattaagatgttaaattttatgttatgtgtattttaccataatttttaagttgggggaaaagacagcaaatgggggaaattgtcaacaggtgatgaatctgataaagaasggtacataaaagttctctggactatcgttgaaaatttgctggaattttaaaattacagaaaaataaca

SEQ ID NO: 146595 - DNA, 624 bp, Homo sapiens
gaaatcaggagatagatgtggcctcaaataagtttcttaaccttcctttctcttagtttcctcatttataaactagaaatcataactactttacacatctcactgagttattttgagaaccagtgagatgagatataaatatgcattttttaaaaaaggaaaccatacaggaaataatctagatctgtttgccaaatcgttccccattatttttcaactcttcatttctgctctagagggaactgatgygggagcagggccacagaagtgcagaacaatggccccaggattggtagtgagaaaacctggattctaattttcctctgctatgtgatagccgtgtgatcttggaccacatgtaatctctgtgttctttatctgtaaaataaagatgactaagctaaagccatcatttaaaagaaaaaatgagaaaattcactgagtcattttgagggtttactttaaaattatcattatgcactctgaaatataaggttataaagccctatgctaacagtcatgagtagtaggagattctcgccatcctgagtatactgcaggcatggaatagcttattttgagcaaaggagatataggtagaaagtacacaggcattgttattgc

SEQ ID NO: 146596 - DNA, 549 bp, Homo sapiens
tgagaagtacttggcacagagtaggaaattaatcaatgttatttccttcatcctctcaccctcttctaacacagaatagtagcagaagaagcagttactagatatgtgatgttttgaataaccttgtctccagagttagggcaagtgaaagactcccatgccttctctacacctttgtgaccgcaggaagaggtacaggaagatcagggatggttgggtcaaggctcacagtgaagggggaaagaaaggggctcagtttaatcatcaggaactcaagcattgctgaacattcctgctagggacacaagaaaaaaataagatttggctgccmcccttaaggaatgtattttctaattgggaaagcaaagaccaacatgaggaaggtgtctaaaaatacaaggtggtatatgctgcatgtcaaataggacagacattaagctcactctagagagaaagaaaatccagcccaagctggggtgcttagagaaggctacatggaggatgggggttaatcctggtgattagcaggggaatgacactgtttactgg

SEQ ID NO: 146597 - DNA, 506 bp, Homo sapiens
tgttactatctgcatctggaaactccctacattttcaataaatacatacattgaggtataggcatttaatggaacgcagagtagcaatgaaaaggagctaacagaagctgtacacaacagcatgaacaaatctcacaaacatcaaattaaataaaagaagcaagtcatgaaagaatacatacacagctgggtgcaktcactcctgcctgtaatcccagcactttgggaggctgaggcaggaggatcgcttgatgccaggagttccagatcagcctgggcgatatagccagtctctgtctctaaaaaaaaatttaatttttcaaaaattagtcaggtgcagtggtgtgtgcctgtagtcccaggtacctgggagactgaggcaggaagatctcttgagcccaggagttcaaggctgtagtgagctatgattataccactgtactccaaccagagtgagatcctgtctcaaataaaaaaaaaggaaaaaggaaaaaggatatatgtag

SEQ ID NO: 146598 - DNA, 506 bp, Homo sapiens
tgttactatctgcatctggaaactccctacattttcaataaatacatacattgaggtataggcatttaatggaacgcagagtagcaatgaaaaggagctaacagaagctgtacacaacagcatgaacaaatctcacaaacatcaaattaaataaaagaagcaagtcatgaaagaatacatacacagctgggtgcagtcactcctgcctgtaatcccagcactttgggaggctgaggcaggaggatcgcttgatgccaggagttccagatcagcctgggcgatatagccagtctctgtctctaaaaaaaaatttaattyttcaaaaattagtcaggtgcagtggtgtgtgcctgtagtcccaggtacctgggagactgaggcaggaagatctcttgagcccaggagttcaaggctgtagtgagctatgattataccactgtactccaaccagagtgagatcctgtctcaaataaaaaaaaaggaaaaaggaaaaaggatatatgtag

SEQ ID NO: 146599 - DNA, 487 bp, Homo sapiens
ggttatttcaaagatgtgtggtaaatagcatggaacgtgggtaatgaggtgatatggtcacccttctgtggcccagcagaaggaagctggggactgagaggcaagtgcagtgtcttggttgctgacacaggcctggtgaaacccttccctccagggagaattatatccagctgtggtcaaaactgggactctctggcacagaggaacattktccaactctttggaattacaaagcacatgagtcaaaggagatctcctttggatggggaaatgaggagaaaaccagttttggagaaacatagaataaacaactttgcaccagcagcttctgacatctacacacccatatagatctccaggcatcacctggctcttgggctctgctaggacctgggtctttggatggctgtgtctatttcagagggtgattagatcctggtgggtggtttctgatctcccatccctccaataaggactttataactta

SEQ ID NO: 146600 - DNA, 455 bp, Homo sapiens
aagaccaccatgttccgcctggttgcccctccctgcgccatggcctgaaagctttctcagagccataaggtgggcaatcttagggttcactttgaygcagggcagctgagcccccaaattggagtcttagcccaggaaagttcttagctttacccaggaaggaattcaagggtgagccaggggtattagacagcaatcttttattgaaccagaactgtcctcacggagcagggctaactcataggcagtgccccaaagcatttcttgtgggctgttggttacctgtgtttctacctacttttacccacttttaattacatgcaaaattaaggggtgaattaatgcaaattaaggggcaggtcattcagaacattctagaaaagagggggcaacttcctggtcattgccacagaaagaggtggtaacttctggtcattgccatgacatttgtaaac

SEQ ID NO: 146601 - DNA, 608 bp, Homo sapiens
ttagattgggagaaagtgaagacagaaattgcttgtcaggttaggaaagggaaggagggaaggagataaatcatcttccacattgggaagtcttagagaaatttttaatctgcaaaaccaaataagtaacaatataggcatttttgttgaagacatggaggaagatatcaaaaggttagctaagaaagtttacaagagttgctctgtgggagtgggaaatgggtgaatagacacagggaacttattctttgtaacaatcttcgtcaattagatgtatagatattttaattctaaaattaaaacaacgtttttctttgaaaaagaaatcgccatgtcaagttgtttcactggataattctgtttaaggaagaatcaatgctaacaataagcaattttttccagatmatataagaagagaaaatatttcccttctcattgtatgggaccagtatcacactaataccaaaaccagacaaagaattacaaaaaaagaaacttacagatcaatatccttcatgcatgtagacacaaaaacctttaaacaagtattaacaaataggcttcagtgatttttaagaagaattacacaccataactaaatgaagctt

SEQ ID NO: 146602 - DNA, 608 bp, Homo sapiens
ttagattgggagaaagtgaagacagaaattgcttgtcaggttaggaaagggaaggagggaaggagataaatcatcttccacattgggaagtcttagagaaatttttaatctgcaaaaccaaataagtaacaatataggcatttttgttgaagacatggaggaagatatcaaaaggttagctaagaaagtttacaagagttgctctgtgggagtgggaaatgggtgaatagacacagggaacttattctttgtaacaatcttcgtcaattagatgtatagatattttaattctaaaattaaaacaacgtttttctttgaaaaagaaatcgccatgtcaagttgtttcactggataattctgtttaaggaagaatcaatgctaacaataagcaattttttccagatcatataagaagagaaaatatttcccttctcattgtatgggaccagtatcacactaataccaaaaccagacaaagaattacaaaaaaagaaamttacagatcaatatccttcatgcatgtagacacaaaaacctttaaacaagtattaacaaataggcttcagtgatttttaagaagaattacacaccataactaaatgaagctt

SEQ ID NO: 146603 - DNA, 608 bp, Homo sapiens
ttagattgggagaaagtgaagacagaaattgcttgtcaggttaggaaagggaaggagggaaggagataaatcatcttccacattgggaagtcttagagaaatttttaatctgcaaaaccaaataagtaacaatataggcatttttgttgaagacatggaggaagatatcaaaaggttagctaagaaagtttacaagagttgctctgtgggagtgggaaatgggtgaatagacacagggaacttattctttgtaacaatcttcgtcaattagatgtatagatattttaattctaaaattaaaacaacgtttttctttgaaaaagaaatcgccatgtcaagttgtttcactggataattctgtttaaggaagaatcaatgctaacaataagcaattttttccagatcatataagaagagaaaatatttcccttctcattgtatgggaccagtatcacactaataccaaaaccagacaaagaattacaaaaaaagaaacttacagatcaatatccttcatgcatgtagacayaaaaacctttaaacaagtattaacaaataggcttcagtgatttttaagaagaattacacaccataactaaatgaagctt

SEQ ID NO: 146604 - DNA, 604 bp, Homo sapiens
tgagtatttgatgtgcaaagccctgttctgagtgcttagttgtataaactcagtcctcacaaccatccctttaggtaaatgatattgtatctgattttctagataaggaaactagagcataacaaggattacagctttcctaacatcakgcagtctagcaagcgatgcactcaagatttaaactcagtaagtctggatataaatcttgcgctcgaaaccactctattatgaaaaattgacagggatgaaaacttcaggaagccaaacagaatatcaaaaagcactgccatttagaaagaagtattcatttggaaggggcatttaagctgatacctgaagaaagaaggaaatgactaagcaaggaatggaaagaggattgctctaacagtgccaacagcccatgtaagggctttgaaatagaatgaaactttcagcacagatggagcctggtgagagtgggagagcaggccagaaggtggggctggaaagtttgactgtgacagatcaggccaggccttttagattaaacattaaaaaaataaagtttttttttttttttttaatattcaaagcacaacaggaagtcatttgtggaaagacatga

SEQ ID NO: 146605 - DNA, 597 bp, Homo sapiens
tgcttagaagcatgtatctcctgagctgaagcagaaggaaaggactgttgtatagtccaaatttccatgctgaatgtatactgattccctttattatgattgcttacctgttcattacttgtcccacagatactttctcatgtagctcagtaactcctgtactttgcagacaggagagtttcagaaacttgaagaacaaattccaaaagaactatgagtaggtgatggatactttttcttttcttaagccacatttcattgccacagtcaaagcagaatgttatgtgatgattttaaattcattttgtattagtaacttcaagtataacaactttgaaactgaaataagtgttaatttctattaacacaaatgacttgtgaaaaaaagttcctcttactggcagctggtttgtaaatttcccgtataaagcctgttactaaaccaatacagtgtggttttttggaattcacccattcycatattgcttcacagttgtcatcatccctctgagcaatattatgggaaaagtttcaagtgatacatattcttctgttaatatcctggctgcctgcaattcttctctgctgttcactcat

SEQ ID NO: 146606 - DNA, 455 bp, Homo sapiens
cattggtatgcacattaaagtttgaaaagcattgatcttgatctgatacaatgtttaataaacctgtgtgtacataaaccacctggatagctttcaaaaagaatcatgctcaagtttgccaccagagactctggggtaattgtttcaggtggggtccagccagccctaaaagctcctcagcagatactcagctatggtgaaccacaggcagcatcatgtgataagcagccagtggatatcagagctcactgctgtttgtttcaacccaaagccatttcaraattgcctttgactctatagcagagaataggttgaacgacttatcacaaggctggcaaacagcaaagtcctattgggccccgtactactgggattattttttggctagaggagaagatagcatccaacagcaaaggttgtcgcatattcccagtgccctcctgagggttgatatc

SEQ ID NO: 146607 - DNA, 469 bp, Homo sapiens
gggggtcatatattaacaaatcaggaaaaaaaaattgctgtctcatagttaccctttggttgtttttacagcttatattaaattttcaatattattrtctataattgtatagcagattttatactaaaatgtatatttgcactatgataccccattgatagaaaccgtatattttaaaactcatcaggaatttccagacatagtctctaggtaaatggaaatggttaatttatgatagctggcttaaaattatacactaagtttaatagcatatatctgtaccattactttaatatagtttgatagcaaacacttagagatttaaaaattttgggttgctatatcatcttgaaaatgattattaaatgaattgtctagctacctatctatctttctgtcttatctaccagaaaaatgactgtatttggcaaagataaatggaacacaatttctggcctcaaagaacaga

SEQ ID NO: 146608 - DNA, 517 bp, Homo sapiens
ctctatcctaacaacaagtaaaaatctgaacaatttgaaaaaaaaatcaaccactctttttagattcatcagagaagtgaggttacagagcaaacttatgccctccaaatkggaaacacggactggatatagagaatcacaacttaacagagcagagcagaatgctccactggaattagttaagagtaggaaaacctgagatgtaattgacaaactgctgtaggcttggtgtggacaagtctgagagtaaaatagtccagcgaggacattcatactggggccctcacacttttgtgagttttaactccagaatctctaccaggctttcaaagtgaagatcagggaaagatcccctgctgattctggcagtgggagcagaaaagtaactagtttgaaatactccggagcattctgttcttatgagcatgggctgccttcaggagaagctattttatcagagccttatatattggggttttatcaggtcccaactgatataagagaagaaaaatacctg

SEQ ID NO: 146609 - DNA, 517 bp, Homo sapiens
ctctatcctaacaacaagtaaaaatctgaacaatttgaaaaaaaaatcaaccactctttttagattcatcagagaagtgaggttacagagcaaacttatgccctccaaattggaaacacggactggatatagagaatcacaacttaacagagcagagcagaatgctccactggaattagttaagagtaggaaaacctgagatgtaattgacaaactgctgtaggcttggtgtggacaagtctgagagtaaaatagtccagcgaggacattcatactggggccctcacacttttgtgagttttaactccagaatctctaccaggctttcaaagtgaagatcagggaaagatcccctgctgattctggcagtgggagcagaaaagtaactagtttgaartactccggagcattctgttcttatgagcatgggctgccttcaggagaagctattttatcagagccttatatattggggttttatcaggtcccaactgatataagagaagaaaaatacctg

SEQ ID NO: 146610 - DNA, 539 bp, Homo sapiens
tttttcattattttgacataatatgccccagggcaagcaccacaaataattaaccactttagacttgtgctatctgctaaacttttttatttcattaaatgtagatcatattttagttctctgtgtaagattgttgagctcgacacaattgagaattctcaaracagatctgttgcttcttatgataacatgctttgtaaaaaaaaaaaatagaaacaatgtagatagtatagaggagaaagtaaaaaaaaaaatcacctaaattcctactaccaagatatagccattattgatgtagacagcaataatatgtatagtagatataattccgtgcatacacaaacacacatatgtaatacatatgagatcatatattttacacatacataatacatatatatagatgtatgtatgtatatgcagacacattttttcctaaatggaataatatttggcatgctgttttataatattgggataatctaacatctctgattatgagattctccgaagtatgtgtcttcccaggagctgaatga

SEQ ID NO: 146611 - DNA, 539 bp, Homo sapiens
tttttcattattttgacataatatgccccagggcaagcaccacaaataattaaccactttagacttgtgctatctgctaaacttttttatttcattaaatgtagatcatattttagttctctgtgtaagattgttgagctcgacacaattgagaattctcaaaacagatctgttgcttcttatgataacatgctttgtaaaaaaaaaaaatagaaacaatgtagatagtatagaggagaaagtaaaaaaaaaaatcacctaaattcctactaccaagatatagccattattgatgtagacagcaataatatgtatagtagatataattccrtgcatacacaaacacacatatgtaatacatatgagatcatatattttacacatacataatacatatatatagatgtatgtatgtatatgcagacacattttttcctaaatggaataatatttggcatgctgttttataatattgggataatctaacatctctgattatgagattctccgaagtatgtgtcttcccaggagctgaatga

SEQ ID NO: 146612 - DNA, 539 bp, Homo sapiens
tttttcattattttgacataatatgccccagggcaagcaccacaaataattaaccactttagacttgtgctatctgctaaacttttttatttcattaaatgtagatcatattttagttctctgtgtaagattgttgagctcgacacaattgagaattctcaaaacagatctgttgcttcttatgataacatgctttgtaaaaaaaaaaaatagaaacaatgtagatagtatagaggagaaagtaaaaaaaaaaatcacctaaattcctactaccaagatatagccattattgatgtagacagcaataatatgtatagtagatataattccgtgcatacacaracacacatatgtaatacatatgagatcatatattttacacatacataatacatatatatagatgtatgtatgtatatgcagacacattttttcctaaatggaataatatttggcatgctgttttataatattgggataatctaacatctctgattatgagattctccgaagtatgtgtcttcccaggagctgaatga

SEQ ID NO: 146613 - DNA, 560 bp, Homo sapiens
tacatgattatttgaatgctattaataaaagaaataaaaagtgtactttatcctgaacatcataatttattgtcagtcttttcatgaatctataaggtcaactatcctcttgttttcctcatctgttaagtagatcataaaaaaaataagtagtaaattcacatttataagtaaaggtcttttttttttttttccagaaccgtatcttatttcccctatgacctttgctgttgctcggtcctaataaaattgaggcccaggtggatgatgctaacattcttagaatcaagccaagttagagcttcaaggaaccttttagcattgaattcagtggttyttgaattcccctttgagaacctgttgacagctagtagccctttcccccaggaagatgcatattgtaggcagaatgatagccctccaaagatgtctataccctcatgccccaaatctgtgaatatattacattacatgacaaaggacagttcagattgcagatggaattgaggtttcttatcagctgaccttaaaacagggagatcatcttggatcatctacac

SEQ ID NO: 146614 - DNA, 560 bp, Homo sapiens
tacatgattatttgaatgctattaataaaagaaataaaaagtgtactttatcctgaacatcataatttattgtcagtcttttcatgaatctataaggtcaactatcctcttgttttcctcatctgttaagtagatcataaaaaaaataagtagtaaattcacatttataagtaaaggtcttttttttttttttccagaaccgtatcttatttcccctatgacctttgctgttgctcggtcctaataaaattgaggcccaggtggatgatgctaacattcttagaatcaagccaagttagagcttcaaggaaccttttagcattgaattcagtggttcttgaattcccctttgagaacctgttgacagctagtagccctttcccccaggaagatgcatattgtaggcaraatgatagccctccaaagatgtctataccctcatgccccaaatctgtgaatatattacattacatgacaaaggacagttcagattgcagatggaattgaggtttcttatcagctgaccttaaaacagggagatcatcttggatcatctacac

SEQ ID NO: 146615 - DNA, 560 bp, Homo sapiens
tacatgattatttgaatgctattaataaaagaaataaaaagtgtactttatcctgaacatcataatttattgtcagtcttttcatgaatctataaggtcaactatcctcttgttttcctcatctgttaagtagatcataaaaaaaataagtagtaaattcacatttataagtaaaggtcttttttttttttttccagaaccgtatcttatttcccctatgacctttgctgttgctcggtcctaataaaattgaggcccaggtggatgatgctaacattcttagaatcaagccaagttagagcttcaaggaaccttttagcattgaattcagtggttcttgaattcccctttgagaacctgttgacagctagtagccctttcccccaggaagatgcatattgtaggcagaatgatagccctccaaagatgtctataccctcatgccccaaatctgtgaatatattacattacatgacaaaggacagttcagattgcaratggaattgaggtttcttatcagctgaccttaaaacagggagatcatcttggatcatctacac

SEQ ID NO: 146616 - DNA, 560 bp, Homo sapiens
tacatgattatttgaatgctattaataaaagaaataaaaagtgtactttatcctgaacatcataatttattgtcagtcttttcatgaatctataaggtcaactatcctcttgttttcctcatctgttaagtagatcataaaaaaaataagtagtaaattcacatttataagtaaaggtcttttttttttttttccagaaccgtatcttatttcccctatgacctttgctgttgctcggtcctaataaaattgaggcccaggtggatgatgctaacattcttagaatcaagccaagttagagcttcaaggaaccttttagcattgaattcagtggttcttgaattcccctttgagaacctgttgacagctagtagccctttcccccaggaagatgcatattgtaggcagaatgatagccctccaaagatgtctataccctcatgccccaaatctgtgaatatattacattacatgacaaaggacagttcagattgcagatggaattgaggtttyttatcagctgaccttaaaacagggagatcatcttggatcatctacac

SEQ ID NO: 146617 - DNA, 265 bp, Homo sapiens
gttatgtttcttaattaggtatcagggagaattattaggataattaaatctgrgttaactggtcttcttccaaaagtttctacttacaaagttcagcctcactttgtgaacaatccagtgacagaatccagatgtcttcagggtctgaggccatgtatctatagagtccccagacatcacatgcagtggttgccattaaagttagatgcagccctgccccgaattggacatttgaattttgtactgtgcatttgcatctcttagt

SEQ ID NO: 146618 - DNA, 561 bp, Homo sapiens
acatgttgccaggctggggggatgggctgtgtgtgctattttaatgagactgcagactggttacatctacagcttcccatattttggcttattttagaaagagccagaaaatgatgtttaacggtaaactgcaagaagacaggcagggaggaggggcagatggcatgaagtaatctttctgcatttcaaggcataggccaactctttgttaaaatattctttccagtttggaagcccttggcttaagggaaatttggaaaaaccaagctcatgtcccaaccagcagctcatctagaaagtaaaaatgaaaactctaattatcagtcagtcagtggtttttatcgtgcaacagttaattgtttcacttaaaaccactgctggtaacagctggaaaggaaagtgactggagaacagggtcatttaaaaccattattttgagctacagtttcaatgtcaatgaaagagttgtccaaattttggcatatcactttctaaygaattttagttttatgagatagccatcatttagtgaaatatatcccaaatcgtgagaactgtatt

SEQ ID NO: 146619 - DNA, 476 bp, Homo sapiens
aattcagaaaaggtactaactcaataatcagcttctgatgaatcaagaaattgatttttgtctaaaaaamatctatgggtttaaaaaaataaaatatgaaaagcattactactttacaatggagctagaaagctaaacatctgctagcaagctgaacagagcatgcccagtccggtccctgactcacgatccctgcacgtgggctccactgggggaccacaaggatttagagacaaggtcagaaaccgattgtcccggaagctgaaatgactcaaaacaatacataatggatctactgaagtaactctccttagtagatggctttgaaatgtgtccctgaagataggctagagtctgcagtctaatccaattaagaaaactaagatgttctcaagggctataagctactcagttgcattgtaagaagtctgagacaatagttgtattataaaattggaagaatggtctgaagagtg

SEQ ID NO: 146620 - DNA, 421 bp, Homo sapiens
atgactcaaatcatcattttgccaaagaagatacacaaacggcgaacaggcatgtgaaaaggtgctcaaaatcactagttgctagggaaatgcaaaaccaaaccacagagaacacattaaactcactagaaaggaacaatttcagaaaataaaggaaaataacaagtattgagagtacggtgaaaatgatggctgaatgtaaaatggttcaactactctagaaaacagtcaaaaagtcaaacatagacttaatgtgagactcagtgattccactcctagatctayacccaaaagaattgaaaacggattttcagatcaatacttttaaacaaatgttcacagcaacactattcataatcaccaaaatgtggacgcaatgtacatgagcatcaatggatgggtgaataagcaccaagtaggc

SEQ ID NO: 146621 - DNA, 421 bp, Homo sapiens
atgactcaaatcatcattttgccaaagaagatacacaaacggcgaacaggcatgtgaaaaggtgctcaaaatcactagttgctagggaaatgcaaaaccaaaccacagagaacacattaaactcactagaaaggaacaatttcagaaaataaaggaaaataacaagtattgagagtacggtgaaaatgatggctgaatgtaaaatggttcaactactctagaaaacagtcaaaaagtcaaacatagacttaatgtgagactcagtgattccactcctagatctacacccaaaagaattgaaaacggattttcagatcaatacttttaaacaaatgttcacagcaacactattcataatcaccaaaatgtggacgyaatgtacatgagcatcaatggatgggtgaataagcaccaagtaggc

SEQ ID NO: 146622 - DNA, 530 bp, Homo sapiens
caatacttttaaacaaatgttcacagcaacactattcataatcaccaaaatgtggacgcaatgtacatgagcatcaatggatgggtgaataagcaccaagtaggctatccaagcgacggaacattatcttgcgatgaaagggacgaactgctgatatatggtaccgtgcatatgaaccccgaagacattatcttaagttaraaaagccagacacaaaaggtcacctattgtgtggttcatttacctgaaatgtgcagaataggtaaatgtatagagacagaaagcaggttggtattgccaggggctgaggggaggggaaactggggagaaactgattaaccagtaaggagttttttttcagagtgaggaacatgttttggaagtagatggaggtggtggttgagcaacatggtaattgcgctcaatgctgctgaattgctcacttgaatacagttaacctatggtatgtgaatttcatctcaataaagaagagaaaaggtaatacaaatagacatacagattatcaatcc

SEQ ID NO: 146623 - DNA, 544 bp, Homo sapiens
ggaattcgagaccagcctgaccaacatggagaaaccccttctctactaaaaatacaaaattagccaggcgtggtggcgggtgcctgtaatccaagatacttgggaggctgagacaggagaattgcttgaacccrcgaggcggaggttgcagtgagctgagatcgcgccattgcactccagcctggacaagaacagtgaaaccccatctcaaaaaaaaaaaaaaaaaaccttaacattaaaacaaaacaacagcattttcttttgtcactgtaagtgatgttctaagtatgattttattcatgactgaaggccatccattttttaatgtagatgtaccataattcacgtaaacacttaccacattgcattggaggttttatttttccttttggcattatgaataatgtcgcgcactaccacggttcatacacacatgctccttctctaacctcgctggagctagaatcactgaatgaagtcatattggcttatttaaaggatctaaaagttatgctgcaggtgtggcccattgcatcccacttcc

SEQ ID NO: 146624 - DNA, 523 bp, Homo sapiens
ttctctactaaaaatacaaaattagccaggcgtggtggcgggtgcctgtaatccaagatacttgggaggctgagacaggagaattgcttgaacccgcgaggcggaggttgcagtgagctgagatcgcgccattgcactccagcctggacaagaacagtgaaaccccatctcaaaaaaaaaaaaaaaaaaccttaacattaaaacaaaacaacagcattttcttttgtcactgtaagtgatgttctaagtatgattttattcatgactgaaggccatmcattttttaatgtagatgtaccataattcacgtaaacacttaccacattgcattggaggttttatttttccttttggcattatgaataatgtcgcgcactaccacggttcatacacacatgctccttctctaacctcgctggagctagaatcactgaatgaagtcatattggcttatttaaaggatctaaaagttatgctgcaggtgtggcccattgcatcccacttcccacacagcacgagaaag

SEQ ID NO: 146625 - DNA, 544 bp, Homo sapiens
ggaattcgagaccagcctgaccaacatggagaaaccccttctctactaaaaatacaaaattagccaggcgtggtggcgggtgcctgtaatccaagatacttgggaggctgagacaggagaattgcttgaacccgcgaggcggaggttgcagtgagctgagatcgcgccattgcactccagcctggacaagaacagtgaaaccccatctcaaaaaaaaaaaaaaaaaaccttaacattaaaacaaaacaacagcattttcttttgtcactgtaagtgatgttctaagtatgattttattcatgactgaaggccatccattttttaatgtagatgtaccataattcacgtaaacacttaccacattgcattggaggttttatttttccttttggcattatgaataatgtcgcgcactaccacgkttcatacacacatgctccttctctaacctcgctggagctagaatcactgaatgaagtcatattggcttatttaaaggatctaaaagttatgctgcaggtgtggcccattgcatcccacttcc

SEQ ID NO: 146626 - DNA, 523 bp, Homo sapiens
ttctctactaaaaatacaaaattagccaggcgtggtggcgggtgcctgtaatccaagatacttgggaggctgagacaggagaattgcttgaacccgcgaggcggaggttgcagtgagctgagatcgcgccattgcactccagcctggacaagaacagtgaaaccccatctcaaaaaaaaaaaaaaaaaaccttaacattaaaacaaaacaacagcattttcttttgtcactgtaagtgatgttctaagtatgattttattcatgactgaaggccatccattttttaatgtagatgtaccataattcacgtaaacacttaccacattgcattggaggttttatttttccttttggcattatgaataatgtcgcgcactaccacggttcatacacacatgctccttctctaacctcgctggagctagaatcactgaatgaagtcatattggcttatttaaaggatctaaaagttatgctgcaggygtggcccattgcatcccacttcccacacagcacgagaaag

SEQ ID NO: 146627 - DNA, 523 bp, Homo sapiens
ttctctactaaaaatacaaaattagccaggcgtggtggcgggtgcctgtaatccaagatacttgggaggctgagacaggagaattgcttgaacccgcgaggcggaggttgcagtgagctgagatcgcgccattgcactccagcctggacaagaacagtgaaaccccatctcaaaaaaaaaaaaaaaaaaccttaacattaaaacaaaacaacagcattttcttttgtcactgtaagtgatgttctaagtatgattttattcatgactgaaggccatccattttttaatgtagatgtaccataattcacgtaaacacttaccacattgcattggaggttttatttttccttttggcattatgaataatgtcgcgcactaccacggttcatacacacatgctccttctctaacctcgctggagctagaatcactgaatgaagtcatattggcttatttaaaggatctaaaagttatgctgcaggtgtggcccrttgcatcccacttcccacacagcacgagaaag

SEQ ID NO: 146628 - DNA, 357 bp, Homo sapiens
aaacaaaatcctggcattttgttgggtatgtcttttaagcctttttttttttaagttggatgcactcaggtgytatttacattgtgtacagtcctctgcttttaataaatgtatacacttatgaaaccactgaggccagataaacgtccaccatccccaaacctgccctctgacctgttgttgtcaaaacccttgtcccacccccacctcctggaaatcactgtggtattttttgttcttatagttttgctttgcctagaatgtcacaaaagtggaataatatatgacataaatgatcctgaatgccttcactggcataatgcttttgggatccactcacatcattgcacatgtaag

SEQ ID NO: 146629 - DNA, 610 bp, Homo sapiens
tgttaaacattcatgctacatgcatacatcatgcgagcagcatgtgcgcattttcacagcacacatagaacatgctgcaacacgcgtgaagcatgcatgcagcatgcacactacatgatgcaagtagggcacaatgggtatggtacaagtcgtggcctgtgtagagcatgcaaaccacatgccacaacatgtaagtcacatatgcacaacatagagctctattctacacgcttgctgcatgctacaacatgcaagctacatgcctgctgcatgcttagaacatgcrttctacattctttggagcatgcatgctacacacatagaacatgcccactggattttgtgaaatgtgcagtacatgctacaacatgcaacctacatgcgtgcagcatgcacactacagccttataacatgcttactgcatgatgcagcatgtaagctacatgcatggcacacgttgccacatgtgtagggcctgtattgtacatgcattgagcttacatgctacacatgtagtacatgtgtacttcacgccacatgaaagctgcatgctcgcaacatgccacaacatgcgagccacatgcctgcaacatgccacaacatacaacc

SEQ ID NO: 146630 - DNA, 610 bp, Homo sapiens
tgttaaacattcatgctacatgcatacatcatgcgagcagcatgtgcgcattttcacagcacacatagaacatgctgcaacacgcgtgaagcatgcatgcagcatgcacactacatgatgcaagtagggcacaatgggtatggtacaagtcgtggcctgtgtagagcatgcaaaccacatgccacaacatgtaagtcacatatgcacaacatagagctctattctacacgcttgctgcatgctacaacatgcaagctacatgcctgctgcatgcttagaacatgcattctacattctttggagcatgcatgctacacacatagaacatgcccactggattttgtgaaatgtgcagtacatgctacaacatgcaacctacatgcgtgcagcatgcacactacagccttataacatgcttactgcatgatgcagcatgtaagctacatgcatggcacacgttgccacatgtgtagggcctgtattgtacatgcattgagcttacatgctacacatgtagtacatgtgtacttcacgccacatgmaagctgcatgctcgcaacatgccacaacatgcgagccacatgcctgcaacatgccacaacatacaacc

SEQ ID NO: 146631 - DNA, 493 bp, Homo sapiens
gtccctggagaaaacgtctctaagatatactatcttagagatatatgaccaactactctagctgtgtaacttggggaaaggacttaaaccctccatgcctcagtgtctttatatgtaaagtaagccttctaatatgacttgctacataggatttttttaaggtttaagtgagagatgctttaaagtgttaagcacagtgcttggcccacaktcagagcacaataaatgttaggcactgaactactgctaccaccattcctacaaccgaatctttctttcttttcttttctttcttttttttttcttgagacagagtctcgctctgttgcccaggctggaatgcagtggtatgatcttggctcactgcaagctccacttctcgagttcaagccattctcctgcctcagcctcccgagtagctgggactacagacacccgccaccatgcctggcttattttttgtatttttagtagagacagggtgtcaccgtgt

SEQ ID NO: 146632 - DNA, 577 bp, Homo sapiens
ctgtttattcattcactcaatacaaatggaccatattacatatatacaggttaaatatcacttatcagaaatgcatgggacaagaagagtttcgaatctggcggtttttcagattttgaaatattttcacatgcataatgagatatcttggggatgggacccaaggttaaactccaaatttactaatgtcttatacataccttgtatacatagtctgaaggtaatttcatatggtagttttaccaactttgtgcatgaaacaaagtctgtattgtgtaactaggtgtggaattttccattttccacttggaatattatgtcgctgctcaaaaagtctctgagtttgaagcattttggatttcagatttttagattaggaatgctcaacctgtaattatataatctgcctttatcacctgaaaacatatcatgaacaytttgttctatgtgaatacttaatctatttttaatgggtagatagtcctttgtaattatgaaccatagtttatttaataaagtacttaatatgagcattcagattgcttcgaatgacaagcccaccataaacatttctgta

SEQ ID NO: 146633 - DNA, 438 bp, Homo sapiens
aatggataaatccccagacacatgtaacctaccaggattgaaccacaaagaaatccaaaacctaaacagaccaataacaagcaaggagattgaagctgtaataaaacatctcccagcaaagaaaagcccaggacctgatggcttcatgctgaattctaccaaacacttaaaaaggagctagtaccaattctattcaaactattgcaaaaaatagaggaggagagactacttcaaaactcattctacgaggccagtattaccctgataccaaaaccagacaaaatctatacatcaattaaaaaaatacataggccaaccackgattaatgttgatacaaaaatcctcaacaaaatactagcaaactgaatttaacaacacattaaaaagatcattcatcatgaccaagtgagatttatcccagggaagcaagaatggtt

SEQ ID NO: 146634 - DNA, 633 bp, Homo sapiens
gtggcgtgctcagggattaggtacatggattctggagtcacataaaatgggtktaagtccaagatttttcatttagtagcagtaaaaagttgaattaactgatttccaggtctataaaataagaataattagtaataattattgtaaatgatgtgacatatgtgaagactctagcatggggcccagtacaacacaagcacccaattggcacttactgttgtaccctaatctgaagatagtcagtcttctacagttggagaagaaagggagtggataataagttgcctgttcagtaaatctgtggtgctacttttcagtgtcttgcaagattggcttcattattcatgatctctttcccattggaaaggaaaagggagtccctgtggaatgcctattgtaagccaggaggtaaacagcgtgcagctcattaactgtcaccacgcccttgggaagtaggtcttcctacatgtggaaagcaaggctccgggagctcatatcattcgctcagcaggacacagctggagagtggaagacccaggatgtgaacccacatccatctgattccaccatctaggctgccccaggctgtagaggtcaagcccttatggtgttttctggagacatttaggagca

SEQ ID NO: 146635 - DNA, 528 bp, Homo sapiens
ttatgacctcttttccctttccaacaagcaagacaagtcgtaagtcattttacagttttgatatcaaatggcatgtcatgggcagagaaaaattacttaaaacaatagtttccaaacttccatttaaaaaatataacactttattaaatgtcatctcaccttagactgtcacrtaatcaacaaggcttatttcattaagataagcgcattatatatgttcaaatgcttcacacttttgtataaatcagtgaggactatgaagtttttgtgagccccagatttggaattgaaaagtatctgtgttaattgcaagtttatattgctggtttgttttggttgcatgctgctgagaaaatcttgattcataaaaatagtgattgcaaatggtaacagtttttcacagcttgctttgaatccctgcatttgcatgagtgttatccatcaaagagccccttttcctgctcttctaatgatgctgttacctaagagttttaggaggcacccattggaattccacaaagagccagt

SEQ ID NO: 146636 - DNA, 495 bp, Homo sapiens
caccttacacagtatcttgttaacacccacacctccagtgcctagtcatggcctaaaatatgctagttcctttgggaagttcatgatctttttaagcctctatatcctcatctccaggagaggtacatcatttctcttgcaaggctgttgtgaggattggcaaatcaactaagcatgcagtawtgcctgacacagaggtggcaactgtactgttgttatttcatcatttaaacacaaatcaattgctactttcaagggcaaggtaaacagttacatcacaaaaacacacacatacagtattactccctaaccacaaaaactagctattaagaatttcaacacaatgaacaaccagagaagcaatgagggattttttacagaaaattccattatgagggaacatgtttaaaatgttagaattttggcatacagctattatatatgtgaagtaattatttttcttcctttttaatttcctgttattcatacctgcac

SEQ ID NO: 146637 - DNA, 616 bp, Homo sapiens
tttggaatgatcttggtaagatacaatatacattcagaattagaaggaacaaaatggttttatggtcgtatcttaagctttattggatgtgtttaatgaatcagaggattagaaggaaacttaagaaatcattttgaccatcttactgtctctaagcagacaggacttcaaccagtacaaagaaatgtataatgccactgaaatgagagtctactgccaaccctactgttttaggaacaaagcaatgttctattcagaagtacagcagatatcagcaagcaaaaccacttatgtcaatatcagcctatatcataaaccatcagttgttctcagggccaaaataactgatcaagtcctggatatgagatcatcttctgtcacctttaaattgactgtatcttggcagcagttcacatttactccataggaattttagcactgcacacatttaagcccatatctacattccaactattctttgtgatataytgcatatcttcacactgttctgagcattttcctacagcatcaagttatcaaaaaatgctacactgtcaaaggaagatctctccccctccctccctctctcctacatacatacatacatacatacata

SEQ ID NO: 146638 - DNA, 623 bp, Homo sapiens
ctctcctcatggtaaatgctgtgtggtgacaggtatgggtgtttataaccagacttgaataggctatagaaaaacaaggtgagaaatatgctgaagtgccaacctttaagcagcagcactgctggagaaatccagggcacaacttcccaagagaattaacttgctatctgtttcctctctgtaaagtggggataaaatagtactagctctcaggctggagcatactttactaagttctcaacamatagtatatttctcaaatgtgcccaccacttcacatgctgagtcctcataaaattacctcccaaagactccacctccaaataccatcacactgggattaggattttgacataggcattttgaaaggacatatttagtccactgcagaggtccacttatatgctttggtagacctcctcggtgttgaccaacaatatagtagctaaagtttgttaagcacatactgtatgccaggcactgagttcttccaatggattcctcatcaagttctaactacaagccggtgatgtgagttttattactggcatgttatacagtgaggatctgaggcccaaagattaagtatactgccaaggttgcacagataatgaatggtacaa

SEQ ID NO: 146639 - DNA, 581 bp, Homo sapiens
ggtgaaggtgccagcatactcgatgtctggtatggggctgctttctggttcayggaatggtgccttcgcaccgttccctcacacagtggaaggagcaaggaagtacactaatcccattcatgagggcagagccatcatgacccaatgacctcctaaagacaccaccttctaatagcaccaccttggtgattaagatttaacatacagatttgggaaaacaaattcagaccatggcattctgcccctgcccctccaaaattcatgtttttctcacgtgcaaaatacattaattccacctcaatagccccaaaagtcttaactcaatccagtaccaactcaaacgtttaaagtccatagtctcatctaaatgccatctaaatcagatatagggaagactcaaatgtatgattcatctgaggcaaattcccttccagctgtaagcctgtgaaatcaaacaagttacgtgcttccaaagtattacagtgggaaaggccaaatggacattagaactgcctctacctaggaaaacagtaaatccaaagcaatactgcattcctagagggtttacagagatgtgccac

SEQ ID NO: 146640 - DNA, 556 bp, Homo sapiens
taaaaattaaaattaattgctagttgtataaattgaaggaaaaatcatgaataatatgaagaatagtacaaaaaaaacactttaaatttaacatcttcagaaggcaycccttggtagatgattaatctaacatctggaagcagaaggctgagaagctacctataccaggcttcaagaaagtgcatgtattaaagcttctgaggcagacaagaacgtggtgtgtttgagaacctcaaaagaacagagcaagtgcagcaaatgtaaaacacagcaagaaaagcttcagtgaggttacggaaatgttaaggattatttatgttaaaagtagaaaccccaactttgtaagcataatggaagtttttaaaaggttttaaggaaggagtgatccgattcacataaaataatttaaaacaatactcaagctactcatcagagagtggactgaggtggaaaggttagaaagggagtttagttaaaaggatataatggtagtgaaggtgagggaggatggagactttattagaacagtagcaactgatagaaaaaaggaggcaca

SEQ ID NO: 146641 - DNA, 556 bp, Homo sapiens
taaaaattaaaattaattgctagttgtataaattgaaggaaaaatcatgaataatatgaagaatagtacaaaaaaaacactttaaatttaacatcttcagaaggcaccccttggtagatgattaatctaacatctggaagcagaaggctgagaagctacctataccaggcttcaagaaagtgcatgtattaaagcttctgaggcagacaagaacgtggtgtgtttgagaacctcaaaagaacagagcaagtgcagcaaatgtaaaacacagcaagaaaagcttcagtgaggttacggaaatgttaaggattatttatgttaaaagtagaaaccccaactttgtaagcataatggaagtttttaaaaggttttaaggaaggagtgatccrattcacataaaataatttaaaacaatactcaagctactcatcagagagtggactgaggtggaaaggttagaaagggagtttagttaaaaggatataatggtagtgaaggtgagggaggatggagactttattagaacagtagcaactgatagaaaaaaggaggcaca

SEQ ID NO: 146642 - DNA, 556 bp, Homo sapiens
taaaaattaaaattaattgctagttgtataaattgaaggaaaaatcatgaataatatgaagaatagtacaaaaaaaacactttaaatttaacatcttcagaaggcaccccttggtagatgattaatctaacatctggaagcagaaggctgagaagctacctataccaggcttcaagaaagtgcatgtattaaagcttctgaggcagacaagaacgtggtgtgtttgagaacctcaaaagaacagagcaagtgcagcaaatgtaaaacacagcaagaaaagcttcagtgaggttacggaaatgttaaggattatttatgttaaaagtagaaaccccaactttgtaagcataatggaagtttttaaaaggttttaaggaaggagtgatccgattcacataaaataatttaaaacaatactcaagctactcatcagagagtggactgaggtggaaagrttagaaagggagtttagttaaaaggatataatggtagtgaaggtgagggaggatggagactttattagaacagtagcaactgatagaaaaaaggaggcaca

SEQ ID NO: 146643 - DNA, 385 bp, Homo sapiens
tttttaagcaaattttcttgttttctaagaaacctagttatatgccaccaagctgtcaggaatcttatgatctttaaccatatatattttgtcttatagctaatgtaataaagatatttaaatactttctctgtccatataatgacctcagaatattgggttttttgaactagcttattcagaaggttcttctcttgtacyagtgtgcaacaggactttggcttatgtttatcatttaattttcttaaaaaaatgtaatactcaaggaaacgaaagtgtaaggcatctaattctatacagaagggcacattggtgatttaaaaagtagtgagtaaaataatacccaagaggaaagaaagtgttaaaaaattaactgattattgaa

SEQ ID NO: 146644 - DNA, 385 bp, Homo sapiens
tttttaagcaaattttcttgttttctaagaaacctagttatatgccaccaagctgtcaggaatcttatgatctttaaccatatatattttgtcttatagctaatgtaataaagatatttaaatactttctctgtccatataatgacctcagaatattgggttttttgaactagcttattcagaaggttcttctcttgtaccagtgtgcaayaggactttggcttatgtttatcatttaattttcttaaaaaaatgtaatactcaaggaaacgaaagtgtaaggcatctaattctatacagaagggcacattggtgatttaaaaagtagtgagtaaaataatacccaagaggaaagaaagtgttaaaaaattaactgattattgaa

SEQ ID NO: 146645 - DNA, 502 bp, Homo sapiens
ttgaaatgtctctagttgcagatgtgtgtgtatccaataaaaaaatattcaattttgtgtggagggtaagagaggatgatgcaataatactgtcaactgcttattatgaaagataaaattttacagaaaaacaaacttatcatgatwtatatttggcacaatacaggagaaaaaaatttgaaagaaaaaaaagcaattagtatttcctcacccatgctatactgttaagtcatcggtcataatgtcatctttaaaaatcaaaacagatagttaaatatttctcccaaatggctagatttctagtgaaattactgctttatgattaagagaaccttgagttctatttgaaacagaagaatgctctatgtattcaaagattaacagaattgtgtgagcatgtgaatgagcatttagataagagtagatgtttaaacacaaaaactaaaatatttgtaagtacatatttaaggtcatttggaaaaaatgccagaaatgggtactg

SEQ ID NO: 146646 - DNA, 502 bp, Homo sapiens
ttgaaatgtctctagttgcagatgtgtgtgtatccaataaaaaaatattcaattttgtgtggagggtaagagaggatgatgcaataatactgtcaactgcttattatgaaagataaaattttacagaaaaacaaacttatcatgatttatatttggcacaatacaggagaaaaaaatttgaaagaaaaaaaagcaattagtatttcctcacccatgctatactgttaagtcatyggtcataatgtcatctttaaaaatcaaaacagatagttaaatatttctcccaaatggctagatttctagtgaaattactgctttatgattaagagaaccttgagttctatttgaaacagaagaatgctctatgtattcaaagattaacagaattgtgtgagcatgtgaatgagcatttagataagagtagatgtttaaacacaaaaactaaaatatttgtaagtacatatttaaggtcatttggaaaaaatgccagaaatgggtactg

SEQ ID NO: 146647 - DNA, 553 bp, Homo sapiens
atacttgtaagggtttgaaatggcatattaattaaagaatatatctgaagagaaaataagtgtaaattataccaaattaattttttttgttattttgttcagaatgatatgtaaccctaaaacatcactttattacttgattatcttacttcttgttcattttcttttttttcattacttttcctcagaatagtttttataggggtttcatttttactccttggttgatttcacatatttcttatatatatcttcattcattaatccatctagtttttaacggttactgagtgtcaccttgatcagccaacyctattcataacaagatttgttgacaagtgctggattttctgcaagagcttctttaattttggttgcttctcctgatagaagagaacaaagttcagtagcagctttcaccctttccaatgtccaaaatccattttatttgtttaattttgtctcaatttcaggcagactgtaataaacatctcccaaattttcctgtgcaaaccttccaactgttccaataccattttcagttgttacctat

SEQ ID NO: 146648 - DNA, 540 bp, Homo sapiens
ttgggtgagttttcaattggttcctgtgtctttgtgacataaccttattaatatgggtattttatttatcattttcttacattctggtactacaaggtgctctagtttcatcttatatatttccagtgctgtcttataatcagccatttctctaaggagccctatttccttttattagaaaatggtattagaaaccaagaactgggtgctattgtgttcattgtttttggagtattcttatatcttctcagtcgaaagaaaaaggaactgtttgtgggtatatgaactcgtgcatatgcatatatcaacaaatagttttatatgtaagcatctctattcatattaagctaaacataagtttattctgtggtctccaagtaatccattactatgtgaattattttagctgtttcacttgacattcatttacttcattgttccattccagtawgcagttttggcagcctcagaattgttaggctgaaatctcctgggaagcaacttgattacctagagtatcatacttctgttcaggtttcc

SEQ ID NO: 146649 - DNA, 550 bp, Homo sapiens
gtacagcatggtgagtatatttaacaacactgcctggcatactttcatcacacagtaaagtttgttctcaccacacagtaaaaaaaaaaaaaagtagtcatgtgaggtgatggatatgttaattagcttgattgtggtacttatagcacagtgtatacatataatatatacatcaaaatattatattgtacaacttaaatatatataattttaayttttcaattatacctctataaagctaagggaaaatattcaataaactgaagtttagagcagaaataaaagatcatgcagtgtggaaaataactgaggattttattttcttttggtctattctcatttaagatcaaagtgttaaacatggcagtacataattttggaaaacccaatgagcaaaatacatctagggatgaagtttctaagaataacgggagaggaaaacagtctgaattcctgcatgttcctgtttatcctttgttttaatcaagagaagctaacctgtgtgaatcctttaagtaaatttagagtgttcccttaaatattcttaaga

SEQ ID NO: 146650 - DNA, 550 bp, Homo sapiens
gtacagcatggtgagtatatttaacaacactgcctggcatactttcatcacacagtaaagtttgttctcaccacacagtaaaaaaaaaaaaaagtagtcatgtgaggtgatggatatgttaattagcttgattgtggtacttatagcacagtgtatacatataatatatacatcaaaatattatattgtacaacttaaatatatataattttaacttttcaattatacctctataaagctaagggaaaatattcaataaactgaagtttagagcagaaataaaagatcatgcagtgtggaaaataactgaggattttattttcttttggtctattctcatttaagatcaaagtgttaaacatggcagtacataattttggaaaacccaatgagcaaaatacatctagggatgaagtttctaagaataaygggagaggaaaacagtctgaattcctgcatgttcctgtttatcctttgttttaatcaagagaagctaacctgtgtgaatcctttaagtaaatttagagtgttcccttaaatattcttaaga

SEQ ID NO: 146651 - DNA, 591 bp, Homo sapiens
taagatcaaagtgttaaacatggcagtacataattttggaaaacccaatgagcaaaatacatctagggatgaagtttctaagaataacgggagaggaaaacagtctgaattcctgcatgttcctgtttatcctttgttttaatcargagaagctaacctgtgtgaatcctttaagtaaatttagagtgttcccttaaatattcttaagagactatggcacaatacattctcatgtcacagtcttaagattgccacttcctgaaatctctgactggcaaagatttaaaggcatgggatggggtctgattaatttgcatggaaattcagtcttagctagaaagaatatataggtactatacaaaatcctgtgtcctgggattgaatgttggcttagaactggatggtctccatttagacacaatgttaaaggtggacaacaaatctcttaatataaaattaccaaacaaagaaagaaatgtataagcttgtgattctaagctaaggtaagaagtcaatgatctgaggagaatcacatttggacacagaaaataactgatacagaaaacttactccaaccttgtcacagggcag

SEQ ID NO: 146652 - DNA, 593 bp, Homo sapiens
actggtgtgcctagagacaacctttccaggactattgggagcagctgcrcctccactgacagtgggcccactggcctgggcttgcatgaagggtggggccaataactctccctgcatggagaagcagcattcctgagtagaatacaggcaaaccacagagctgtctgttttgagctgaggaaaggggtcctgcctcaaggccagtttggtggtagccacagggcaggtgttttccatggccctcaatgcattgcagcctaaagataaaagacagtttctatctaaactgaataagtcatgaggcctgggacaggggtgcgataataaagcaaatcatgttcccgcctgcccagaacatgcagctggtacagccccatgcactgagaagggttatttttacaagttcataggcttgtttgggacctaggcatgtctctttccaaagagctggtccagaaatgctgtgacctatctccctaattggacctcctcccaagggagtcccacggcatgaaacacctagcaacaacaacaacaacaacaataacaacaacaacaacaacaataacaacaacaaaattgttggcacagtg

SEQ ID NO: 146653 - DNA, 593 bp, Homo sapiens
actggtgtgcctagagacaacctttccaggactattgggagcagctgcacctccactgacagtgggcccactggcctgggcttgcatgaagggtggggccaataactctccctgcatggagaagcagcattcctgagtagaatacaggcaaaccacagagctgtctgttttgagctgaggaaaggggtcctgcctcaaggccagtttggtggtagccacagggcaggtgttttccatggccctcaatgcattgcagcctaaagataaaagacagtttctatctaaactgaataagtcatgaggcctgggacaggggtgcgataataaagcaaatcatgttccygcctgcccagaacatgcagctggtacagccccatgcactgagaagggttatttttacaagttcataggcttgtttgggacctaggcatgtctctttccaaagagctggtccagaaatgctgtgacctatctccctaattggacctcctcccaagggagtcccacggcatgaaacacctagcaacaacaacaacaacaacaataacaacaacaacaacaacaataacaacaacaaaattgttggcacagtg

SEQ ID NO: 146654 - DNA, 635 bp, Homo sapiens
cttcctcacttatcttaataatttccgacttttgatttaaagtgaaacacgtggtactctctctttcacttgaacacttagagagctttgtaagattattaactggtttaattttaacgttgtcgtttctcaggaataggccagaggagagggagagagatgggaaaaagtggttcatggggcactcagtagacaaataatatgtaataagtttgatatcttatatgggcataatttgtgacacccmcaaacaattacaatagtaatatgaaaaatcactgatcacagctcaacataaggaatatagcaatgatgaaaaagattaaagctttatgaaaattagcaaaatgtgtcacaaagatataaattgatgatttgctgttggaaaaatcatgttaatagatttgtttgattataagattgccacaaaccctcaacttatgagaaaaaaaaacccaaatatctgcaaagcatgataaaacaaagtgcaataaaataaggtatgcttatcctatgaagcatattataatgcatcatgtttctggtgcagggtcatcagaaaaccagagaacataattatccctctatggagcaatcagaaaaagctggtgtgacagataacatacagggtaaga

SEQ ID NO: 146655 - DNA, 656 bp, Homo sapiens
acgttggcagaaaaaaaagaaataatatatatttgagctgaaatacatgtaattaagaatggaaaaatggaaaataaatcaacaaatctaagatgaggtttttttttgaaaagataaaattttcaaatagctagactaaaaagaaaaatagaataatcaaataaaataaaaaatgaaagaggcattgcaactaatgcctcagaatagaaaagattataagagcctactatgaacagttattaaccaacaaactggacaacgtagaagaaattgatatattcataagaacgtacaacctactaagactgagtcatgaataaatatattttcagaacctaacaataatgaataaggagattgaattagtaatcaaaacttcccaacaaagaaaagccagcaccagatggcttcactaccaaacacttgaaaaataattaatgctttttctttataatcttttccaaaaatctgaaaagaaaaagatactttcaaactcattttatgagagcagcattatactgataacaaacccacmcaaacacgcgacagaaatagaataatgagaagaagaagataaagaacagtccaatattgttaatctacatagatgaaaaattcctcaacagaaaattgggaaacttaattccacagcatat

SEQ ID NO: 146656 - DNA, 428 bp, Homo sapiens
gacacaattcctctttagaaacttaaagatgataattctcaaattgtattttaaggtgtatatcttttaccacttaaaacggctcatgatgctgaccatgattttatacgcctgctggagaactaaaggagtgtaactggatatttcataactcaaagataaatgcttaagcaatgggtagcctttcttcatgatgtgattatttcacrctgctgcctgtatcgaaacatctcatgcacctcatagaaaaatacccctactatgtaaccacaaaaactaaaaattaaaagaaaataaaattgctcatatgttctctgcctcaaataattaactttctcacctgaccctccattgttactttaaaaatatttgtcaattatgaaattccaatttaaaagccaaactttctatgatgactcaaattaaaa

SEQ ID NO: 146657 - DNA, 428 bp, Homo sapiens
gacacaattcctctttagaaacttaaagatgataattctcaaattgtattttaaggtgtatatcttttaccacttaaaacggctcatgatgctgaccatgattttatacgcctgctggagaactaaaggagtgtaactggatatttcataactcaaagataaatgcttaagcaatgggtagcctttcttcatgatgtgattatttcacgctgcwgcctgtatcgaaacatctcatgcacctcatagaaaaatacccctactatgtaaccacaaaaactaaaaattaaaagaaaataaaattgctcatatgttctctgcctcaaataattaactttctcacctgaccctccattgttactttaaaaatatttgtcaattatgaaattccaatttaaaagccaaactttctatgatgactcaaattaaaa

SEQ ID NO: 146658 - DNA, 428 bp, Homo sapiens
gacacaattcctctttagaaacttaaagatgataattctcaaattgtattttaaggtgtatatcttttaccacttaaaacggctcatgatgctgaccatgattttatacgcctgctggagaactaaaggagtgtaactggatatttcataactcaaagataaatgcttaagcaatgggtagcctttcttcatgatgtgattatttcacgctgctgcctgtatcraaacatctcatgcacctcatagaaaaatacccctactatgtaaccacaaaaactaaaaattaaaagaaaataaaattgctcatatgttctctgcctcaaataattaactttctcacctgaccctccattgttactttaaaaatatttgtcaattatgaaattccaatttaaaagccaaactttctatgatgactcaaattaaaa

SEQ ID NO: 146659 - DNA, 540 bp, Homo sapiens
tgggtttcactattccaaattttcaactactgataacatcagaacatttacatattccttgtagctatttctgtttggtatatttttgtcagcaggattaaaatgagagaatctcaggagtgtttgtcctgcaaacccccataaccccctttcccaattccaaaagaaagtcacagccaaaatgatagagaacactaattattttgggttaaatattaatgccatgttgaatatatcaagcatcctatttgagctgaactaaatgccttcttggatgtgcagatacctttttatatgttaaaatatatttaggaacaaaccagttgaattagtcatttggaacatagacattatagatsacaggcatgttttcttaatcactatgttttacctaattgagtcaaactcttgtaaacatgatggcaggccttttgatagtatttttctcctgaaatgagggttatttgtcatctctcagatccaaggctcactgtcctttaatagatcattgttaagagcattaacacctgtttaatttca

SEQ ID NO: 146660 - DNA, 593 bp, Homo sapiens
ggtcaaactgttaaaagaaaaagaaaaagtaaacataggaaaaggaaatttatgggatggaaaaatgtcattttctaagaacttcttggttgtaaaaatcctgattattatcccacaaaaaagtgcacaaatggaaaatgggtccaggtaaaaggggtcaagtttagcaagacaaatttgatggtgtggagagcttccacgtaaatacgacttcattttagattagttatgttctggggtgacgtctgttatggtgagatagctcacaaaattggtgctggagctgatcagctgcgaagtaataagaaaataattcattttgtgttttttaatgatattattggattaatcatgaaaaacractttttggtttttttcaaatttatttattttaaattgacataaaatcatatgtatttatcatgtacatgatgttttgaagtatatatgcattgtgaaatggttaaatctagctaattaacaaatgtgttacctcacatagttatcatttttatggcccaaacccttatacatccactctcttagcatttttcaagaatacagtatgtcattattaacgctagtccccatgc

SEQ ID NO: 146661 - DNA, 487 bp, Homo sapiens
ttttagaggcaaagtgggagagtaggtaatttttggagaaagctgggataatgaataaaggctggagcagggattgaattattcttcaaataattatatttgaagaagatagacagattaaactaagtgtggttagaccaaatgaaaagaatgacttaggattggctgagggcagctccttccttaaaatgaccattcctaagagttggcaattttcttgaagaagaagaccaaaatattgatttattccatctgaaaatgtttgtaggcacttgttttgatgactgcaaaaactgaaaacatacctcaaagattgaaatcaggaatagttgaatacaaaagattaactgatatgaatttctggctattaatctacttttttgtttctttayagcaaggatgacagcaaactgatgaagttggtatattgatggaaaaatttataataaaatttaaaagaataactcaccttcaaaacctgcttgta

SEQ ID NO: 146662 - DNA, 617 bp, Homo sapiens
ttcatttgcttatacaccttatgtctccctctatgctacttatggatttagaaaaattctctaattcagtctcttttastattcaaacaagcatagtattgtgtaaatgagaaaatgttcttaacgactaaaccataaaatattgttaaggatatcaagaaatgaagatactttaaggagctacctatcatcccacattaatcgacataccagaaaacaaagaatatatcctatatttaaaccattctaaaaaagaacccaggtatcctactaattatttaacattgtaagtaacaatggtaagttaagtgcaatgtttaatatctctctggtacaatataagattgttatgatatgtgatatgtatataaaaagtatttaatatgatattgactaataaaaatagtctttttatcttctgcaaaaccataagtgtatggaaaacattacattaagcttaactaacatttaaaaaaacaactacagtggaaggatcactgagcccgggaggcggagcttgcagtgagccaagatcacaccactgcattccagcctgggagacaaagtgagaccctgtcccctctaaaaaacaaaaacaaaaaacaaaactaccgaat

SEQ ID NO: 146663 - DNA, 616 bp, Homo sapiens
tcataagaaaccagcactctctatttttgcttcaatatggaaaattgtgtatattcattatatgagaaatttgtgaaagatgccycaaattatggtgttatagaatgcagccacaatgatgtatttgacactgagagaatagcaatgccaagttcttatagaaatgccccttgagcaatatacaatacttgatagcatgctcaacacattatataatttttttcctttatgacatattttgcataaataaaattttctattatagtaggtgctcttcagtgattgctgtcataacaataatacctcatataatggactattttataatccatgaaactattttattcatattatctcatttgttccttgctgaggttaacagcattttcaagaagacaaaattaacttaaggaatgtctgtggcttgtccaaagccaaatatcaaataaatgtagatatagacacttgaacctagattttcagatatcttattctgcacccttttatattttcaccataagcacagtctaaggaaaaaattgactgagaaattgtttacaagatatgtattagagactattactcctaataggcaactaattcaaatagaataggc

SEQ ID NO: 146664 - DNA, 616 bp, Homo sapiens
tcataagaaaccagcactctctatttttgcttcaatatggaaaattgtgtatattcattatatgagaaatttgtgaaagatgccccaaattatggtgttatagaatgcagccacaatgatgtatttgacactgagagaatagcaatgccaagttcttatagaaatgccccttgagcaatatacaatacttgatagcatgctcarcacattatataatttttttcctttatgacatattttgcataaataaaattttctattatagtaggtgctcttcagtgattgctgtcataacaataatacctcatataatggactattttataatccatgaaactattttattcatattatctcatttgttccttgctgaggttaacagcattttcaagaagacaaaattaacttaaggaatgtctgtggcttgtccaaagccaaatatcaaataaatgtagatatagacacttgaacctagattttcagatatcttattctgcacccttttatattttcaccataagcacagtctaaggaaaaaattgactgagaaattgtttacaagatatgtattagagactattactcctaataggcaactaattcaaatagaataggc

SEQ ID NO: 146665 - DNA, 610 bp, Homo sapiens
tgtgagtaattgtaacgtgaagtggtaatctactgatgatatatgagaatagagaaacaaattaaaaacatcattcaattgaaattttaaagtgtatagtggtagagggctgtatttccaaatgcacaaagaattcccacttgaaaacttattgcactcaagtcattgtgtgaaattttatctttaataaatgttaagtatttctactggtaatagattaacatatcattaaagataacatattttaaatttttatacaaaagctttattagcctttataaaagatggtttatgtttccaatttacatgatatcttagaatattatattttatataatatttggctaaaaatcaaatatgatagttatagtatattttagtgctcttsttactcacatagtataaggcaaaaaactcataaaaaatttaattggatgtacaaattcaattgattttgcatgcaaaggaattttaaaatattcacattaggtaagtagagagatttttaaaaagaatgtaataactacaggttatatagttcagtgatacctaaacctggttcatcattgtacagttttagaaaattccccaggctcatactagcctatat

SEQ ID NO: 146666 - DNA, 473 bp, Homo sapiens
agccaggggtggtagtgcttgtctgtaatcccagctactcggaaggctgaggtggtaggattccttgagcccggaggttgagtttgcaatgagctgtaatgatgccactacactccagtctgggtgacaaaggaagaccctggctcaaaaaaaaaaaaaaaaaaagaaaaagaaaaaagaaaaaactattaaattaaatttaaaaatactgtatattacaatgaacaatggttacccatggggaacacaagaaataattttatttagtaaaaaamttaataatttaattgttaaatttaatttagtaaaaaatcactaaattaaaatataatttattgatatatatgtagcatagtttactatgctatatatggtaaatatatatattttactatatatatgacatgtgtacctacatatacatctcaataaactatattttaataaaatcataataatttccctaaggaatg

SEQ ID NO: 146667 - DNA, 619 bp, Homo sapiens
agattttttattactgatactatctccttattcattattagtcttttcagaccttctcctttatgattcagtctgggtaggttgtaaatttctagaaatttatcaatttattccaggttatccaatatattgtcatataattgttcatagtagtctcctacgatttctttgtttccatgtaggagttttaatgtttttacttttatttgtggtttattagagtattttctctttttggggggtgtagctaaatttctttgttgtttatctttcaagaracacaactttagttttactgatctttctattgttttctggtctctatttcatctgtgtcttctctgatccttattatttctttcttgtactaactgtaggtttaggttattcattttttaaatttcttgaaatgtaaggtaggctttttatttgagatctttctttgtatttgatgtaggcatttattgctataaacctctctcttagaacagattatgctgcatcccataagttttggtatgttgtatgtccattttaatttatctcaaaatattgttataattttctttcaatttgttcttcgacctattggtcatttcacagcatgttgttaactttt

SEQ ID NO: 146668 - DNA, 595 bp, Homo sapiens
tgaggggacttctaggtgttggtaatattctactttttggtgatgagagagacacacctggtcccaggaattgctgtggctccaggtgacaggttatcgactgcaagatactggagtggggccatccaggaccaattggcccaagctgacttggaaactgcttacagatatgtgagctaatcgtctggacyagtttatactagaaaatctactctttagaatcatgaggtatgaacaagccagttcaacagtgagctcctgagcagactgcccactgataaagtccagtggtagacagaaataattaggcttcttaccctagtcttagtcagtggtttgggctactccaaaaagaatgtgacctcaactaaaaagcatgggaactgaaggaattaatcactagatataagaaattaatcagactcctcccagctaaacaagaaacattttcctgagagggaatctaagctgtgcctctctaaatcagattaaaagtacataaccagagtcagagggtagagagaaacggattgttgtagttatgcctcctgatttgctcccacctatctgcatccaccttttgggtagtatcctc

SEQ ID NO: 146669 - DNA, 540 bp, Homo sapiens
tcattggctaaaaattagtcatatggccaaactttgctgtgctaacagaatgaaaccagggttctaagtaaaaaggaaacagtagattttgggtggggaactagcagcctctaacagaattattcagcttagaaacttgccattttcattatatcctccttcyttccctgaaccagtgtcctgtcttatctctctgacttgatatctcctgatagatttctctacatctgcctgcctgctgaccactcacctgggcctccaaacacagtctgcttcaaatgtttctattgctatgtttatcgacataattgttcaattgcttgatttctccttattgaccttccaggctgttgacaccaggctcagattactttgtctattaattcctggtaaacagtactttctagtactgccaaagatgcttacagttcccctggggagggggagataagcatattacacaagaggtaagtgtggaaaaggggccaggacaattagtcattagttcatctggttgaaacacatctactcctgggcaag

SEQ ID NO: 146670 - DNA, 473 bp, Homo sapiens
tgatatacctaaatctgtcagtgatgaaataaaattgtggatctattttgttctactttcccttactcagcatgatctcccaaactggctcatcattgaaattactagaggaggtatccaaactggctcatcattgaaattacatgaggaagtttctgtataatatatattttctaaacattttcatttcataggtctaaggtaatacaaaatatatatttttaaaagattctgagattataagtaatatttacatttgagaaaccttgactggaaaataaaaaccgagraaatagtgacatgtctcaagatcaaagatctactagtagatagaaccagaagccaagatttttggtttctcttcctttatcttttcataatgttgtactgtctcacagtagtaccttcaaaccgattaaatttatacacagattttatatgtcttgtacattgcatgataacagaaaaatcca

SEQ ID NO: 146671 - DNA, 473 bp, Homo sapiens
tgatatacctaaatctgtcagtgatgaaataaaattgtggatctattttgttctactttcccttactcagcatgatctcccaaactggctcatcattgaaattactagaggaggtatccaaactggctcatcattgaaattacatgaggaagtttctgtataatatatattttctaaacattttcatttcataggtctaaggtaatacaaaatatatatttttaaaagattctgagattataagtaatatttacatttgagaaaccttgactggaaaataaaaaccgagaaaatagtgacatgyctcaagatcaaagatctactagtagatagaaccagaagccaagatttttggtttctcttcctttatcttttcataatgttgtactgtctcacagtagtaccttcaaaccgattaaatttatacacagattttatatgtcttgtacattgcatgataacagaaaaatcca

SEQ ID NO: 146672 - DNA, 424 bp, Homo sapiens
cccttggaaagtagatgcagtatttttcatgtataggttgtaaattcaaattggaggttgcactgsaaggtaagaagaagttgaagcattttcaaaaataaagtttgttattgagccttgtgtctaaaagtatttaagtgcagaatatcatcattagtggtagtactattattttaatatgtgctagcaacaacaacaatacatttccataagcttaaatctgcccttagttattgtattagctggggctgtcatagcaaaataccatagactgggtggcttaaataacacaaatctgtatgtatacagttttagagcctggaagtacaagattaaggtgctaacagggttggtttctagtaaggcctttctatttgatttgtaagctgccttcttgctacctcctcatatgaccttttctctc

SEQ ID NO: 146673 - DNA, 469 bp, Homo sapiens
ttgaaaattagtcataaaaattagtaagaattaatgcattcttctatacaaattctaacccaaaataattcgaatgacttatttgttcttggatatcatcttctacttttccctttggtcacataattccagccacacttgccttctggtgttccctgacacagcgtatcctcccctcagcgtatccttcacactggcttttckttctgccatttctgagttgggtgcttgaccaactctttcacttcctctcagtgtttgctcaaatatcactttctcagagaccaaccccgaaccttcatgggatttatttcccaacttctggggcaccaagtgtgaacatggcctccatcatacttgctattttgtggtcattcactgattgaattaatgttattaacatagtagagaggaggataattaacatagcctttgggcaagcatatgtgtgctgttatcctttccacat

SEQ ID NO: 146674 - DNA, 615 bp, Homo sapiens
ccatgccccctgacagtcacttaaacctttagctcattacatttcaaagttaagcacggccacctggtctctattatttttagttgttgtatctcccttgctttcaggaagtccaattctgtaatagtacttcctaccctgggctaccatcaaccctagtctacagagaattcccatcactgaaattctcaacaattctgatcctcatctcggtagtgcatttcttatcactttgctaaatacartgtcccccaggccttcctttgggacagggttttctgtattacatagtatatccagctgaatatattccatatattgatgcttttgatcccttcatccgccatttattacgtcagttccagcattttctcttcacagtctggggctgttacttcctataagcttccaagtgtccaactagccactcattagcatcctgtacttggggccttgcctatgtcacaggataattctcctatattaataaatactcactaatcgaatttctcattacatcttgcttgatcttaaacattccaaatataatttcatatattctgtacaattgatgctgagccatgttggctatacattaccattattgtgtgaact

SEQ ID NO: 146675 - DNA, 615 bp, Homo sapiens
ccatgccccctgacagtcacttaaacctttagctcattacatttcaaagttaagcacggccacctggtctctattatttttagttgttgtatctcccttgctttcaggaagtccaattctgtaatagtacttcctaccctgggctaccatcaaccctagtctacagagaattcccatcactgaaattctcaacaattctgatcctcatctcggtagtgcatttcttatcactttgctaaatacagtgtcccccaggccttcctttgggacagggttttctgtmttacatagtatatccagctgaatatattccatatattgatgcttttgatcccttcatccgccatttattacgtcagttccagcattttctcttcacagtctggggctgttacttcctataagcttccaagtgtccaactagccactcattagcatcctgtacttggggccttgcctatgtcacaggataattctcctatattaataaatactcactaatcgaatttctcattacatcttgcttgatcttaaacattccaaatataatttcatatattctgtacaattgatgctgagccatgttggctatacattaccattattgtgtgaact

SEQ ID NO: 146676 - DNA, 449 bp, Homo sapiens
gtcacctcaacaaaggaccagttgtctaaatagctccagtccaatggtagaggacttaattcatccatgggcccaccgacattgaaaagttacagggagtattggtattcctaaaaactcagtgatgtttaaagtctcctttggcattgatgtgtctttgatggcatcaaagaaatgttagtgcataaaatgtcatatggtctttgaatttggatgtgcagcaggggtgtggcatgttgtgcagagccattgtttgtgagggagacctggacaatgtagggcatgatggactcacactggatccaagaacagtggtccagggtgataatagaaagtgtagctaaraaatttcataaagatcaaacaattcacaaatgacagatctttatcttgatttgatttttgtataaggtgagagacctgaaactataaaaattctggaagataac

SEQ ID NO: 146677 - DNA, 590 bp, Homo sapiens
agatctttatcttgatttgatttttgtataaggtgagagacctgaaactataaaaattctggaagataacatcggaaaaacycttctagacattggcttaggcaaggattttatgaccgagaatccaaaagcaaatacaataaatacaaagataaatagctgggacctaattaaactaaagaagtttttcatggcaaaaggaacagtcagtagagtaaacagacaatccacagaatgggaaaagttcttcacaatctatacatctaacaaaggactaataaccagaatctacaatgaactcaaacaaatcagtaagataaaacaaacaatcccatcaaaaaatgggctaaggacatgagtagacaattctcaaaagaagatattcaaatggccaagaaacgtatgaaaaaatgctcagcatcactaatgatcagggaaatgcaaatcaaaagcacaatgcggtaccacttcaccctgcaagaatggccataatcaaaaaatcaaaaaacagtagatgctgacatggatgtggtgaacagggaatacttccacgctgctggtggaaatgcaaactagtacaaccactatgg

SEQ ID NO: 146678 - DNA, 590 bp, Homo sapiens
agatctttatcttgatttgatttttgtataaggtgagagacctgaaactataaaaattctggaagataacatcggaaaaacccttctagacattggcttaggcaaggattttatgaccgagaatccaaaagcaaatacaataaatacaaagataaatagctgggacctaattaaactaaagaagtttttcatggcaaaaggaacagtcagtagagtaaacagacaatccacagaatgggaaaagttcttcacaatctatacatctracaaaggactaataaccagaatctacaatgaactcaaacaaatcagtaagataaaacaaacaatcccatcaaaaaatgggctaaggacatgagtagacaattctcaaaagaagatattcaaatggccaagaaacgtatgaaaaaatgctcagcatcactaatgatcagggaaatgcaaatcaaaagcacaatgcggtaccacttcaccctgcaagaatggccataatcaaaaaatcaaaaaacagtagatgctgacatggatgtggtgaacagggaatacttccacgctgctggtggaaatgcaaactagtacaaccactatgg

SEQ ID NO: 146679 - DNA, 478 bp, Homo sapiens
acatcattctgaatagtcactagacacttttaattgagttttgagtgaaattctattcagtgttttacaacagttattcttccattcctataaaaatctccagtgaartcattccttctcattaatccctaatgtaaattgactctttgtagtaaatgtaaagaaccacgtttctctatcacagattcttttagaccaactaatgtatgcatagacattcttttaggtggtgatagagaagatgagcatcagaacacacatgtaaggatatatcttacggtgaaccaaacctttacactataacaggaaacaggataaaacaatgatggtgggtatgtatagaaaaagtgatttcatagcaaggtcaactgctgaaaaggatggataaggtgaagttactgccagtttagaaataatggggaaaactgaaataattttgaaggggtgggggcatgtgagtttgcaatgtaatatcaat

SEQ ID NO: 146680 - DNA, 634 bp, Homo sapiens
ggacaaatgtaaatatagtctcaccatacgtttttgtacaaaacttcttgtggtcacgtattttcttttctttcagttaaatacttaagagtagaaatgttgggttatatgatagatgtatttaactttatcaaaaaaaatcagtctttatcaaacttgttgaacaatttttcattatcactagtaacgtgtgaatgttccagttacccaaaaacctgtcaacacttgaaattgtcaggctttataatttgagccactttagtgcctatgttgtgatattgcattatggctttaatatgcaattctctaaacgataatgaacatttttcatatgttcaattggccatttgtgtgtgcctttgatggagtgtcagtttaaatctttggtctaattttcatatacttaaactgtcaattgtctttttttaattaaggaattaatatatattatatatatacttttgtatttatccaaatacttgtgttgcttttayctcaattccttcatgtcaatcagatatttctttgcctatgtatcagttttatttagctaaaacatcctttggcatttatcatagtggggtcaatttgtgataattctttcagctatcatttgtctgaaaatatttttatt

SEQ ID NO: 146681 - DNA, 572 bp, Homo sapiens
ggaatttaaatgaattatcccaaatgaaatacaattgactttatccttgtaaaagttatgttctaggctctttctggaatttgaaggctgtagtttcagtcactgagaaaacagaaaatcctactggtggttagatgggcagacatgttaacagtcttagcattggagtcaatctgaactacccgcttttagagctcaaaggcagggtttccacattctgagaaacagtcttcatgagggggaaatcagttatttaaaaagtaaattgtatccaggattttaaagaacaaagaactttacagcaagtcatctccatcctttgagctgttattgagacaccacttttagacatggtggtccatcacccggtaatatggtcccattaacctcccagggctgaatttggtgcttaagcaagaaatcttttgcttcattcccagcgtggcagtggacagtgaggcaggagccgaattcattttaatatcacagcccattagggagaattaggccatgatgcatttatgcyaggcacttgagatgtttactattttcattaaaattttttcttctta

SEQ ID NO: 146682 - DNA, 542 bp, Homo sapiens
atggaaatgctgttgtttagtgaccaggtaggggaaactgtggcagcctcaccacagctagtggtatctatgcacacccaggttgagcccaagcactgaggcatctctcttcttcctgatggaaagtgcaatgggattttaaaatttgatctgagtgtctgactgcttcagtggagggctctgcaatttcacatttcatctcagcagctaatgtccagatcttgtcaaatcaccgccaagaatgtaccrcagggctaccctggacaaaaccgtgctgttctgtggcaacttgcactctgagggttcagtgactgtgatgcaaccaaatgtgctttcccatgctaacattagaagggaggctgctgctcccctccaagaacatctcgttttctcttccacaaccgtcgtagtgcaaacctttttcagctgagctgctagtttcaattcaaaatatcctatcttggttttttctgcgtttaaaaagtggtagaacttattttgacagtgagaccctggaagatgaaaacagaaagaaaccagtt

SEQ ID NO: 146683 - DNA, 556 bp, Homo sapiens
accactggcccaggcacaatctccctgaacaaagacctagagaggaagaactgatgaggagtgggggaggtcagaaccagagtaacaatctggggaaatgtatttatgttagcctgtckagctctgttgagcacttccgtcaaataatggaattatacaaccccccctataaaagataccaggtggagaatagcaaagagaagggaggaggaggtgaggtgtgttcagaaggttgatcaaataaaactgaatggtaggtccttggctacaccaaatgtgggttttgttttcttttaattttgccattaaaaaaaatgcggtgtcactccttcaatctttctacaattctgcatggttgaacatttgaaatgagtttgtgtatcaccctcaggcgctgattcagacttgattggggcaaagcagactgcatgtgcttatttttatccacgtcatttgggacgttatgtcgccaaaggaaccaaaaatgtgctgctctattgccaaattatcacctatccttttatcagacagggcgatgatcctcaacaagttgtgc

SEQ ID NO: 146684 - DNA, 646 bp, Homo sapiens
aatgattcattaaacctgattctgcatcaaggaattcacctacatatatgggaatctgtggcaactaatagcctacttggtgaatttaaaatagcagtggatccgtttgtctcctggataatgggcagtgtgccgatttattcctcgtgtttgtatttgtgtggcatttggcttactacgaggggctgatattcaggaaactaaaacactgactgcaacagtttgactcgggagtcctgctgctgcctgaatggaaagaattgtgagcagtkgttatgatgacagtaggttaaatgtttactaattaggttgcaaaggtgaccatgaaactttaaaactttgcatcacggagaaaacttcattgggttaggcttatgttaagaagaaggtatctaattaggcaaaaatgtcacacagccgggaagaaattttgaaatgaattgagggtgaaagatatttgtcaaaaatctcccaccacagtatgcaaaacgactgcagtgattttgctgtattaattatgcctgaagcacaatatataaagttctccaacacacactagatgtctctcttctagctgtaagatttttgtgtttgtaattctttgccagggcttgcatagtaggggtgcacagtaatagcttgtttc

SEQ ID NO: 146685 - DNA, 646 bp, Homo sapiens
aatgattcattaaacctgattctgcatcaaggaattcacctacatatatgggaatctgtggcaactaatagcctacttggtgaatttaaaatagcagtggatccgtttgtctcctggataatgggcagtgtgccgatttattcctcgtgtttgtatttgtgtggcatttggcttactacgaggggctgatattcaggaaactaaaacactgactgcaacagtttgactcgggagtcctgctgctgcctgaatggaaagaattgtgagcagtggttatgatgacagtaggttaaatgtttactaattaggttgcaaaggtgaccatgaaactttaaaactttgcatcacggagaaaacttcattgggttaggcttatgttaagaagaaggtatctaattaggcaaaaatgtcacacagccgggaagaaattttgaaatgaattgagggtgaaagatatttgtcaaaaatctcccaccacagtatgcaaracgactgcagtgattttgctgtattaattatgcctgaagcacaatatataaagttctccaacacacactagatgtctctcttctagctgtaagatttttgtgtttgtaattctttgccagggcttgcatagtaggggtgcacagtaatagcttgtttc

SEQ ID NO: 146686 - DNA, 646 bp, Homo sapiens
aatgattcattaaacctgattctgcatcaaggaattcacctacatatatgggaatctgtggcaactaatagcctacttggtgaatttaaaatagcagtggatccgtttgtctcctggataatgggcagtgtgccgatttattcctcgtgtttgtatttgtgtggcatttggcttactacgaggggctgatattcaggaaactaaaacactgactgcaacagtttgactcgggagtcctgctgctgcctgaatggaaagaattgtgagcagtggttatgatgacagtaggttaaatgtttactaattaggttgcaaaggtgaccatgaaactttaaaactttgcatcacggagaaaacttcattgggttaggcttatgttaagaagaaggtatctaattaggcaaaaatgtcacacagccgggaagaaattttgaaatgaattgagggtgaaagatatttgtcaaaaatctcccaccacagtatgcaaaacgactgcagtgattttgctgtattaattatgcctgaagcacaatatataaagttctccaacacacactagakgtctctcttctagctgtaagatttttgtgtttgtaattctttgccagggcttgcatagtaggggtgcacagtaatagcttgtttc

SEQ ID NO: 146687 - DNA, 631 bp, Homo sapiens
cccatttgcattgcatttgagtcattcaaatgatgtttgtgaaccattacttcaccaacgtttttatttagtgtttattaaactgcatttctgaaccttcttttggactgcagtttataatttcccaagcaaacagagcatttatttgctccatctttaggacgaactatcttgggaataaaagtgaaatttttggatgcaagcatgtatgcttattttaatagcttactcatgcagaagtgagacacaactcgctctggcttttcattcataaaaacatgctagatgtaaataatgttttgcttgttgatgagtttggtttgagataactgaagaaaacaaaacagattatcctttaagcataataagcctgtgttcattaggtccattcattcattcattgaacaaatatttgtgcttgctgtataggaactactgtgttaaatgctggagacacaatggtgagaaaaagcattcagagcctccaatctcatggagcttatagtccagacagagaggcagacattcatcgaataaytgaacaactgacagagatgagtgctttgaaggaagaggaatatggggttctggtagcattaacttaaagagggccaaaatggcctggaccagg

SEQ ID NO: 146688 - DNA, 602 bp, Homo sapiens
tcttttctgctcctctccctcctcccacccttcaccctcaagtagacgcctgtgtctgttgttcctttctttgtgttcatgagttctcatcatttagctcccacttgtaagtgagaacatgcagtatttggttttctgttcctgtgttagtttgctaaggataatagcctccagctccatttatgttcctgcaagacatgatctcattttttatggctgcatagtattccatggtgtatatgtaccacattttctttatagacatttaggttgattccatatcctgctattgtgaatagtcctgcagtaaacatttgtgtgcatgtgtctttatggtaaaatgatttatattcctctgggtatatacccagtaatgggattgctgggtcaaatggtagwtctgcttttagctctttgagaagttgccatactgctttccacaatggttgaactaatttaaactctcaccagtatgtaagtgtttctttttctccacaaccttgccagaatctgttatttttttgactttttaataatagccattctgactatgtgagatggtatttcattgtggttttgatttgcatttctctaatgatcag

SEQ ID NO: 146689 - DNA, 486 bp, Homo sapiens
ttcttaacaacagtagcaatggctacctgtcatttagtaaactattactttgtgctcggcacattgatttagtcttcacaaaaaccttgtaaattgaatattacctccatttttcagaagaagaacctgatatttaaggtggtaaaccagcttagtcaagattacccagctcttgttggtaatgtagagtccaaatgcaaatctatctgaattcaaagcatcagttgtttaaccaccaaactccctcatcagaaatcccttgccaggtacacatgartcagaattagtgtttaattagaattaagtcccctcgggctgccataacaaaatagcatagactaggtgacttaaacaacagaaatttattttcttacagttctagaggatggaaagtccaagagcaaggtcctgcatggttcactttctggtgagggctctctttctgtcttgtagatgatcacctttttttactgagtgttcaaatga

SEQ ID NO: 146690 - DNA, 514 bp, Homo sapiens
caagagtgaagcatggaagtggtgcattgtcccaagcttggtgttaacytgagccatgtggtggaacatcagagaaatgaaatgactgaccttgaagcccagagggggacgagagactggagagaccagcattctctgtgagattgaacaataaagttaataggtgtgaggaagcgggagggaaggggagaaattagcttcactgagcatcagctgtgttgctaggtgctttcagtcatatgcagcccaccttacaatcctgcaaaataccatgtcacagacaaagaatataaggctcagaaatataatttacctgaggtcacacagccagcaagtggcagagccaacttttaaacccagatctctgcttctaaaacttgcccccgtttccccattagattagctgcttccagggacataagaaaggtagaaaatggaaggttacagagcaaaggggattataatgcttaagttttcagagctggagcacttcccactgaagacaaagtcaagg

SEQ ID NO: 146691 - DNA, 514 bp, Homo sapiens
caagagtgaagcatggaagtggtgcattgtcccaagcttggtgttaacctgagccatgtggtggaacatcagagaaatgaaatgactgaccttgaagcccagagggggacgagagactggagagaccagcattctctgtgagattgaacaataaagttaataggtgtgaggaagcgggagggaaggggagaaattagcttcactgagcatcagctgtgttgctaggtgctttcagtcatatgcagcccaccttacaatcctgcaaaatacyatgtcacagacaaagaatataaggctcagaaatataatttacctgaggtcacacagccagcaagtggcagagccaacttttaaacccagatctctgcttctaaaacttgcccccgtttccccattagattagctgcttccagggacataagaaaggtagaaaatggaaggttacagagcaaaggggattataatgcttaagttttcagagctggagcacttcccactgaagacaaagtcaagg

SEQ ID NO: 146692 - DNA, 514 bp, Homo sapiens
caagagtgaagcatggaagtggtgcattgtcccaagcttggtgttaacctgagccatgtggtggaacatcagagaaatgaaatgactgaccttgaagcccagagggggacgagagactggagagaccagcattctctgtgagattgaacaataaagttaataggtgtgaggaagcgggagggaaggggagaaattagcttcactgagcatcagctgtgttgctaggtgctttcagtcatatgcagcccaccttacaatcctgcaaaataccatgtcacagacaaagaatataaggctcagaaatataatttacctgaggtcacacagccagcaagtggcagagccaacttttaaacccagatctctgcttctaaaacttgcccccrtttccccattagattagctgcttccagggacataagaaaggtagaaaatggaaggttacagagcaaaggggattataatgcttaagttttcagagctggagcacttcccactgaagacaaagtcaagg

SEQ ID NO: 146693 - DNA, 405 bp, Homo sapiens
actttaaaaaatccaaactatacaagtaaaatattacactctatgctgtgggttacaagcaaccaattaatcagcacctggttctgaggcaccgtggcgctacaagggaggcaaaggctctgcccccagatgtttggaatcttgggggaaacrtggtaaatgacagcggggcagggaacttgaacaaagtacaaggcccagtggccagtgggttgggaaagcttcctggaggaggtgagggtataaacaggccttacatacacacacagcaagccaggctgggacagtgagatgaactgcaggtaaaaacgattttaaaaggcaagtaagaaatcagtctggcagaaacaggagtttggggaggagaaacacaaattcagccccctttcctgttcctatccaccc

SEQ ID NO: 146694 - DNA, 579 bp, Homo sapiens
tgaaccatgctgttgagtgtagcgtagttctttccttttgattgctgagtggtccgttgtatgcatataccacagtttgcttattcttctgagtatgtgtatttcaaattttaatagatactgccatgttacttccccaaaatgctgtacaatttacatttcaactttgtaatattgttgtagttgtctttaattttggcaggcctgataggcagatatgatgtctcattagtactttaatttgcatttccctaacgatggtaaattcaagcatctttttgtacatttgttgactctctgcttttgtgcttctataaattgccttttcttattccttcatcatttttctattgagttgacaaattataaaatctctttctatatgatataagtacattctttgcagtttgggttacaagtattttttccaaatctatcatttgtgttttgaatttgcttacaatatttaatactgtacacatttggggggrtaattattttattttatgtttaattgacaaataataattgtgtgtattatgggatcataccacatttacgatatggtcaactatatgt

SEQ ID NO: 146695 - DNA, 564 bp, Homo sapiens
tgcagatccctgggggctctggcttgtcttcttccagtcaggcatggtaaagcagttccaccaccaagttcctacagcaagaaccaggtggattcttcctttatggataactaggtacagtcatggcttctaytaagagtggccaggaatttcttgactaaggtcacatatgtactaatatcccattgctttcctcaaattgtatcactaaaaactaatgacatcatagaattcaaatgcagcatctaagcctaaatgaaaacaaatgctaaattgcatagtgttgtttattgttgctgttttaattatttgctgcaaacaactaatttaagggaagtcaggtggccaaagatacatagcttcattacaacagagcatttccttagaggacccaggttccaaaaagagaatttttctggaaccatgaccaatgcattgggataattagttgcacaattgaactatattgtcatttaaaatgatgttttagtgtgtgttgagccatatgacaatgctgatgcttgatatttttgaccccacaatgaatgacaattgtacatggtt

SEQ ID NO: 146696 - DNA, 564 bp, Homo sapiens
tgcagatccctgggggctctggcttgtcttcttccagtcaggcatggtaaagcagttccaccaccaagttcctacagcaagaaccaggtggattcttcctttatggataactaggtacagtcatggcttctactaagagtggccaggaatttcttgactaaggtcacatatgtactaatatcccattgctttcctcaaattgtatcactaaaaactaatgacatcatagaattcaaatgcarcatctaagcctaaatgaaaacaaatgctaaattgcatagtgttgtttattgttgctgttttaattatttgctgcaaacaactaatttaagggaagtcaggtggccaaagatacatagcttcattacaacagagcatttccttagaggacccaggttccaaaaagagaatttttctggaaccatgaccaatgcattgggataattagttgcacaattgaactatattgtcatttaaaatgatgttttagtgtgtgttgagccatatgacaatgctgatgcttgatatttttgaccccacaatgaatgacaattgtacatggtt

SEQ ID NO: 146697 - DNA, 427 bp, Homo sapiens
tggtcaggatatcgtagagcccagagaagayaggagtctggttcagtgggttcaaatatggaaccccaaatcatgttcaaagtacacattccaggtatcactctaattcaatagttatgtattttaaacatgctgattaaaaataccctaacaattcaaactcttcaatcccttggtgactagtcactcagtctatagattaaaatagtgcatatgtctgaaggaagtatcacctgtctccttttgtgttttccagcctaatatgaataaccaatatccttttctatttcagaaggctacactatcttcctaacaaaaaaatttctgaaagtgtagcttgtgaggatcttagaatttaagcttcatccctttggctttccatggtgatttctttttgaggtccattataactcaagtactcatcaaa

SEQ ID NO: 146698 - DNA, 406 bp, Homo sapiens
tggtcaggatatcgtagagcccagagaagacaggagtctggttcagtgggttcaaatatggaaccccaaatcatgttcaaagtacacattccaggtatcactctaattcaatagttatgtattttaaacatgctgattaaaaataccctaacaattcaaactcttcaatcccttggtgactagtcactcagtctatagattaaaatagtgcatatgtctgaaggaagtatcacctgtctccttttgtgttttccagcctaatatgaataaccaatatccttttctatttcagaaggctacactatcttcctaacaaaaaaatttctgaaagtgtagcttgtgaggatcttagaatttaagcttcatccctttggctttycatggtgatttctttttgaggtccatt

SEQ ID NO: 146699 - DNA, 510 bp, Homo sapiens
cacacttatacaacatgaccctgtctgcccctaagtcacagttgcctggacctttctttggagaatgtggaaatgaggctgagagattcttgttcagtctaggctagtctcttcaatggggtagatacaaattcaagagctgtaacatggctgtattctggaatccctgtgatctaagaggagaaaagtggtgtttaaggttaataaaaaataatagacaagaacagtgtattagtccgttttcatgctgctgataaagacatacccaagactgggaagaaaaagaggtttaattggacttacagttccacacggctcgggaggcctcagaatcatggcaggtgaaagacactgcttacatcatggcaacaaaagaaaatgagaaagaagcaaaagcagaaacccctgataaacccatcagatctcatgagacttattcrctatcacgagaatagcatgggaaagacaagccctcatgattccattacctcccccgggtccctcccacaa

SEQ ID NO: 146700 - DNA, 567 bp, Homo sapiens
atagcatgggaaagatcagcccccatgattccattacctaggtccgtcccacaacaaatgggaattctgggagatacaattcaagttgagttttgaatggggacacagacaaaccacatcaaacagatattcagaaagggacaaaagtaaggagaatgaaaaatctcatcatcttcattttagccccttccgagagtccagctgcatttctgcctgcagtctccatcaaaacaagctatatccttaataatttccccccttttacttgatccaattcaagtcagtttctataatatcagctagtactgcaaatactttatttttttaacctgcctcttttcacaaggaatttcagacacccatgaataaaacatggatagccagatgkatagaagacagattgacttcttcctgagagtgcagtcactgatgggcaaagcagcaaaatcacccatcctgttctactaatccatcaatttattctgcaagatgtccgctgagcacttgctttgtttcaggatctttttggggtgctgggatgcagtagtcagtaaggtgaccaaaggt

SEQ ID NO: 146701 - DNA, 414 bp, Homo sapiens
ggtgaccaaaggtctgccttcccagatctatgtgtacaaacacacacacacacacacacacacacatgcacacacaatgcrgcagtaatccagaaccacaagatacaggaaaaaataggaaagaaaattcaaatccaagatatgtttcaacagaagacattgaaagaattgttgccccattaaatatatgcaatgaagaaaatattatatttatgtctattgcccaggagaatgaaggtgacacttaacaaaaagaaaaactaaaagtcaggaaaaacttaaactaatcttctgctgggttctgtttacagtatgattgttttaccattttttccaaattatcagccttcctcattctttcaactaatctatgttctccctatatttcaaaaaggtaattcaaaaactatcatc

SEQ ID NO: 146702 - DNA, 414 bp, Homo sapiens
ggtgaccaaaggtctgccttcccagatctatgtgtacaaacacacacacacacacacacacacacatgcacacacaatgcggcagtaatccagaaccacaagatayaggaaaaaataggaaagaaaattcaaatccaagatatgtttcaacagaagacattgaaagaattgttgccccattaaatatatgcaatgaagaaaatattatatttatgtctattgcccaggagaatgaaggtgacacttaacaaaaagaaaaactaaaagtcaggaaaaacttaaactaatcttctgctgggttctgtttacagtatgattgttttaccattttttccaaattatcagccttcctcattctttcaactaatctatgttctccctatatttcaaaaaggtaattcaaaaactatcatc

SEQ ID NO: 146703 - DNA, 562 bp, Homo sapiens
tgcatgcacacgcacggacacacacacaccatataaataagtactatatatatttatttaatgacaccgtagtgttgatgaccatttctccattttgccgtcctgctatccaactgaccgccgattgctggctcgcactttctgaggaatcagagtaagatagatggattgtatcaatgtcaatatcctggttgtgaaaggacacttagttttgcaagctgttatcattgggggaaactggataaaaggtacacaggatttctctgtttctaataactgcacatgaatctgcaattatctcagttatttcaagtatttttaaaggaagaggaggtcttttgtgccagggatccaaaaagtcaagcaatgtggcccactccccaggagtggaaacaaagacctagtgggtcgtctggtccttttgagtgtcccyatcatgagcacccggaagcaggaatggtggcaagtgtggctcagactggctcctctcaaaaagcaggtacattggtagccaaaagtgggatgagaggagtgcacgagtttgagaaggtttccggagggg

SEQ ID NO: 146704 - DNA, 527 bp, Homo sapiens
ggttgggttctggtgaaggccttcttcctgacttgcaaatggtcaccttctctctgtgtcctcacatggcagggggaaggcggagagggagagaaagagaaagagagatgaagacaaaaagtgagtgaactctggtctctcttgtctcttcttayaaagacacttaatcctatcatgggcccacccatcacctcatctaaattcaatctcccccaaagaccccacttccaaatatcaccccattgggggttagagcttcaacatatgaattcgagggggaatatttagtccataacatcgtcattatgtgctgccatttagagtttgtcatagtgactgtcttagtctacctgtgctgctgtaacaaaatacctgaaactgggtaatttataaagaacagaaatgtatttctcacagttctagagaaagggaaatccaaaatcaacatgccagcaggttcagccttctggcgagggtcgagtctctacttccaagagggcacattgaatgctgcatcctccagagtg

SEQ ID NO: 146705 - DNA, 588 bp, Homo sapiens
gcccatttaaaaatcgggttatttgtctttttattattgagttgtaagaattttttatatattctgtatacttgacccttatcagatgtatgatttgcaaatattttctctcatttttgttgcgggaagtcagggacccccaacggatggaccggctgaagccatggcagaagaacataaattgtkaagatttcatggacgtttattaattccccaaattaatacttttttaatttcttatgcctgtctttactgcaatctctgaacataaattgtgaagatttcatgaacacttgtcacttccccaatcaatacccttgtgatttcctatgcctgtctttaatctcttaattccatcatcttcataagctgagtatgaatgtcacctcaggaccccgggatgattgcgttaactgcaaaaattgtttaaacaatatgaaatctgggcaccttgaagaaagaacaggataacagcaatgttcagggaacaagggagataaccttaaagtctggctgcctgtgggccgggtggaacagagtcatatttctcttctttcaaaagcaaataggagaaatatcgctgaattc

SEQ ID NO: 146706 - DNA, 330 bp, Homo sapiens
tttttacaagtgtacaaagagcacataatggagaaagaacagtgttttaacaaattatgttgggaaaactgagtattcacatgtggaagaacaaaattggactcttatctcacaccatatacaaaaatcaactcaaaatggataaaagacttaaacataacactggaaactctaaaactactagaagaaaacataggggaawatctccacaacaatggtattggcaataatttcttggaaagtattgcaaaagcacagacaacaaaagccaaaacagagaaatcagattgcataaaactaaaaagctttttcacagcaaaagaaaaaaca

SEQ ID NO: 146707 - DNA, 494 bp, Homo sapiens
tactctttcttctacttttatgtatgtttgtaattttccatcataaaacattcaaatcctatcagttgccccctcctttgtgccccacgtctgccatagcacattgttcctccctcaactataatgattgcttactgcttaccaaatctagtcttcagggagtgcccaygggcatgattttctgtgcctgtccaggtctaagcacaatgaccagcacaccataggcatttatgcagcaaatgaacatacggttactatacaccagattcccgcctatccacctctcaatttcaaaccacggaaattagaattagatcttatttttccatatctacagtatcttaaaattgtgtggctaattctatccacatcctgaaggaggtgagggcattttaaatgaatcttgaatgtacagataaaacacaattgtaaaaagaatagctgtatccatttgaaactaaacaaatagtaaatacaatctggtttcacaatcc

SEQ ID NO: 146708 - DNA, 599 bp, Homo sapiens
aataccaattatagttatgtctctcatctttaccagatacaggacagatattccacaaatgcaggatcatgtatcttgttcactgcagggttycacagtacagaaatgagcacatagtaggcactcagtaaatatttgttggaggactgcaggagcagtacaggttttgtgtatttacctctttactggcctcatgttatttttcctacccttgtttttcctctctgccaatttacttgtgtctttattttattgtgttgtatttcatgtatatttgtaagctaccttgaatcaaatagtagtaaagtgtcacgtactgttataattacaggtatcctttactgagtgcttatgtgctattgagtgctaggagtcttgctaagtactttatagacatttgcttatttaattctcacacaaccccatgagataggtatttaactagttctattttgcagccaaatgaagcttggaaaagttaagtaatttgttcaaagtcatactgaaatgttaattctgatctatttctttccagggcttgttcttttggaatgtttacaattgatttatgagattactttaaaaatttgaggggataa

SEQ ID NO: 146709 - DNA, 599 bp, Homo sapiens
aataccaattatagttatgtctctcatctttaccagatacaggacagatattccacaaatgcaggatcatgtatcttgttcactgcagggttccacagtacagaaatgagcacatagtaggcactcagtaaatatttgttggaggactgcaggagcagtacakgttttgtgtatttacctctttactggcctcatgttatttttcctacccttgtttttcctctctgccaatttacttgtgtctttattttattgtgttgtatttcatgtatatttgtaagctaccttgaatcaaatagtagtaaagtgtcacgtactgttataattacaggtatcctttactgagtgcttatgtgctattgagtgctaggagtcttgctaagtactttatagacatttgcttatttaattctcacacaaccccatgagataggtatttaactagttctattttgcagccaaatgaagcttggaaaagttaagtaatttgttcaaagtcatactgaaatgttaattctgatctatttctttccagggcttgttcttttggaatgtttacaattgatttatgagattactttaaaaatttgaggggataa

SEQ ID NO: 146710 - DNA, 608 bp, Homo sapiens
tgcatcatacctggacactgctgtcatagagagagacttgtgagtggtttcctttcatttactgaatagagataaaaatgcccaaagcatatgtgagggacaaattttaaaaattaatttaaaaattctgttctgtttaacactaataatctctaatgtatccaacttttcaattattgaaaatccaaaagtcaaatgtggagcaaaccttgaaacatagagcagtaatgaatatctgctgccaatagcaaaatattcaccaaaattcaagcagaaggtgaatgtgactgaatgagaggtccttaagctttttcmtgccatggaccctttggtagtctggctaacgtttctaataaaacaaaacacaggcttataaagaaaatcaatcatatggaaatgaatgttgatcacaatatttaaagaaataccaagtttgtgatgtagtaatatttgtgtctttattaatgctataaaaggcaagaatgaacaggaggcttgatattgactcctttttgaagtaggatgagcataaatgatacattgaaatatctgcaaagttataatgtgatatgaaagtgtctgtaatttttattcctggcaatgtgata

SEQ ID NO: 146711 - DNA, 389 bp, Homo sapiens
tcatctacttccagcagggaaaatcataaattatatttataataaaatgatatttacctcagtagagtttattagactgtcattcaacaaattttgatcagaaattgcaattaaattacctccgattgcagtcaagggcaagtaacattttctcagatttcagtatcctggtggcaggtgtcttcaactcttgactattccatgggtgttaatgatgaactagattaaattatyggtaacagttctaaatttgttttatctttccttgttgaagtaaaatcatcaacatatttttgtactcaaatatgaagccctgtgtctccttgcttactttatggaatgtggtatttgttattagcatgttgtattttaaatactttgttcagcct

SEQ ID NO: 146712 - DNA, 560 bp, Homo sapiens
acaagtcccatttatgcaattcacgtccctgagacacgactctcccacttcacaatttgctcctctgacttctgttttaatgcctttctttctaccttccttgctgaatgaataaaacaagatctctttggtatagacctactggaatttctctccttgttaaaccttttccactacattgccagtcaggaattcccatctatatctctaaaacttgtttctaccctttagggccactggtccttctccttcacccctcccctgctccctccagccagttgtaaccctttaatctatttggctactgcaggatttatgcatcccctaggctttttccagcttcagggctcctagaaggtctaagctcatctttgcagccctgacagtggccactgctctatcacagccaccttgaaagatgtctctgctgctgacaatgcaccccactctttggagaaagggttgtgggaatgcctgtaactcaaacaagatataggaaggacacttcctctacmtaccacttaaaaacagcctgctgccaactgtgcatttccatcact

SEQ ID NO: 146713 - DNA, 424 bp, Homo sapiens
catttatatgcacctcatccaatgaaattaaaatttctacaaaatcagaaacrttaatgctaaattgcattctatatgttttgattgttttgactcttactggaacctttttaaaccaatgcatcatcatgaaagcatgttggagtgtattatatgatgaaaagttcaaaaatctctaagtacatgtttctataatagaagacaaattaagaaaagaaattttggtgtaaaactgcagatggtcttttacaaagatgaaaacgctatgcatttgcctgtaatgtcctctacgaatgtcttactttgtatcaggaaaattctatttattctcctttggttcatttgcatgtacctggtaggcccatccaagtggctaggagccccattagcaattgtgatgggtgcccccagtggcttgggaatt

SEQ ID NO: 146714 - DNA, 424 bp, Homo sapiens
catttatatgcacctcatccaatgaaattaaaatttctacaaaatcagaaacattaatgctaaattgcattctatatgttttgattgttttgactcttactggaacctttttaaaccaatgcatcatcatgaaagcatgttggagtgtattatatgatgaaaagttcaaaaatctctaagtacatgtttctataatagaagacaaattaagaaaagaaattttggtgtaaaactgcagatggtcttttacaaagatgaaaacgctatgcatttrcctgtaatgtcctctacgaatgtcttactttgtatcaggaaaattctatttattctcctttggttcatttgcatgtacctggtaggcccatccaagtggctaggagccccattagcaattgtgatgggtgcccccagtggcttgggaatt

SEQ ID NO: 146715 - DNA, 600 bp, Homo sapiens
aacctaatatggcagaatggaaacctccaaatggccagtggttattctggtgtagctgaaatgggctcgtttatgatcataaacattcttgagccttcacaaacatcgaggcttctgaagccctggcaatcagcacacaaactgctttagaaaagaaacagaaagaggctcaagcctttgagaggctgccacttttgtaaaaaatctctctctgcccccagctttgtttgacacccaacaaatttctttaatcaaaatcactcctttctcttctacagataaattcctggaaagtgtaaagggaagaaagcccctccattgggaaataggttggtgtcaggctacttgcttgtctgattcttcacaatgataaaggtaggtcaagggcagagaatttgcaaccagtgtgtgaaacgaatgccttatcaacaagactagcatcaggtagcttctggatgcgtacccaaaaacrtcccaaaaaattagctatcttgaaatagaagctggctgtaccgccagggtgaaccttattgctttgacctatatcaacagcacaagagaaaggcaaggaattaccaagccatagtaggaaagatttta

SEQ ID NO: 146716 - DNA, 553 bp, Homo sapiens
ggacagctccttatctctctgtgcctcatctgtaaaataaggacaatagcaccaaccatagtagggaagtagttaaatgagacaattcatgtagtcacttacagacaagttttgcacaaaataagtgcccaattattattatttatgattctaccttcatttcctatctgtcaaataaggataaaaacaggatgtgaaggatttactgtggaaacaacttatgatggttagtgcagagtgctttgcctagtgcgcgctgcactggtagacatccagyatatgttagctgtcaaaggcgagttcatcaatgtgggagttgtcacccttcctcttcattttatctcagcacctggaatgtggtaggcaatttaaataatgagaaaagcacttcatattacctgcaaccaaagccatgcctagcagaatggcatgtcaggactggtccactcactgaaaaagaaaggacactggaatctattgccatgggcatatgcagagagttccacatttcctaattaaaaaaaaatgaaattgaagattgactactacttta

SEQ ID NO: 146717 - DNA, 522 bp, Homo sapiens
acatatttaatgttcccaaagaaagaaactgtgagctaaggattttacatcctacagagcttattttccaagaataaagggtacagaaaagtcattaccaacaactgaggaaatattgttcccataaaccccaccccccctccacaaggactctgctaaaatcaagcttgagacaatgaaaatgacgagaaagacatcaacataaggactgctggtgagcactaagcatgtgataactcacagcaggcatactaagtgagcattagaaaggagaaaatctaatatgcaaatggctstatgaccagacaattacgatatagtacaaccagaaaaatgtgggagagtgaggactgcattactaaataacaataataataaataataataaacaataaataacaatagcagtaactgtttttagtaatcggaagtggtgaaagtattattagtcttgttattctgagatcattgcatgagtaatgtggaataaagtaaatgagttttttttgggattttaattct

SEQ ID NO: 146718 - DNA, 604 bp, Homo sapiens
gttagggaaggctttgtagagaccatgagattcaaggtcaccaaattggaataatgaaaagcttcttcttctaccacttactgcccgtgacatgaataaataacttaacctcacttatccccagcaaaatggggatgattagagtctgccttatatagcarcctgccttacagtagaataaatgagatgatcttagagagcactcagctttgtaccaagcacaccatcaggactcaatccatgctatctataagaataatcacagcaagcaccacatcaatagcatccaggttcagagccgaagctctttctcccacctctatttcaaaaaaaatacccagggatcttatgagtcctttcttaaccacttcagagaggagtgaacagcctcctcctccgcattgctgttacccgtgttggtgttaggttctcttctgatacctgcatatgggcctctgcccatccgaggtcttcctgcttgtctcatacatctctccatcctcagtgccagtgcagggtctggcacatgttaaatactcagtggatggttggcaaatacgctagggatttagagataggaaatggaccttaattttacagaatt

SEQ ID NO: 146719 - DNA, 604 bp, Homo sapiens
gttagggaaggctttgtagagaccatgagattcaaggtcaccaaattggaataatgaaaagcttcttcttctaccacttactgcccgtgacatgaataaataacttaacctcacttatccccagcaaaatggggatgattagagtctgccttatatagcagcctgccttacagtagaataaatgagatgatcttagagagcactcagctttgtaccmagcacaccatcaggactcaatccatgctatctataagaataatcacagcaagcaccacatcaatagcatccaggttcagagccgaagctctttctcccacctctatttcaaaaaaaatacccagggatcttatgagtcctttcttaaccacttcagagaggagtgaacagcctcctcctccgcattgctgttacccgtgttggtgttaggttctcttctgatacctgcatatgggcctctgcccatccgaggtcttcctgcttgtctcatacatctctccatcctcagtgccagtgcagggtctggcacatgttaaatactcagtggatggttggcaaatacgctagggatttagagataggaaatggaccttaattttacagaatt

SEQ ID NO: 146720 - DNA, 604 bp, Homo sapiens
gttagggaaggctttgtagagaccatgagattcaaggtcaccaaattggaataatgaaaagcttcttcttctaccacttactgcccgtgacatgaataaataacttaacctcacttatccccagcaaaatggggatgattagagtctgccttatatagcagcctgccttacagtagaataaatgagatgatcttagagagcactcagctttgtaccaagcacaccatcaggactcaatccatgctatctataagaataatcacagcaagcaccacatcaatagcatccaggttcagagccgaagctctttctcccacctctatttcaaaaaaaatacccagggatcttatgagtcctttsttaaccacttcagagaggagtgaacagcctcctcctccgcattgctgttacccgtgttggtgttaggttctcttctgatacctgcatatgggcctctgcccatccgaggtcttcctgcttgtctcatacatctctccatcctcagtgccagtgcagggtctggcacatgttaaatactcagtggatggttggcaaatacgctagggatttagagataggaaatggaccttaattttacagaatt

SEQ ID NO: 146721 - DNA, 604 bp, Homo sapiens
gttagggaaggctttgtagagaccatgagattcaaggtcaccaaattggaataatgaaaagcttcttcttctaccacttactgcccgtgacatgaataaataacttaacctcacttatccccagcaaaatggggatgattagagtctgccttatatagcagcctgccttacagtagaataaatgagatgatcttagagagcactcagctttgtaccaagcacaccatcaggactcaatccatgctatctataagaataatcacagcaagcaccacatcaatagcatccaggttcagagccgaagctctttctcccacctctatttcaaaaaaaatacccagggatcttatgagtcctttcttaaccacttcagagaggagtgaacagcctcctcctccgcattgctgttacccgtgttggtgttaggttctcttctgatacctgcatatgggcctctgcccatccgaggtcttcctgcttgtctcatacatctctccatcctcagtgccagtgcagggtctggcacatgttaaatactsagtggatggttggcaaatacgctagggatttagagataggaaatggaccttaattttacagaatt

SEQ ID NO: 146722 - DNA, 554 bp, Homo sapiens
ctcaccaaaatgtcacacaacaggttgctgcctgtgggagaagtttcatcaggactccaggagccccagagtttatggagaatccaggggaggaagagcgctagagagcctggtgttgggttttagataattcacctcagccacccactccactgcagtcaaattggtctcctcactgtcccttgaacacaacagatgtgcttccgcctcaaggcctttgctctgctgtttctcctgttgggagtgctttccacaagactgcacttgctaattccccacctccttcaagagttcgtttccatcacaccttccacacatggcccaccctgaggaccctattaaatacctgcagcaactgcctcattcccctaccctctgcatttcattcctaccctcttacccaggtctaccctttctttttaacacagagcttaccactttctaacatgctaaaaaatgtaattataaattgggttccatttctgatctgatcmcccccttcccccagaatgcatgctccctggaggtaggaatctttgtttgctcactaataa

SEQ ID NO: 146723 - DNA, 570 bp, Homo sapiens
ttcttcttctctaactcctccttagcctcttcttgatccagcgagaaggaagctcgctgggtcctattacctttgatggtgaagacttcccaccaayagaccccaggatagccactgccagatgtagcccttgttgaatccgtttgtaaatcattgagtcaggaggtctttagagtttgaggttaaagttccccatgccattgatttgacaaaggatgttttccagataaccacccctggaatcttcagaacttaaccctagacattgtatagcacctagaagccctgatatcagaagatgaagtttagacaggagacactcaaagcctagggtgaagatttaaacagcagacatgatttccataggaataactgtaccttggcaggagcccagcagaaaatggtcctaggatatggctggaaattagaaaagaaagaaagaaaggaaaaaagcaatgcaaccccatgtctgcacgaagaaggtatttctctttgctggagtgtctcagaaggatcaaacatgtaattaggaataaaatatgtttcccctgtctctgccactacctaatc

SEQ ID NO: 146724 - DNA, 570 bp, Homo sapiens
ttcttcttctctaactcctccttagcctcttcttgatccagcgagaaggaagctcgctgggtcctattacctttgatggtgaagacttcccaccaatagaccccaggatagccactgccagatgtagcccttgttgaatccgtttgtaaatcrttgagtcaggaggtctttagagtttgaggttaaagttccccatgccattgatttgacaaaggatgttttccagataaccacccctggaatcttcagaacttaaccctagacattgtatagcacctagaagccctgatatcagaagatgaagtttagacaggagacactcaaagcctagggtgaagatttaaacagcagacatgatttccataggaataactgtaccttggcaggagcccagcagaaaatggtcctaggatatggctggaaattagaaaagaaagaaagaaaggaaaaaagcaatgcaaccccatgtctgcacgaagaaggtatttctctttgctggagtgtctcagaaggatcaaacatgtaattaggaataaaatatgtttcccctgtctctgccactacctaatc

SEQ ID NO: 146725 - DNA, 570 bp, Homo sapiens
ttcttcttctctaactcctccttagcctcttcttgatccagcgagaaggaagctcgctgggtcctattacctttgatggtgaagacttcccaccaatagaccccaggatagccactgccagatgtagcccttgttgaatccgtttgtaaatcattgagtcaggaggtctttagagtttgaggttaaagttccccatgccattgatttgacaaaggatgttttccagataaccacccctggaatcttcagaacttaaccctagacattgtatagcacctagaagccctgatatcagaagatgaagtttagacaggagacactcaaagcctagggtgaagatttaaacagcagacatgatttccataggaataactgtascttggcaggagcccagcagaaaatggtcctaggatatggctggaaattagaaaagaaagaaagaaaggaaaaaagcaatgcaaccccatgtctgcacgaagaaggtatttctctttgctggagtgtctcagaaggatcaaacatgtaattaggaataaaatatgtttcccctgtctctgccactacctaatc

SEQ ID NO: 146726 - DNA, 549 bp, Homo sapiens
ggccaaacaggaactgctccagtccacagctcccagcgagatygacatagaagacaggtgatttctgcatttccaactgaggtacctggttcatctcactgggacaggttggacagtgggtgcagcccacagagggcaagttgaagcagggcagggcgttgtctcacccgggaagcacaaggggtcggaggatttccctttcctagccaagggaagccgtgagtgactgtacctggagaagcagtacaatcctgtccaaatactgcacttttcccacagtctttgcaaccaccagaccaggagattcccatgcctggcttggtgggtcccacacccacgaagccttgctcactgctagcacagcagtctgagatcaacctgggatgctgaagtttgggaggggaggggcgtccaccattgctgaggcttgagtaggtggttctatgctcacagcgtaaacaaagcagcagggaagctcgaattaggcagagcccaccgcagctcaacaagtcctactgcctctctagattccacctctgagggcagggc

SEQ ID NO: 146727 - DNA, 549 bp, Homo sapiens
ggccaaacaggaactgctccagtccacagctcccagcgagattgacatagaagacaggtgatttctgcatttccaactgaggtacctggttcatctcactgggacaggttggacagtgggtgcagcccacagagggcaagttgaagcagggcagggcgttgtctcacccgggaagcacaaggggtcggaggatwtccctttcctagccaagggaagccgtgagtgactgtacctggagaagcagtacaatcctgtccaaatactgcacttttcccacagtctttgcaaccaccagaccaggagattcccatgcctggcttggtgggtcccacacccacgaagccttgctcactgctagcacagcagtctgagatcaacctgggatgctgaagtttgggaggggaggggcgtccaccattgctgaggcttgagtaggtggttctatgctcacagcgtaaacaaagcagcagggaagctcgaattaggcagagcccaccgcagctcaacaagtcctactgcctctctagattccacctctgagggcagggc

SEQ ID NO: 146728 - DNA, 626 bp, Homo sapiens
tatctggaaagccttcccaagagggacatctacaaataggccaagacagtgaagactaccataaatacataactcttcaatgctcagaaactgaagaacaactactagcatcattaacatctaggaaaacatggccttaccaaaggaactgaataaggcatcaggaaacaatccttgagaaacagagatatgtgaccattcagacagagaattcaaaatagctgtgttgaggaaacccaaagaaatttaggatracaaaaatagagaaggaattcataattctatcagaaaaatttaacaaaaagattaaaataagtaaaaagaatcaagcagaaattctggagctgaaaaataatgtaattggcatactgaagaatgcctcagagatctttaacaacagaatggatcaagcagaagaaagaattaatgagttggaagacagactacttggaaatacacagtgagaggaaattaaaaaaagagtaaaaatcaattcagcatgcctacaggatctagccaatagcctcaaaatggcaaatctaagggttattggtcttaaaaaggaggtagagaaataaataggggtagaaagtttattcaaagtgataataacagagaccttacca

SEQ ID NO: 146729 - DNA, 499 bp, Homo sapiens
ggagtaacgtaagtgctgtcaacagatagagaaagaaagaaaatgtggtacatatacacaagggagtactattcagtgataaaaaagaaggagagccagttacttgcaacaatgtggatgaaactggagatcatattgttaagtgaactaaaccaggcacatctaaacatctcatgttctcacttatttgtgggatctaaaaatcgattgaactcatggacctagagagtataaagatgtttactagggkctgggaagggtagtagagggaatggaggaaagtggggatggttaatgggtacaaaaaatagaacgactgaaaaagatcctctgtttcatagtacaacagtgtgactattgtcaataataatttaattgtacattttaaaataaccaaaagagtgtaactggattatttttaaaacaaagtataaatgcttgaggagatggataccatattcttcatgatgtgatcatttcacattgcatgcttgtatca

SEQ ID NO: 146730 - DNA, 612 bp, Homo sapiens
caagttggtctggtgtctggaatgaaactggggcttaataaaaaggagcatccatacaggagctcaaattgtaccctgtagcattccaaggacaggcytgaattctgagaagggaaagttgtgaaagccttgtgcggtcctttttaagttggtggctgagcttggtgaggtgtgtttttaaaagaccattagtccgttctacctttcttgaagactgaggactgaaaaggatataaaggtttcactgaataccaagagccaaaaaaaatgcttggctgatttgactaataaaggctggtccgttatcagactgtatagaggtgggaaggccaaaccaaggaattatgtctgacagaagggaagaaatgaccgtggtggccttgtcagaccctgtaggaaaggcctctacccatctagtgaaagtgtctacccagactaagaggtattttagttttctgacttggggcatgttgagtaaagccaatttgccagtcctgggtgggggcaaatcctcgagcttgatgtgtagggaagggaaggggcctaaataatacctgaggagtagtagaatagcagatggaacactgagaagtgatttctttgaggatagat

SEQ ID NO: 146731 - DNA, 612 bp, Homo sapiens
caagttggtctggtgtctggaatgaaactggggcttaataaaaaggagcatccatacaggagctcaaattgtaccctgtagcattccaaggacaggcctgaattctgagaagggaaagttgtgaaagccttgtgcggtcctttttaagttggtggctgagcttggtgaggtgtgtttttaaaagaccattagtccgttctacctttcttgaagactgaggactgaaaaggatataaaggtttcactgaataccaagagccaaaaaaaatgcttggctgatttgactaataaaggctggtccgttatcagactgtatagaggtgggaaggccaaaccaaggaattatgtctgacagaagggaagaaatgaccgtggtggccttgtcagaccctgtaggaaaggcctctacccatctagtgaaagtgtctacccagactaagaggtattttagttttctgacttggggcatgttgagtaaagccaatttgccagtcctgggtgggggcaaatcctcgagcttgatgtgtagggaagggaaggggcytaaataatacctgaggagtagtagaatagcagatggaacactgagaagtgatttctttgaggatagat

SEQ ID NO: 146732 - DNA, 584 bp, Homo sapiens
agacctggaagttctgttctttggccctagtttcctgcttttttggcatgaggactgacagcaattaaacagaaggtaactgtaagtaggcaaaggccacatacataggtgatggacctgttccaaattggttaggagagaggtrgggtggggtcataactgggtagaaattggaccaaggtgatctttgaggatcccctgaactctgattcaacacactcctttaacttggaatgacacacaagtagaaataatcttcctgataagttttggtaaactgagactatcctagattgcttagcatgaattaatgatatcgtatggctttataaagggaagaatgaaaagaaggacaagaaagtctaagagttgatgttatggatagtgtatgtatgtttatgtgtgcagctacacgtgtctgtgtacacacggatgctgcacaattcaattacaaaagaaacaaacattttccttttcttgaatttagacccttactcctgcttaaagaagttcaatgttagcggtgcagccctggcagtattcagacactaactggaaaatttcacctggtcttgcaaaagctt

SEQ ID NO: 146733 - DNA, 584 bp, Homo sapiens
agacctggaagttctgttctttggccctagtttcctgcttttttggcatgaggactgacagcaattaaacagaaggtaactgtaagtaggcaaaggccacatacataggtgatggacctgttccaaattggttaggagagaggtagggtggggtcataactgggtagaaattggaccaaggtgatctttgaggatcccctgaactctgattcaacacactcctttaacttggaatgacacacaartagaaataatcttcctgataagttttggtaaactgagactatcctagattgcttagcatgaattaatgatatcgtatggctttataaagggaagaatgaaaagaaggacaagaaagtctaagagttgatgttatggatagtgtatgtatgtttatgtgtgcagctacacgtgtctgtgtacacacggatgctgcacaattcaattacaaaagaaacaaacattttccttttcttgaatttagacccttactcctgcttaaagaagttcaatgttagcggtgcagccctggcagtattcagacactaactggaaaatttcacctggtcttgcaaaagctt

SEQ ID NO: 146734 - DNA, 584 bp, Homo sapiens
agacctggaagttctgttctttggccctagtttcctgcttttttggcatgaggactgacagcaattaaacagaaggtaactgtaagtaggcaaaggccacatacataggtgatggacctgttccaaattggttaggagagaggtagggtggggtcataactgggtagaaattggaccaaggtgatctttgaggatcccctgaactctgattcaacacactcctttaacttggaatgacacacaagtagaaataatcttcctgataagttttggtaaactgagactatcctagattgcttagcatgaattaatgatatcgtatggctttataaagggaagaatgaaaagaaggacaagaaagtctaagagttgatgttatggatagtgtatgtatgtttatgtgtgcagctacacgtgtctgtgtacacackgatgctgcacaattcaattacaaaagaaacaaacattttccttttcttgaatttagacccttactcctgcttaaagaagttcaatgttagcggtgcagccctggcagtattcagacactaactggaaaatttcacctggtcttgcaaaagctt

SEQ ID NO: 146735 - DNA, 383 bp, Homo sapiens
gtttggatctctgtaccttatttcaggcatgggatgaaccgagcaatattttctcctcaggaaatgtgcttcgaatagcacccacctagcacatargaggtgctacatgagtatttgttaaacaacatgaaaacaaatgttgctcttatgcatagatgtgtgaaaaagggaaacaagaacatctccaaaagtaaaggaaatgtgaaaggtgctgcccaggagttcctgctaagaggtttatgaaagttatcttctggatttctgccccacgggcccaggatagcaaaagccagggttcgtaacctgagagcacagttgttaaataggctccaaattctgtggcctgtggtgtttttgttgcccaaattataacttcagatgtc

SEQ ID NO: 146736 - DNA, 432 bp, Homo sapiens
tagcaattgtcaaatgaaaaaaaattacccctaattcattaatgacctatttaatgcataggttatttgaaagacaaatgttttaatactcaaaagtgaatatcaattggaaaaatcctgctcattctctctgcctctttccccatttcacttcccttttccctgtctctagcaagtttggagggcgtctatgccagtggtagccaggagagagcacacagcaagtgcattgagaaagaaacactttgcacttaaaaartgagccccttcatgaaattcctgctgtgggagaatcagggaagggaagggatggagagagaatgtgtaaaggaacaaacagtccccccgcccctctccagaaagggccaagccaggaacaggctgggctgaggcgaggctggagaaccacgtgggtagggagagcttgaattc

SEQ ID NO: 146737 - DNA, 433 bp, Homo sapiens
gtagcaattgtcaaatgaaaaaaaattacccctaattcattaatgacctatttaatgcataggttatttgaaagacaaatgttttaatactcaaaagtgaatatcaattggaaaaatcctgctcattctctctgcctctttccccatttcacttcccttttccctgtctctagcaagtttggagggcgtctatgccagtggtagccaggagagagcacacagcaagtgcattgagaaagaaacactttgcacttaaaaagtgagccccttcatgaaattcctgctgtgggagaatcagggaagggaagggatggagagagaatgtgtaaaggaacaaacagtccccccrcccctctccagaaagggccaagccaggaacaggctgggctgaggcgaggctggagaaccacgtgggtagggagagcttgaattc

SEQ ID NO: 146738 - DNA, 550 bp, Homo sapiens
gtgaaattaagttactgaagtgaggcaatgttgccccacacaagctatcccattaaaaaggtaaattacctactttttttccctgcattcccaggaataaagaaagaggaaaacagagagaagggaacagaggaaaaagtaagtgtgaggggacgaaaaggtgcatctgtagaactcaaacctacagatagagaatgctgaaaaaataaataatttgtaaggccatttttggctcccagcttctacaattcttccctakgccttgttgatattcaccttctctgaattcctgtctatgtgatttatgtttcctctaaaataatgtaattgtttcttgtgtatatttatatctccacagagaatgaggctttttaaagtcaaggccttttatctactgagaataaattcacaatgctaagaaaataacactaaagagaacagagtataccttcatgttattggatgaattatgttcccccaaaattcgtatgttgatattttaacccctaatatctcagaatgtgactgtatttggaaaaaacatttttaa

SEQ ID NO: 146739 - DNA, 544 bp, Homo sapiens
aatgaacaagacattaattttatattaatttttggacatttaatggttaaagtcacttaaaatgctaatttgaaacaacatatatgaagtttattaatctagtattttccatttgcatttaaagttaatctttaccaattgaaatattgtaaaaaacttttaagaaaatcctaagaattgaacttttctctaaagtttaatatctacacaatttttagattcttccacataattcatttccaaagacattaaaaaacatttttacactttttraattactaaatcatgaatattattcacaggattgacctagaaattataaatcatataattaaatgaaaattcatatttgccatgctttattcgaacttaacgctgttttgaaagtgaagtcccttaattgtccttaggttttctgggtctctattttataaaatgaaattctaacaaaatgtgtctcttaatcttattattttatagtcttctccagggagggagatttgccaataattgctggaagaaggcagcatggtgtaaggaaaga

SEQ ID NO: 146740 - DNA, 499 bp, Homo sapiens
aatgaaaatgaacaatgttagcatrattaagttaccaatttattgtagttaaaaagaaagaaagttctacttaacaatggccaaataaacagaactaatatagcatgcatcagtgggttcttaaattagaaccactgtactttttaaaaatgtgattttaagaatttaaataagtgaggcatgaaagtccaaaattttatatgcgcctgtatcataagcttaatattttaattttattatgaaaaccacaatggctaaatattttacttctgtgagcgtgattatcaatattatttacatttttccattagtgtacatatctatcactacattgtgtaaggaatttaattccaactcattagatgttaactatgcatgccaggcattgtgttaagcagtgaggatacagtgataaataaggtaaagctgatttttttcaacaagtacaaggtggaaatggaactgtgtgaggaccattaaatcatatgttgacctgact

SEQ ID NO: 146741 - DNA, 499 bp, Homo sapiens
aatgaaaatgaacaatgttagcatgattaagttaccaatttattgtagttaaaaagaaagaaagttctacttaacaatggccaaataaacagaactaatatagcatgcatcagtgggttcttaaattagaaccactgtactttttaaaaatgtgattttaagaatttaaataagtgaggcatgaaagtccaaaattttatatgcgcctgtatcataagcttaatattttaattttattatgaaaaccacaatggctaaatattttacttctgtgagcgtgattatcaatattatttacatttttccattagtgtacatatctatcactacattgtrtaaggaatttaattccaactcattagatgttaactatgcatgccaggcattgtgttaagcagtgaggatacagtgataaataaggtaaagctgatttttttcaacaagtacaaggtggaaatggaactgtgtgaggaccattaaatcatatgttgacctgact

SEQ ID NO: 146742 - DNA, 593 bp, Homo sapiens
taaacaaaaaacaaaagtggcaacagattcaatgcatgttatccagaattgcttttaccttttcttgcaaacagttttgagttttggtagtaaactgtttgaggcggtgaataagtacgtagtatacttagcataagacttaagaactctggcccttttgatcacttctttgcagcaaattattgtttgttgtgctttaaagtctccatttgtaaagaggaaatactacagatacacattaaagccacatccatcagtaacaagtacttattcaatttgagctggcaatagttcattaatagaactgatgtacttaaaagataatcagaatcgtcagtgtgctgttcacttactgaatgcattgactttctatattagttcttcagaatcttttttgggtcatgaaaaatatggacaacctacatagtgctttgataaaagttatgaccttcttttccagaaaagacatatatgcatctacacatgttttcatataatttcaagaaattttttgttaagtcttctgaaactcttcaaagggggytctttgaccacatattcaggacctctgttctaaaagatgcacatgaacc

SEQ ID NO: 146743 - DNA, 471 bp, Homo sapiens
ccaccagtccaccaggaggcatgtttacgaaggttgacaacagcgcatcaacggattgggcaacacagggttttatatataatcatgtttttgtttgtagatctgtttttaactttctcacttcattgaaactatgggacaatactttgataagtgtatgcaaatggtcttcaacttacaataggttgacttacgatttttcaattttacaatgagttcattgggacataaaccaattgtaagttaaagagcatttgtattaggttgcacatttttccttttgtctcaggcttctgaggcttggcatggcactggaaagtcgcaayagaaaccacaagatttaaagtcctctgtctctaacatggcaatctatataaaaatcatttaaagtactcatgtcctttgagctaatttttccacttttgtggatctggctaacaaaattatattataaacacattattaaaaatt

SEQ ID NO: 146744 - DNA, 611 bp, Homo sapiens
ttaatgactactgtgataagatgaaaaatgatcttcaaccatctatccacccacccacccatcaatccacacacccacccatccacctgcccactcacccacccttccattcattcatccatccatccacccatctacccacccatccactcatccatccatccatccatscactcgctcactcactgacccttccatccattcatccacccacccaccacccaccgacccatctacccatccactcatccatccatccatccacttacccatccaaccatccattcaatgattgtgttttgggtactacacagtgccaggcactgaacaatccagagaggaactctgccctctacgagcccacagtgaagaagagagacaactaaattagtgatttctatgacttgaagagtttgccatcatggggacccccaggtgctgtggacacacaaagcaggaagacctgaactggcccggggtaaccaggaatgcctttcctctcagctccaagtagggatttttttttcttcaggtaaagaaggacttaataaaaagatgaatcatgaagaaactgaaatacacaactgtctgctagtaaaaggtgcagaagg

SEQ ID NO: 146745 - DNA, 572 bp, Homo sapiens
gtggttggtgtgagtgaccccaaaggacaaggtgtgccacacaggtctactggagcatgtcagcatgagtgtgcgtgtgtgtgtgtgagagagagagagagcaagcccaagatatctgtgccacacctgtctctgggtgtgcaagccccaygatgtgtgagtgtctgtgtatgtgctcaaagctgaagaagacaatctcacaaactctcacagttgagaagagagaacagggaaagaggaagggaactgaaaatgaatacctcagaagcaaatttagtgctatttttagacaactcctattctgttaaccagaaaaggaaaatctaaaaaaaaatcccaaagaaaccgccttgcatcagccttgaaggcacaggtggcagacgtaggtctaaggggcaggcagtgagagggatccagggcttcctgtggagcttctcaccctcacgcctggcctgaggaaggggaggtccagcccttaccttcctaccagggtcaactcactccactgtcctctgttctcagaggagttgccaatgttagatggcaggaaaaaccttccatttctgctcatc

SEQ ID NO: 146746 - DNA, 583 bp, Homo sapiens
agaagctcagtgttgaagggttattttagccccaccctcaaggatccttgcttcttgggtcatgcacagttcccagggcttccctgctgctgccttgtgtctagcagaaatggacatcccagttgcaggtcaagtcrtgcttggctggaggccgaaggaaggagaaatgccctagaatcaggaaggcatgacctgaccggaattcaccttctatctgtgacatccactgcccacccttgggcttctgactgcggtgcctgccttccaaaatttgtaccttttatgtgttccatgtttagaaataatttccttaaaaaatatttgtggagtttctaatgaggctaaaacagtaaagtcactagcagatccagacaagatagcctgtttgaggcagaaaagtgttggggaagcttcactttgggctgcaagagagggaacatgccgtgggaatgctggggatggtggccctgcctgggatgggccagcggctctggacattgtactctggtttcagccaaatgcctcagccacatcccaccatcctctcttgcactgcccaactctttccctactgctgcactga

SEQ ID NO: 146747 - DNA, 495 bp, Homo sapiens
ccaaactttctcttatcagcctgtcttcttctgagccctcccaactcttccaacctctgcctttaccctgttccaaagctgcttccacattttcaagtatctttacctgaaatctaaagatacctgaggagcaggtgtctctgaaatctcattctttgaaacctaggcagaggctcccaagcctcaactcttggactctgtgtacctgcatgcttaatagtttgtggaagccaccaaggaccaagtgagaagcaatgmctcactccttggtaccaattttctggattagttcattctcacattgctataaagaaatatctgagactgggtagtttatttaaaaagaggtttaatgatgtcattattctgcaggctgtacaggaagcatagtggcttacatctctggggaggcatcaggaagcttccaatcatggcaaaaggcaaaatgagagtgaggtgtctgacatggtgggagcagaagcaagagagagagag

SEQ ID NO: 146748 - DNA, 495 bp, Homo sapiens
ccaaactttctcttatcagcctgtcttcttctgagccctcccaactcttccaacctctgcctttaccctgttccaaagctgcttccacattttcaagtatctttacctgaaatctaaagatacctgaggagcaggtgtctctgaaatctcattctttgaaacctaggcagaggctcccaagcctcaactcttggactctgtgtacctgcatgcttaatagtttgtggaagccaccaaggaccaagtgagaagcaatgcctcactccttggtaccaattttctggattagttcattctcacattgctataaagaaatatctgagactgggtagtttatttaaaaagaggtttaatgatgtcattrttctgcaggctgtacaggaagcatagtggcttacatctctggggaggcatcaggaagcttccaatcatggcaaaaggcaaaatgagagtgaggtgtctgacatggtgggagcagaagcaagagagagagag

SEQ ID NO: 146749 - DNA, 582 bp, Homo sapiens
gggggaggggttcttattcctgatgcaggtagtccctactgctgtgtggttcccatattggctagggttggatcacacagtctaagctaattctgaatggctattttaaagagagcaggggtatgagccagagaggcggggtgagtagtttggcaggaaggayggttaggaacagggaactaaaggtgacttaggtcagagaaggtgaccgggggtgactcaggtcaaagcaggtgaccgggatgagtcagggcagagtaggtgaccaggggaacagatgtgaactactgattaaaactggttgaaaaagttgtttactgaaactacgaggaagttaaactttaaaatggaggacaaagaactgaacatactgacatactgattctttgaagagaaatctagaactcaccgtatccaattgtcaacataccagtactaaaagaaacaccaaattattagataaatagaaaatagggtccagatttatatctatacaaattaatcaacagcaactaaaatgataaatatgtgggtaaaagtaatctgctttttaaaaatttaaactctcatgtaaagacattt

SEQ ID NO: 146750 - DNA, 340 bp, Homo sapiens
gacgttaacaatgcactagcagcattaaacagatcatctagacagaaaatcaaaaaagaaacattgaatgtaaactggatcttagaccaaagggacctaacagacatttacagaacattttatccaataactgcaaaatatactacacattcttctcatcactacatggaacattctccaggataggccatatgttattcttcaaagcagtttcaacacattttaaaaaattatatyatcttctaagaacacaatggaatataactagatatcaacacgacgaggaacttttgaaactgtacaaatacatggatgtgaaataacacgctcctgaacagcc

SEQ ID NO: 146751 - DNA, 527 bp, Homo sapiens
gtgaaaggcaaaagggaggtaagcacatctcaccaagttggagcaggagagagagaaaaagcaaaggggaagtgctacacacttttacacaacaagatctcatgagaactcactcattatcatgagaacagcaaggggaaaatcccccccatgagtcaatcactgcccaccagkttcctcccccaccattgtgaattacaattttacatgagatttgagtagcaacatagagccaaataatatcactccattcctgtctcctcccaaatctcatgttcttctcacatttcaaaacacaatcatgctttcccaactgtcctccacactcttaagtcattccagcattaactcaaaagtccaagtccaaagcctcaactgagacaaggcaagttccttcacctatgaacctgtaaaataaaaaaacagtttgttaattccaaaatacaatgtgggtacaggcattgagtaaattattccattcccaaagggagaaattgggcaaaacaaaggggctacatgccccatgg

SEQ ID NO: 146752 - DNA, 419 bp, Homo sapiens
aaaagtgtgtggcacctctcaccccactctatctcttttgctattgctttcactatatgatatgcttgctcaagcttcaccataagtaacagctcctgatgcctcccagaagccaagcagatgccagcaccacactgcctgtacagccacagaactgtgatccaatcaaatctattttctttataaattacccagtctcaggtatttcttcatgacaatgcaagaatggcctgatacaacatgcaattcaatcaatgtgatataacttatcaacagaatgaaggacaaaaaccatatgaccatttcaaaagtgctgaaaaaacatttgataaaatttaacattcttttatcataaaaacaataaaaagtgggcacygagggaataaacctcaacacaataaaagccatatccaacagta

SEQ ID NO: 146753 - DNA, 488 bp, Homo sapiens
tttgctaaagcatagcaagagtgacctttactccagttcccagtaagttgctcatcttcaactgagaccacctcaacctggacttcgctgtccatatcactatcagaattttggtcacaaccatccaacaagtctctaggaagctccaaacttacttcatcttcctatcttcttctgatccctccatactgttccaacctctgcccattacccagttccaaagttgcttccacattttcaagcatctttatattaatgctcacttctctggtaccaattttctgtatcagtccattctcacactgctataaataactacctgatactatgtcatttatgaagaaaataagtttaattgactcacagctctgcaggctgtacaggaagcatggcagagaggactcagcaaacatataatcrtggcagaaggcaaagaggaagccagcacatacaaccatggtggagcaggagagagcaaagggtgaagt

SEQ ID NO: 146754 - DNA, 570 bp, Homo sapiens
tgggactaaggtcataataaagaggtttacttaaaycaggaagcattactattttcaccagcctaagatattagtagccattatataaatccgcatttctaataaaaacagtgatattccagattcaaacagtgatatacatgaatagttaaaaaataaccagtttatttctagagtaatggaagctagttttttcaaaaaagtaaatttagaattacatctcctgtctgactgtattattttacaatcttctagtccacaccgaagtgaattaacaggagcaactcaggagacatgtatcaatgagaggtgttataaataagtaaataaagacacatgtatgcataagtgtgcataaaactatacacacacagtcacataaacaaatatatccatccatatatacatacatacatatacacttctctcaacacatgtccacaaaaaaacccatgcacacaatggaaacaaaaaacaaggagacagatggaaatttgtggaatttactctcaggagcctgcatggtcatacggagtgtttttaacagggtttccaattcttctcattgta

SEQ ID NO: 146755 - DNA, 570 bp, Homo sapiens
tgggactaaggtcataataaagaggtttacttaaatcaggaagcattactattttcaccagcctaagatattagtagccattatataaatccgcatttctaataaaaacagtgatattccagattcaaacagtgatatacatgaatagttaaaaaataaccagtttatttctagagtaatggaagctagttttttcaaaaaagtaaatttagaattacrtctcctgtctgactgtattattttacaatcttctagtccacaccgaagtgaattaacaggagcaactcaggagacatgtatcaatgagaggtgttataaataagtaaataaagacacatgtatgcataagtgtgcataaaactatacacacacagtcacataaacaaatatatccatccatatatacatacatacatatacacttctctcaacacatgtccacaaaaaaacccatgcacacaatggaaacaaaaaacaaggagacagatggaaatttgtggaatttactctcaggagcctgcatggtcatacggagtgtttttaacagggtttccaattcttctcattgta

SEQ ID NO: 146756 - DNA, 365 bp, Homo sapiens
gtattcatcgtacactgggaattatttgcctcttactctacaatatatctcccagcctctcacctcaggccacaatggtcttttaggtaatgcaatgtgcaatccttcttaccacagagcctgtgcttttgctattgccattgtctagaacccagcagaactgtattagtttgttttcacgatgctgtgaagaaatacccaagactaggtactttataaagaaaagagrtttaattgactcacacttctacatggctgggaggcctcagaaaacttacaatcataatggaaggggaagcaaacacatccttcttcacatgacagcaggagagagaagtactgagcaaagtgatcgaaagccactt

SEQ ID NO: 146757 - DNA, 568 bp, Homo sapiens
cactggtactagataacccatttatcttagatgataggtttatgcattttattttttgagaaaaaagccactggattttaaaaattcaactcagacttaataattttgctgacagacagcaggatattagagacagtcctcaataatcacagttctgattcagatgaagtattttgaatacaaagtgacagcagaaaatggcatagatttcaataactttaagaaccaawcttgcattgtctgagtaaactctggctggtgattattgaataagcatgtttacctgtgattttacacaggaaagggtatcatttcacagcaaaatgaggatccatgaattataaaaagaattattaatgctcaaatagcacatcctaggaacagatcaccaacctggaaagttattttctgcattttcaattgaatgaagtatttgattttattacaaaaaggaaaaactgaattatttttagacgagtataagaaataaattaactcaagacccttactgtaatttgaacatattcaaataaacattcatgttatctgaacttctctgagaaggaca

SEQ ID NO: 146758 - DNA, 568 bp, Homo sapiens
cactggtactagataacccatttatcttagatgataggtttatgcattttattttttgagaaaaaagccactggattttaaaaattcaactcagacttaataattttgctgacagacagcaggatattagagacagtcctcaataatcacagttctgattcagatgaagtattttgaatacaaagtgacagcagaaaatggcatagatttcaataactttaagaaccaatcttgcattgtctgagtaaactctggctggtgattattgaataagcatgtttacctgtgattttacacaggaaagggtatcatttcayagcaaaatgaggatccatgaattataaaaagaattattaatgctcaaatagcacatcctaggaacagatcaccaacctggaaagttattttctgcattttcaattgaatgaagtatttgattttattacaaaaaggaaaaactgaattatttttagacgagtataagaaataaattaactcaagacccttactgtaatttgaacatattcaaataaacattcatgttatctgaacttctctgagaaggaca

SEQ ID NO: 146759 - DNA, 580 bp, Homo sapiens
ttcaataatcaaaacaaacacttgacagaaagaatattaagcaaagtgagagaaaaaaaaagcaacacaggaaaagaaaatttatccccaggctctacatattagagatatcagatgctagcatttaaatagttgtgaattaaataagtagatgaaaagatgagtaatttcaccagagttgaaatctatatgccaggtgtggtggctcacacttgtaatcccagcactttgggaggctgaggcaggcagatcacatgagattaggagttygagaccagtgtggccaacatggtgaaaccccatctctactaaaaatacaaaaattagctgggcactttggtgcatgcctgtaatccctgctacttgagaggctgaggtgggagaatcacttgaacccaagaggcagaggttgcagtgagctgagattgcaccactgcactccagcctgggtgacagagcgagactccatctcaaaaaaaaaaaaaagaaaaagaaaaaaagaaatccatatagtaggatcaataatgcaacggtaggtaataaaggcagatagtaataaagttaaaagcaggaaggagaa

SEQ ID NO: 146760 - DNA, 580 bp, Homo sapiens
ttcaataatcaaaacaaacacttgacagaaagaatattaagcaaagtgagagaaaaaaaaagcaacacaggaaaagaaaatttatccccaggctctacatattagagatatcagatgctagcatttaaatagttgtgaattaaataagtagatgaaaagatgagtaatttcaccagagttgaaatctatatgccaggtgtggtggctcacacttgtaatcccagcactttgggaggctgaggcaggcagatcacatgagattaggagtttgagaccagtgtggccaacatggtgaaaccccatctctactaaaaatacaaaaattagctgggcactttggtgcatgcctgtaatccctgctacttgagaggctgaggtgggagaatcrcttgaacccaagaggcagaggttgcagtgagctgagattgcaccactgcactccagcctgggtgacagagcgagactccatctcaaaaaaaaaaaaaagaaaaagaaaaaaagaaatccatatagtaggatcaataatgcaacggtaggtaataaaggcagatagtaataaagttaaaagcaggaaggagaa

SEQ ID NO: 146761 - DNA, 504 bp, Homo sapiens
ctacatatagatttattctccatggtggggtaaaaattgcaatatttagcccaattatattaaattatattatattacatatcttcctgggtaagagaaaaaagttgcattcttcaatgacactctaaaatatgtggacttttgtcatctttatatatgcatatataacatagaaactaaaatttgttaaccaggcaattaagtggaatcaacttagagtcataatttaaatctatatttgaacttyccataactaaattcagtatatataaaatatgaaaatgctgtccaaatacaatcactcacagttttacatggctaaaccgttttgagaggcttaaaggcttttaagaaacaagacaattcatatgcttctggaaattttctctaagtgaaacaatacttggttaagccaaaatattgttcagtgcaaagtagccaggtttagggaataactaacaggctatgccaaagttttattcttggatacctgatatcaatgtg

SEQ ID NO: 146762 - DNA, 504 bp, Homo sapiens
ctacatatagatttattctccatggtggggtaaaaattgcaatatttagcccaattatattaaattatattatattacatatcttcctgggtaagagaaaaaagttgcattcttcaatgacactctaaaatatgtggacttttgtcatctttatatatgcatatataacatagaaactaaaatttgttaaccaggcaattaagtggaatcaacttagagtcataatttaaatctatatttgaacttcccataactaaattcagtatatataaaatatgaaaatgctgtccaaatacaatcactcacagttttacatggctaaaccgttktgagaggcttaaaggcttttaagaaacaagacaattcatatgcttctggaaattttctctaagtgaaacaatacttggttaagccaaaatattgttcagtgcaaagtagccaggtttagggaataactaacaggctatgccaaagttttattcttggatacctgatatcaatgtg

SEQ ID NO: 146763 - DNA, 504 bp, Homo sapiens
ctacatatagatttattctccatggtggggtaaaaattgcaatatttagcccaattatattaaattatattatattacatatcttcctgggtaagagaaaaaagttgcattcttcaatgacactctaaaatatgtggacttttgtcatctttatatatgcatatataacatagaaactaaaatttgttaaccaggcaattaagtggaatcaacttagagtcataatttaaatctatatttgaacttcccataactaaattcagtatatataaaatatgaaaatgctgtccaaatacaatcactcacagttttacatggctaaaccgttttgagaggcttaaaggcttttaagaaacaagacaattcatatgcttctggaaattttctctaagtgaaacaatayttggttaagccaaaatattgttcagtgcaaagtagccaggtttagggaataactaacaggctatgccaaagttttattcttggatacctgatatcaatgtg

SEQ ID NO: 146764 - DNA, 457 bp, Homo sapiens
agaattcattaataggagacttgctgcaatggtttgaatgtttcctcccaaacttattttgaaatgtattactatcatcatggctattaaaaggtgattattccataagggctgtgcccctacgaatggatcaatgtcatcatcacaggagtgagttccttactgtgagaataggttgctataaaagcaagttcaacaaccttttgctctccagcactctcttcactttctgccttttgccatgagatgatacagcacaaaggccctcaccaaattttggtgtcaagctcttggacttctcagcctccgsagtcataagccaaatgaatttctattctttataaattatctggtctgtagtattctggtatagcaacacaaaatgaactagacatctgccttacaacaaatactaaaggaaattttacagactgaaagtaagtgacaccaaacaata

SEQ ID NO: 146765 - DNA, 456 bp, Homo sapiens
gaattcattaataggagacttgctgcaatggtttgaatgtttcctcccaaacttattttgaaatgtattactatcatcatggctattaaaaggtgattattccataagggctgtgcccctacgaatggatcaatgtcatcatcacaggagtgagttccttactgtgagaataggttgctataaaagcaagttcaacaaccttttgctctccagcactctcttcactttctgccttttgccatgagatgatacagcacaaaggccctcaccaaattttggtgtcaagctcttggacttctcagcctccggagtcatragccaaatgaatttctattctttataaattatctggtctgtagtattctggtatagcaacacaaaatgaactagacatctgccttacaacaaatactaaaggaaattttacagactgaaagtaagtgacaccaaacaata

SEQ ID NO: 146766 - DNA, 441 bp, Homo sapiens
tggctcattggattttaacctaatttatacacatttgattgtcccccttaaaattttagagttcccaatatagtaaattggaatttgttttgtttaataaaaatattgccagatagcaactgtcagttagaaaattagatttaatttccctttgtaagtaattagctgttagtgtctccgctctctttatgcatataattaacttttctaatcaaatataacttctttggtgttgaagataatactacaagctttgtcatcaaatattacacttccgtttcatggcaaacttaagtgaaataaactgtttactgtattctactcataggatttttacatgcaaatggcaaacaaacaggaaagatgtaaagagtttctaatggcaaggtttctctgtttggggaggcatttcatttctygacttctgttttgagactctga

SEQ ID NO: 146767 - DNA, 561 bp, Homo sapiens
aataccaactatgaccacatgaccagttgcagaaaagagcactgtaattgtcatgagtattttctcctttttttattagaaacatgtttgtgtatgtatacacttgytctaagaaaatatctttattttattcctttatcatgtgacataggatttactgacttcatatcagcatttaagtattgttaactttatgtaatagcatttgggttggggattggtgcgtttccagtagtacaaaggatagttgtattatgttaggtgtaattatgacctcattgttgtctttatttgaggattacatatgatctaaggagatgtgtatgggttcaagttgacaagaggtggacttatggtggttaatactgagtgtcaacttcatcggattcaaaggtgcaagtattgatcctgggtgtgtctgtgagggtgttgccttaggagattaacatttgagtcagtggactgggaaaggcagacccacccttaatctgggtaggcaccatctaatcagctgctagcacagctagaatataaagcaggcagaaaaatgcaaaagggcta

SEQ ID NO: 146768 - DNA, 561 bp, Homo sapiens
aataccaactatgaccacatgaccagttgcagaaaagagcactgtaattgtcatgagtattttctcctttttttattagaaacatgtttgtgtatgtatacacttgctctaagaaaatatctttattttattcctttatcatgtgacataggatttactgacttcatatcagcatttaagtattgttaactttatgtaatagcatttgggttggggattggtgcgtttccagtagtacaaaggatagttgtattatgttaggtgtaattatgacctcattgttgtctttatttgaggattacatatgatctaaggagatgtgtatgggttcaagttgacaagaggtggacttatggtggttaatactgagtgtcaacttcatcggattsaaaggtgcaagtattgatcctgggtgtgtctgtgagggtgttgccttaggagattaacatttgagtcagtggactgggaaaggcagacccacccttaatctgggtaggcaccatctaatcagctgctagcacagctagaatataaagcaggcagaaaaatgcaaaagggcta

SEQ ID NO: 146769 - DNA, 613 bp, Homo sapiens
tgattccaaatcaccattctactcttctggtcatttttctctaactaagccaacatttgtgtttgcccatacctctcgattcaaggtgtctgggactaaaagggatatttctaaattatttcaagcagcgtgtttttattatttactctgttctaaatgatacagatacacttctaaatatataacacataattttatttatatacttataaatatagmtagttctaaatatttctatttcttttcttaatgattcatagcttggcaaccatttatatagttttttataaaatatcacatgtactgtcatttaaaatacataaacatgtttcagaagtattgtaactgagccacacatacccatttccgtgtatttgttattggctttatgatttaagtatataagaattcatacttgagaatttatccttattaaagcattctcttctgcgacaagtgtggcaatgaattttgagctagaagaccttcacagtcagtctattgtagcattcagattttctttagcacttagattcttggtgggcaaaaatgagcgaagaatgctatcagcattcataacccatgataacaaatgaagcaatggctgaccctg

SEQ ID NO: 146770 - DNA, 596 bp, Homo sapiens
acatctaaacaacagaaaaatttctaaaccgcatgttacctagtgctgaatgcattttcatattcaaggtatataaatgttctataattttctgtagctccatcagatacttatcagtagaatcatgaactgccaaagacatgactttctatttcctacacawgtcaagtacagagtctcttccagagaatcacagttcaaattaattagggaatttaatattggctgtggtatgcttccctatctatgttgtgtaacccaaataaatgactctaagaagaaaacttcaggcaatgataaaaagaaatcccaagtaaaggctatttgaaattatattaaatgaggtgaatgaatagatgtaatataaaaacaggcttcacgcagtgccttaaacataaaatatgctctgtgaaatttttattattgcttatacttattatttaattgtcatactcctgcaatagccccaagcaatggttggacccatatcttactatgttttatgtgcatattaagttatcaaatacaaattagcctccatgagattatccacttaaattccagttgccttgaaaattttagtccaatcacaacac

SEQ ID NO: 146771 - DNA, 580 bp, Homo sapiens
aaaaatgccaggtgggtgagagcttagttggcctaaaccatcttaaatctttgcaggtctattaggtcattgatttggttctttggacatttaatgaatataatatgaattgttcgttttctgtcatacgaggaaaatatttcagacaagatacttttatgatagagtagcatattattattattattatttgcaactcagagagaagtctgcttactttaatcccactaacttgattcaagtcctatcatcagtgtgaccatttaaataaacaataagctgaggtaaaataaaataaaacataacaaaacaaaaaaagtgatctcccaaagtaggccttcttcwgcaggaagtaaatgacaatttatggcatatttcaatatgtgaaaaaaatgattttttcacaaatttcattagcacaccattgattgctcatttttcagctctcaaaataatttaacatagtctctttcatgcagaggataacatattcatattatttgatttttgatgaaaccaaatgaccctttaaatttgcaatagagttctttaattttgtatgagtttctttactgctgtt

SEQ ID NO: 146772 - DNA, 519 bp, Homo sapiens
cactctttgttttaaatatttccccacttatttaaaatagctattagcttttttatgggtggtaatagtgttagaatggaaaagaataaattgaaaggtattcttaatgctgttctagccctcgttcaattttcagggatattccaacagaaagaaaaaaagctgtgaattgaccacttaagtaaatcagtttgcaactcagtgtcctaagattattaaatctagaggtaggaatataattttatgtcatgaaaattcatcccctaccactttttataaaatactrtatttctggttggtctcatgttaatatacaattgtagtttttacagtaatttagaaaacgaaagaaccaattcagtgtaaaaggaaatacttgattactctgttgtataagagcaataaaagctaatttactgttatattactcagtactgaaagctgcaagaggctatctttcagttcattcttcattaattatgctgtatggtggtgatatcagtatgagttttatggaac

SEQ ID NO: 146773 - DNA, 519 bp, Homo sapiens
cactctttgttttaaatatttccccacttatttaaaatagctattagcttttttatgggtggtaatagtgttagaatggaaaagaataaattgaaaggtattcttaatgctgttctagccctcgttcaattttcagggatattccaacagaaagaaaaaaagctgtgaattgaccacttaagtaaatcagtttgcaactcagtgtcctaagattattaaatctagaggtaggaatataattttatgtcatgaaaattcatcccctaccactttttataaaatactatatttctggttggtctcatgttaatatacaattgtagtttttacagtaatttagaaaacgaaagaaccaattcagtgtaaaaggraatacttgattactctgttgtataagagcaataaaagctaatttactgttatattactcagtactgaaagctgcaagaggctatctttcagttcattcttcattaattatgctgtatggtggtgatatcagtatgagttttatggaac

SEQ ID NO: 146774 - DNA, 602 bp, Homo sapiens
agaagcatttccacgagtaatttcacacatgctgctaagtactgcagagtattgccaagcctagcctttaatctctatgggaagccatacagctgtaaactcttatttgctgtcacatgtcttttgcaaggttattagaaaagataggagaccagaagtccttccatgttaccttactttattttttgaccaggttttattacattatccctttatatctgttgatagctcaacatgtgcatatttcaccagcctcaggcaaaattatgaagtaggattcatgaggctttggtgttcttcccactctgccttctgggtcctcgcctgcattctctccccggaagtttctcactttctgaacccagcccctgctctctgtccaatctacttattgacaattttaagggtgtattttcggccaaatgcagaccarcgtggtccattcatggatcaccgtgttttgtctcccaggtaagaatctcatgtgataaaacttgggcttgctgaagtggtctatctcttggagtggggatgcatacttctagatcttcagcaggctctaaatttgcttcagcctgtcttcttgcaagactcaatagatg

SEQ ID NO: 146775 - DNA, 533 bp, Homo sapiens
cagtataagtgagatcatgaggtatttgtcttcctgagtctggcttatgtcacttaacataatgttcctcaggttcatctaagttgttgtacatgataggatttccttcctttttaaaagctgaatagtattccattgtttatatataccacattttctttattcatttrtctgttgatggacacttaggtttattccatatcttggctattgtgaataattctgcaatgaaaatgggagtgcagctatctaatgagataacacctcacatctcttggaatggctattgtcagcttttggagacctaaagactcatatgttagtaacaataggaaaacatacagctttttcataagtgatagtaaaatcttatttcagtaaagtaaataagtgatcaagatcatccaaattaattttctgaaaaagagaagttgctttggatatatacacaggagtgggattgctggataatgtggtagttctatttttaagtttttaagaacttcatactgttttccacaatggcctaccag

SEQ ID NO: 146776 - DNA, 570 bp, Homo sapiens
aacactgtttaggttgattactgacaattattttctttttgttttgaaattgtttgtcaaaattacttgtttaaaattataagatgttgacagaacttttgttagcatatcctaacatgcaatacatggcattaattcatggtaaatgtgtttaggtagtgtgaatggatagtgcctagtaaccttgtgtacaaagataagcatttgtcaaacatgtaagacagattaccaacatagaccagcaaccattgcctatatgatgtgttaacaacatgaccctgtttagctagctgagaattgttaaggcctgaaagyatatcacatgaaccttcatgcaagttcttgggtgggatacactgttgacagattctgtcagagtgctaagcataagaatataaattaaaaataagttttagaagtaaagtcggtgtggtttttaaaaaaaaatcctgcaaagaatagtgttccatagaacagattgggaagtgctgaattaaagaaagagttctgttagtcaacagttaatatgtttagtgccacttaattgcagttattaaatggatttgtaag

SEQ ID NO: 146777 - DNA, 570 bp, Homo sapiens
aacactgtttaggttgattactgacaattattttctttttgttttgaaattgtttgtcaaaattacttgtttaaaattataagatgttgacagaacttttgttagcatatcctaacatgcaatacatggcattaattcatggtaaatgtgtttaggtagtgtgaatggatagtgcctagtaaccttgtgtacaaagataagcatttgtcaaacatgtaagacagattaccaacatagaccagcaaccattgcctatatgatgtgttaacaacatgaccctgtttagctagctgagaattgttaaggcctgaaagcatatcacatgaaccttcatgcaagttcttgggtgggatacactgttgacagattctgtcagagtgctaagcataagaatataaattaaaaataagttttagaagtaaagtcggtgtggyttttaaaaaaaaatcctgcaaagaatagtgttccatagaacagattgggaagtgctgaattaaagaaagagttctgttagtcaacagttaatatgtttagtgccacttaattgcagttattaaatggatttgtaag

SEQ ID NO: 146778 - DNA, 570 bp, Homo sapiens
acatctccttcatttacatgacctctttatttttaaaatccaaagaatatgtcatttcttgtccttggagaacttatatattctactttgaaaaaacaaaaattcctagatgtaagttaaatcataactcaaaaattcaaaatagtctatgtcaagagatggtataagcctgcacacaattaaaggctaaatatctgcaggtatttttaagtcagaatattgtttcctggggtttggaaatacataatgcaaatccatgaagaggggagggcttcaaacatgtcttgaggagttgtgaaatatgagcagagaagaggaagcacattccagatggggcaatagtatgaggcaagatgcagagaagtcaaaaacaaggactatataatagctaagattcccttgargcggggggttactatgtgcattgcactgtcacatcatttaattctcacaaaaactctatgagattgatacaaatatgaacctgttcatgaccaccctgcctaataaggactctccaccattcccattctccatctctatctattagtctgatacattttcttcatg

SEQ ID NO: 146779 - DNA, 611 bp, Homo sapiens
tcttgtgggagaaaaaaatatgtgaacaracttttaaaagatagcatctggccttgcaaatatacaaattacaacaaaacaaggtaaaacgtaatgagacttcaaagattcacaggggaatacttctcagataagagtcttcatttgcaagtaacaggaaacaattcgggttacttaagcaatatagggaatgtattaaagggataacaagcactttatggaatggaccagaggctggaaacccaagtctggatgccagagaggaatcaggaccagatgcaagagcagctctggctatacagacaccattttttttttctatccatgtgtcttttcttaggcctaagggtaaaggaattaacgggacaagtttggatcaagtccacagagaataaggctaccaatgtacagccccaccagaactgtacagcatagataaatctaccaaaaggaaatcaggttgttttcaggaagaagaatagatgttgaacagacatatgaaccaaatagcgtccaccctacagtggaacacaagaccagttggtttgagtaggaaggaaaggaaacaaatttattgaagactttctttgtgctaggtactgtgatattct

SEQ ID NO: 146780 - DNA, 611 bp, Homo sapiens
tcttgtgggagaaaaaaatatgtgaacagacttttaaaagatagcatctggccttgcaaatatacaaattacaacaaaacaaggtaaaaygtaatgagacttcaaagattcacaggggaatacttctcagataagagtcttcatttgcaagtaacaggaaacaattcgggttacttaagcaatatagggaatgtattaaagggataacaagcactttatggaatggaccagaggctggaaacccaagtctggatgccagagaggaatcaggaccagatgcaagagcagctctggctatacagacaccattttttttttctatccatgtgtcttttcttaggcctaagggtaaaggaattaacgggacaagtttggatcaagtccacagagaataaggctaccaatgtacagccccaccagaactgtacagcatagataaatctaccaaaaggaaatcaggttgttttcaggaagaagaatagatgttgaacagacatatgaaccaaatagcgtccaccctacagtggaacacaagaccagttggtttgagtaggaaggaaaggaaacaaatttattgaagactttctttgtgctaggtactgtgatattct

SEQ ID NO: 146781 - DNA, 611 bp, Homo sapiens
tcttgtgggagaaaaaaatatgtgaacagacttttaaaagatagcatctggccttgcaaatatacaaattacaacaaaacaaggtaaaacgtaatgagacttcaaagattcacaggggaatacttctcagataagagtcttcatttgcaagtaacaggaaacaaytcgggttacttaagcaatatagggaatgtattaaagggataacaagcactttatggaatggaccagaggctggaaacccaagtctggatgccagagaggaatcaggaccagatgcaagagcagctctggctatacagacaccattttttttttctatccatgtgtcttttcttaggcctaagggtaaaggaattaacgggacaagtttggatcaagtccacagagaataaggctaccaatgtacagccccaccagaactgtacagcatagataaatctaccaaaaggaaatcaggttgttttcaggaagaagaatagatgttgaacagacatatgaaccaaatagcgtccaccctacagtggaacacaagaccagttggtttgagtaggaaggaaaggaaacaaatttattgaagactttctttgtgctaggtactgtgatattct

SEQ ID NO: 146782 - DNA, 564 bp, Homo sapiens
atgtcttatggaaaattttttttaaatatctaaacatagaaaaggtaaaataaaataaaataaaataaaataaagatttcacatatgtattttgggaagacaaaatattcagatcatagcaatgagtctagagaggcagtaatgtctaagtgtcagaaagataataacaggacgcaccgcactgggatctaaacagtgtgaccttcgtgctgtgctctgagcacttttaaatatgttgtaccttgtatttctcagtacaactctaagatgtaggggcattaacatttccaaataataaataaggaaatatagctaackgacttggaggcattcagttcataagggcagcaaacatgaatgagaagggtgaaatgcattggttggaaccccaaatggtgcagctctgccacttaccagttaagcgattgatatggattgtctgcgtccccagccaaatctcattttatagtttctgtaatccccacgtgcgatgtgagggaccaagtggaaggtaattgaatcacggaggcggtttcccccatgccgttcttgtgatagtaagtt

SEQ ID NO: 146783 - DNA, 564 bp, Homo sapiens
atgtcttatggaaaattttttttaaatatctaaacatagaaaaggtaaaataaaataaaataaaataaaataaagatttcacatatgtattttgggaagacaaaatattcagatcatagcaatgagtctagagaggcagtaatgtctaagtgtcagaaagataataacaggacgcaccgcactgggatctaaacagtgtgaccttcgtgctgtgctctgagcacttttaaatatgttgtaccttgtatttctcagtacaactctaagatgtaggggcattaacatttccaaataataaataaggaaatatagctaacggacttggaggcattcagttcataagggcagcaaacatgaatgagaagggtgaaatgcattggttggaaccccaaatggtgcagctctgccacttaccagttaagcgattgatatggattgtctgcgtccccagccaaatctcattttatagtttctgtaatccccacgtgcgatgtgagggaccaagtggaaggtaattgaatcayggaggcggtttcccccatgccgttcttgtgatagtaagtt

SEQ ID NO: 146784 - DNA, 435 bp, Homo sapiens
tttttgcttagtattgctttggttatgtgggctcctttttggttccatatgaactttaggatgttttttctagttctgtgaagacttatgctggtattttgataagaattgcattgaatctgtagcttgctttggcagtatgatcattttcacaatattgattcttcccatccatgagcattggatgtttccatttgtttgtcatctatgatttctttcagcagtgttttgtagttttccttgtagaaatgtttcacctccatggttaagtatatttctaaggtttgtttgtttgtttttttgttttgcagctgttgtaaaggggattgagttcttgatttgattctctgcttggtcgttgttggtgtatagcagtgcwgttaatttgtgtacattgagttttttatcctgagactttactgaattcatttatca

SEQ ID NO: 146785 - DNA, 575 bp, Homo sapiens
tgtaaatgttctttacccagactgtacactgctcagattaaccaatgcattgggctgtgacctctaaaactgaaaatacttgggagtaaaaagaaaaaaaaaaggagctaatgaacctaagtcactaattgggtctacaagtgctctatcccatgactatggctatatatgctgtccccagtcagacttcctacagtcctacagattagtttcttctacaggggaaactagacaagttgtgaataggtggtggtagtgatggtagtagctatcatgtattgagcagttactatatgactggccccattctgttttacrcaaatttactcattgaatcctcataacaatcccataaagtaaataaatacctgttttacagatgaagaatttgaggcacagggagcttatttttccagggtcatacagctggatcagtagccatgattggggtcagcaaattacagtctgtaagccagtctagcccactgtttgtttttgtatgacccaggagttacgaatgattttgacatgtttaaatgtttgtgggggcaggctgggggtagggagaaggatat

SEQ ID NO: 146786 - DNA, 549 bp, Homo sapiens
tgctaaaaataaataaataagtgtaattagcagtccccagtcactgtgatgacccaaaacggccctgcagatctacagaattctccctaggacatggtaaaaacttcactgaaaatcactgtttatcttaattatcagcttgttagcgtcagactcaaagaatgagaacttttagcaatgatctgaaaaatggctaagtgatttttaatgctcagcgttcactgaagctactagaagtgaggcaatcaggaggaaaaaaaccacaaaatttgtmattcagagaagcaattatattcccatgtaatcgaacacatattttaaaaagagtttgcctctaattgctgtattcacatgtttttaaagtaattttgtgtatctatttcataagcatcattctatgttggcattttacaaaggcaatctttcacaaaacattgtattgtgtaattctcagttctgttttctgtaaaattaaaggtctcaatatgaacaactgctctagtaactatcacgtatttgaatcacagttgagaactacaacaataacta

SEQ ID NO: 146787 - DNA, 374 bp, Homo sapiens
ctagactcagctggcaatgtatttttgccttttgctcttcctctcctttttgcctaaaatacagatatcatgcctaaagggagtgcagccaggtgatgatgacaaaagcaacaagaaagaggactgagtgggaatgcaggagattaggcccctcttagcaccrtggaactgcactggatggcctgcttccagactcctgttatgtgagaaacacaagcccctttttagtcagatttcttgttttgtgtagctgaaggtaaccctaatggaaacactccccactgaccaaagcacctctaatccctggcagcccctcaaaagatgaatgagatgaatgcccaaattccctactctctccaaacaatgattagaat

SEQ ID NO: 146788 - DNA, 374 bp, Homo sapiens
ctagactcagctggcaatgtatttttgccttttgctcttcctctcctttttgcctaaaatacagatatcatgcctaaagggagtgcagccaggtgatgatgacaaaagcaacaagaaagaggactgagtgggaatgcaggagattaggcccctcttagcaccgtggaactgcactggatggcctgcttccagactcctgttatgtragaaacacaagcccctttttagtcagatttcttgttttgtgtagctgaaggtaaccctaatggaaacactccccactgaccaaagcacctctaatccctggcagcccctcaaaagatgaatgagatgaatgcccaaattccctactctctccaaacaatgattagaat

SEQ ID NO: 146789 - DNA, 564 bp, Homo sapiens
tcagtggtctaggatttagtaagcagcaccaccacttatggcttgctgagcaycacacagcagactctaaataggggcgtccctggcagtaggcaagtttctagcccctttaagtagaatatcagagataggtagaacatcagaactccagggctgttggaagacattcaaacggttatgaaattatgtcatgtaataatcatccatttgttcgaggatacaaatttcagtcctcaaatgaaatggtaaaagaagcagatccaagatgtttatagtgtgagccttagggttaagaactatgggaagtaggagaagacaaaaattcaggcctaagactagagagaagtaggtccatgacctgaatgaagatgtgtagtcccatgacttggcttattgttctccatgtctgacatggtttgacttaattcgaaggcactccaaatgacaaggatcacttgagggtgctgaggagcatcaaactccaggcaggggaactctgaaacatttgttcttaaccacatctcaacagatctgcattaaggagactctgcttttgacagaact

SEQ ID NO: 146790 - DNA, 412 bp, Homo sapiens
gcaaagagttggggtagagttttctcagagcaaattattccttaactcatcaaaagataaattggagttaatcacaagattgagggacaaaggtgctaaatggcattcagctaagtgacattcaaaatatgcttcattggcgaggaccccaagtagttcagatgagtgggaatggggaatgtaggagaggaagcaactgttgagggrggagttggctgagtcaatgttcaaatcatggaggaggatcttctatgctcaaaaggggattgacagaacggatttgtctgaggcaagaatgatctttcaaatgggagatgtgttggaaaatgaggagacaaacaggtcacttaggaggctggtgaagtaatctaaaaagaaatgatagcagtagagatggagagtaaacataccc

SEQ ID NO: 146791 - DNA, 385 bp, Homo sapiens
ttcaagctgaacagaatgaattcaacttgatcatgttatggatgttcagttgaaccaggtatgttaggtaaatttccctaacctacacagctactaagcctgaggctgaaagtaggagcgttattacctgcctcctcatcagttcaacatatttccaaaaactgcactcaaaacaacagtctaatgtgtaggagatacaagttttcttgtctgaatgagccagatcattacaattaatcagatacgttactcaaccctgctttggcasagtctacatccaaaagttcagaaataagattactttgatttgaaataactgtgtggatcctacatgtctctaaaccagactctcctatgagtaatgacaaagacccaaacaaattgt

SEQ ID NO: 146792 - DNA, 397 bp, Homo sapiens
ctcagctctggatcaagtggacctgatakacatctacagaactctccactcaaaaacaactgaatatacattcttctcattgccacatgacacttactctaaaattcatcacataattggaagtaaaatattcctcagcaaaagccaaaagaactgaattaataactgtctctcggaccacagcacaaattagaactcaagattaaacaattcattcaaaacaatacaactgcatggaaattgaacaaactgctcctgaatgacttttgggtaaataaaaaaattaaggcagaaataaaaaattctttgaaactaaggagaactttaccagaatctctgggatgcagctaaagcagtattaagtgggaaatttacagcactaaatacccacatcaaa

SEQ ID NO: 146793 - DNA, 405 bp, Homo sapiens
aaattaacaaagctactcaggacctgaactcagctctggatcaagtggacctgatagayatctacagaactctccactcaaaaacaactgaatatacattcttctcattgccacatgacacttactctaaaattcatcacataattggaagtaaaatattcctcagcaaaagccaaaagaactgaattaataactgtctctcggaccacagcacaaattagaactcaagattaaacaattcattcaaaacaatacaactgcatggaaattgaacaaactgctcctgaatgacttttgggtaaataaaaaaattaaggcagaaataaaaaattctttgaaactaaggagaactttaccagaatctctgggatgcagctaaagcagtattaagtgggaaatttacag

SEQ ID NO: 146794 - DNA, 421 bp, Homo sapiens
agatctttgagacaaaaaattaacaaagctactcaggacctgaactcagctctggatcaagtggacctgatagacatctacagaactctccamtcaaaaacaactgaatatacattcttctcattgccacatgacacttactctaaaattcatcacataattggaagtaaaatattcctcagcaaaagccaaaagaactgaattaataactgtctctcggaccacagcacaaattagaactcaagattaaacaattcattcaaaacaatacaactgcatggaaattgaacaaactgctcctgaatgacttttgggtaaataaaaaaattaaggcagaaataaaaaattctttgaaactaaggagaactttaccagaatctctgggatgcagctaaagcagtattaagtgggaaatttacag

SEQ ID NO: 146795 - DNA, 421 bp, Homo sapiens
agatctttgagacaaaaaattaacaaagctactcaggacctgaactcagctctggatcaagtggacctgatagacatctacagaactctccacycaaaaacaactgaatatacattcttctcattgccacatgacacttactctaaaattcatcacataattggaagtaaaatattcctcagcaaaagccaaaagaactgaattaataactgtctctcggaccacagcacaaattagaactcaagattaaacaattcattcaaaacaatacaactgcatggaaattgaacaaactgctcctgaatgacttttgggtaaataaaaaaattaaggcagaaataaaaaattctttgaaactaaggagaactttaccagaatctctgggatgcagctaaagcagtattaagtgggaaatttacag

SEQ ID NO: 146796 - DNA, 515 bp, Homo sapiens
ctctaaaaggacacagagcagtgaaactgtagggattagaaaaatcagcaaagggtcatcagattgccctaaatatgaatggcacagtcttggtctccatgagacgaaattctagcctctccctgaccttattccttctcccacggtgtcttgtactgtgtcagaaaccctagtaacactgatgattttgtctctccrcttgtctctcaggtctcctttctggcctagggtgcagggtaagctggagtatattggaggaaaagctttcctacctcttagggaaggatctactacctacgtcctctgaagaagggtataagattagaggagattgaaaaactgaaactgaccctagtggagccaggatcagctcactgaggttagggcaagaattaaataaaagctcagatactgatgtgagaggagtaatgctagggaaggtgtgctttggacattacttgaaggggaaatcatgagacctagaggttacttgctgtttcttcatttccttttag

SEQ ID NO: 146797 - DNA, 515 bp, Homo sapiens
ctctaaaaggacacagagcagtgaaactgtagggattagaaaaatcagcaaagggtcatcagattgccctaaatatgaatggcacagtcttggtctccatgagacgaaattctagcctctccctgaccttattccttctcccacggtgtcttgtactgtgtcagaaaccctagtaacactgatgattttgtctctccgcttgtctctcaggtctcctttctggcctagggtgcagggtaagctggagtatattggaggaaaagctttcctacctcttagggmaggatctactacctacgtcctctgaagaagggtataagattagaggagattgaaaaactgaaactgaccctagtggagccaggatcagctcactgaggttagggcaagaattaaataaaagctcagatactgatgtgagaggagtaatgctagggaaggtgtgctttggacattacttgaaggggaaatcatgagacctagaggttacttgctgtttcttcatttccttttag

SEQ ID NO: 146798 - DNA, 587 bp, Homo sapiens
gtgatatggacaataaagtccaggctgaggtggactcagatggagatgaggaacttcttgggaactggcgtaaaggttactcttgctatgcaaagagactggcagtattttgcccctgctttagagatctgtggaacttttgaactcaaaagagatgatttagggtatctggcaggagaaatttctaagcaccaaagcattcagggggaagcagagcataaaagtttggaaaaattacagcctgatgatgcaatagaaaagaaaaaaccattttctggggagaattcaagccggctgcagaaatttgcataagtaactaggaatctaatgttaatcaccaagacaatggggataatgtctccaaggtatgtcagagaccttcacggtggacccccatcacaggatcacaggcctaggaggaaaaaatggtttcctgggccargtccagggccccccttctctgtgcagcctcagaacatggtgccctgtgtcccagccacttcagctccagccatgggtaaaaggggcaaaggtagagcctgggccatggcttcaagggtgcaagccccaaaccttggcagcttcca

SEQ ID NO: 146799 - DNA, 490 bp, Homo sapiens
cccccatggttcaaccaccttcccctgggtgcctcccacaacatgtgggaattctgggagatacamttcaagttgagatttgcatggggacacagccaaaccatatcaataagtatatatgtatctaaacatagaaaagtaaatatagcagatttattgtaaatttaaatacagtaaaattacatattacaatgttgtgggaccaccactgtatatgtcatctgttgttgaccaaaatatcattatacagcatgtgactgtattctccacctatccacattgctatttgttgtgaaactcagacctcctctcagttgaaggtcctagggattaagaagttcttcctgttagcaaggctcagctaggactaaccttttcaggtatgcttccaatctggttattgctgctgaaatggaaacaaggataaggaaataaaacccatcatggatggatgcaaaaggctttcatcacattcttcattctaatgctt

SEQ ID NO: 146800 - DNA, 662 bp, Homo sapiens
gatggtttcatgggtatagttcaatacccaaactcatcaaatggtacactttaaatatgtgcagtttattatatgttatttatacttcagtaaaacttttaaaaagtggaggggtgatagatactggattggcaattaacattttctacccaaagtggtgtgatgttatttcatccctttaatttggatatcagcacatagaaaacaatcatgctctgtggggcccttactcagaagttgggtacatataaggagccaggtttccaacggtctttatttagtaccatgcacatgcctttaacaccctgaaactgggtgtataattggcattctttggaagctgagccaaggtgtatacattacctaaaaattacccattagatctgtgacacgggccctgcctcttctctcctttggtgtacattataagatacatgacatcatagtctctctctgactgggccactgactcyagttctccactaggctccttgtggcttcatattctgtaatgaagttactgtgggactggctgtgtcctgaatgtttcccctgctcatgtcatctggtatcattacctgatatcgtcagggaaggagttctcactgtgaggcctttgggtgtgacctttgtagtgttcctgattctctaggtctctttat

SEQ ID NO: 146801 - DNA, 572 bp, Homo sapiens
tatcaggtatttggatagcttaagctatatctctcctcttacagtggaaataaatcaacgtagcatagcaaattaaaactcaggttttggaatgactatagaatagagtgactttgaacaaataactctctgaatagcagtgggctggaaaactagctctccacaagaaaacaataggcttaatttgtagtgtttgcttatttcctcggtataaagactccaaccatggttgatttcaaactaccaacagtttaataatcagctttcaaaattcttgaaaatttgcctgtaatctcagctgagagaggctgaggcaggagaatcacttgcacccgggaggcggagattgcagtgagctgagattgcgccattgcactccagcctgggggacagagcaagactccatctcaaaaaaaaaaaaaaaaaaaaggaaaaagaaaaaaarttcttgaaaatttaacaattggctgtcatgagctggaatgacccaaccctagccctctattgtctctgtttcttcaccttaaaaacaggaccaatactgtccctcttagggataggatcagtaaaca

SEQ ID NO: 146802 - DNA, 572 bp, Homo sapiens
tatcaggtatttggatagcttaagctatatctctcctcttacagtggaaataaatcaacgtagcatagcaaattaaaactcaggttttggaatgactatagaatagagtgactttgaacaaataactctctgaatagcagtgggctggaaaactagctctccacaagaaaacaataggcttaatttgtagtgtttgcttatttcctcggtataaagactccaaccatggttgatttcaaactaccaacagtttaataatcagctttcaaaattcttgaaaatttgcctgtaatctcagctgagagaggctgaggcaggagaatcacttgcacccgggaggcggagattgcagtgagctgagattgcgccattgcactccagcctgggggacagagcaagactccatctcaaaaaaaaaaaaaaaaaaaaggaaaaagaaaaaaagttcttgaaaatttaacaattggctgtcatgagctggaatgacccaaccctagccctctattgtctctgtttcttcaccttaaaaacaggaccaatactgyccctcttagggataggatcagtaaaca

SEQ ID NO: 146803 - DNA, 586 bp, Homo sapiens
tataaaaccatcagatctcatgagacttattcactaccaggagaacagtatatgggaaactgcccccaagattcaattatctccacctggccccatccttgacacgtggggattattacaattcagggtgagatttgggtggggacacagccaagmcatatcaatgcccttcgcatctcaccagcctccttgctcctcagggctccgcactagtaatccctgtgccccaaagcctcctccaaccctcctataggaggggtcactccccttgtcctctgacctcctccagctttctatccaaagtacatcaagcacctttcactctcctgtgtatcagatcatggatgtgtccatttcctctgcctgaccctgagtttcttagggacaaacattgtctgccctctaccacagggtctgggctgggagaggtgtcagaaaacgtttgtgggattgagtgcaggcttctgaaataggaggctcagcacccctcaggaaaagcatatgagctgcccttgacttgatggcgtggaattggcccagggtagacggttggggcagaaggaggggaatgtacgttagccaggaa

SEQ ID NO: 146804 - DNA, 617 bp, Homo sapiens
tgcttatctcttggaaatccacttatgaccttcaataactggaccactgtccaaatgacattgctgagtgactgaaatgttcattttctgttatatagtctctctattcaagcctactgactgtggctatgtcatcacagttttgcttttgtgaacttttcattcttcttggatcaccatctctttaaggctatggtctgaattttttctgattttttaaaatttgccttcttaatgtccaacattatgtctgatctcccaggctcatgtggagtgatttatttccctcaaggttcctttcctttccccttcacaactggttctttttcaactactgcagttgaattgaacccaagacaggaatttcttttgctgcgttctgtgttcttggggagatcatgttgtctactgggcaattcaagaaataatctgatgctcttcttttcatgaaatgagattttcattgctcaacagatgatctgmgaatccattctgcctgtgtcttgcctccgttgaaccagcttttgagatccaaattaggaaggccatgtcttccctacagtgtccaattgaccaggcagactgtagctaatccatatgatgatctcccactggag

SEQ ID NO: 146805 - DNA, 224 bp, Homo sapiens
aaagagaaagagtttcatggatggatgaaaactccttcttcccatgcgccttcaggtttctgctccagggcacggggctcctacttgcatggaggcaacarggctcagcttccacagttgttaaaaccaagcccagtggttgtgtctgaaggaaaaggagcttttgttttatgctgaaatgctgcatgaagcttactccatccctttggattcttctccttaag

SEQ ID NO: 146806 - DNA, 294 bp, Homo sapiens
ggccaatcttcagctttttcagcagaacccagaaatctagatttyagtgagaaatatcttttgatttaaaagtgttggtaatgaattccaattgttttaaacattgcagtagccaactaaaacacccctgtgaacttaatctggactatagccacccccaggccccaatgtggaaacttgagggaaattagggacccatgaagacatctggagggtctgtccagctgggggcctccacgctgaggcctgaggagggtgtgcagctcctaacactgcagcgtggactaactctct

SEQ ID NO: 146807 - DNA, 451 bp, Homo sapiens
gagatcttaggctcctgaagcgaggctcgtgccctgaagcacctacagggccgggcagggaagggtgtgcaggaagcaggccatgcaagtggaggggccacagcaaagcggagccctcttgctccgtctgaggggccagtcaccagtcagcttggaaatggagtggccaatcttcagctttttcagcagaacccagaaatctagatttcagtgagaaatmtcttttgatttaaaagtgttggtaatgaattccaattgttttaaacattgcagtagccaactaaaacacccctgtgaacttaatctggactatagccacccccaggccccaatgtggaaacttgagggaaattagggacccatgaagacatctggagggtctgtccagctgggggcctccacgctgaggcctgaggagggtgtgcagctcctaacactgcagcgtggacta

SEQ ID NO: 146808 - DNA, 447 bp, Homo sapiens
aggctcgtgccctgaagcacctacagggccgggcagggaagggtgtgcaggaagcaggccatgcaagtggaggggccacagcaaagcggagccctcttgctccgtctgaggggccagtcaccagtcagcttggaaatggagtggccaatcttcagctttttcagcagaacccagaaatctagatttcagtgagaaatatcttttgatttaaaagtgttggtaatgaattccaattgttttaaacattgcagtagccaactaaaacacccctgtgaacttaatctggactatagccacccccaggccccaatgtggaaacttgagggaaattagggacccatgaagacatmtggagggtctgtccagctgggggcctccacgctgaggcctgaggagggtgtgcagctcctaacactgcagcgtggactaactctcttctgaagatct

SEQ ID NO: 146809 - DNA, 583 bp, Homo sapiens
gttcatctcggagcttgcctaccacttctgtcttctctcctagagccaaggtggtactttctagatgctggccccagagctccgggatgtgccgtggacctctacacagatgttcatcaattcctgggctctggtcaacatccgttgaagttggaatggttgttgggaccccctctgatgtccccccaagacagggccaggaatgtggcaggggaattctgtggctagtgggggaccccragtgagggcttgtctggggtcttgtctggggctcaggtgagctgtctgggcagtggaagacccaggcccagccctttgtggggagagaggacccattcaggctcactgcacctcactgttatgggttctgcccttttgagtattccttcatctgctcattcattcattcatttacccacgcttcactcaattttaatttattcaaatatccatgcatttattagttcattccaaaaagatattcatgcatttgttagttcattcaaaaaatccatgcatttattagttcattctaaaaaatagtcatgcatttattagttcattcaaaaaaatccatgcattt

SEQ ID NO: 146810 - DNA, 570 bp, Homo sapiens
ctcatttttaatgtagtaatttatcactctaaacttccctcttcgtctgcttttgtcgtatcccataaattttagtattttgtgttttcattttcattgtctcaagatattttctattttcccttttgatttattcttttttgagatggagtttcgctcttgtcgcccaggctggagtgcagtggcatgatctcggctcactgcaacctccctctcctgggttcaagcgattcttatgccccatcctcccaagtagttgggactacaggcacctgccaccacacccagctaacttttttttgtatttagtagagacgtggtttcaccatgttggtcaggctggtctcgaactcctgacctcaggtgatccacccacctcagcctcccaaagtgctgggattacaggcgtgagccacctcactgggccctttttgatttattctttgacccattggttgttcgaaggcatattgtttaacttccacatatttgtgaaatgttcagttttctttctgctactgacttctagtttcattgcaytgagattgcaaaggatacttgacaacgatt

SEQ ID NO: 146811 - DNA, 468 bp, Homo sapiens
atgatgtttaattaggcaacacagtaaccacctgctgtaactatcttacaagcaactatcacgttattaacatagccaaagtttatatattttattgttttattatctcatttctataaacactataccaaatattccttmaaaacagcttattatctactgaatacctttatttagatatcatgggcatttcaaattcattatgtccaaaatggaaagcattctcttactgttgaaaggtaattgtccatggtgtttttatttgtctctgagtaaagacaggatatgcttctgggttagagggtacatttgtttcctgaccagcataacaaagataatgtcaacctccaggacaatgattttgggcaagtttgcaagtagcctcttataagattgggaggacacaggtccaccgtgtacacagcatctgtctgggcctcactctgtatcatgggatttggggaattc

SEQ ID NO: 146812 - DNA, 532 bp, Homo sapiens
gaattctttgaagatagggctgggcggggtggctcatgcctgtaatcccagcactttgggaggctgagaccagcctggccaacatgacraaaccccgtctctactaaaaatacaaaaattagctgggcgtggtggtggatgcctgtaatcccagctatgtgggaggctgaggcaggaggatcccttgaacccaggaggcgaaggttgcagtgagccaagatccactgaacccagtaggcaaaggtagtgagccgagatcgagccactgcacaacagcctgggcaacagagtgagaccctctctcaaaaaaaaaaaatgtaatcccagcactttgggagcccgagatgggtgtatcacttgaggtcaggagttcgagaccagcctggccaacatggcgaaaccccttgtctactaaaaatataaaaattagctaggcatgatggtgggtgcctgtaatcccagctgtgcgttaggccgaggcaggagaatcgcttgaacccaggagggatcgggatcgcaccactgtactcca

SEQ ID NO: 146813 - DNA, 532 bp, Homo sapiens
gaattctttgaagatagggctgggcggggtggctcatgcctgtaatcccagcactttgggaggctgagaccagcctggccaacatgacgaaaccccgtctctactaaaaatacaaaaattagctgggcgtggtggtggatgcctgtaatcccagctatgtgggaggctgaggcaggaggatcccttgaacccaggaggcgaaggttgcagtgagccaagatccactgaacccagtaggcaaaggtagtgagccgagatcgagccactgcacaacagcctgggcaacagagtgagaccctstctcaaaaaaaaaaaatgtaatcccagcactttgggagcccgagatgggtgtatcacttgaggtcaggagttcgagaccagcctggccaacatggcgaaaccccttgtctactaaaaatataaaaattagctaggcatgatggtgggtgcctgtaatcccagctgtgcgttaggccgaggcaggagaatcgcttgaacccaggagggatcgggatcgcaccactgtactcca

SEQ ID NO: 146814 - DNA, 573 bp, Homo sapiens
ccacatttcctttggttgcctgtgcttgtgaagtatcactcaataaatttttccctagaccaatgtactggagagtttcctcaatgttttctgttagtaatttcatagtttgaggtactagacttaagtctttaatccattttgatttgatttttgcataaggcaagagatagggatyaagtttcattcttctgtatatggatatccagttttcccagcaccatttattgaagagagtgtcttttcccccaacgtattcctggcatctttattgaaaatgagttcactgtagctatgtggatttgtttctgggctctctactctgttccattggtctgtttgtttttatgacagtaccatgcttttttggttactatagctctgtagtataatttgaagtcaggtaatgttattcctcgagttttgttccttttgctcaggatggctttggctattctgggactttgtgattctatataaactttagaattttttttcatatttctgtgaagaatgtcattggtatactcatagggattgcactgatctgtagactgctttgggtagtatgga

SEQ ID NO: 146815 - DNA, 547 bp, Homo sapiens
agaaatctatatttaatagttctcatattcctttccaataacaataaaagcaaagaataatgactgatgtttattgagaactacgtgccaggtattgggacaggattttcaggtgtataaactcatttaatccttaaacaaaaaagtgaggtggtagtagtattaccacatttcaagaagtgaaattgaggtacagagaggtgggtcaactggtttgagtttgcattgcttgaatgtggagaagacagaaatcaaatcccaggcattctgactttggagcctatgttctgtctttatgatgatgctgttctgcttctctaagatgatgtgtgtaggtactatttgtttctyaggacattatgttaagaatcctttctgaaaccctctcagcctgtgagaccttcttcatccctggccctctcatactggataggggatgagaagtatcctggactcatgcaatcagccacttcctttgaaaatgctgcaaaaatatccctgcaccatgacgaataaaaaggatgtagaactatcctagaggcccatg

SEQ ID NO: 146816 - DNA, 498 bp, Homo sapiens
ttaagtataatttgccacttcaaacacacacacatatactactataggcatatttcattttctcgtgctttgctttattgaattgcacagatattgcatttttcttttttttttttttacaaattaaagttttgtggcaactttatatcgagcaaatctattggtatcattttccaacagcatgtgcgcactcggtgtctctgtgtcacatttagtaattcccacaatatttaaaacattttcattatcatatctgatatggtgagctgtgattagtgatctttgatgtaactattgtaattgttttggggtgtcacawactctgtctatagaagatggcaaactcagatacacattgtacgtgttctgactgctcaactgaccagtttttcccccatctctccccctctgctggggcttccctattccctgaggcataacgatatttaaattaggcctattaataatcccacaatggcctttaagtgtttaaatgaa

SEQ ID NO: 146817 - DNA, 550 bp, Homo sapiens
aattcttaaaaatagtctatggctgccctcttattaataatatagtaaagataagaaataaaccaaatataaagagtttttattttaaactaatttataagctctcccccaacaaatattcatttactcagaaagaaggaagtatataaaaatactatgtttatgtacatttgattgaacattgtaatttctttttttagagagatgagggtttcactcttacccgggctggagtgcagtggcatgattataggttactgcaggcttgaactcctaggcccaaatgatcctcctgcctcagcctcccaagcgccttggaatacgtgcaygtgctgccacccacctgactaattgatacttttttttttatagaggcagggtcttggtatgttgctaaggctggcctagaactcttgggttcaagcaagcctcctgcctcagcctcccagtatctgagattacaggtgcaagccgattccaaacattgtaaatgtttacagttaatgtgtaagcccatggctctcaccgcattaagaaattgacccaaggg

SEQ ID NO: 146818 - DNA, 401 bp, Homo sapiens
cgaattcaattttcagaagcatactaagtatataaaaaatacaggtgacacccaggtatgacaaaaattatgatggtggatatgagtggctgagatgatagaaaattacaccagtcaaaccatgcatttaacagatgaggaatctgaggccctgccatgcaagagacttactcaaggtcagacctcatcagggctaaaaacagatgacaaaattccctggttcctggcccagtgcttactccaatatgcctgctactgccctcttgtgagaaggggaagagatctcracacccatgcagcctagcccctagattcaaagtcaaatgcattttcagaaatagcctgcagtttgcttagagttaataaggtggaaggagatttctaaggaatgaacaccaaga

SEQ ID NO: 146819 - DNA, 401 bp, Homo sapiens
cgaattcaattttcagaagcatactaagtatataaaaaatacaggtgacacccaggtatgacaaaaattatgatggtggatatgagtggctgagatgatagaaaattacaccagtcaaaccatgcatttaacagatgaggaatctgaggccctgccatgcaagagacttactcaaggtcagacctcatcagggctaaaaacagatgacaaaattccctggttcctggcccagtgcttactccaatatgcctgctactgccctcttgtgagaaggggaagagatctcgacacccatgcagcctagcccctagattcaaagtcaaatgcattttcagaaatagcctgcagtttgcttagagttaataaggtrgaaggagatttctaaggaatgaacaccaaga

SEQ ID NO: 146820 - DNA, 408 bp, Homo sapiens
tgtcacatggcaagggtagaatcgctccctcacagacctggccgagatggccgggtgctcactggtacagrtgcccagagtccctgccagagcttcggggccatgcgacgggtgccaaggagccagctagcgactggggcgtcggttctgtgtggggatgccttttcaccccgttctcaatctgaaggcagtgaatccacttccattcacagaactcacagaggcctctcctctctgagatggcccagtgtgatatcccaggctgcgtagtaagctcctcctctggtgtcagccatgtggaggggttaaccctttcctggctctgagggtgctggctggcacagggggcacccacctgcagggcctcaaaggtcatatgccttggggaagacaccctgaactccttag

SEQ ID NO: 146821 - DNA, 437 bp, Homo sapiens
aattcatgggtggggagacggcagcccagcactgagcctgggtttctgggatcagccaggcctgcattccagcccgagctctgcgcctctcttgctgtgtcacccgggacaagtgagtcagtctctctgagccaccagctcctcaggcatgaaacctgtaactcagactcccaagtctgatttgcacatctctgattttaagcggcgccggctaaaggtgaaaattattctagtaggtattctttgcaccgctgatttgtacttcaggcaattggttggttttccatttagggtcgggagacaggggccctttttttgtccatcaattgatgtcagttaaacaaaaaagagtgggtkttttggaagaaaaatattaagcaactacagctgccctgaggatgggacagaaatcagaaagtcgtgtgtaaagtttcaga

SEQ ID NO: 146822 - DNA, 420 bp, Homo sapiens
ccgggcacggtggctcactcctgtaatcccagcactttgggaggccgaggtgggcctcccataatataaccctgtctctactaaaaatacaaaaattagctgggtgtggtggcacgcgcctgtagtcccagctacttgagaggctgaggtgggagaatgacttaaacatgggaggcaggtgttgcagtgagccgaaaccatgccattgcactccagcctgggtgacagagtgagactccttytgaaaaaaaaaaaaaaaaaaaaaaaagacaccaggtaccatctctgacccctccagtttccctctctcccacatcccagcctcactaagtcctgcccatcaatttccttggcagccctcgcagcagcttctctccccgtcccattcatgtccccacccataaccaggccgccctcatt

SEQ ID NO: 146823 - DNA, 590 bp, Homo sapiens
aagcttagtaaatgttccaatgttaagacaatttgttttagggaggaaaggaaaaaataatatgtagataggataaataagggctttttcactaagtctgtaaacactagaattaggaatcattacttctagtttaaaggaagtaattttttaccaaawttaaggaaaattaattttttcaaataggagtatatttacagaactcatcacccatggcagcatagtactgtttgaggtatatacacatagactttcctggcttatgaaatacagaggttttttagaatattagtggtatagaacgtgttaagtatttttgagcaaaccaagttctatgaaatacagttacaatatcagcagtatggccacatatttgtaaaagaccctaaaacttgtggctcttgatggaggtgctaaacaaaacattttggagttccacagcaagaagttctcacctttgcctgttggaacagaaaacagcctctccaaaggggaccagttttacatggggccttgcttgtatttgaagacattttcaagaaactggaaaattgagtgtgaccacagcaggttgaggttttaggtaggat

SEQ ID NO: 146824 - DNA, 554 bp, Homo sapiens
aatcaaaatatgttgtcacagaaagaataggtggaaggtcatagcctggaacccaagtttgaaaacatttcattgtgttcagtagtgaatttctacagtttaacatagcacagggccttctgaaaatcgcacttgtcaaagacgactcatctatttctccagacttcagtaaagaatgaaaagtacctttagataaaaacaaagaagagtaatatatgcagcacagtgacgttaggattctggtaattaactacatttaaatctctggtcactttaagaccctaaataaaaggcagacagctccactcaaaaactaaggctgatgtgagggaggtgagaggtcactgcacttggtacttcctagagayggccggagccaggcccaagacacagcagaggtcaaaggcagtggagagccttggccagttcagtgacagcttctggctgaagacttttggttctattcagaaacctgtgtcgtttttttggtgttgtagtttattttgtgattttttggaatcgtactttatatttccaaatttaaatttaaatgc

SEQ ID NO: 146825 - DNA, 424 bp, Homo sapiens
gaattcaatgcttgggtcacctccagattcattttcacagtctttcatgttttggtcatatgacattgtattttgctgccatatgactgatctttttttgttaaatgtgagatacttgttaaaaaatgtttagcaatgaattgaggcctagtagcatgttatcttgctgcagaagagatgggagtctacttctgggggatggtcaggggtcctccatacaggctgcaattgaagtcrtcggtgcaggctcagtccctacaaaggccagggtatttcctgtccacctttattctgatgcatgactcttctgggtctcaaccagagccagtggacttcagtatgggtcgctttcattggcagaccctcaatccacttgttttccatctaatcccacgcatgtgtgcaaaagctgctgtgcttcttt

SEQ ID NO: 146826 - DNA, 424 bp, Homo sapiens
gaattcaatgcttgggtcacctccagattcattttcacagtctttcatgttttggtcatatgacattgtattttgctgccatatgactgatctttttttgttaaatgtgagatacttgttaaaaaatgtttagcaatgaattgaggcctagtagcatgttatcttgctgcagaagagatgggagtctacttctgggggatggtcaggggtcctccatacaggctgcaattgaagtcatcggtgcaggctcagtccctacaaaggccagggtatttcctgtccacctttattctgatgcatgactcttctgggtctcaaccagagccagtggacttcagtaygggtcgctttcattggcagaccctcaatccacttgttttccatctaatcccacgcatgtgtgcaaaagctgctgtgcttcttt

SEQ ID NO: 146827 - DNA, 534 bp, Homo sapiens
gttgaagaaggacctagggtgttctaaacattggggaggggtgctcaggactctgcaactgtctttcctggtgtcactrttcacggcatgcacactcacaacatacacacctgccagcacatacctacatgaccttcgtgcccttcccgtacttctggtgcatcacccctgcacatcacatttcctacatgcatttcccacatgtccccgcacacccgaatatacacaaacacatattccccacgctccgtgaagtatgtccaccacacactcacataggcaagagcagatgcaatgccttgggttcacacactctttacacacccctgcaaacacatccacactacacacaccatgcgcagtttccatgacacacccacacaatccatattgtttggccatagacatatagcacataactgcatcaaaaccttttcacccacaaaacatatatacctcacactcacctacccacccacgtcacattgacactcatatcgacaccatctcaccaaagcaaaccacagtccacat

SEQ ID NO: 146828 - DNA, 547 bp, Homo sapiens
caccttgaggagcaaggccttagtacactaaagtctacggcacttttgcccatttctttctttcttttcttttttcttttttttttttttttttgagacagagtttcactctttttgcccaggctggaatgcaatggcatgatctcagcttactgcaacctccacctcacgggttcaagccattttccttcctcagcctccagagtagctgggattacaggcgccctccaccatgcccagctaatttttttgtatttttagtagagayggggtttctccttgttggccaggctggtcttgaactcctgacctcaggtgatccactcacctcggcctcccaaagtgctgggattataggcatgagccaccgtgcctggccatgtttttgtatttttagtagagatggagtttcaccttgttggctaggctgatcttgaacttctgacctcaggtgatccgcccacttcggcctcccaaagtgcgggattacaggcgtgagccaccgcgcctggcccacttttgcccatttcttatctcatttaagctt

SEQ ID NO: 146829 - DNA, 547 bp, Homo sapiens
caccttgaggagcaaggccttagtacactaaagtctacggcacttttgcccatttctttctttcttttcttttttcttttttttttttttttttgagacagagtttcactctttttgcccaggctggaatgcaatggcatgatctcagcttactgcaacctccacctcacgggttcaagccattttccttcctcagcctccagagtagctgggattacaggcgccctccaccatgcccagctaatttttttgtatttttagtagagacggggtttctccttgttggccaggctggtcttgaactcctgacctcaggtgatccactcacctcggcctcccaaagtgctgggattataggcatgagccaccgtgcctggccatgtttttgtatttttagtagagatggagtttcaccttgttggctaggctgrtcttgaacttctgacctcaggtgatccgcccacttcggcctcccaaagtgcgggattacaggcgtgagccaccgcgcctggcccacttttgcccatttcttatctcatttaagctt

SEQ ID NO: 146830 - DNA, 547 bp, Homo sapiens
caccttgaggagcaaggccttagtacactaaagtctacggcacttttgcccatttctttctttcttttcttttttcttttttttttttttttttgagacagagtttcactctttttgcccaggctggaatgcaatggcatgatctcagcttactgcaacctccacctcacgggttcaagccattttccttcctcagcctccagagtagctgggattacaggcgccctccaccatgcccagctaatttttttgtatttttagtagagacggggtttctccttgttggccaggctggtcttgaactcctgacctcaggtgatccactcacctcggcctcccaaagtgctgggattataggcatgagccaccgtgcctggccatgtttttgtatttttagtagagatggagtttcaccttgttggctaggctgatcttgaacttctgacctcaggtgatcygcccacttcggcctcccaaagtgcgggattacaggcgtgagccaccgcgcctggcccacttttgcccatttcttatctcatttaagctt

SEQ ID NO: 146831 - DNA, 674 bp, Homo sapiens
attttaaggtctcaagtttgagaaatcaaaacagtaattttgtacatagtataggtgtgccgtctaaatgtacrctattcaaatagtgcaggaatctcaaaaaataacaacaatctcagagaagtgaaactctgtggttactagcaaaggcaaatgcaaaaacactctgtaaggagtaatgttgagcaccttttcatatacttgtttgccatttgcttgccttcttttgagaaatatctattcaaatcttttgcccatttttgaattgttaaaatttttctgtagagttatttgagctccttatgtcatctgattattaatcccttgtcagataggtagttttaaaatattttgttccactctttgggtcgtctcttcactttgttgattgtttcctttgctgtgcagaagctttttaacttgatgtgatctcatttgtccatttttactttggttgcctgtgctttccggggtagtattcaagaactttttgcccagaccaattcctggagagttttcccagtattttcttttagtaatttcatagtttgaggtcctcaatttaaatctttaatccatttttatttgatttttatatatggcaagagatatgggtctagtttcatttttcttcatatggatatctagtttgcctagcaccatttatcagagac

SEQ ID NO: 146832 - DNA, 434 bp, Homo sapiens
cctgttgacttcaattgtctcagaaggcatagcactcagaaaacacttgctgaatcagtaataattatcttggactttgattctctaaagataaaatagtcaattaacttgattacttcttattttccagttggtgaaaaaaggtgaatgcagtagtagccatgttggggaagaaaattctttatcctcacatgttctgttgggccttcccttctctctcggcaggtgtttactttgattttttatagtgcayatcccctaaggcaggactgtagtcattactgtggaattaatacgggctggagtatcaagggtggtgttctacccaagggattctcatagaatcagcagatttagagttggacacaacctgaggatcacttaatccaggtgctcctaaatggaggccttgagaggtgagatgtcagattttg

SEQ ID NO: 146833 - DNA, 564 bp, Homo sapiens
gaatatgattaattttactaaatatatatctcacagagccacctctccaacaatgtcagctacgtgggcaaccaacgctcatgtacactgctgtgaggrgagggccactggctcgtggaaaggaccctgctctttcccacacacagctcattctgacccaaacacacaggctaacccaaaccccacccccacggcaccagtactcatgctcaggttctccatctaaagctcacctcccctggaagcatcttgaggccctctctcctctatccccccacctcccagagctgtgctaatgctcttctcctgggcttccagggcacccgactcttccaattcattgtgtagcagagggaaaaactttatttttaggaggcggtgagagaattattttgaaaagagacgctggcttagtcaaaacagaactctcctaagccacagggctagataataaacaaagggggaggggatgcttagtgagaaaagggtttggaatgacatatttataaatccatgtttataagtctgcagaagcactgggtggagggaggagagaggacgtgc

SEQ ID NO: 146834 - DNA, 564 bp, Homo sapiens
gaatatgattaattttactaaatatatatctcacagagccacctctccaacaatgtcagctacgtgggcaaccaacgctcatgtacactgctgtgaggagagggccactggctcgtggaaaggaccctgctctttcccacacacagctcattctgacccaaacacacaggctaacccaaaccccacccccacggcacsagtactcatgctcaggttctccatctaaagctcacctcccctggaagcatcttgaggccctctctcctctatccccccacctcccagagctgtgctaatgctcttctcctgggcttccagggcacccgactcttccaattcattgtgtagcagagggaaaaactttatttttaggaggcggtgagagaattattttgaaaagagacgctggcttagtcaaaacagaactctcctaagccacagggctagataataaacaaagggggaggggatgcttagtgagaaaagggtttggaatgacatatttataaatccatgtttataagtctgcagaagcactgggtggagggaggagagaggacgtgc

SEQ ID NO: 146835 - DNA, 564 bp, Homo sapiens
gaatatgattaattttactaaatatatatctcacagagccacctctccaacaatgtcagctacgtgggcaaccaacgctcatgtacactgctgtgaggagagggccactggctcgtggaaaggaccctgctctttcccacacacagctcattctgacccaaacacacaggctaacccaaaccccacccccacggcaccagtacwcatgctcaggttctccatctaaagctcacctcccctggaagcatcttgaggccctctctcctctatccccccacctcccagagctgtgctaatgctcttctcctgggcttccagggcacccgactcttccaattcattgtgtagcagagggaaaaactttatttttaggaggcggtgagagaattattttgaaaagagacgctggcttagtcaaaacagaactctcctaagccacagggctagataataaacaaagggggaggggatgcttagtgagaaaagggtttggaatgacatatttataaatccatgtttataagtctgcagaagcactgggtggagggaggagagaggacgtgc

SEQ ID NO: 146836 - DNA, 285 bp, Homo sapiens
gccaagcaggtaactttagagatcaagtgcacggtttgacctttgacttagggttttatacattggcayacttctggagtcttgcatcccttgattcttcagggatcagtcttatcccctgattcttcccttggggtaggctgtccacatgcacagtgacttgccagcgcttggaaagtgagcaggggcagtgtgtttattggaagtgtacacatgctcacttgaggcaatcttcccttaccagcctcatgttcctagaaggtcatataccagtcaaacgttgcc

SEQ ID NO: 146837 - DNA, 551 bp, Homo sapiens
cccacctccatcacaggcagaatccactccacttccgactccaggaatagtgtgacttaggccagccagaacagcacatttactcccaatccacatacccttataaaaattctcaaacatacagaaaagatgaaagaagagacagtaaacatgcatataccyatcacctccattctacagttgttcatattttgctatatttgccttatcacatatctagccatctttctatcatccatcagtccatcttgctttttaataaattttaagaggagttgcagatatcagcacttttaaacatttcagaacacatatcatctaaagttcaatatttgtccatttttaaatgtaaaatgtacatacaataaaatacataattcttaagcatgccaatcatgaattgtgacaatttcatatacccatgtaagctaaacctctatcaagatagaaacatcagctcagatagttccctcagacctccttccatcttactcccacccctcacacaccccatgcactggcaaccactgttctgttttgcacccccaatt

SEQ ID NO: 146838 - DNA, 584 bp, Homo sapiens
atattgacatagaaaacttttttatgtgctggtaatttttaaaacggtttatggctatattagaaatactttaaaaataaaacaaatcataaaagcaaacaacacaaataaagtgaagagaaaaagcagtttattgattttgaatgagtacaacattgatttcttcccatatgcttaatgattttaaaggatgaaagtctgacayttaaaagtgtattttttatattgattctgttttgttttgttttccccttcatttgtgttcaaagatgtgaatttatcaccttgtattgagaaagtatatgtaaagaatgccagttataaaaatcaattattcaaatgatcactctgaatcttttctattttacttggcgtcttccactttagagaaagagccttagactgtggatctggaatcattatccactttctcagcatgggagtagttgaagtcatttaacatctctgaaacttttacctcatctgtaaaatagagataaaaatacttgcttttttcatcttacaaatatgcttaatatatattttgtactttgtgatggataatttaatatcaaggtataatt

SEQ ID NO: 146839 - DNA, 572 bp, Homo sapiens
catctttgaaattatttctaaatagtcatagtttattcactaatttttttttgctttccatatatacaagtttgagaatgacattaatgctagtcaaagaatcacctcatccactagatcactttgtaagtatgcttgcttttattctgtcttcttatcactattattttgtcattgtatgtccataaaggtaaactatttagctggatcagctctgacctttaaggtgaaaagagtagggtggggtggggagtaagttcaatgaatacattattcacttatttggttaaaaaaatatgagatttattaacatttctgttattatgtgcgttgagtttttcttgtatatgattactttagaataaaatttcatggtgtttatttacataaaaccctgaaaggtcaagcttttttgagaccttctcagttatagtccagaaacacattgtyatttgcattttttcataatgttaaatgtcaatatgtctataggcagacaaccagttccctcccatcgtaatactaaaaaaagaatggaattaaaaatgcaccctcagattagtgaaccagaa

SEQ ID NO: 146840 - DNA, 497 bp, Homo sapiens
ttgcatttatcctctaaatatttacacctatgtatccataaaatgttttaaaataaaaaaaaataaatttggctattttatttttatttgtagattttattttaatctttttttgtgttttttgtttgtttgtttttagcaaatcctgttccctggctatagtttcaaactggcatttaaaaattaaccccaagaaacattcttttattcttgttcttactcgcggtgccttgttttcttgagtgttcaattattaattgtatgttggtaatgcacttagtagaacaaaattattatagccaattttggcactaagctaaaaatgacttctttcagatggttggtagattctgttagacatatgtaggtgctaccagctgtgctcaccctcatccaactttatgactytcacaacttatatccaaaaaatgaattcttaatagatcatagatttaagtataaaaatttaaagttataaaatttatggaaagaaaggc

SEQ ID NO: 146841 - DNA, 577 bp, Homo sapiens
atggggggaaactgaggccaagaaggccaagtgacataccttaattaatcaagaaataaaatcagattctgggctcagcatctcagtcctaaatcagtgtccatttttctgcatcacaaattagtactcacagtttggatttcattatgcaatacattctctatctactcttagcttttttacttttagtttgtttgagagtaaattgggattcccagctatcctttmctcaggcatgagcctttggaggcttctaacttgaaatagatggttctggcatttggatggagtggaacacaaacagatttgcaacagagattcaattttgttggaaactcactggggttgaaaaatgaaagacgaaattgccagatagaaatgtgtttggggttttagtgaatccagaatgctgagaaagagttgaagaatttggaccaatctcctcattgcttggcttgctcagccctgctcagcactacaggaaagtttggtggaaaacactggaaagaggctttgtctataaatatcccagcaataaccagtcgaccaaaacaatcttgggctcatgcttttattc

SEQ ID NO: 146842 - DNA, 412 bp, Homo sapiens
gtgtgagtgaaacagagaaatggctattcaaaggctattcaaaatgacagcaaccaaaaaaaaaaaaaaaaaaaaccccaraaaatttgcaaggaaattagaagcagggggtaaggatttgaaggaaagtaagatgatgacaagaagctggattgattgattgagacagggtcttgctctgtcgcccaggctggagtgcagtggtgcaatcacggctcactgcagcctcgacctgctgagcccaagcgatcctcccgcttcggcactccccctcctccaagtagctgggactacagacacgctccatcaaacctaggtagtttttgtatattttgtagagacaaggttttgccatgttgcccaggctgttcttaaactcctgggctaaagcaattcacctgcctcagcctcc

SEQ ID NO: 146843 - DNA, 541 bp, Homo sapiens
tatttatcctgtctgagtctttctcattttaaaatggcgcagggaggtgccgggcgcggtagctcacacctgtaatcccaacactttgggaagccaaggcaggtggatcacttgaggtcaggagtttgaggccagcctaaccaacatggtgaaaccccatctctagtaaaaaatatgaaaaaatyagccagctgtagtggcgcacatccgtaatcccagctactcatgtggctgaggcaggagaaccacttgaacctgggaggcggaagttgcagtgagcccagatcgcaccactgcactccagtctgggcaacagagggagactcagtctcaaaaaaaaaaaaaaaaaaaaaaaaaaaaaggtgtgtggcaggggagaggagataattcctgtgtggcagaaacatcaagagggatccccacctcatagagttgttttgagaattgaatgatttaaatttgatcgctaatgaattaaatgaaataattgtgtctggcaaacatttgggacaattgagtatcaaaatacatacattaaaga

SEQ ID NO: 146844 - DNA, 409 bp, Homo sapiens
ctaaccaacatggtgaaaccccatctctagtaaaaaatatgaaaaaatcagccagctgtagtggcgcacatccgtaatcccagctactcatgtggctgaggcaggagaaccacttgaacctgggaggcggaagttgcagtgagcccagatygcaccactgcactccagtctgggcaacagagggagactcagtctcaaaaaaaaaaaaaaaaaaaaaaaaaaaaaggtgtgtggcaggggagaggagataattcctgtgtggcagaaacatcaagagggatccccacctcatagagttgttttgagaattgaatgatttaaatttgatcgctaatgaattaaatgaaataattgtgtctggcaaacatttgggacaattgagtatcaaaatacatacattaaagaattc

SEQ ID NO: 146845 - DNA, 548 bp, Homo sapiens
gaattctcatcatagcttttctgacaggttatttatcctgtctgagtctttctcattttaaaatggcgcagggaggtgccgggcgcggtagctcacacctgtaatcccaacactttgggaagccaaggcaggtggatcacttgaggtcaggagtttgaggccagcctaaccaacatggtgaaaccccatctctagtaaaaaatatgaaaaaatcagccagctgtagtggcgcacatccgtaatcccagctactcatgtggctgaggcaggagaaccacttgaacctgggaggcggaagttgcagtgagcccagatcgcaccactgcactccagtctgggcaacagagggagactcagtctcaaaaaaaaaaaaaaaaaaaaaaaaaaaaaggtgtgtggcaggggaraggagataattcctgtgtggcagaaacatcaagagggatccccacctcatagagttgttttgagaattgaatgatttaaatttgatcgctaatgaattaaatgaaataattgtgtctggcaaacatttgggacaattgagt

SEQ ID NO: 146846 - DNA, 619 bp, Homo sapiens
tcagaatggaagtatagtaaatagagggcacctgttacttaggatgtgcttcattgagagagtggagccttgtgcttaagtgattcagatactaaatttctattgggatggttggctgaaattgtccttttaagaaacaggttataaagatagctggcttaggtggacagtttattattttttggtgggttatgtattctgtatacaggaaggggttagtagtttgggagtcatgaaattaagtaatgttcaaccgtgttaacttgggagcagtggttagcaaacctgattatttgacagataaaaaatcttgggtcctattccagacttactaaattagaatcttttaggcatcaatcctaggaatttgtatttttaagttcttctgaatactttggatgtctggtgggcaactttttgggagttactgccttagaaractatccagatagttgtgaccaaagacctatttgaaatgggtgtgagaaaggaatagcttaaacttgagaaggaaatgaggactactgtgctttttttttcaaaaaaaaaaaaaaactaattattgtggccaattgcagaacacttggttagcagtgtctacttagtggataaatttttg

SEQ ID NO: 146847 - DNA, 434 bp, Homo sapiens
agctccgaagggcgctggcggcccagcctggctggcccccacattccgagcccaggattaggcgccggcstctcccgagctcagtaagcgggctgagcggccggagaccgcagggagacggagattctcgacctttccggggagcacatggcagagccgctcctcaactcgcgcaggcgcagagccacggcctcggccacctccccttagcccaccgcgagcaggtccctgtgccattaccttgagggcctcaagtcccataagacgggacttgcggtcctgatccttgatgatgaggaaagggcgcccatattcatcgaaggcgagggtccccatggacgccatggtgcaacaaccggaattacttccccccaaccggcggagaccgctacggaagcgagaatgcacttccctttctcgggagggcccaaaag

SEQ ID NO: 146848 - DNA, 434 bp, Homo sapiens
agctccgaagggcgctggcggcccagcctggctggcccccacattccgagcccaggattaggcgccggcgtctcccgagctcagtaagcgggctgagcggccggagaccgcagggagacggagattctcgacctttccggggagcacatggcagagccgctcctcaactcgcgcaggcgcagagccacggcctcggccacctccccttagcccaccgcgagcaggtccctgtgccattaccttgagggcctcaagtcccataagacgggacttgcggtcctgatccttgatgatgaggaaagggcgcccatattcatcgaaggcgagggtccccatggacgccatggtgcaacarccggaattacttccccccaaccggcggagaccgctacggaagcgagaatgcacttccctttctcgggagggcccaaaag

SEQ ID NO: 146849 - DNA, 434 bp, Homo sapiens
agctccgaagggcgctggcggcccagcctggctggcccccacattccgagcccaggattaggcgccggcgtctcccgagctcagtaagcgggctgagcggccggagaccgcagggagacggagattctcgacctttccggggagcacatggcagagccgctcctcaactcgcgcaggcgcagagccacggcctcggccacctccccttagcccaccgcgagcaggtccctgtgccattaccttgagggcctcaagtcccataagacgggacttgcggtcctgatccttgatgatgaggaaagggcgcccatattcatcgaaggcgagggtccccatggacgccatggtgcaacaaccggaattacttycccccaaccggcggagaccgctacggaagcgagaatgcacttccctttctcgggagggcccaaaag

SEQ ID NO: 146850 - DNA, 648 bp, Homo sapiens
ctgctacacattatagttatcatattattcattaccaatatctgttttcctgagtatatttaagcttttgaagtacaaagggattaggtttgatccatccttttatgttccacatttctaatactctacctgacatatattaggtatcraattatgatttgttgaattgacacccttcattttaaatacttacataattttaagtttatgattttatatgtttatattgtagtgatatgaaatactacattgatatcaaactctaagaaaataatgctttttaactgcaagtcaaaatataataccaaaatcaggacttttcaaatagtgccacctgatgataattgtttgtacaaccatttttgtcccaaggtaataagcaaaaaaaaattatctcaattcaactgcagtagaatttttgatatttatcagtataatattatcgaatatacatttttaaattgcaaataactttaaaagaataccccatcattgaatttcttctctcaaaactagcagctggaatagaaattaaatataaagaaaatgcatgcactacattcagcatacaaatttacatggaaccattcatccaagttctgcaaggaatggcttcaaataagttagattttattattagaattaatt

SEQ ID NO: 146851 - DNA, 610 bp, Homo sapiens
aaatattttcatacatatattgcaaatttcttactctattgtgctccactatwatacaccatatgctctagtgtattttcccgtctacttgaaattcattcacagttatctgcagatgtaacctatataatcatccaagtctataagacaaggatagccatattattccttctttatatttctgttggaatgatctttaacacaaggattctatacaattttgagtaggagaaagagaaacttggaggaaacatgtagtgataatgacttttgcagtattagtaaaaatagaaatactaaattagtgttcagcttgtgaaaattcaaaatagaatttttataagttctcaaggcaagcacaggaagaaaggttggttttaaaaaggattcctttatcatctcatttaacttatggagaagcaggtatcatggattagattacagggtactacttaaaggataaccaggtaagaagaggaaacatttactttctctaaacttgagtacatgagagattgtggtagatgatggaggaaacagtaagaagcctccctcccactcccctgccttgaggttgagcctagaaagggatggctttaggagaaacaat

SEQ ID NO: 146852 - DNA, 562 bp, Homo sapiens
ttttgcaggtccattgtgtattacaaatttggtaagttcaggaattccaataaagagcaaatcaatctgatacagtgaagctattagcatatttaatttaaaagtcatcattttacctagatttttaaacttagtgtgtttatgtgttgttagcttcacttacctatgttactctcaggtctcaccaatttggtttcagtgtaaattatctaaactttattaattagaaaatgctttgtatggcctctggtctggcaaagtggaggaattacaggtactaaaataatgacatattccacttttctctaatctacctgtatgktccaatcaaactcaacactcaatgatatatgcaattcaaaaaaatgtgcaattattgaacaaagaaggacaattaaagaagaagcgccaaggttaacataccccaataattctgctcttggcaagatataaatattttggggacatgacaagggcattctctttggatgtatatgactgataacaaaatctctgtgagtacatttattgctcataaatttcttgtgattgttaaccatca

SEQ ID NO: 146853 - DNA, 562 bp, Homo sapiens
ttttgcaggtccattgtgtattacaaatttggtaagttcaggaattccaataaagagcaaatcaatctgatacagtgaagctattagcatatttaatttaaaagtcatcattttacctagatttttaaacttagtgtgtttatgtgttgttagcttcacttacctatgttactctcaggtctcaccaatttggtttcagtgtaaattatctaaactttattaattagaaaatgctttgtatggcctctggtctggcaaagtggaggaattacaggtactaaaataatgacatattccacttttctctaatctacctgtatgttccaatcaaactcaacactcaaygatatatgcaattcaaaaaaatgtgcaattattgaacaaagaaggacaattaaagaagaagcgccaaggttaacataccccaataattctgctcttggcaagatataaatattttggggacatgacaagggcattctctttggatgtatatgactgataacaaaatctctgtgagtacatttattgctcataaatttcttgtgattgttaaccatca

SEQ ID NO: 146854 - DNA, 301 bp, Homo sapiens
ttcagctacaaataaataccatgcatagatccctagtcctctgaaaacatacagaaaagaagtttactggcagtactcaatttacacctcagttaaaggaacagcccacacaaatgggaaagaatcagtgtaagaactctggcaactcagaaasctggagtgtcttctttcctccaaacaccacactagtttcctagcaaggattcttaactggctgtagtccctgaaatgacagatatagaattcagaatatggataagaataaagaccattgagataaaggacaaagccaaaaccgtat

SEQ ID NO: 146855 - DNA, 301 bp, Homo sapiens
ttcagctacaaataaataccatgcatagatccctagtcctctgaaaacatacagaaaagaagtttactggcagtactcaatttacacctcagttaaaggaacagcccacacaaatgggaaagaatcagtgtaagaactctggcaactcagaaagctggagtgtcttctttcytccaaacaccacactagtttcctagcaaggattcttaactggctgtagtccctgaaatgacagatatagaattcagaatatggataagaataaagaccattgagataaaggacaaagccaaaaccgtat

SEQ ID NO: 146856 - DNA, 590 bp, Homo sapiens
acaatttcttttatcttatataaaatcaatgccatcaaaattttagaatgctcctaattcattaagtacacactcatcaatcatctcctatgcaacagatattgccagtctgtggtgtaacaatcaacattaaagtccctgctttcwaagagttaattatctagtcagctatcaggatgttctcgcctatgggctgttcagccagtaacagatgaagatagacaagacagaaacagagcgtgacagatgaaaggttagtaggggtgaagttaggatctcctggaaaaaaagaatgtgtgaatgcatgaacacatgaaatttactgatgctttaaagaaactgaagttagttcagcactaccaaagtgaagcttatatgtaagtgtgtttcaagaagtattggagaggtgattcataaaagttttgtctagattgtcctggacataagagaaaaataaggtagatggttgcctctgctagtggaatcattttaaaagtattgtattaaacagagactagccacatatatagacagtaagcaactaaacaagcaaatatataagcacatttcatgaaacctgccgtgaagga

SEQ ID NO: 146857 - DNA, 672 bp, Homo sapiens
attttgtgttgctattatataatgtttgttcataaagaaaggcagtttattgagctcacagtactgcaggttgagaaatctaagggcatggccctggcttctggtaaaagctcttatgctgcatcacaatcataatgtaatggaaagattcaaagagaaagyggacatgtatgaagaggcctgctggctttacaaaaaccacctctggcaggaaataatttatttctgtaaaaatcagtctcttgagagtgagatctcactgctgcaagaacaacaccaaaccattcatgcggcttctgctcccataacttaaacacctttcactgagctccatctcccaacatttgcaatgttgggtgtattagtcttttctcacactgctataaagaactacctgaaactgggtaatttataaagaaaagaggtttacatgactcaaagtactgcacacttaatgggcagcatgacagggaggcctcagaaaacttttaaaccatcagatctcatgagagatcttgttattatgagaacccaagatccaatcacctcctaccaggcccctccccgattagtgaggattacaatttgatatgagatttgggtgagaacacagagccagactatattattctccctctggcacctcccaaatctcctgttattctcaccttt

SEQ ID NO: 146858 - DNA, 592 bp, Homo sapiens
tggagcagtagttttaaaaaacaggagtgaaaacactgaacataatcaccttaatacagatgagtagataatctgataaatagagaacagtgaatcgttacacaaaatacagtggaaacaccaaagggggatgagaatcctggcacaaaagtgcaatttaaagttttcttgagaatcgtggattgttggcagagacagtaaggccaaaacataragatgttacagagtagcaagaaaatgttgctagtctggtactcagatagaaattaactgcatttttttcatgttttgatgtttccttcccttccccaattttgaaatattaaaataaaaatcagttcttgaaattaagaagatggtgatgatgatgacagtgatggcaacaatgatggaagaggtcttattgcctgctcacttcgtgcttgactctctcctgaaagccttctcttggaggacattagctttccctatcataaaaattatttatgtttctgacgtggctgtttctgataaggcaaagctcattatatttaagaactacattagtcagtgcttttaaacctataatgaaagttacatcacatcatgccta

SEQ ID NO: 146859 - DNA, 396 bp, Homo sapiens
aagaagcacagcagcttttgcacacatgcrtgggattagatggaaaacaagtggattgagggtctgccaatgaaagcgacccgtactgaagtccactggctctggttgagacccagaagagtcatgcatcagaataaaggtggacaggaaataccctggcctttgtagggactgagcctgcaccgacgacttcaattgcagcctgtatggaggacccctgaccatcccccagaagtagactcccatctcttctgcagcaagataacatgctactaggcctcaattcattgctaaacattttttaacaagtatctcacatttaacaaaaaaagatcagtcatatggcagcaaaatacaatgtcatatgaccaaaacatgaaagactgtgaaaatgaa

SEQ ID NO: 146860 - DNA, 311 bp, Homo sapiens
tgctgaattccagaaggaactactgagatgcaaagaagcacagcagcttttgcacacatgcgtgggattagatggaaaacaagtggattgagggtctgccaatgaaagckacccgtactgaagtccactggctctggttgagacccagaagagtcatgcatcagaataaaggtggacaggaaataccctggcctttgtagggactgagcctgcaccgacgacttcaattgcagcctgtatggaggacccctgaccatcccccagaagtagactcccatctcttctgcagcaagataacatgctactaggcc

SEQ ID NO: 146861 - DNA, 424 bp, Homo sapiens
gaattccagaaggaactactgagatgcaaagaagcacagcagcttttgcacacatgcgtgggattagatggaaaacaagtggattgagggtctgccaatgaaagcgacccrtactgaagtccactggctctggttgagacccagaagagtcatgcatcagaataaaggtggacaggaaataccctggcctttgtagggactgagcctgcaccgacgacttcaattgcagcctgtatggaggacccctgaccatcccccagaagtagactcccatctcttctgcagcaagataacatgctactaggcctcaattcattgctaaacattttttaacaagtatctcacatttaacaaaaaaagatcagtcatatggcagcaaaatacaatgtcatatgaccaaaacatgaaagactgtgaaaatgaa

SEQ ID NO: 146862 - DNA, 424 bp, Homo sapiens
gaattccagaaggaactactgagatgcaaagaagcacagcagcttttgcacacatgcgtgggattagatggaaaacaagtggattgagggtctgccaatgaaagcgacccgtactgaagtccrctggctctggttgagacccagaagagtcatgcatcagaataaaggtggacaggaaataccctggcctttgtagggactgagcctgcaccgacgacttcaattgcagcctgtatggaggacccctgaccatcccccagaagtagactcccatctcttctgcagcaagataacatgctactaggcctcaattcattgctaaacattttttaacaagtatctcacatttaacaaaaaaagatcagtcatatggcagcaaaatacaatgtcatatgaccaaaacatgaaagactgtgaaaatgaa

SEQ ID NO: 146863 - DNA, 311 bp, Homo sapiens
tgctgaattccagaaggaactactgagatgcaaagaagcacagcagcttttgcacacatgcgtgggattagatggaaaacaagtggattgagggtctgccaatgaaagcgacccgtactgaagtccactggctctggttgagacccagaagagtcatgcatcagaataaaggtggacaggaaataccctggcctttgtagggactgagcctgcaccgacgacytcaattgcagcctgtatggaggacccctgaccatcccccagaagtagactcccatctcttctgcagcaagataacatgctactaggcc

SEQ ID NO: 146864 - DNA, 412 bp, Homo sapiens
tgaattccagaaggaactactgagatgcaaagaagcacagcagcttttgcacacatgcgtgggattagatggaaaacaagtggattgagggtctgccaatgaaagcgacccgtactgaagtccactggctctggttgagacccagaagagtcatgcatcagaataaaggtggacaggaaataccctggcctttgtagggactgagcctgcaccgacgacttcaattgcagcctgtatggaggacccctgaccatcccccagaagtagactcccatctcttctgcagcaagataacatgctrctaggcctcaattcattgctaaacattttttaacaagtatctcacatttaacaaaaaaagatcagtcatatggcagcaaaatacaatgtcatatgaccaaaacatgaaaga

SEQ ID NO: 146865 - DNA, 397 bp, Homo sapiens
aaccccccgtctctactaaaaatacaaaattacccgggcgtggtggtacatgcctgtaatcccagctactcgggaggctgaggcaggagaatcgcttgaacctgggaggcggaggttgtggtgagctgagatcgtgccactgcactccagcctgggcacaagagcgaaactctgtctyaaataaataaataaataaataaataaacaactatcacagcataaagtaggaatatttcgttactgtctagttaaactggttaatgcagaaaggaagtctggaaattccaggttttaaagtaaaattttggacttgtaggattgattatttggcatagttgtgatgtttgttcctgcgttatggttttgttggcagggcagcctttaaggacctgtatat

SEQ ID NO: 146866 - DNA, 620 bp, Homo sapiens
attgaaacttgttattgggtagatttggggtctgttttgggctgaattgtgttccttctccaaattcctatgttctagtcctgacctccagtgcccaagactaatgtgactatatttggagacaggatttttaacaaggtaattaagttaaaatgaggtcattaaggtggactctaatccaatctgattggtgtccctataagaggaggaagcaagaacacagaggcacacagggaagaccaggtgaaggcacaaggagaagatgagcatcttcaagccaagacaagagatctcagaagaaaactgccctgccaactccttgatctcagatttacaatgcccagagctgggagaaaataaatttctgttgtttatgtcacttagtctgtgatactttgttatggargttctaacaaattaatacaaagtctgtaccataagattctcaacacttcgtagacttgcaattttgacaagaccagatcattcaatcagacaggaatgcaaaaatgtattaccctgggaattaaatatacatcacacaaaatgttaataaaaataagttttctaatactctcctgtctgcaatacattttaaaatttagaagtaaaatttatcc

SEQ ID NO: 146867 - DNA, 597 bp, Homo sapiens
tttctataaaaatgaaaagataatcctagagtttaaggatgtttgtcctttaggagattagccagcattgtacctaaacttgcaatcttatccaaactgtcctttattaaattgttttcagatattcatcttctcaaagctttttgaaccagtcttagtatttctctggttccctcattatgagttgattaatgagttgaatagaattgttgacctgtgttcattttttatttgtggaagaactgtgttttaactytcagaatattacattttaacaccttataaaaatggtcctgttagaaggaagaagtattttatgaagtaggacttcacttctaaatatattgcctttgaggtgttggaaatatctttcttttggaccaatgtcttcatgatagctctcttttgctcaaagcatacatgcctataaaaaatagacttcaaaattgtagttaatttatttgagaaacttaacactccacacagagagaattgctatgacatcctttgtgattctgcctttccattttcttctacctatgttgaaatttgtaattctgtatcagttcaaaaacttcaggacttacacagcaaaag

SEQ ID NO: 146868 - DNA, 465 bp, Homo sapiens
ttctcaaagctttttgaaccagtcttagtatttctctggttccctcattatgagttgattaatgagttgaatagaattgttgacctgtgttcattttttatttgtggaagaactgtgttttaactctcagaatattacattttaacaccttataaaaatggtcctgttagaaggaagaagtattttatgaagtaggacttcacttctaaatatattgcctttgaggtgttggaaatatctttcttttggaccaatgtcttcatgatagctctcttttgctcaaagcatacatgcctataaaaaatagacttcaaaattgtagttaatttatttgagaaacttaacamtccacacagagagaattgctatgacatcctttgtgattctgcctttccattttcttctacctatgttgaaatttgtaattctgtatcagttcaaaaacttcaggacttacacagcaaa

SEQ ID NO: 146869 - DNA, 553 bp, Homo sapiens
tttcacttgaacctagagagtgcaaatcactcaaaatcctgctcttgctgtagagtaaggacaaaaaactgtttgaagggctacgagggaaggatagagattcctgggcactagaggaggcattaaacttaagaaaaagataaatcatgtccatctccaataagaagtcctttgtagtcctgagatggcttaarggtgctatctcttggtcagagacttttctactgtagctatttctccatgagcataggtcaaggcagagattttcatttctaatttcaattccacaaacaaagaacaaacatgacatgctaacagcatgttaaagttgaggcttaaatatggcctgagaaggactctgtatttctatatttgaatccttttagatgaactgcagcgtaacttactaggtagacaagattgaaaacctcacttagtagtatgcacctgtaacaatagctcagtcttgaccaatcccagcaaccgtacttcaaccactgatacactgctgagtgttcaaactgtattcaaataaggcaaatgccaacctgta

SEQ ID NO: 146870 - DNA, 470 bp, Homo sapiens
tgatggctgtcatctgatgatgccatgtgaaggctttaatgaactggcatttcctgttgctgagctgccatgtctgaaggccaaagcaaacagggtttaggctctttggatcccaaactgtttttgtctctttctcttcctacttctgatccagtctgcaggtctgctcacctctctttctcaatctcacctgtgtacatgtgcaatatgaaggtcagatgccaggtgctgccttccaaccagaccaaacccttgagaaaagtacgacctgcggggagsggggtgtgatgccggcttttttctgagacacaggggaaaccttggctaaaagtgtttcctgtaagttgagatggctggaagcctaaagctgttttgcttcaaagttcttgttactgctaattgaaacatatgagaaaggaataaaaatgctgaagttaagaaagtagaagttgggagtaggaaagtaagaa

SEQ ID NO: 146871 - DNA, 541 bp, Homo sapiens
aagctttcatcattaagaaaattttgcttaattatctatattaaaattaaatacttccaattattaggaaacaactttcagagagtgaaatttcaagacacattgaatgaggagatatttgcaattaatatttctggcaaaggacttatattcaaaatatgaaaggttctcttaaaatttaattttaagaggtagccaacccagttaataaaacaggcaaaggattaacaggcattgcataacaaagtatatctcaatgaccaataaacatacgaaaaggagctcaagttaaaaacataatggactattactatctgtctatcagaatggctaagatgaaaattccagaccatgtgagagaggacactaaacaggaggaatgttcatacattgttrgtgagaatgaaattggtaaaacccacttgtaccaacgcattctatgacagtattccctaagctgaatatatgcatgccttatgaaagcaattctactttaggtaagtacacaatagagagtcataaatatccatcaaaagacaat

SEQ ID NO: 146872 - DNA, 600 bp, Homo sapiens
tttgccctctgaaagggatatgcatattttcgggttaggtgttccatggtcagccaatttcagactgtggggaaagacaattgttcatcagtggtgctctgcgagaatgatgactagagtacaacccagagagaattagagtactaacataactggactctccctgaacaaacctttgagtaagtgtacagattgttgggaattactagcaagaaagagggagtcgagttactaaaacatataattcataactgaaggcagaaatggtttcttgaaatggcctggtgtttatattaaggatgccccaggctgaagtactgtgaaactatggcactatggtatataaaacatgtcataattacaaagctactgaaaaagcacttaatacttttattcaatttcagtttgctaaagtacaagcaaacttaagtaaactataatgcatacatgaatatcttcttacaaattttcttaygtgaaaaaaattactagttaaatcatattgctttgatacagacttggttttttgttttttttgggggggcagcattcataaataggagttgtgcaggggcatatgatgtgctatttttagaatcc

SEQ ID NO: 146873 - DNA, 554 bp, Homo sapiens
aatataatcattttatttagcttgtaaatttcaggatcattctgaggtcaagcttgtcaggatgcttagattgaaatgaatcacatttctagactgtgttgtaatactccaaaatattaaatgagggaagacgttcaggatgcatatcaagcatataagcctcaagtaaaataaatgtgtcattgatttttattgcaattatggtgtggatttcaactgataagcaaagctagatgtttgagagcttgaacatctttctgagakaagatttaaaggaatgaatagcctcctcagagtaaaaaagtatgacagtgtagaaattgaaggtcttcctcttgcagagtctctctttgtagattatactatagcttccattgaagtatacatatgctgtagaagtagataagcatctcatctttgttcttgttcaattcaaacaaatattctgaagaaaatattattctcagatactttatattaaagaatccatgaaatattcataggttcttctatctcccttgaaagtaaagagtatgacagtttaagtctacaat

SEQ ID NO: 146874 - DNA, 635 bp, Homo sapiens
tgtgcaaaattttcttggtatatctactttctctaggagattatacatatttgttatcaaatttttaaatagtaaaagagccccaagaagccactgctagatcttgatcaaaaaggccccaaatgcaagtgaaattcagtacatgaatagtccaccttttcactgyctctaatccaaaaccaattcctattgataataacacttaaatataaactgaataatcccccatttttatttctacttccattgctttgtctctggcatttgcagtttcctgcctagaccattgtaaccacagcctaactactctccctaccagcagcagagagatgctcatattcttcttcagcgaattagtaattcacagatgccatggcaaataaaacccttgagtggctaactacagtatgcgtatctgcaactatgattgctttactttttcttttttcagttagtacatataaaagagatgatcagacccctatgaacaaagaccacgattaatcatctttatattcgtgtctggaacataatagatgttgtatagttatttgtttaattgaatggatctgtcacccccaaatgcctaaaatatgctttgtatatgagagaggtttaataatgctaaacaaatg

SEQ ID NO: 146875 - DNA, 635 bp, Homo sapiens
tgtgcaaaattttcttggtatatctactttctctaggagattatacatatttgttatcaaatttttaaatagtaaaagagccccaagaagccactgctagatcttgatcaaaaaggccccaaatgcaagtgaaattcagtacatgaatagtccaccttttcactgcctctaatccaaaaccaattcctattgataataacacttaaatataaactgaataatcccccatttttatttctacttccattgctttgtctctggcatttgcagtttcctgcctagaccattgtaaccacagcctaactactctccctaccagcagcagagagatgctcayattcttcttcagcgaattagtaattcacagatgccatggcaaataaaacccttgagtggctaactacagtatgcgtatctgcaactatgattgctttactttttcttttttcagttagtacatataaaagagatgatcagacccctatgaacaaagaccacgattaatcatctttatattcgtgtctggaacataatagatgttgtatagttatttgtttaattgaatggatctgtcacccccaaatgcctaaaatatgctttgtatatgagagaggtttaataatgctaaacaaatg

SEQ ID NO: 146876 - DNA, 561 bp, Homo sapiens
aaaataaagctcctaaggaacactgttgaataaaggcttggtacataagcagagaatcaggatcatttataaataataacaaagactcagatacaagtaagcagcaacccacagcagrtaagtgtgagaaaatcatggtgtaggaaacaccaaatagagttaggagaattgggataatgcaagaagagaaatcaggccaggacctatggtacattatattttccaaggatggacaccacagtatacttcatcccccatgctccatttacaatggcattgaccatccttccatcaagtagtgggatccctgtccctagcacccacctcccctaggacccaggcagacctttatgactgctttgctcaatagaatacagtagaagtaatgctttgtaacttccaaggctaggttataaaaaattctgttcaaccttgctctcttaggactttttctcagtaagccctgataccttgatgtgagaaggccaagaagaagcctatagagatgcccacaagaggagactaaagctgagagaaactgaggcccctggccctagagct

SEQ ID NO: 146877 - DNA, 561 bp, Homo sapiens
aaaataaagctcctaaggaacactgttgaataaaggcttggtacataagcagagaatcaggatcatttataaataataacaaagactcagatacaagtaagcagcaacccacagcagataagtgtgagaaaatcatggtgtaggaaacaccaaatagagttaggagaattgggataatgcaagaagagaaatcaggccaggacctatggtacattatattttccaaggatggacaccacartatacttcatcccccatgctccatttacaatggcattgaccatccttccatcaagtagtgggatccctgtccctagcacccacctcccctaggacccaggcagacctttatgactgctttgctcaatagaatacagtagaagtaatgctttgtaacttccaaggctaggttataaaaaattctgttcaaccttgctctcttaggactttttctcagtaagccctgataccttgatgtgagaaggccaagaagaagcctatagagatgcccacaagaggagactaaagctgagagaaactgaggcccctggccctagagct

SEQ ID NO: 146878 - DNA, 561 bp, Homo sapiens
aaaataaagctcctaaggaacactgttgaataaaggcttggtacataagcagagaatcaggatcatttataaataataacaaagactcagatacaagtaagcagcaacccacagcagataagtgtgagaaaatcatggtgtaggaaacaccaaatagagttaggagaattgggataatgcaagaagagaaatcaggccaggacctatggtacattatattttccaaggatggacaccacagtatacttcatcccccatgctccatttacaatggcattgaccatccttccatcaagtagtgggatccctgtccctagcacccacctcccctaggacccaggcagacctttatgactgctttgctcaatagaatacagtagaagtaatgctttgtaacttccaaggctaggttataaaaaattctgttcaaccttgctctcttaggactttttctcagtaagccctgataccttgatgtgagaaggccaagaagaagcctatrgagatgcccacaagaggagactaaagctgagagaaactgaggcccctggccctagagct

SEQ ID NO: 146879 - DNA, 334 bp, Homo sapiens
cagagtggtacatttacaagaagtataatccagaatctttcatgtaacaataattagtatgaggatgcattaagtttgtgtatgtaaaatatgcatagcacatacattattcacttaccagtaggtcagcaaagaattattaaatgcaactgtgctccaatatagaactagacytaggagatatagcagggaacaaaacacagtggcccctgataggacactcagatgataaacggatatatacaactcagaatgttgagaagtatacaaaaaaatgaaactggtaaacaggatagcatatcaaggtagggtgagggtgggtaggcaaggctgc

SEQ ID NO: 146880 - DNA, 566 bp, Homo sapiens
gaatcttgctaactgactgccttttggaggcagaaagctgaatttgttaatatgaataacacactgggaggctatgaacattcaagacagggtaatgggcctcaaactaatttttatcttcttgtcatcctggatagattccctaagagacaataatgaaaagtgcagagaaaaaattcctaccagatgagaatagtaaattgtgttttgtcagccagctttggactttgtctctcctcttctaaggaatcatacaaagaatgtgtgagctgaggagtatgaggcgacatttttctgaaactgataatgaacmcagagccaaaactgcaacccaaggtcacagataatggaaaatacaccataggcattttcattgcctttatgtttttaatgatgtcctcattgtctcttattgggtttttgttttgttttctttttacagttgcttatgtttcctgctctttgccatttgctctaaggctgccactagcacttccataaaatatcttaatggccccccacagggctttggtagtgaagggtctgctaatgtttccatgatgacc

SEQ ID NO: 146881 - DNA, 614 bp, Homo sapiens
ttcattatttacctaacagtatgactatcatcctgtaatgaatggaaagctactaaacatgttttaggcaagtgagtaggacagttgataactatatcttggttttgatttctatgtagagcagaaaagaggcttgatttttgacttaaagaattcatcaataggtagtgayatataatatttagtaatctacttctgttgttgttgcttagatttgtggaacacaagtcactctgcaattacattgcaagtaccaagaatttaagagatttggtctgattccttccccttgggcataggcatagtcagggactgccagtcttctgtgtataagagtcactgggttgtctagttttctgttactcaactactgtcttacacttctctcctgcttcttattaataaataataaatatgctaatagaaactatgaaaactagtaggggcaaaatacccttgggctaccttgtggggattctgctgtgcctattatggttaactgtgtcacgcacacacatacatggtcagggtagatagatggccacatctgtcctgattattactagtctccagaatatctaaaaagataaaagaaaagtaactgcagtctcaac

SEQ ID NO: 146882 - DNA, 400 bp, Homo sapiens
cctccttagccagagctgcatcagtcttttacttgctcttcattgggaaattaacttatagctggctttccatcccttctgtctaaacagtggatacacatctttytcttttttgtaattccaaacataacccttgttggtgcaattttaggaccacttcctttcccagtttcctcgaatgcacagtggcctccttcctttttaaatctctaatagtgttaaatctcttttctgcttacatgttccttgctgtatatttcctcgtaattatctggcgatattatctgccagttataacgtatgtggccttgggaaaatgacacaatctctcaagtcctcagatgctctgtctgttaaatatgaataacacatatatgtacccacaggtggttttgaattc

SEQ ID NO: 146883 - DNA, 363 bp, Homo sapiens
aagaaataacaacttccaaatttggagaaaaacataaacctgtagatttaaggagtgcagaaaaccttaagcagaatacacccaaagaaattcagtgatgtattataatcagactccttaaaactaaaagcaaagaaaraaatcataaaagaaaccagaaaaaaatatcaatcacattacttataggatagcaatgatttgaatgactgcatttttcataatgaaaaaacagaagtgagaacaataatgtggtgagacaaaaacaaaacaaaacaaaaacccacccagatttctctatcaagcaaaaatatccttcagaaatgagagtaaaataaggacattaacaaatgaattaaaactaaa

SEQ ID NO: 146884 - DNA, 558 bp, Homo sapiens
ccttagtttcattatgtacccaaaagtcattcaggagaaggttattcaattttcacataattgtatggttttgagttaatttcttagtcttaatttctaatttgattgcactatggtccaatggattgtacgctgttatgatttcagttcttttgcatttgctgaggagtgttttacttctaattatgtaatcaattttagagtaagtgccatgtggccatgagaagaatgtatattctgctgaatttgggtggagaatgtagctatctatcargttgccttgattcagaggtgagttcaggtcctgaatatctttgttaattttctgtctcaacgatctaatattgtcagtggggtgtaaaagtctcacattattattgtgtggaagtctaagtctctttgaaggactctaagaacttgctttatgaatctggatgctcctgtgttggctgcatatatatttaggaaaactcttcttgctgaattgaaccctttaccattatgtaatgcccttgtcttttttaatctctgttgatttaaagactgtttttttagaaa

SEQ ID NO: 146885 - DNA, 558 bp, Homo sapiens
ccttagtttcattatgtacccaaaagtcattcaggagaaggttattcaattttcacataattgtatggttttgagttaatttcttagtcttaatttctaatttgattgcactatggtccaatggattgtacgctgttatgatttcagttcttttgcatttgctgaggagtgttttacttctaattatgtaatcaattttagagtaagtgccatgtggccatgagaagaatgtatattctgctgaatttgggtggagaatgtagctatctatcaggttgccttgattcagaggtgagttcargtcctgaatatctttgttaattttctgtctcaacgatctaatattgtcagtggggtgtaaaagtctcacattattattgtgtggaagtctaagtctctttgaaggactctaagaacttgctttatgaatctggatgctcctgtgttggctgcatatatatttaggaaaactcttcttgctgaattgaaccctttaccattatgtaatgcccttgtcttttttaatctctgttgatttaaagactgtttttttagaaa

SEQ ID NO: 146886 - DNA, 559 bp, Homo sapiens
tctatttttgtctgtcaaattattttttcttatgtgctagctatgtaatcaaatgtaatgatagtttctgaagtgtcatgaaagtagttgattgaattctaaggtgttttgattttaaaattcttctgttctcactctgtgggttgagagatgcaggaattctcctagaccagatttctgacctgcagagcagaggctcaaacatcytcaaggagcaaatcactaaactattaagcaagaactttgaaaggaatcaatatttataatggatcttaatggctcactcatgctagaaggacacagaaatactctttgtatttcatacttattaaatgtgtgtttgtttgcttatatattaatctattttttctcataattaagaccacatacaaaaatatattcaataataaaaaaaatcacagggggaaatggtgtatgttatccaaagacgcaatagcatattatctttatttaagacagatcctgtgttttaaaaagaagtgttattctcaatgtaaagtaaaagtacacaaatgtatcattggagataagagggcta

SEQ ID NO: 146887 - DNA, 582 bp, Homo sapiens
atggcctgtggaccatttttgtgatggggaagatatcaaagaatgaaagagggactcaggaacagtgtctagggctttgtgggcagaaagggccttctagttccctctcactctccgccatcctgcatctcatgtcagccctgctcctcrtgacagggtccatgatctgaggagaagtgggtcaggagatcaggatgaacagggagagttgtttacctgaagtggccagaaacaacgtaattcatgggaagaactaactccatggctgggaaaccaggcagtagcactagttagaattgcatctgtgggtaagcctttttccctgtacactttttacctctggtgaaaagtggtgaactgtcctgtgtccctgttcatatctaggctattcactctatgctgcacccaatttcatttcttctcaccttctcaaggcttctgctccttccttcatttatcacctgtccttcatctatctctcatctctctttcatctctctttttctctcttatctatttctcatacctctctccccctgctcttcctttactttctctcatctcttctaggttaaccccacc

SEQ ID NO: 146888 - DNA, 627 bp, Homo sapiens
cattttaaaatttaaaatatagaatgtatttgatctatgcttggtgggttcagtggccatttttatcctattttgatgaagtatctaatatgattacaagaggttaaagaattctccaggttcacagctagctgaagagccaatattatgactgaagaatcagggaattcccttctacaattcactggctctaatcagtcatcacagtttctccttagtgcctgtgaatgttgctaactctaatggcacattcttcctctttaaatgtctttttattggagccatgttctctcatcccatgttataaactgaattgtgcccccaactcgcaaaatcctatgttgaatcccaacctccamtacttcagaatgtaactgtatttcaagataagctctttaagatgtgattaaattaaggttgctaggatggggccataatcaatatgatcagcgtcctgacaagaagaaagagaaacacgagggaaatgcacgcagagagaaaaggccatgtgaagacacagggagaagatggccatcttcaagctaaggagagaagtctccggagaaaccaaacctgcaaacaccttgatcttggacttccaacctccagaacttgagacaattcatt

SEQ ID NO: 146889 - DNA, 569 bp, Homo sapiens
ttttcaatgaaagttatttggtaaaatctttgataacatggaaagcagatcaggtaactaatgaacatatggtcccagggaaatacattggaaatataaatattagcagtgtgtgttgggtgatgttggctacatttcacaatgtattagtcaaagagatgacctcagaagagaacaccctgatttgcaacatgaatgaaaggggttagaaaatacccacaaatttggcaatatgtagagtggaaaggcactcttctttacaayaaataaaaaatataagatctagaaattctttgaggtatcaagtggattaaagttaatacttatagtagccatcaaagcaagagtacagctgtcccattcactgttcaaaagtctaagtgggttaagtgatgatccacaaatgatatcaattggacaaaaccacttaggaaaaaaggccggaagtacaggtctacccaggaagccagatgagcccaagttattcatcactaagtctagaaataagggattgaaagagtgaagaaatgcagcagatcaagaactctctctagaaaaaaacagtaaat

SEQ ID NO: 146890 - DNA, 502 bp, Homo sapiens
tttaactggtgcatcatcaaatataayagagaaagcaaaggtatatccagagcagacacatcatgattctgaatattggagttctctggaatctcaagaaatagtccctctgtacacttaatattataattccatttgcaaagtaaatatcttccttttaaattttcagggtggtatcacagagcaaaaagtagtgttgttcaattgaaggtccatgggttacgtttaagggctaaaagatgggaaatatctgtgggttattataaacacctagtacctgtgtgctatgtttactccaaggaagaagttgaacaaagatgagaaaatttaatgaaggaagaacagtgcccatagctaccaggaattgatgaggttgaccatctatattaatagctaattcaccttgactttttaaaggtaaggcacaatactgggtgctttttttctttccttggagtactccctttgacctgagttatgtttatttgtcttggtgtatgtt

SEQ ID NO: 146891 - DNA, 459 bp, Homo sapiens
agacagtcttcactccacatcagaaagaaaaccagaaagattgttctttctgtgtcaaagccaagacatcagtaccaaaaatgtagatggaaaaagagctttgtctaatattactggtgacccagagcaaagtttgtccaaatggattcctatccagtgagaacaacactcacctgtttgtgtggctgacttatgtaacagggttataaggcatggttgtgtyataatcagtgattctccttatgactaataacaattttagacagcacaaaacagaagcacaaaagggagcagaacaggatgaaaatgaatggcctgattctagcaagaatgccaaaaaccgggaagcgataacaaaacctgggtgccaagcagaataaatagctgtagagctcaacaaaaacacagcagagttcagaccgggtgctgatgtactcattgatctactcattgtgatca

SEQ ID NO: 146892 - DNA, 459 bp, Homo sapiens
agacagtcttcactccacatcagaaagaaaaccagaaagattgttctttctgtgtcaaagccaagacatcagtaccaaaaatgtagatggaaaaagagctttgtctaatattactggtgacccagagcaaagtttgtccaaatggattcctatccagtgagaacaacactcacctgtttgtgtggctgacttatgtaacagggttataaggcatggttgtgttataatcagtgattctccttatgactaataacaattttagacagcacaaaacagaagcacaaaagggagcagmacaggatgaaaatgaatggcctgattctagcaagaatgccaaaaaccgggaagcgataacaaaacctgggtgccaagcagaataaatagctgtagagctcaacaaaaacacagcagagttcagaccgggtgctgatgtactcattgatctactcattgtgatca

SEQ ID NO: 146893 - DNA, 467 bp, Homo sapiens
atttcggtataattgatttcctttgaagtcctatatattttcctacgtatatttatagctctatttttaaaagggctccatgggctctgtagactgttaaatgggttaacgacaccaatgaactagttaagaatactggtagtaaataaattctggtattagcctgtcttccatttcatttagttagtaggagagatagattctagtgaytcttcatctataaatgtgctttacaaactcttctcattccacataccagccaaaagattaaagcagatatttttttttgcatctcatggtacacatcagtgctagaatgatgagaagctcattataagtctcattatccaaatgttgaatgtttttcatgggatctgtggctgtcaaaaccaaacacaaaacacacacaaaaaacacaccaacaaagtataataactagggtgaccataaaatttattctctaaacc

SEQ ID NO: 146894 - DNA, 624 bp, Homo sapiens
ggaggtgttggtgtgccaagctaaggagatattttagcccctagctggagattgcaatggaagcaagcatgcaatcacattcttcatccrcatgcacagcctgcatgtcaatcattatggcattcttcttgccaagtccaatggtgttctctgaatcctctgagcatgggtatcttggcaccactaccaagtgatgtttgcatatctgatgaaacttgacatcactgttctaagaacttgggagtctttggagggttttaagcttggatgtggagctgctagttatgaagtttagacaggaaaaaaaaacaaaacaaaaccaaacaccccactatttttgtgctgtggagggaaaactagagggaggcaaactagcaccaaagagaatagttgcaacatgtgttagtttgctggggctgccatagcaaaataccagagtctgggtggcttacactgaaatttatttctcacagttctgactggaagttcgaggctaaggtgttggcaggtttggtttctcctgaggcctctcaccttggcttacacatgccccccttcttgctgtgacctcacatgtccctttgtgtgtcctaatatctccttgttaggacatcagtcatattg

SEQ ID NO: 146895 - DNA, 377 bp, Homo sapiens
cagccacatgatgctattttaaattttaaactaaattaattaaaattaaatgaaattagaagttcagttcctgcattgttctaaccacatttcaagtgctcaatagacacatgtgatcattggctaccttaatagtgcattcatagggcatttctataattgcagaaagttccactgaacataatttttctacaggaaacacagggggaaggaaatggtgttctagatacasaagagcagggagaggccaggcacgatgggccccataattgaaggctatcaaagccaagtagaagaatgtgtttttgtggagtaaagcatcataaacagaatagagtcttctcaattcaatctatttctttacttgtagtgaaacc

SEQ ID NO: 146896 - DNA, 567 bp, Homo sapiens
ataaaccagtagcagacaatgttacataatagtgaatgaatgttaccataaattttatgtaaaagtgtaaaatttattttcctacaattaggaattttcttcaatgtatattttttaagtaacaaaaataatgaggaacagatactgctttttaaaatatgccttacactatatttccttctaatttgggtatgtcacattttatttacctatcatattaagattctcatgatgcgtataaaagtaacatcacaagtaatcacaattatgtagagacattttgattcattttatcttttatcatatcattcatacatcagcaagcatgaaggggtgagtgcgtttttatcaataaatcagtggtgggtggtggttgttgatggggtatggrtataaaatctctattattgtgatgtttgccatatactataccccattgactatgcagtattgctataatatatgcatatcatcaaagtttgatgacacataaaattagctgcttacatatttgtatttgataatgatatcctaaaacatgtcaggcttgagggtaactgactcatg

SEQ ID NO: 146897 - DNA, 495 bp, Homo sapiens
gaatgaataagtacaaagtcccctagttctctttactgaagtatggctaattaccctgaaaggacgaaacaaatcatagttatgagcaaggtgaagacatttccttccacctccsatcaaattcatttctcttcctcctgtaaccttataactccaactcaaggtgtatgtttccaaggaaggtcatgttttaaaatatgactttaagcccatagattttatgcaacagtctcatcctgagcaagcacactacataaatccaggtattattgctgttgtcattaaatcatgttagtggcttaaagcaacatttctcaaaatgttgtcacctgaccaatgcattagcatcatctgggaacttgctagaaatgcaaatccttggccccactcaaaacctgctgaattataaactcgaggggtgaggcccagcaatccgttttcacaagccttccagctgattctgatgtacagcaatgttttggcaatcactgtctt

SEQ ID NO: 146898 - DNA, 495 bp, Homo sapiens
gaatgaataagtacaaagtcccctagttctctttactgaagtatggctaattaccctgaaaggacgaaacaaatcatagttatgagcaaggtgaagacatttccttccacctccgatcaaattcatttctcttcctcctgtaaccttataactccaactcaaggtgtatgtttccaaggaaggtcatgttttaaaatatgactttaagcccatagattttaygcaacagtctcatcctgagcaagcacactacataaatccaggtattattgctgttgtcattaaatcatgttagtggcttaaagcaacatttctcaaaatgttgtcacctgaccaatgcattagcatcatctgggaacttgctagaaatgcaaatccttggccccactcaaaacctgctgaattataaactcgaggggtgaggcccagcaatccgttttcacaagccttccagctgattctgatgtacagcaatgttttggcaatcactgtctt

SEQ ID NO: 146899 - DNA, 495 bp, Homo sapiens
gaatgaataagtacaaagtcccctagttctctttactgaagtatggctaattaccctgaaaggacgaaacaaatcatagttatgagcaaggtgaagacatttccttccacctccgatcaaattcatttctcttcctcctgtaaccttataactccaactcaaggtgtatgtttccaaggaaggtcatgttttaaaatatgactttaagcccatagattttatgcaacagtctcatcctgagcaagcacactacataaatccaggtattattgctgttgtcattaaatcatgttagtggcttaaagcaacatttctcaaaatgttgtcacctgaccaatgcattagcatcatctgggaacttgctagaaatgcaaatccttggccccactcaaaacctgctgaattataaactcgaggggtgaggcccagcaatccgttttcacaagccttccagctgattctratgtacagcaatgttttggcaatcactgtctt

SEQ ID NO: 146900 - DNA, 581 bp, Homo sapiens
gagataatgctttgctataaagctgtgtgtttccattgccttcactcctatctttctccttcccattcaagcagtgatgttagcttcatataagtattgtcctctgagggagggcagacaccaccaaggaccaaaatccaagttcagttcttaaatatatttcttaaaaccatagcagataaagtgtgaagagtatacacgtcatctgggtaatagctggactttactgagaraaaaggaggactgatggtttctcagagtttccaaagatggtattaaatatcaataaccaagcttagaatactgagcagacagtgcacactagaaaccatacagaagagtgcacagtgaatggaaaaattatctcccccaccccaaaaggtaataagtgctcaaccggtagacttcaaaagaaaacttcagtggggaggctgaaataaagcaactcgtgcttgtattatgagccacagatcagttccttacccaaactcttcttagacccataaatcaaagatggcgaaatgagagagaaatccagtgtgggtatgagacatcccagaacagtggagttactgctgatt

SEQ ID NO: 146901 - DNA, 466 bp, Homo sapiens
tacaccctatgtaaatgaagcagaggtccatgatcagtttgattggttgtgggaggggaccaatcagaggctgaagcaaagttacaaagttacaccaccctatacaaacatctgactggttgtgtaaaacgmccaatcagaggctgaagttacaaagttatactcctaggcaaatgaagacttggcctaagaccagtctgattggttgtgggaggggatcaattagcgatactttcaatttttcacctgccatgcagaaaaggggctgggggtggggaggttgcaaagggagtagcctctggtccttttgttacttgagcgtggaaagttggggttttccttttgacttagttctaggaagtcagcctgaattggccttaggaagccaattccatgcctccagaccctatctcctgcttccctccccttcagagatgtccctgtcctcctcaccagaacctgtgaa

SEQ ID NO: 146902 - DNA, 618 bp, Homo sapiens
ggaactcgttaaaaaaggtttagcaggtgtggttaagaggactatttctggtttgattctgttctttttttaaatttattttattttcattttagttttgtttaaccctaagcttgccaatgttttctttttttcttttttctttttttttttttttcctgcacaatgtttattagatatctctgggatcaacatctgtaaaggagaagggaaagaaagtgttgggtagctacatcctaaactgagcccacaggaaaaatttggaagaagaatggtcctccatagtggtcttgagttcaaaagaaagaactcgtcctttgtagccccatgtccatcagtcactgaatgtgagccatgtagccttggacctggaggctggattaacacaatttcagaggggctggctatgaaagggtggcagcggacatactagcaacagtaaggacaacaagatgttcattgtttcactgaagraaaatctgaatggtgcatcactagttaacaagataattatttaccacaaataaaatggtacaattgtattatcttgatctttattgcttgacatattttattacacactgctactttattcaagtcagagatccatagccttaa

SEQ ID NO: 146903 - DNA, 329 bp, Homo sapiens
gctacttgatgtcaagtgctgggctaaagtgccaaagaagtgatagtagacaaaactctagtggttcccagacctcatggagcttagaatctaggggccaraagcaatcaattaagaaagcaataatgtaaaaatttgcactgttagggtaagtaagtgaagactatggtaagcaaacagcagatatatctaacctggttgggaagagtccgtgctggggaacagggatgggtacagttcattcacagaactggcatccagattccttgattcataggccagggctcttttcaagaccccatgctatactgcttcattgtacttccata

SEQ ID NO: 146904 - DNA, 329 bp, Homo sapiens
gctacttgatgtcaagtgctgggctaaagtgccaaagaagtgatagtagacaaaactctagtggttcccagacctcatggagcttagaatctaggggccagaagcaatcaattaagaaagcaataatgtaaaaatttgcactgttagggtaagtaartgaagactatggtaagcaaacagcagatatatctaacctggttgggaagagtccgtgctggggaacagggatgggtacagttcattcacagaactggcatccagattccttgattcataggccagggctcttttcaagaccccatgctatactgcttcattgtacttccata

SEQ ID NO: 146905 - DNA, 329 bp, Homo sapiens
gctacttgatgtcaagtgctgggctaaagtgccaaagaagtgatagtagacaaaactctagtggttcccagacctcatggagcttagaatctaggggccagaagcaatcaattaagaaagcaataatgtaaaaatttgcactgttagggtaagtaagtgaagactatggtaagcaaacagcagatatatctaacctggttgggaagagtccgtgctggggaacagggatgggtacagttcattcacagaactggcatccagattccytgattcataggccagggctcttttcaagaccccatgctatactgcttcattgtacttccata

SEQ ID NO: 146906 - DNA, 549 bp, Homo sapiens
agctgttaaaagaaagcaatcttaaaattttatgtctagagcctttcttctctatccaacacctgtcagatgcatgtaaatataactagccgtgcctagcccatccttgtatagtgaccaatatagtagaaatatccatctgctgaacagaagtaatgccaattttatgtwagagctgaaattgtaaaagtgcaatccttggtttctaaaacctcaaggcttctttttctgtatagtggaaaatgatcctatacagaaaataatcctttccttttctttttcttttggagacagtgtctcactccgtcacccaggctggagtgcagtggcaagatctcggctcactgcaacctcaacccctccggttcaagaaattcttatgcctcagcctcctgagtagctgggattacaggcatgtgccaccatgcctggctaatttgatccttcttttttctatgtaggagaaaatgatctaggaatgatctagcctcattaatctcagtctctgatggacagtctctaaagcaggtgtttcatttctgtgaaaca

SEQ ID NO: 146907 - DNA, 549 bp, Homo sapiens
agctgttaaaagaaagcaatcttaaaattttatgtctagagcctttcttctctatccaacacctgtcagatgcatgtaaatataactagccgtgcctagcccatccttgtatagtgaccaatatagtagaaatatccatctgctgaacagaagtaatgccaattttatgtaagagctgaaaytgtaaaagtgcaatccttggtttctaaaacctcaaggcttctttttctgtatagtggaaaatgatcctatacagaaaataatcctttccttttctttttcttttggagacagtgtctcactccgtcacccaggctggagtgcagtggcaagatctcggctcactgcaacctcaacccctccggttcaagaaattcttatgcctcagcctcctgagtagctgggattacaggcatgtgccaccatgcctggctaatttgatccttcttttttctatgtaggagaaaatgatctaggaatgatctagcctcattaatctcagtctctgatggacagtctctaaagcaggtgtttcatttctgtgaaaca

SEQ ID NO: 146908 - DNA, 470 bp, Homo sapiens
atttatcccagtttttgcatcctgtagcttctgtattcatgagcaagccactgctgtaggcactggggctaccacagcgaacagaacaaacacatatctgtccttggagagtttatattctagcaggaggagacagacaataaaaagcacagaagttaaaataaatagacagatagatgggttccatggggaaatacaaagcagggaaaagagtgcaggggtgatacccttgactaggatgggcagggaaatctccactgagatttgggtaaatcagttaccccctaacaacaaataagtcactggtcrggtgcattaagcaagactgtggccagaagcagacaatgtagctaaaggcaactgggtataaatacaaattcctataagagccacagaaaagtaagccagtcaagtgctacctctggagaagatggtagttactcggctccaccctcattgccagtcttgcc

SEQ ID NO: 146909 - DNA, 489 bp, Homo sapiens
ctgcacccttaactactctgccatgtttcactttacaagcttatgactctaattaagacccaggaagaaacaaaggtggcattattctcaggagggatggaaggggaactgtgccttcctgagaccctccaacttccacaatacctcctccccgatgtagcgcctctctaaccccatgcctaacctgtactagccaataagactgtctatgggcctttaagagaatttttctttacaagctgcattctcccaatcacatatctagggtaagaagagagttgaacaaaattccagaaattcactttatggactccccaaaattcaactgggtgtctcaaattttaaagtgtggtgaattcagtatgctttaagttgcakgcatggtgactgcaatctactcctattataatcgtagctacaatttattaaacacatatgaagtactaggtactctgaatgaattatctttcatctttaccacatccctgg

SEQ ID NO: 146910 - DNA, 490 bp, Homo sapiens
acctctgggggcagggcatatatgaacaaaaggcagcagacaacttctccagacttaaacgtccctgcccgacagctctcaagagagcagtagttctcccagcacagcgtatgagctctgataayggtcagactgcctcctcaagtgggtccctgacccccgtgtagcctgactgggagacacctcccagtaggggccgacagacacctcatacagtcaggcacccttctggaatgaagcctccagagaaaggatcaggcagaaatgtttgctgttctgcagcctctgctggtgaaacccaggcaaacagggtctggagtggacctccagcaaactgcaacagacctgcagctgaggggcctgtctgttagaaggaaaactaacaaacagaaaggaatagcatcaacatcaacaaaaaggacatccacaccaaaacctcatatgtaggtcaccaacatcaaagaccaaaggtagataaaaccacaaaatg

SEQ ID NO: 146911 - DNA, 557 bp, Homo sapiens
tttgaaatgcattgaagaaataatggcgtaagctgtcctctctctctcyccacctcggctgccaaacaaggaagggcctccaaccggtagacaggagacccacgtgaccttacctatcattggagatggctcacactccttaccctgcccccttgccttgtatccaaaaaataacagcgtggccaggcattctgggccactactagtctccacgtcttggtggtagtggtcccccgggcccaaatgtcttttcctctatctctttgtcttgtgtctttatttctatgatctctcatctctgcacacagggaggaaaacccacagaccctgtagggctcatccctacagtagactacaggcttacatcatcacccctggctaatattttttgtagagatggggtttcatcatgttcctccaactggtcgcaaactcttgagctccaaaagtgctgggattacaggtgtgagccactgcaccctgtcacacttagttcatttttaagtaataagtgctctatgagttcttaccattttatcaaacagaatactgaaaag

SEQ ID NO: 146912 - DNA, 367 bp, Homo sapiens
tgggccactactagtctccacgtcttggtggtagtggtcccccgggcccaaatgtcttttcctctatctctttgtcttgtgtctttatttctatgatctctcatctctgcacacagggaggaaaacccacagaccctgtagggctcatccctacagtagactacaggcttacatcatcacccctggctaatattttttgtagagatggggtttcatcatgttsctccaactggtcgcaaactcttgagctccaaaagtgctgggattacaggtgtgagccactgcaccctgtcacacttagttcatttttaagtaataagtgctctatgagttcttaccattttatcaaacagaatactgaaaagac

SEQ ID NO: 146913 - DNA, 367 bp, Homo sapiens
tgggccactactagtctccacgtcttggtggtagtggtcccccgggcccaaatgtcttttcctctatctctttgtcttgtgtctttatttctatgatctctcatctctgcacacagggaggaaaacccacagaccctgtagggctcatccctacagtagactacaggcttacatcatcacccctggctaatattttttgtagagatggggtttcatcatgttcctccaactggtcrcaaactcttgagctccaaaagtgctgggattacaggtgtgagccactgcaccctgtcacacttagttcatttttaagtaataagtgctctatgagttcttaccattttatcaaacagaatactgaaaagac

SEQ ID NO: 146914 - DNA, 618 bp, Homo sapiens
actcttttagtttttttaatgtataaattatgttttactataatcaccctgttgtgctatcaaatactgtcttattcgttctttctaacaattgttttaacccatttagcacccccactatccccctgttccgtcactgcccttcccagcctctggcaaccatccttatactctccatctctatgacacctattgttttgaatgttagcacccacaaataagtgagaacgtgtcacatttgtctttctgtgcctgacttatttcacttaacataaagacttacagttccatttatgttattgcaaatggtatactctcattctttcttatagctgaatagtattccattgtgtatatgtaccacattttctctatccagtcatctgttgatggacatttargttccttccaaatcttggctattataaaccctgctgaagcaaacatgagagtgccaatatgtctttgatttaccaattttatttcttttaggcatatactgagcagtgggattgctagaccatatagtagttctatttatagttatatcaggaacatccaaactgttcttaactgtgctcccaacaacagtgtacaagggttcccttcactccacat

SEQ ID NO: 146915 - DNA, 605 bp, Homo sapiens
aatatgacctctgctgcatcctattggtaaagcaagtcattgtgaccagcacagattcaagaaatgggacagtagactctacctgtcaaggtaaagagcagcatgtgcatgcagggaggaaagaaattgagggcatcatcttgaagactatcatatcacactattattccagctaatgaacattatgttttagatgggtagtactagctactcatgtctcccccagaaacccaagctaggcatggacatattgaagactatcatatcacaccattattccaactaatgaacattatggtttagatgggtagtactagctaytcatctcttccccagaaacccaagctaggcattgacatactgaaaagaatgtcaataccattaaaaaactctagaaaaattatatgtgatgactgaggttaattcagtctgtcaattacatcaatataattcccttcttgtaacactaaatatggtgaaacagaattgaattctacaaaagtatttcatctgttttcctatggaataattaacaaaccaaataaatgtataaatagtatgaagtccaatttatcttagatttttacctcttaatttcaaagctg

SEQ ID NO: 146916 - DNA, 605 bp, Homo sapiens
aatatgacctctgctgcatcctattggtaaagcaagtcattgtgaccagcacagattcaagaaatgggacagtagactctacctgtcaaggtaaagagcagcatgtgcatgcagggaggaaagaaattgagggcatcatcttgaagactatcatatcacactattattccagctaatgaacattatgttttagatgggtagtactagctactcatgtctcccccagaaacccaagctaggcatggacatattgaagactatcatatcacaccattattccaactaatgaacattatggtttagatgggtagtactagctattcatctctyccccagaaacccaagctaggcattgacatactgaaaagaatgtcaataccattaaaaaactctagaaaaattatatgtgatgactgaggttaattcagtctgtcaattacatcaatataattcccttcttgtaacactaaatatggtgaaacagaattgaattctacaaaagtatttcatctgttttcctatggaataattaacaaaccaaataaatgtataaatagtatgaagtccaatttatcttagatttttacctcttaatttcaaagctg

SEQ ID NO: 146917 - DNA, 605 bp, Homo sapiens
aatatgacctctgctgcatcctattggtaaagcaagtcattgtgaccagcacagattcaagaaatgggacagtagactctacctgtcaaggtaaagagcagcatgtgcatgcagggaggaaagaaattgagggcatcatcttgaagactatcatatcacactattattccagctaatgaacattatgttttagatgggtagtactagctactcatgtctcccccagaaacccaagctaggcatggacatattgaagactatcatatcacaccattattccaactaatgaacattatggtttagatgggtagtactagctattcatctcttccccagaaacccaagctaggcattkacatactgaaaagaatgtcaataccattaaaaaactctagaaaaattatatgtgatgactgaggttaattcagtctgtcaattacatcaatataattcccttcttgtaacactaaatatggtgaaacagaattgaattctacaaaagtatttcatctgttttcctatggaataattaacaaaccaaataaatgtataaatagtatgaagtccaatttatcttagatttttacctcttaatttcaaagctg

SEQ ID NO: 146918 - DNA, 605 bp, Homo sapiens
aatatgacctctgctgcatcctattggtaaagcaagtcattgtgaccagcacagattcaagaaatgggacagtagactctacctgtcaaggtaaagagcagcatgtgcatgcagggaggaaagaaattgagggcatcatcttgaagactatcatatcacactattattccagctaatgaacattatgttttagatgggtagtactagctactcatgtctcccccagaaacccaagctaggcatggacatattgaagactatcatatcacaccattattccaactaatgaacattatggtttagatgggtagtactagctattcatctcttccccagaaacccaagctaggcattgacatactgaaaagaatgtcaataccattaaaaaactctagaaaaattayatgtgatgactgaggttaattcagtctgtcaattacatcaatataattcccttcttgtaacactaaatatggtgaaacagaattgaattctacaaaagtatttcatctgttttcctatggaataattaacaaaccaaataaatgtataaatagtatgaagtccaatttatcttagatttttacctcttaatttcaaagctg

SEQ ID NO: 146919 - DNA, 527 bp, Homo sapiens
aagaaatgtccatttaacaggtggagaatcaaatccaatctagtaataatttctcatcttcatcaagtttttatttaatcaaactcttttaaaaatcataaaatataaggcccctgtttaggatttgatcaaaaatcatttgtaaaaggtcagaagaactctcactactgttttgtctactacagatgcaattaaccaagcttctagaatctaaagattattattcaacttaattcatgatgctttcatcagctcaccaactatttactttagagcaatgaattctagtcttgatatttctattgtttaaatgggtctcataacctctgtgggcttcaaattctcatctgtaaaattgagttaaaaaatccctgttaaggaataactcaggaatattgtgaatgtaaatcaaatatcggtgaaagcattggaaagtgacatgtcagggagaatatacaggttgagtattccttatytgaaatgtttgggatcagaaatgttttggatttcagatttttttcagatct

SEQ ID NO: 146920 - DNA, 401 bp, Homo sapiens
aaggggatgtcactcctgtaagtgtttgtaaacccatttaagaccacatctctgttctgtgatataggaagactagaatattcctagtcccttctgctcccagagcaaagaggtttaggatggagtcctctgggaggtagctgtaaaagttgggcattcaacacatggcataaaccccatctggggagaaatgaggagctgcattcttatagcaccttctcgtcaccactcctaagagaagaagccgctgcaagtrcctacaagtccatataaaactgccacctttctctatggtctagacagacattcatatactttgccccctctgctccccgaagtgggaggtttaggatgcatttccttgagtggaagctataaaagttggggagctcaatgtgtgg

SEQ ID NO: 146921 - DNA, 503 bp, Homo sapiens
cggtgactcattttgacagcactactcaccctctgtaatatagtttggacatgtgtccctgctcaaacctcatgttgaattgtaatctccagaattagagggcggggggggggcatggtagaaggtaactggattatgggggtgaatttctcatgaataggttagcatcatcctcttgrtgctgtcctaaaagtgaacaaattttcatgagatctgcttgctcacaagtgtaggaaccctgctctagctctgtcttgctcctgctctggctttgtgacgtaccttctccccctcaccttctgccatgattgtaagtttcctgagcacccctcgcccagacgccaagcaaatgctagcatcatacttcctgtgtagcctacaaaaccgtgagccaattaaacctctattctttataaattaccaagtctcaggtacttctttacagcaatgtaagaatagactaacacatgctttcttttctaatagatccacatttccattgc

SEQ ID NO: 146922 - DNA, 472 bp, Homo sapiens
tccatgtgtcccactctatcttctcgatctgaaaaagaacgaaagagaatgatatttttgcacaacctagtttgttttatttaaaasaaacagtttgcacctgagtaattctaaattactttgccaacgttaggcatttgtgttgagtgctgaggtacacaaattctaagttgcatatttaaagtggttatttgcattgtcttcagaagccaacactgcagtcaaatacccaaatgtttttctctagataaaatgaacattttgaaattgtggaaatttgataataataaggtattttagttcttaactagacatttatcattgtataagccataagctggatccagattccccaacgccagcactgatgtcttaggctggaaaattctttgttgttgggactgtcctgtgcgtgtcaggatgtttagagcatctctggtctccgcccactggatgccagtagcataccctt

SEQ ID NO: 146923 - DNA, 604 bp, Homo sapiens
caaaagttcaagcagctgcttctcagttgttgggaacaggcctcccaccatctggccgtaatctggccccaaaactggcaataaacaaaatctctgcagcattgtgacatgttcatgacggccataatgccaatgctggaaggttgtgggtttaccagaatgaggacaaggaacacctgggccacccaggacagaaaaccacttaaaggcattcttaaaccacaaacaatagcatgagtgatctgtgccttaaggacatgctcctgctgcaggtatctagcccaacgcatccctttatttcggcccatcccttcgtttcccctaagggatacttttaattaatctaatatctatagaaacaatgctaacgactggcttgctgttaataaatacgtgggtaaatctctgttcaaggctctcagctctgaaggctgtgagaccccgatttcccagttcacacctctatatttgtgtgtgtgtgtctttaattcctctggcactgctgggttagggtctcccyggctgagctggtctcggcaagcagcatccattgtgggggctctaatccaggtcaaagggtcgttagagcgacggttggagaaca

SEQ ID NO: 146924 - DNA, 580 bp, Homo sapiens
gcaaatttgcagaatactgcattaaagaaaataggttcataagtctaaagctcagaggagttgaagttcttcccacaggttagaggcaagaataatagatttgtttggctccatttcactacgtcaaatagaacctcattctcactcaccttcaaacttgtctaaccaaattcggttaagtatactatgcagcatggtactgattattttcattatggaaatggatgtatttgtctatgcaacaacagtttgcaattttgtcttcatcatagtgacttgcttatcccaatggaatggccctgcctctgcctataagaaggagttcaagatgccgctaataaacggaaatatttaaattttggaacacttttgtaagtttatgcagacawtagagagcatatttaaacttggtactgctttaaaaaaaatcaggacatttttgatctaatgtgaaatcaggccctttagcatgaatcaaaacaaaggaagaatatgttttttccctgatgctaattcacactgaaatcatgcttctgagtctccacttaaggcttttaaaagacttggagaaataaatcgt

SEQ ID NO: 146925 - DNA, 562 bp, Homo sapiens
aaataaattggaaaagagctgcgctgtaaggaaatgaatattttggaggttatggcagtaaagtaagcaaaattctacaaggttctgttgtacgtttatgatatagggaaagaaaaagatcrcaaagatgttaaggagggtgaattaattggctgtaagagacaaggaagatggagctatgctttcagattaattttaggtactacataaataaaggtgacattcgctgagataaggatatagcaaaagagccatgttattgtgaaaacaaaaggagaggggagatattgtatgtgtgtaatatataaaattctaacacgttgagtttgagctgtctgatggaagttaagatattaagggacatttggatattaatacatgtatctgagtattcaggacagagatatggttggcaatttgaattgggcacctttggttcatacagagatagcactagaaatcataggaagaaaggaaacaaaccaaagatcatcaagcgtgaaaagacatgaaggacaagaactacatctgaagatgtacgatcaaattgatgttcacagaa

SEQ ID NO: 146926 - DNA, 624 bp, Homo sapiens
acacacattttcacaagttagatagatgaatgattctaggtctaagtgattatccctccatttcctcattattttcttgattaaactataaatccctctgctttttctacccgaattagaaagcttagaggtttctaggcttgaatttagtttattaatttgtttttaatcattagtaccactgaacataaatacctttcagaagcttagtctttctagtttagaaaaattgggtgactacttaatcttccattactgttaagctgggcttatctctggcataagtaaagcacttgtttttaaaagaataataaatgtatactgaagaaaaattggaagcaaccttccaatttagaaatgggccacttgtcctgtaaattatcttacatatacccagtggaatactttgttgccatgacgataacgatgtctataatgacttataaatactgaaacagattttgagtgaaaggaagcaaattaaaagcagtatgtaaggatacgatgtaagagagagagagagagagaatgagaagaaaactttccaactattgrgtagttagctttgaggagtggtattaggagtaatttttgctatgcttttaactgttaaaagtatgtatt

SEQ ID NO: 146927 - DNA, 572 bp, Homo sapiens
aattatggttcctgtttactttgtgtcaattggaaagtgttatatttactcattgaatcccagttttggaaagaagatatgatgggctgccataatttctcagtaggattgggaaaaataacaatgcataaatattcacattttccttcacttccctatccttgcttggctctgagcaattcattgcattggtcattttactagtcaggattttgatataagtaggtatgaagtggcagagccaacaaaacccccacaaaactatattacttatatgaagaccggcaaattctatgcttggggggaaaaagayttggaaaaaaatgaggaaaaggagaaatagaaaagactaagagtggtctgaattttcatagaaagttttgcagagggagagacaatgaatgagaaagggggagggggcaaattaaccaataactaggtgcgagatcccaggcaggggcccttactgtgatgattgactatgggaggtgggtgtgcacagcagatttttaggatattttgcagtgcatcatgcactaatcactgttggcatttttgaagaaaatacagaa

SEQ ID NO: 146928 - DNA, 413 bp, Homo sapiens
tttgtaatggctcttggtcttaaaggtagttacataaataaattaaaattatcttaaataataaatgaaaattataggaactactgccagtttttgatgtagtaccaagccctcctctacaaatatggtytcctaattaagatccccatgttttttttttaataagccactcgcataatttaccatctatgatttccatttttagtttacttaatgtaaaactagagctacatttacaaaactgtaggaaatcagtcagtgtggtgggaaaaggtataaaagttacagggaaagacacaaaccttcttggaaggccaggaggttttgcaaaagcttcaaaagtaaatttgcctgaagacagccaagttctcttatccagagcctgagagcaaagggtaaataataagggaatg

SEQ ID NO: 146929 - DNA, 597 bp, Homo sapiens
tccaataatgatataatatttagaatagatgtatatattatagtaaatcaagataggatgaacaatacgtataacaaagtaagcaatggtggtttctgttttaataaactgaattacttggctttcttgcatttggatgactaaaaattacttcagtataaattctaagtatttacctacaaattcggtgtggaaatatgaaacaagacaatgtatatttaggatatatagggcatagacatatattattccatagcaagaaacattatttaaagagtttatctttttacttgtttcaraaagtctttgaataaggtaactttgtgcttaattcagctaccctaaatatcgactgttgctattctaagtttgctcttcaaatcagcatcagtatcacctggaaatgcgtgaagatacagagtctcaggtatcgccagtattcctaaatcaaaacttgcattttaatgagatttccagatgatttatagagatattaaaattcaagaaacactaacttttcgagtatgtgtcttataaacctcctactttgtttgcacgtgttgcacctactaacacacacaacactgaactgttcac

SEQ ID NO: 146930 - DNA, 405 bp, Homo sapiens
tgatattggagactatcattctaagtgaagtaactcaggaatggaaaaccaaacattttatgttctcactcgtaagtgggagctaagctatgaagatacaaaggcataagaatgacacaattgactttggagactcaagggtaagggtgggaagrgggcaagagataaaagactacaaattgggtgccgtgtatattgcttgggtgacaggtgcaccaaaatcttacaaatcaccactaaagaacttactcatgtaaccaaacaccacctgttccccaataacctatggaaatgataaaattttttaaaaaagaaataccacagaaaagatgctgctctttatgaagcatcatatctaagaacattccaacacatccccccagtagtggtggtaaccttgatcac

SEQ ID NO: 146931 - DNA, 532 bp, Homo sapiens
cagttcttttagccccactactgatactttaagatggttatcacaaacaaatttgaagagtaatacttagtccacatatctacatatgtatatcrtaggatgtagaggggtgtgcaggactaaacctaagcatcttaagactacgttaatttaacttattctcaagatacaggtagatataatgaagagttattaaaggtgtaataatgattacagcaatcatatcataactatgatataaattataattataaattataaaatatcatttggggtctagctgatggagaacttattcttaacccagacatagtttgtgattaaggtttttgatcttgaataaagcatagtgttatttacaagatattttagcaaaaataatttttaattgaagatattttatgcatctaaaaacattcatttttatgttaagctttgaaaaattagtcacccaatcaaaagccttaaatatctttattacataacaaaattatatttaaattgaacatctttgaaacttttataacaacat

SEQ ID NO: 146932 - DNA, 622 bp, Homo sapiens
  misc_feature (1)...(622): n = A,T,C or G
ttattctcaagatacaggtagatataatgaagagttattaaaggtgtaataatgattacagcaatcatatcataactatgatataaattataattataaattataaaatatcatttggggtctagctgatggagaacttattcttaacccagacatagtttgtgattaaggtttttgatcttgaataaagcatagtgttatttacaagatattttagcaaaaataatttttaattgaagatattttatgcatctaaaaacattcatttttatgttaagctttgaaaaattagtcacccaatcaaaagccttaaakatctttattacataacaaaattatatttaaattgaacatctttgaaacttttataacaacatagtcttttttcaaagtattctatcacaatttaaattcttataatttagatttgttttcttaaagttattatatgtttttttcaagttaatgcacattttcatattcccctcataaattagcatttataaaatgtattttctcttgttatttatgtttggtaacacacatttttatagaaccagaggcaaaaaatgtatagggattaggtgtgtgtatggtgtccattcttnnnnnnnnnnnnnnn

SEQ ID NO: 146933 - DNA, 469 bp, Homo sapiens
gcccaacaaaacccactttgttcctytgaagtcagggtagcatttccaaggctgccgtgtaaacaagtgtcccctattaagttggtttatcccttaatttatcctacaaatattaatgaagcaccacagtgccaggcctggcgctgggatgctagagagagaataggcatgaaaaggggcttggtacctgccctcccacctctcagagtctcaaggcatggttctccacctgggtgactctgtcgctcagggagcatttggcactatctgaagacattttttttggttttcaccactaggtgggggccagggagggtggtgccatggcatctggtaggtgggggccagggagggtggtgccgtggcatctgctaggtggggggaggccaggggtgctgctgagcagcacccacaatgcacaagacagccgcctgcaacaaagaattatccagcgaaatgtcagtagtgc

SEQ ID NO: 146934 - DNA, 471 bp, Homo sapiens
gtgcccaacaaaacccactttgttcctttgaagtcagggtagcatttccaaggctgccgtgtaaacaagtgtcccctattaagttggtttatcccttaatttatcctacaaatattaatgaagcaccacagtgccaggcctggcgctgggatgctagagagagaataggcatgaaaaggggcttggtacctgccctcccacctctcagagtctcaaggcatggttctccacctgggtgactctgtcgctcagggagcatttggcactatctgaagacattttttttggttttcaccactrggtgggggccagggagggtggtgccatggcatctggtaggtgggggccagggagggtggtgccgtggcatctgctaggtggggggaggccaggggtgctgctgagcagcacccacaatgcacaagacagccgcctgcaacaaagaattatccagcgaaatgtcagtagtgc

SEQ ID NO: 146935 - DNA, 577 bp, Homo sapiens
gaagagctcagtgcagctaaatcagcttcctaacacatttaagtctacaggtaggttcatttaagcagttcagaaacttttaaaaaggttcagaagaaataaaacagagaacatctttcctaccctccctccaaatatatcaaaggtgtcatattaaaatacatggattccagtagtacacatggactaaacatttcccatcttttattaggtgactaaagggctrctttgagatatgttttggcacccacaaaagtaatcctgtgacactgggtagacattcttttctttttcagttctccattctggctcttgtaatcaaggtgggtttcttgcaccaagcctctctacccaggcctgttgtaagaaacccatgcagctttggtccatccatatccttcagtgtaactttttggcatgaattacacataaaacagtgacccagaaagagtttgaactgggtacaagaggtgggtggtccctggttcccacattttgacttctggggaaaaatgatatgagccattttccaaaatatagtaagtaaataaaaatatatgtatctgtaggcacaagg

SEQ ID NO: 146936 - DNA, 574 bp, Homo sapiens
gtcttcctttaaaatgatgatattttgttcatcgcagaatttttgcattaactttgattttttaaatatattgcactaaaatattatttatcttgattattgaatcttttgtactcaaggctagtgaattatttgcttcatcctaatccctgagtctcaggccctgcaaggtgaatggattagcttgagtcatataaagtatccatttattgcatatgaaaaacagataaatatctgtcattccatatgattcaacctaatggatcctcctaggatggagtcaggaggccacactgcacatgagtgcttcaattataccactcggtggtcctaagcctggtgcacattagagctcyttctgaaatttttattaaaaccagagcctcaggtttgggatgggaaactggcattcctctactgcaaacctctggattggaacccctggattaaaccagaattaaatcagtctatagattgaggcagagagtctggattcaaattctggtgtagctctttataaccacacaatttaaggcaagttgcaagttatgagtgttgagcaatgtatgcaaat

SEQ ID NO: 146937 - DNA, 486 bp, Homo sapiens
acacttttacaatattaaaaatagtttaaatgtatgttaagagaagccaacataacttcacatgggaaagaagagaaggaatctaacatttagcaagcacctactatgggcagaacattatgttcagtactttgccgtatgagatcttgtttaagccttatacaaacttatagcaaggatattataatctcccttttgcagatgagaaaatagagccttggagtttacgcatattgccccaaatcacacatgtaagccaagtatcagcaaattttacgtaaagattcaataaataatttaggctttgtgagtcacacaaggtctctgtcacatatttgtctttatttctttggtggtttgtaggctggtttttacaaccctttaaaaatgtaaaaactgttcttaactccttgattggatttggcccaatgttggtagtttatagaccattkaaagatccctgtctcaagaggctggggagaaata

SEQ ID NO: 146938 - DNA, 425 bp, Homo sapiens
tctagacttagtctgagtttaaatcctaattccaccacttactcatgagcatttaagaagaatttacaaagtgccaggcaacattccaggtgtttcacatgtattcatttatttaatcctcacaacaactccatgaggtaggtcctatttttctccccttctacagagaaggaaacagaggcccagagtgattacgtaacatccagatttacacacagcaagtaagcagtggagcccagccatmtggctacaaagctcatgcttttaatgatcatgttaatattatcagtcaatcataaactacctgatcaggacaagtaaatagattaaacttatacctccccccccacaaaaaaaaagggtttttaagtgattttcactgatcttattagtcttgcaagaaaaagacttagcaactgagactg

SEQ ID NO: 146939 - DNA, 406 bp, Homo sapiens
agatctgtcactgtggtttttgtcagataagtttaaatcctggtaattggtttatgccaaaggacagaggagagtcatttcaaagctttcctgttcgyagactattaaattgccagatataacactcacaacaaagtgacacataatttagaaagaatgtaatgcatgcttttaatcagaacaacaataacacacacaaaaaaactagtaacaagtatggaaatggcagaaagcattaaattcagtaatggacacaaataaaaagcaactgctcgacaaaaacagctgtgaatggtctatgtacccctcacatccccccacctcataaaaaagatattcacatttggaaatatggttacaaatgtaaatcactgatttcttgcaagaccatgacggccctgtaata

SEQ ID NO: 146940 - DNA, 327 bp, Homo sapiens
ggtaattggtttatgccaaaggacagaggagagtcatttcaaagctttcctgttcgtagactattaaattgccagatataacactcacaacaaagtgacacataatttagaaagaatgtaatgcrtgcttttaatcagaacaacaataacacacacaaaaaaactagtaacaagtatggaaatggcagaaagcattaaattcagtaatggacacaaataaaaagcaactgctcgacaaaaacagctgtgaatggtctatgtacccctcacatccccccacctcataaaaaagatattcacatttggaaatatggttacaaatgtaaa

SEQ ID NO: 146941 - DNA, 546 bp, Homo sapiens
ctggaatcccagcctggggaggtgaagggagtggtgaggctggaggagaaaacagggaccagacctgatggaccctgagcaggctctcaagaagtctttgttcacatgcaaggcaattcaaattacttattagattttcctggtcttgaggatttgagaaattgtaccctgtaagatttagcctccttcacgttcattgtatgaaaatatctgaatgtaactgcgattttatgtgagaaaatagggttctccttttatctttcaagatcaacacatgattatctattaaccyggcttccatatcatttacatgtataatagttcaaagtctttgattccaaaagagagaggaaaatattaatagagagaaagattgagaaagagagaaaggagagaaacgctgacggtgtatgctaataaatttaatatagagagaatttctggcaatgattttcagtttcagtatttaagttgatcctagtcatgattcattattccaggattcacttccaaagtcaagggtctgaggaagctgaggaagctttt

SEQ ID NO: 146942 - DNA, 439 bp, Homo sapiens
ttaaagaattcattgacagctgactcgagttgttttctctagtggccgatacctagaaatgcaacgtttcacagttagggagttgtttctttgacatgagactttccagcacaagtgataatgacctcaaaaaatttacatatgaacagttggatgtttaatatagcgtttttaaaaagtaaattattacrggtggaagagagggcatgcgggataatagtaagagttgaggtggtggagtagaaatgataggaaaagatgggcaaagaaagtggagtggggaacctgggggctttgaaaactgactttacaatctttcctgggttttgagcagatcattaattctatcagtgaatattcattaaacacctgctctgtactcagtagtgtgttgaaaattatctgtcatttgccttttggttggactttgtagattgtg

SEQ ID NO: 146943 - DNA, 426 bp, Homo sapiens
aatcgtgctaaagttacttgacggatgagtaagagttagccaaaaagtgagttggagagacaatcattccaagcatatggaagcacaagtgagaaggctatggagaggggaagaacagggagcactagtggaatgaaaaggtgaccaggatggctggaacatggtatatgtgtgagagtgaggggtatgggatatgtctagaactatrggcaggggccagattatgagaagaatgataagtgacatggttgataatatgtgtcaacttgactgagctaagggatacccagatggctgttgaaacattatttctggatgtgtctgtggaggtgttttcagaagagattagcatttgaaacagtagactgagtaaagatctgccctcaccactgtgggtgggcataatctaatccattgatagaattc

SEQ ID NO: 146944 - DNA, 491 bp, Homo sapiens
atcagtttaggcagataaaaatgtttccarattttcttcccatttcctcctcccactctaaattaaaaaaaattttacaataagcatttatatcaatatttaaagagctctatcatctgaggagtcttattttttttctttttttgaagggaactctttatcttactgtatattaagatcccccaccctcgttgccttggtttttgtctttttgtgtgtttcttttatgtggtaccaggataaacaataactcgacaaagcaaaatctcttagactaacaggccatagttttcactttcccaggataaacaatgtatgttccttctgtcttttttgttgcgttttaatttacagctgttgaatcatctttaatctgtatatgcacattccttttttgcagtgacttattagttggacatgctactttggagagagtgcaattggaactctgtgtgttgagcaaattgtttaactcaacatatgcccagaat

SEQ ID NO: 146945 - DNA, 491 bp, Homo sapiens
atcagtttaggcagataaaaatgtttccagattttcttcccatttcctcctcccactctaaattaaaaaaaattttacaataagcatttatatcaatatttaaagagctctatcatctgaggagtcttattttttttctttttttgaagggaactctttatcttactgtatattaagatcccccaccctcgttgccttggtttttgtctttttgtgtgtttcttttatgtggtaccaggataaacaataaytcgacaaagcaaaatctcttagactaacaggccatagttttcactttcccaggataaacaatgtatgttccttctgtcttttttgttgcgttttaatttacagctgttgaatcatctttaatctgtatatgcacattccttttttgcagtgacttattagttggacatgctactttggagagagtgcaattggaactctgtgtgttgagcaaattgtttaactcaacatatgcccagaat

SEQ ID NO: 146946 - DNA, 578 bp, Homo sapiens
tattatctcttaagccagttcagtgaggaaggctttgcttattttccaatacagtcaggtactttgtaggtgctcagtaaatatgtgggaatgaattactgatttcttaattgctaggtgccaattaagttatccaagaaaacaagaaaatttgaggacagaaaatcctgatgttggttttggtcttgtgactgtgaaatgcgattttgtgcccagcagtataaagatttttctcttattttgaaaaggacactcttcaacaaattaactccccacctcaataaataataaataaataaatccctttaaacatattttgatgcttacagtaaaaaaaagtacaattatttgattctaatcagaattaagaactttcaaataatttgttaaatttatttttagtggtgctcagagcttttaaacagagggttaatttgaaccaaaggagataaaggtgaggcatgttaattgaatgtcatatctgtccattttaatagaaaaaccaatgtctaaagtatagttataaagaatgtgatttgcctaamttacaggccagactgtgttcccccatgctgaca

SEQ ID NO: 146947 - DNA, 538 bp, Homo sapiens
tatatgtaaaactttccataataaaccctgataacaatctctaacaaaaagcaatgaataagaaaattcattcatgaatataaatacaatcctaggttaaaataccatcaaatctaattcaaaagaacattaaagtaattctttctcatcttagcaaaggatttmttttatgactatgaagagtttgatattaggatatgtagtaagcaggatcataatattaataagctttaaaatgttattatcccagcagtttccaaataggcattcaacaaaatctaacatctattacttatttaaaaaaaaaaaaaaggtatggcagagactgttactattcatcaaacatttatttgctccacaatctttctcagtcccttgaatctaagtggtctagggatatgactaattcttaccaattaaacactggaagaaagaagaacaggtgtgctctctccacatgcaatctcatgcaggtggttgaaagaaaaaaagagctggtggagttagaatttggaagcaggctgggcccctgggacac

SEQ ID NO: 146948 - DNA, 538 bp, Homo sapiens
tatatgtaaaactttccataataaaccctgataacaatctctaacaaaaagcaatgaataagaaaattcattcatgaatataaatacaatcctaggttaaaataccatcaaatctaattcaaaagaacattaaagtaattctttctcatcttagcaaaggatttcttttatgactatgaagagtttgatattaggatatgtagtaagcaggatcatratattaataagctttaaaatgttattatcccagcagtttccaaataggcattcaacaaaatctaacatctattacttatttaaaaaaaaaaaaaaggtatggcagagactgttactattcatcaaacatttatttgctccacaatctttctcagtcccttgaatctaagtggtctagggatatgactaattcttaccaattaaacactggaagaaagaagaacaggtgtgctctctccacatgcaatctcatgcaggtggttgaaagaaaaaaagagctggtggagttagaatttggaagcaggctgggcccctgggacac

SEQ ID NO: 146949 - DNA, 601 bp, Homo sapiens
tcactggtaactttttattggttgggccagatgagcaagcggtggctggtatacgtgaggcctcaataagtcatgcgtgctctaaagggaaggaaataaattttagggactaccacaaccataaaatgtttaggggttcaatggttagaggtgtagcaagacatcctctccaaagtaacatacaaattatcatagcttgtacatccaccgtggataaagaagaaccacactggtaggctttttccatctctgaaattggtgcattccacatctatattcagaatgatataaaagactgtcagccttaaatggtgtacagagaagtaaagagctccacaacaggtccaaactgctgtgcaggcagccctcgcacttggaccatatgatctggctcrctctgtggtgcaggcagtatcagtggtgtgaaaagttgtcatatggtaagtccaagtggaagaaccacaaagtagatcccctgaaattttagggcaaagtcttgccatctgcagtgcacaattatacatcttttgaaaaataattccaggcaggctagtgagctgtggtaaaaatgaaatgcctgactatagttcaccaagtgaac

SEQ ID NO: 146950 - DNA, 601 bp, Homo sapiens
tcactggtaactttttattggttgggccagatgagcaagcggtggctggtatacgtgaggcctcaataagtcatgcgtgctctaaagggaaggaaataaattttagggactaccacaaccataaaatgtttaggggttcaatggttagaggtgtagcaagacatcctctccaaagtaacatacaaattatcatagcttgtacatccaccgtggataaagaagaaccacactggtaggctttttccatctctgaaattggtgcattccacatctatattcagaatgatataaaagactgtcagccttaaatggtgtacagagaagtaaagagctccacaacaggtccaaactgctgtgcaggcagccctcgcacttggaccatatgatctggctcgctctgtggtgcaggcagtatcagtggtgtgaaaagttgtcatatggtaagtccaagtggaagaaccacaaagtagatcccctgaaattttarggcaaagtcttgccatctgcagtgcacaattatacatcttttgaaaaataattccaggcaggctagtgagctgtggtaaaaatgaaatgcctgactatagttcaccaagtgaac

SEQ ID NO: 146951 - DNA, 539 bp, Homo sapiens
gaattcatgtcagcacacctgtacaagatgcacgttaaattgaaacaacaaataarataatcttgagaagctgaaatcctttaatttttcagaatttttttctgttaacatatttcattgtattatgctgtatcatttagaatcaaaacaccaacctgtcatattgcttttcttttttatatttataatataaggcatcatctaattttgaatataatcttgaatatactccaaatgtgagaaaaaacacttagagatagcaataatcatgattaaaatttggctatgcaaattcagagaacttattctgaaatgatgcaaacatgtatatgttaagtcacattgtttttacctctgaaaaacctcctgataaacaccactggccaagagtagcaattcatagcttcatttctatttgcaagtcatgatgtataacacattaagcagactatgcatatatacatatatatatataaatgtatcgagcagactaagttaaaaataataatcaacatgtccattgctgctcttaagaagtg

SEQ ID NO: 146952 - DNA, 549 bp, Homo sapiens
agctatcgcatcttgcttctgtgagtcttacattgcccaagaattattagtccagttcacatggaaaaagacatatttttatttacttggattcaaaagattctttaatgttataaacaaataacacactcaaaaataaagcttaatattcagattttacagtcctagccatttttctctttaactttaatattaattgctttctgaatgtatcattacttttaagatagaaacatataatttcaaatatttagacacaggagacacactcatcttatgtgcttccacagatataaattagatatatgcttatcataacaggttgtaattgccattttatttgtctaacagctcaagagactacaagttctatggagacaaagatcataactcttttagtcactattgtagctacagtgctgatrttatatagctggcatataagtgatgatcaatatatttttgttgaatttttattcattcattaaatacttatcagacaccttctatgagcagtatgattggcagtaaagattctgacatgaacat

SEQ ID NO: 146953 - DNA, 278 bp, Homo sapiens
acctgatacattcagtgaccagagaatgaacttctaaatcctgcagttcagcattatcctctgcgtttttaggcacaggtagaaaagatttggcacgctttttgagttactgccaccatttcatctccactctttagcttggagatgcctgccagatacacaattgtatggaattaatatgacatatttaagaacaaaacaaaaccctccctcaatttataaccctctttgaktattggcatatctctctgccttttcacagccaaatttctcatgac

SEQ ID NO: 146954 - DNA, 576 bp, Homo sapiens
aacagctttggaatgtcattttcacgaaagaaaacagagagaatccgagaggaagttctcctccactccagatcccctaagatactcaaacatgctcacaggagggctggaatacatcaaacattagcagagggaaaaggacacaattttcccacattaaaatacatggataaagttgaacttctgctaaaaatagttcccatgactaatcctattaagtttaaaaaattgggcagtatcctccctgaagcagaattactctctgccatcacactctgctgttcycccacactccccaagccagcaggccctcaatattaggccctcatctttccctctgtaatgacatttggggaaaagggagaaagaaagagatcgaacagtgccttttattcaggtctcagatatcaaaggaaaccaaaaacaagatataaaactcaaaattatctcagaataccaacgattcgaaagagcagtgtactgttctcagtagatctgcaatgttttcccactggctcttggactcactctgtgtccccagggaacaatgagattgcagaaagcaaacgaagatta

SEQ ID NO: 146955 - DNA, 549 bp, Homo sapiens
tttggctccttctctactctcaatctcattttaacattgagacactatagaatctgtgaatctgaaaatatataatttgtattaaattgtaatatcaaatagatgatcaatataaaaatctgaaaaacctcatgggaatggtgagattttcaaagagacrtttccttgaccttacccaaaacaggaatgaaaaagcaaaggaaaaagaacagaaaacgatgagttcaaaattacacataaaagtagaagacaaaaatatttgctcacagaaacctgagcatttatgtggcatttggtaatgtaatagcgtgcacgatgggctctgtcctgactgaaactcagtggcaaagccgttattgtttctgtggccaagaaaaggagtattcatgttgtaatataacatattgttatattgtccagttctttttcggactccataataaaaaattatagtcattttctaaggaaaagtcatagaatgatcagatcataagctccataaataaaaatgtgctggagaccttgagtcttgtctcagaatatgtattc

SEQ ID NO: 146956 - DNA, 488 bp, Homo sapiens
cccatgaaatcagtatcagattataatgcttaacatgtctcagattagccagataarttgattttcagaaagaacaattgtgatatttgagtattctgattacaactctcacttaaaaatttagagattttttaaaaaggcattactactctatccctgtatgtgagcttcatttgctggagtgtaaaattcagagaaataactatttgaataaaattttgctttctgccccttcccccacttatgttattctcactcttaatagaataaagggaacagtgctgcatggatatgacacaggtattaaattcatctgagtcagatgttttcaggtatttgggtaaaatagaatgtctcagtctaaaattttgccagaaatgcattatcataagagtacaataaattcccactatagatagcaatgatattgtaggccctaggagtgactatagagtgactatagagactaagtcaatcagtagtatctt

SEQ ID NO: 146957 - DNA, 356 bp, Homo sapiens
aaggcattatctctgcccgtcatggagaaaaaggtttaacacattcaatagaattttagaacatcatagagccaatcttaagagctaaattattaggtagagagaataaatgctataagagttcagaaaacagggagagcaacgaagactgcaatagcgagaaagactggttaggaagactttcatcgtttccttaaaagcagaaaaaaatatataaaataaatgcagaacatttataataattcagacttaaaaagawataaaagaaatttacctattgaaatttcagtgtactttctaatgcaatatggaattaaatgttgagtcaagttatgaaacacacctagagcagaagg

SEQ ID NO: 146958 - DNA, 569 bp, Homo sapiens
ttcccactatagatagcaatgatattgtaggccctaggagtgactatagagtgactatagagactaagtcaatcagtagtatctttttatgtagtcacctggagatgtacatgagtaaaactctttctgcaagtgacagagtggaatccatttactctcataaccaaaaagtccggagtacatttggcttcaagttttattttgatccgggtgttcaaaccaatttctaggacctactatctcttaatcccttasttagcccttgctagtctctgtgttatgatttcatgtacaggttccattttgcagcaagctggtgcttccagccataatctcactacctcacaattccgtgttctgtgaaaacagcatctcttgtctgaaagtgcttacaagagtaccaaggctgattcactctggttggacaagctttagtcatgtgtccatctctgaaccagtcactgtggccatcgaatgagtgcgtcagtcacttagtgcttggtcgcatgcccatcacatggtcctagcaagagcttcactcagatcacatcaagctcggtgtccctaag

SEQ ID NO: 146959 - DNA, 381 bp, Homo sapiens
cctgggttctagccattcgcctgtctcagcctcctgagtagctgggattacaggtgcccaccaccatgcctggctaatttttgtatttttagtagagacatrgtttcaccatgttggccagactggtttggaacacctcacctcaggcgatctgcctgcctcagccttccaaagtgctggggttacaggcatgagccactatgcccggccaatcatttttaattggatcatctgatcactggctatttattaactgcaacttaagtaaactagcatttatccaatttcaatgtttgaaggagtttgtaaatggtctccatataaagcaggcaggaaaagttgaaggattgacattttttcaaatgcattttcagttagagt

SEQ ID NO: 146960 - DNA, 436 bp, Homo sapiens
tctttaataaatcactggccaataggtgaaccttattgtttttatttggatttggaaataaaccaaaataggattgatctgaaagtgaaagtgactttaaatgcccaccctctactcatatcaatagaaaaatctatattggtagctaaaacattattggataatattttgttgttgttcggcttgtgttttttctttttctttttttttgttatctcaccactcacacattaactttcattggtttcagtatcatattctcattgagtaactgcttctcaagttggaatgagayagttatttcatcattttctaaaatttcttaaatagccaaatagctctaactttaacacaatgataaatgtttcactatttcacaattatgtgaaacaacaagctataaaccaacgaagcatctacagagcatactcaaata

SEQ ID NO: 146961 - DNA, 441 bp, Homo sapiens
caataggtgaaccttattgtttttatttggatttggaaataaaccaaaataggattgatctgaaagtgaaagtgactttaaatgcccaccctctactcatatcaatagaaaaatctatattggtagctaaaacattattggataatattttgttgttgttcggcttgtgttttttctttttctttttttttgttatctcaccactcacacattaactttcattggtttcagtatcatattctcattgagtaactgcttctcaagttggaatgagacagttatttcatcattttctaaaatttcttaaatagccaaatagctctaactttaacacaatgataaatgtttcactatttcacaattatgtgaaacaacaagctataaaccaamgaagcatctacagagcatactcaaatatttcgtttgtaactatactaaaaa

SEQ ID NO: 146962 - DNA, 641 bp, Homo sapiens
acaggctttaaaaaaggaaacaaatatggatagttccaaggcagacaggtctatatggaggaaaaagtaaggcatcccctcctccaacgtgccgcctccatagctatgatgaatttttccartgaaggtaaactctacctggcaggattgctggaagaatgggagggtaacatctggtgaaggataaaaatagaaagtattattgggctttctgaggctgcttacttgaaagaagagcataaataattcctttgcccagagcccttatctgttctttatgcctttgactgtgggtgtgcagcaggtggggagagagaaggggctggtgaggaaatttctcatcagtggaaatcccctcttggtcatgcatccatttgagggagttgggggggttgcagccatagtatctatggcaggggagcatatccagaggataagagagtgacagacacgaatgagaaagagggagaggatcaagacaggcagacatgggtggatacaatgatagaaacagaaagtcctacagggaagtaggaaatgagaaaagagaagaaaggaacaggatggagcctatcatactgtaagatgtatcttatatgcctcactgaagttgtttgtgaccctttggttccctgggtccc

SEQ ID NO: 146963 - DNA, 416 bp, Homo sapiens
ttagaaccattataagattagagygtttctaaaactaggtcgttcttctggctctgtcattaaagtaatgagacaagtgcccaagaaaagtagaactggctgttgtggggaaataactaactctgttgctaagggaagattcacagatgctaaattaaggcatcttaggccacttgatagttaatcttaaaatggcttcaatttcagttaaaaggttcatttaataacaaagacatttacattagtatttagttagaagtgatggcagttcctgcttccaaattagtgctttttaagtagaccagttggaggtgggttattggtgaataaacatgatatttgaaaccaatgttccaaaaaatgggtatgaagattcatccaggaagcttttaaaaatataggcaacaccctagaaa

SEQ ID NO: 146964 - DNA, 460 bp, Homo sapiens
tagcacttgctgacaatttattgggggactgttaacagacaaatttagtagtttgcccaagttcacaaactatcattagaagagctagaattagaactctgcctgcctggttcttagtcccgttctctttctactatgccattatagatgcatgatatatccagtacatcctctctatacyaactctcattgcctgccctttacctcttaccttcaaattttgctttaaacaaataaccattgcacaggctgctctgaagaagatgcattgttgctgccactctaaataatgtttttagaattggtaacattaacagtgatagtgtcaggtaggggtagcaaaaggaatgatcttagagaaaacatgcctactccagcatttgcattaagctcctgtgatgccccctctacatatttatagaagtctgggtagcccaagctacccagcatgggaaaagag

SEQ ID NO: 146965 - DNA, 419 bp, Homo sapiens
ggaacagcagtacaatgacctcaatcaatgrgggtttattgaaggacttgatggagaaagaaagtcaagggaaaagaaaatctaatctcctgcacctaaggacaatagaagcctcatttactaccattcagaatgcagtggcaggtcaaatattctggtagtcattctggtgatcaaccccagatttaaaagtcacttttcttggattcagtacttggattctctttctttcgctttttctttctaatggattgcccaaacctggctctccaagtcatgccttctatttacctttctactctacatttcttcatcttcctctctccatacacagaccacaccctctgtatttctgccgtttaagcaccccaggggagaggatacaattgattgatgaattgctttctaatttagaaggc

SEQ ID NO: 146966 - DNA, 444 bp, Homo sapiens
gaattcacctatcattgtatcaatttcttcccagttactgggaacagcagtacaatgacctcaatcaatgagggtttattgaaggacttgatggagaaagaaagtcaagggaaaagaaaatctaatctcctgcacctaaggacaatagaagcctcatttactaccattcagaatgcagtggcaggtcaaataktctggtagtcattctggtgatcaaccccagatttaaaagtcacttttcttggattcagtacttggattctctttctttcgctttttctttctaatggattgcccaaacctggctctccaagtcatgccttctatttacctttctactctacatttcttcatcttcctctctccatacacagaccacaccctctgtatttctgccgtttaagcaccccaggggagaggatacaattgattgatgaattgctt

SEQ ID NO: 146967 - DNA, 404 bp, Homo sapiens
gaattctcctgcatctgtcctccaccagtctgtatatttactttctattgttgctgtaacaaattaccactaacgtaatggcttacaacctacaaatgtatcgtcttacagttctagaggtcagcagtcctagatgggtctcactgggctaaaatgaaggtgttggtaggtcgacatttcakcctggagactctaggagactgtttccttgccttttccagcttctaaaggctgcctgcatttgttggctcaccgtgcccttcctccgtcttcaaaatcagcaataatggactcagtcctcaaatcttgtcactccagccttctcttctgcctccctctcccacttttaagaaactccatgattacattgggtgcatgtagataacccaggatactctccctgt

SEQ ID NO: 146968 - DNA, 404 bp, Homo sapiens
gaattctcctgcatctgtcctccaccagtctgtatatttactttctattgttgctgtaacaaattaccactaacgtaatggcttacaacctacaaatgtatcgtcttacagttctagaggtcagcagtcctagatgggtctcactgggctaaaatgaaggtgttggtaggtcgacatttcatcctggagactctaggagactgtttccttgccttttccagcttctaaaggctgcctgcmtttgttggctcaccgtgcccttcctccgtcttcaaaatcagcaataatggactcagtcctcaaatcttgtcactccagccttctcttctgcctccctctcccacttttaagaaactccatgattacattgggtgcatgtagataacccaggatactctccctgt

SEQ ID NO: 146969 - DNA, 404 bp, Homo sapiens
gaattctcctgcatctgtcctccaccagtctgtatatttactttctattgttgctgtaacaaattaccactaacgtaatggcttacaacctacaaatgtatcgtcttacagttctagaggtcagcagtcctagatgggtctcactgggctaaaatgaaggtgttggtaggtcgacatttcatcctggagactctaggagactgtttccttgccttttccagcttctaaaggctgcctgcatttgttggctcacmgtgcccttcctccgtcttcaaaatcagcaataatggactcagtcctcaaatcttgtcactccagccttctcttctgcctccctctcccacttttaagaaactccatgattacattgggtgcatgtagataacccaggatactctccctgt

SEQ ID NO: 146970 - DNA, 559 bp, Homo sapiens
tcccatcctctgactcactgctccgctgcattaacctttctagtcctccagcatgccaagttgagggccttttctgaaccgatattccctctcagtcctccagcacgccaagttgagggccttttctgaacygttgttcctctctctgctctttgcctggcccattccttcacaacatccaactctctactcaatgccattcttcagagaatggctatacatcccaacactcttgctcgggctttactctccacagcacttatgacctgaaattatattagttacttgcctgtatccccagctccatggaaacaaactcttataccaatatctgcaacatagtaacttaataaatatttctgtgctatttacataaacaaattatcttaataaagggtaatgaaaattgcatgtacacatgcatggaaagcagagattcaaaagcttggcaatcaaagtaaaaacttatttccctaccgaggccatgtgaaggataatttattaaaagaggacacctttctggatgaattacttaagcaaggtacctacccattcctat

SEQ ID NO: 146971 - DNA, 603 bp, Homo sapiens
tggtttgaaaaatcttgttctggggatctgaatttcaaaaatgaaccctaggggagatcaaaatccattttaaacaaagatcaattaagagccaaagtgaaatctaacttgcaaacaacaatttgaagccttgcagcagacttaaggaattcccgctctgactggggaaaagtataaaaatggacctgagagtaccctcttgagggatgatcaagaatggagacagttggaggtgtgctcattaagattcaaaacagcagaaatccatttttggagcagattataacctgtggccaaaaaaaaaaaatgtgtgctgtttgacarctaatggcaatttatacaatcattggaggctggtaaagctccctaatatgttgccaccattatcattgcaaccaaaaaaattctgaagattgtgtggtgatctacgaaagagataaataattactgttatttaaacccaagtgaaacaatgacggcagcagcatattatcaagaaatttaaattatgcatgaaaatgtgatttaaaaacaatgtcctttgggtaacacacaagaacctacactttcacagacaaggactcaacctcacatgtcacaagc

SEQ ID NO: 146972 - DNA, 585 bp, Homo sapiens
taaagattttcttgtactagtgcttattcttcataaacacagtgtaaagaaatctasttttttggtggtttgttttagactcccaactctgcctagtggcagaaaaacctcttaatagtgtgggtcatcataaaatctgccaactttaatccaaataagtatcaagagtcttcattcaatattctttcaaacttgtttgtctcgaacaaattagagttttagcacttattgttcaatgtactgtagtaattgtatttaatagtaagaaaatatataagcaatgattttttaaaagggagttctcaagagttttggatttctttctgccgtgtatagaggtttcttatgcatggacatttgtgctgttttatatctttttcaattaaaaaaaaatttaaaggcatcaggctccctaagttcatttgtaaatagtggcttggaactctacacaatagggaagctcctaaaggctcatttagaccataatctagttaatagtatcatgctgaactctcagttttctttaggaaaccaatcaatcagtgtaggagggagaaagaagcagaggtcttgtctttttcctga

SEQ ID NO: 146973 - DNA, 585 bp, Homo sapiens
taaagattttcttgtactagtgcttattcttcataaacacagtgtaaagaaatctagttttttggtggtttgttttagactcccaactctgcctagtggcagaaaaacctcttaatagtgtgggtcatcataaaatctgccaactttaatccaaataagtatcaagagtcttcattcaatattctttcaaacttgtttgtctcgaacaaattagagttttagcacttattgttcaatgtactrtagtaattgtatttaatagtaagaaaatatataagcaatgattttttaaaagggagttctcaagagttttggatttctttctgccgtgtatagaggtttcttatgcatggacatttgtgctgttttatatctttttcaattaaaaaaaaatttaaaggcatcaggctccctaagttcatttgtaaatagtggcttggaactctacacaatagggaagctcctaaaggctcatttagaccataatctagttaatagtatcatgctgaactctcagttttctttaggaaaccaatcaatcagtgtaggagggagaaagaagcagaggtcttgtctttttcctga

SEQ ID NO: 146974 - DNA, 558 bp, Homo sapiens
ataatgtgtacatagtaataatctgaagaaccataagatgctgaaactaagtttaaattactttataacactatacatgaaaagtgcacacaaaaatatttatcctaataactagaaatggatctatgttccagttctaactattagaggaacaggaggagccagaaacctagagccctcctattcctatkcttctacctatggaaatggtcaaagagcagtcacacctctgctgagaagctaggagagttggtatcagtaagcattacacacacatgtgcaaacacacacacacacacaacctgaaaagcccagcctaaccctctgcctcttgatgccagtggcacacacaggattgcaattcggggacagaccttttacaggctgctgatccagcatatcctgcagacacatgtcagttccggggtcccctgacattctaaacctatcttgggaattctcataatattcaacatagcacagaatccactaggccagacttgaaattattcagaatttggtcctagaaccagttggtctgttcctaggaatctcaag

SEQ ID NO: 146975 - DNA, 518 bp, Homo sapiens
tgggtccattttcattcttctacatatggatagccagctatcccagcgccatttactgggcctttcaccattgcttgtttttctcaattttgtcaaatatcagatggctacaagtatgtggctttatttctaggttctccattctattggtctaaattgttttcgtaccagtaccatgctgtttttgatactgctgycttatatttgaagtaaagtaatgtgatgcctccaactttgttctttttgcttaggattgatttggctatttgggctcttttttggttccgtatgaattttaacacagttttttccaattctgtgaaaaattccattgtagtttgatagaaatagtgttcaatgtgtagactgctttgagcagtgtggctattttaatgagattgattccttcaattcatgagcatagaatgtttttccatttgtttgtgtcatctatgatttattttatcagtgttttttagttctccttgtagagatgtttcacctcaatggttaagacg

SEQ ID NO: 146976 - DNA, 432 bp, Homo sapiens
taactaacttgcccaaggtcacagagttgtgtctttctgactcgaaagcctatatatgaagttttaaactatgtatcagtggttctcaaacttcagtatgcataaagattaccmcaaaagtgtgttaaaatgtagattcctgagtcctactcccaaagattctgattgagtagttctgggataaagcccatgaacttggatttctaacaatccccctcaggtaatacagatactggtggtccatcaaccacacactgagtagcaatgtacaattctctcccctaggctacactactttgctttttaagctttatgacaaatactgtagtcagtacttttaaaaaaatcactgtgtttttgtaggaaatagacatgctcattataaagaagtataagcaatgcatacaaatacaaagaaaaaaatcaatcacc

SEQ ID NO: 146977 - DNA, 550 bp, Homo sapiens
atcttcttaatgtccatgggatctgtwgtgatgtcccctcttttatttatgatattagtagtttgtgtcctctctttttcttatgtgtaagtttttatgtcccttttgcctgacacaatagacactcaataacagtcactcatctattgaatgaataattaaggagacctgcccactcaaaataagtaacctgggaccagataatatccagggatttatattactaattctgtggccctcccagaagtaaagaaatatgatctgatccagtttaaatatttaagtcagcagaaaggggttccagtgaaaatagcctatgccattttgtaccaggtgggaaagaggaaacatgatatcttcatgagacccttaccggcctgaatactcttttataagaacatgtcatgcctttaagagatctctctgcaatgcaatgttattacagatagaaattatgatttggaggagggatacttttctgtattatatagttcataaagttttattgatctaaaaacttgttctaggacagaaagtagtagacatctaa

SEQ ID NO: 146978 - DNA, 521 bp, Homo sapiens
atttctcacaattccgaagactagaagattgagatcaaggtgtcagcaatgttgctttcttctgagacctctcttcttggtctgcagatggctatcctctctctgtgtcttcacattcacatggtctttcctctgtgtatgtctgtgtcctaatcttctcttcttctaagaatgccagtcattttkgattcaggcccatgctaatgacctcattttaattgaattatccctttataggccatatctctaaatatggccacattctgagatgctgggagtgaggacttcagcatgtgaatttaggggatacaatcaagctcataacaggtgcaaaaactcactcaagagaagacagataatacgagtagccctaaatttattttttaattgaatttattatttaaaacccttccacaaagaaaactccaggcccaagtggcttcactggttaactctaccaaatgtttaaagaagaattatgccatgtccacataatctcttccagaaaacaagagatgatg

SEQ ID NO: 146979 - DNA, 503 bp, Homo sapiens
ggcattaaaggggttaaggcctgtgaggaaggtgacacaacaactgtagggttgttggatcaaaacatgtggtaaaaaatgtgtgctgaaccataattacaatttcaatattcagttcctaaaacctgcctgcatgtgatcttaatcctatcatcttaaggttgtaactatgataaccttgaccatcttcactggtgtcatgccatcaaatctccaaagatctgtacatctaccatctcatgtgttcagtacaaccaattgccttaggaaacctcagtatcaccattatttctcttttacaaacacagtaataaaaattcagagataatgcagcaggcaaagtacaaaaatgatattttcttaacatcaaactttgctttagttttgctcacgtstaaggtagaaactatagaattccctccatgagtaatctatgtatagataacgcagctaatcatgcaggcttcagattcagaaaaccctagatttgattccagtatatt

SEQ ID NO: 146980 - DNA, 534 bp, Homo sapiens
agacaatgaattacattatcactctactcaggggctacttagtaaaaagatagcacccagaagctaagagaggaaaaatgtggcatggctatgttagctttagatagtggtaaaagagatgtaaaaaattgatttaaaaaacatgtcctctaaaaattaataactaaagctgtgcccttcctcagcattggggtcagaaagtcacatatatgcattgcatttaaaacttgggaaatttaaaaggagaagaaaaatcactcattctttctttcatcaaataaaagcaatattcatattattttttttaatatcctgtcttttwaaaaaaccattttttattcaggaatatactgagtcaaattttacaaataattttatgtactaagttttcactgaacataatgaagagtgtatctccatattgtaaactttgcaaacattatttagaatgtctatttttattctaatttagtgactgcaatttaagcaaactcctatgttgggcaattaagatgttaccaatggttgctattg

SEQ ID NO: 146981 - DNA, 485 bp, Homo sapiens
agatctttaatgaaggtggctatataaaacaacacatttttcagtgtagatgaaacagccttctactggaagaagatgccatctaggacttttatagagagatgtcaatgcctcgcctcaaatcttcaaagggattctcttattagggactaatgtagctgttgacttagacgccaatgctcatttatcactctgaacatcctagagcccttaagaattgtgctaaaccttctctgcatatgctctacaaaggaaacaacaaagcatggatgtcagcacatctgcttacagcatagtttactgaatattctaatcctattattgtgatgtaytgcttgtaaaaaaaatattcctttcaaaataatattattcactgacactgcgcctagtcacccaaaagctctgatagaaatatatgaggagataagtgttgttttcatacctgctaacacaacataccttctgcatcccatggttcgcagagt

SEQ ID NO: 146982 - DNA, 399 bp, Homo sapiens
cctgtcactgtgaatcttggcaataggaatcccataactcagagagccaagatataaaaggaatattaaagctctaaataatttccaattagcactattatctatggcctgggatgcttagctcccagctctttgttggtaacaggagaattgagatgctccttcaccttttgaggaaatgcctctgacccactccattagaagagagataacacctggaactgaccccatagmtaatccttgggttgtaaagaacatagatcctgtgccatctaataaaaagcatctaccctgtttgggaaaatcctaaggctcaaagatatgtctgaagatgaatttttcataagcatgatgataaagctttatccaaaggtatttattgtctgcctacaatgcctc

SEQ ID NO: 146983 - DNA, 550 bp, Homo sapiens
ggtatcaagtaagagcatacttgaactgaattcattcgctgggaaaacatttatctcatgtctgttatgtgtaacagtcttaaggatttctgaaaaactctagttgtgacaattcattcatagactgaccttggcctagataataaagggacattttattaagcctagcacttgaaaaaaaccttctttaaaggggataggattaaaggataatctcttccactcagataaatatttatagtcatcaagttttttcttttcccccagtaaggtagatgctttaaaaaggaaaaggaacttgcttaagaaactccagagtatagaacattttttaaaagaaaatgtagcataaaaacatagaccctgaaatcagactcatcagttttaaaccctgattctaccacttataagcygtatgctcttaaataatttacttaacccttttatgtttcaagttcctcagttgtaaattatcagaaactgtcacaactcacagactgttgtgaggattaaatgaaataccatatgtaaagaatttagcatttttttc

SEQ ID NO: 146984 - DNA, 497 bp, Homo sapiens
cctggaaataaatccaccaatttacagtgaattgattttcaacaaagatgccaagaacacacaatggagaaaaaacagtttcttcaataagtggtgctgataaaactagatatccacatgcaaaatgaaattaaaactttaccttccaccacaygcaaaaatcaattcaaaatggattaaagacttaaacataggatcttaaactgtgaaactattcaaataaaacatatggataaagtttcttgacattattcctggcaaagtcattttttgatatgaccccaaaagaatgagcaataaaagcaaaaattgacaaatgacattaaatcaaactaaaacgtttctgcacagcagtcaacagactatactttaactatgggtagcttattatatatcaattatacctcaataaaagtatttttttaattatactttaagttttagggtacatgtgcacaacgtgcaggttagtgacatatgcatacatgtgccatgtt

SEQ ID NO: 146985 - DNA, 584 bp, Homo sapiens
aaatttctgttgttagaagccacccagtttgttacagaagccctaggagacaaatacacgtgttgattgtatcttaaaagctctcaggtgctgctaatggcagtttttaaaatggctgtgaaatctgcttcttgcctgttacctcagcattctcgaatgctttcttcttctgcccagcttcagtagcaactcctgattatccagtcctcaattggaggtcatttcccctaggaagctttctctgacatctcagagcagggtaaaacagaagagttctatttcctggcatgttgcagggaacagggactgcagaaatgcttgtttaaccaggaatgcacatttgaaaaagtgcagcccacgttaaaaagaaagaaaacgttcatcatgtgtctttaaaaaaaatttccaattctgttcaaactgttttgacaattattctttcatttttaaatttatattgggtgctcatgtgacctcagaagccctagatttatcaaaccrtgcttgtaatttcttatgattactttcttaattgcctatcttgtgtgtttgagtgctggctcccttggagaagggccacgttt

SEQ ID NO: 146986 - DNA, 442 bp, Homo sapiens
tgactaatgaatatcggctggccctttagggttacgtgttactcagttctcacctgactgctcacytttaccctacctgcctacaccttgcatggtgagaactgtcaagcttctaacttttcccagtattccttccccatcatttttatgttcctcatctcctttctatgtttttgtttctgctcagcagcagccattacagaaaaggaaaaaaaaatgagtatcacaattgttcagtagacaaacattagtaccgtactgccacgtatttatgaactaaaaacattctggattattccactcaagtccatgaattctctaggaattgtgtctagaaaacaattggaaagatagcttgactgggagttaagattaagttctcaggcccagacatatcttaaatttacttgagactctgggcacatgtaggccatgtgacctc

SEQ ID NO: 146987 - DNA, 549 bp, Homo sapiens
gtattccagtctcctattctttcagaatacttacaacattggtaatctataattattttggttatggctttggtcagcattggtttcctctacaacattacaagtttcttaaaaacagacactgagtcttaattacagctgtctatcttctcttctttgatgctgcagtaactccaattccagaggtctcaagctgttcccaaactaaaacatgtccaaataacagtttatacatctacactgcaaaagtcttaagtagattcactataccacagatagacagtataagtraatgcttgctaaaagtaaggccaactctggagtcagagtagtgggttcatgggcatagctgttaacttgcaatatgacgttaggcaactacttaacctggtagaggatcatttttccctgctgaaaaatggcgatagtgataacaactttataaggttctattgatgagtcaatgtgtgtgggtaaatctcgacaaagagcttggcaatacttaagtcaaatgattactattatcaagatcattataataactactat

SEQ ID NO: 146988 - DNA, 471 bp, Homo sapiens
tgggtgaggatacagcccaatyatatcactatggttatgcaaacttgggtatttggccaacattttcttaaaaaatgaacaaactgagcttgtcattttgaggaaaataatttgataatatttgttaccaatgatgaaatttcgagcatgaggcaatatttagaattttagaaaactcattatctgcctctgcagtgagcttaatagcttcctagagctcagactgttctgctaaaattggagatgatattaatgaatgtgatttttaatattttctgatgaattatgtcaacattcagaagatttgcattggtcaggtaaacaatatttccaagtgaccaatacatgctttataaaatcatacatggctaaagatacatttaaagtgcaagatgaccaatgaatttaaatgcaataaagtacaaaattatattaatatggtttgtttccacaatagaaataatgacaaaa

SEQ ID NO: 146989 - DNA, 632 bp, Homo sapiens
taatatctctttgagatcctgatttcaattcttttggatgaatagccagaagtggaattgctaaatcatacgttagctctaattttattttttttgtcgaacctctatatggttttccatmatggctgtaccattttgcattcccaccaacagtgtacaaaagctccaatttctccataacttcaccaacacttgctgtcttttgttttttataatagacatcctaacgggtgaaatgaatctcatcggggctttgatttgcatttcccaataactagtaacattgagaatattttcatatacctgttgaccatttgtatgtcttctttggagaaatgacattattgtgagtaaaataagtcattcacagaaagacaaatactgcattattttacttttatgaggtatctaaaatagtcaaactcatggaagcaagaaatagaattttggggccagggctggtgggagaggaaaatggggagttgctatccaataggtataaagtttcagttacgtcagatgaataacttctagaaatttgctgtataacattgtgcctacagttatcaatactgtattgtacacttagcaatatgttaaaaagataaatctcatgttaggtgttcttacca

SEQ ID NO: 146990 - DNA, 632 bp, Homo sapiens
taatatctctttgagatcctgatttcaattcttttggatgaatagccagaagtggaattgctaaatcatacgttagctctaattttattttttttgtcgaacctctatatggttttccataatggctgtaccattttgcattcccaccaacagtgtacaaaagctccaatttctccataacttcaccaacacttgctgtcttttgttttttataatagacatcctaacgggtgaaatgaatctcatcggggctttgatttgcatttcccaatractagtaacattgagaatattttcatatacctgttgaccatttgtatgtcttctttggagaaatgacattattgtgagtaaaataagtcattcacagaaagacaaatactgcattattttacttttatgaggtatctaaaatagtcaaactcatggaagcaagaaatagaattttggggccagggctggtgggagaggaaaatggggagttgctatccaataggtataaagtttcagttacgtcagatgaataacttctagaaatttgctgtataacattgtgcctacagttatcaatactgtattgtacacttagcaatatgttaaaaagataaatctcatgttaggtgttcttacca

SEQ ID NO: 146991 - DNA, 632 bp, Homo sapiens
taatatctctttgagatcctgatttcaattcttttggatgaatagccagaagtggaattgctaaatcatacgttagctctaattttattttttttgtcgaacctctatatggttttccataatggctgtaccattttgcattcccaccaacagtgtacaaaagctccaatttctccataacttcaccaacacttgctgtcttttgttttttataatagacatcctaacgggtgaaatgaatctcatcggggctttgatttgcatttcccaataactagtaacattgagaatattttcatatacctgttgaccatttgtatgtcttctttggagaaatgacattattgtgagtaaaataagtcattcacagaaagacaaatactgcattattttacttttatgagrtatctaaaatagtcaaactcatggaagcaagaaatagaattttggggccagggctggtgggagaggaaaatggggagttgctatccaataggtataaagtttcagttacgtcagatgaataacttctagaaatttgctgtataacattgtgcctacagttatcaatactgtattgtacacttagcaatatgttaaaaagataaatctcatgttaggtgttcttacca

SEQ ID NO: 146992 - DNA, 373 bp, Homo sapiens
aaataaacttctgtggtttaacttgctcagcctgtgatattttattgaggaccccgaacagactcatacagagggttcctctgagcaggaggtaaagcctgggactcaaggggtcattctggggtaagttttttcttgatttgaggtggttccatggctgtgttcagagtgaaaattcgctgagctgtgcacttaagctccatgtgmctttgtgcatgtatgctgtgtttcactccatagttcacatgcgcacgcacgcatgagcacacatacacatgtcaccacttactggctacaagacattaggcaagttaataaaactctttttcagtttcttctccagtaaagggaaatgacaggtgtccctccctca

SEQ ID NO: 146993 - DNA, 440 bp, Homo sapiens
gaattcactcccctggcaccttgatagtgaccttccagcctccagaactgtgagaaataaacttctgtggtttaacttgctcagcctgtgatattttattgaggaccccgaacagactcatacagagggttcctctgagcaggaggtaaagcctgggactcaaggggtcattctggggtaagttttttcttgatttgaggtggttccatggctgtgttcagagtgaaaattcgctgagctgtgcacttaagctccatgtgcctttgtgcatgtatgctgtgtttcactccatagttcacatgcgcacgcacgcatgagcacacatacacatgtcaccacttactggctacaagacattaggcaagttaataaaactctttttcagtttcttctccagtaaagggaaatgayaggtgtccctccctcagaggttgctaatg

SEQ ID NO: 146994 - DNA, 580 bp, Homo sapiens
ctagtcttaatgagcttgagctcatatcctcctcaagctgccaatttcccttctccctgtctggaaacacatcccggaagggtggctgtacttgatgtcttcatttccgttcctcctgttctctcttataccttctctcagttggatgctcctaccctcagcccagtatcagctgctctagaaagatcacaatgaatctccacgtcaataaatctcacagtcagcctgaacctcaccccgtggatcgatcttacgctttctttactgggctcccctgataccgcgctcacctgggcttcctctgaccttctcagccactgygttttattcttttctctctctctactccatccctcctgggggatctcatcccatgccctgctcaaaaataccatccatgtgtctcatctccttctggaactctatcctctgctcactaatggacacccacttttattaattcattcagtgacacaatacagattgatttagtaccttccaggtgccagaaactcctcgggatcatagtgatgcatcagaaaataaacacaatttcccacaaacaagcaaacagaacaaa

SEQ ID NO: 146995 - DNA, 598 bp, Homo sapiens
ttgtaaattgaactgtttctgtagtttgctttttagattgctcattgttagtgtataaaaatgcaaacgatttttgtgtgttgtctttgtatcctgcaactttgctgaatttatttattagctctgaccatttttgtgtgtggaatcttcagggttttctatgaataagatcataccatctgtgaacagtgataattttacttctgcctttccagtttgaatgccttttatttctttttcttgcctaattgttctgggtagaaatcctagtactatgttgaatagaagtggtgagaatgggaatccttaccttgtttctgatcttataggaaaagctttcagtcttttaccattgagtatgatgtttgctgtcggtttttcacatttggattttattatgttgaggtagattcctgtaaccctagtttattgagcattttaatcatgaatggatgttgaattttgtcaaatgtttttcttcatcaattgagaagattgtgagtattttcctctycattctgttaatgcggtatactactacattgattgattttcataagttgaaacatccttacattccaggaatatataccatttg

SEQ ID NO: 146996 - DNA, 326 bp, Homo sapiens
acccccaatctggaaccagagtaattttctttaagtatttttactttgaattctcacttcaatgtcttcccgttggtttcccattacctttaagagatggtgtccagtcctcgaaccagtctatatggctctgtttgacctggcttttgcctgtctttctaccctgagggtctcaaccatcttcgctaatgaggaacaactagagagcttttttcttccccccaagaaggagcttttgatttagctaactagaatagggcctgcacatagataacgttttcaaagcgatccatgtgattttcacwtgcagtaaaagtggagaactg

SEQ ID NO: 146997 - DNA, 550 bp, Homo sapiens
gttgttcaccaggacaccagagctttgtgtcctcaaaccattctcctgccccaagtctcacccctgcctgtagatcattttcatctggattccagagaaacagcgacagtgattgcaggcatggctttgcacagccactctggcttgactcccaggctctgggtgtgccgtgagggacggggcggtgatggacttgtaaactctcaggaacgcctcccagctgcagacgctgtccccgcagtattcactggtccagttcatgtccttttctgtcctctatgggtctccgggactcccagcccctagggcttcctcccaccccaccatcacggcagggaatgcagagggaccctgggctctgtgcgtgcccgtgcaatgacacatgggaggcggaagatgtacacggggcctcacacatgggatccttcctctgcagggaggatctggtcccagagcacccagtggtatctccccatggccccygcggcctccttgtctcatttccacacgcctctcccacttctgcctggaattgcctcctaaagaaaca

SEQ ID NO: 146998 - DNA, 575 bp, Homo sapiens
cttggggctccaaatctccacagggaagagcatgggacctgctggccattcatgtttggtagatgctagcatacccgatgcagggggtgggggtggagcaggagccagattcactaaaaaamcatgggcctttaccagaaaaatcaccgcaagaatgtcatgtctcgcatgctgggcctgtcacctctgcttggcatatgcataaaaggaaacagtagtttcaagtaccagtaaggtgagcttcaccaattcctcactcagtactctccaacaagtctggaatatctgtgccccaaatgggagaagactatttaaaaaataaaattagtgtatcaccagaggtccaggcatttctctgtaggaccctccctttgaagaggcattgatgtgagaaaggtagagatgtcctcctgtctggggagagacagtcaccaaaacttaaagatcaatatatgaatgctctaggagagtgtggatgtcccattttccagaagttacacaagacaacacatctccatcagagggatgctgcattttacttctgtggctattataacaaattaccactaacttgg

SEQ ID NO: 146999 - DNA, 575 bp, Homo sapiens
cttggggctccaaatctccacagggaagagcatgggacctgctggccattcatgtttggtagatgctagcatacccgatgcagggggtgggggtggagcaggagccagattcactaaaaaaccatgggcctttaccagaaaaatcaccgcaagaatgtcatgtctcgcatgctgggcctgtcacctctgcttggcatatgcataaaaggaaacagtagtttcaagtaccagtaaggtgagcttcaccaattcctcactcrgtactctccaacaagtctggaatatctgtgccccaaatgggagaagactatttaaaaaataaaattagtgtatcaccagaggtccaggcatttctctgtaggaccctccctttgaagaggcattgatgtgagaaaggtagagatgtcctcctgtctggggagagacagtcaccaaaacttaaagatcaatatatgaatgctctaggagagtgtggatgtcccattttccagaagttacacaagacaacacatctccatcagagggatgctgcattttacttctgtggctattataacaaattaccactaacttgg

SEQ ID NO: 147000 - DNA, 573 bp, Homo sapiens
ttgtgaagttctcatgttgtgtttttcagcttcatcaggtcatttatgtttctctctaaactggttattctggttaacatctcctgtaatgttttatcatggttcttagtttctttgcattgggttagagcatactcctttagctcagtgaagtttgttattacccaccttctgaagcctacttctctgtcagttcatccatctcatctcagcccwgttctgtgctcttgctgaagaggtgttgcaatcatttggaggagaagaggcactctggctttttcggtttttagcacttttgcattgattcgtcctcatcttggtgaacttatttacctttgatctttggggctgctgaccctaggacatggtttttgtggggtagtttttgttgatattgctgttgctttctatttgtttgtttgcttttttgtttaacagtcagggccctctgcccataggactgctgcagtttgctgggggtccactccagaacccattcacctgggtccctcccacacctggaagtgtcaccagtggaggctgcagaatggcaaagatggctttctgttcctt

SEQ ID NO: 147001 - DNA, 568 bp, Homo sapiens
cacccttaaatttgggtatgattttaaatttatcagcctggggtttctcagatcatgtacattgtataaatttgaggccaggtgcagtggctcatgtctataatcccagcactttgggaggccaaggtgggtggatcttttgaggtcaggagttcgagaccagcctggccaacatggtgaagccctgcctatactaaaaatacaaaaattatcagggcatggtggtgggtgcctgtagttccagctaatcgggaggctgaggcaggagaatctcttgatggtggaggttgcagtgagccgagattgtgccactgcactccagccygggtgacagagcgagactctgtctaaaaaaaaaaaaaaagaatttaaatatattgaatttgaattatataaattgaaatttgaaccccacacctgtgtaccagctgactttagttgcaagttctcagaggagatttttttcctacccagttttcagggggaaccaaaatgtaaccttatagttccctttgctttttgatagatttttctaatcccctttttactgatgaggtacttttcctga

SEQ ID NO: 147002 - DNA, 513 bp, Homo sapiens
ctaaggaaatttatgtaaaacataaacattaataaaaatgtattagtattgatttgttaattataatgtgtcatactgatgtaagatgataataagggaaactgagtgtaggagatataggaattctctgtactattttctcaatatttctaaatactagaacctttctaaaaaaatgtttgttttaaaaaatagttcaccaacactttaacaaataatgtatttctgacatctagcaggaaaaaatgagtactactgacagaccctgttgatatgagcttaatacatggtgtaataaagggcatttaatattactgtttttcagttgggataaataataggaaaaaattaataatatgagtgttcatagacctctttcttcttcctccaaatccaataccccatggaagaaaagacaaargataaaagtttgtgcaggccaattctcactacagaggaagtcagagctggagaacagggctgtccaggacctgttcatggtgggaatggtgt

SEQ ID NO: 147003 - DNA, 436 bp, Homo sapiens
cctctttcttcttcctccaaatccaataccccatggaagaaaagacaaaggataaaagtttgtgcaggccaattctcactacagaggaagtcagagctggagaacagggctgtccaggacctgttcatggtgggaatggtgtgtgcatgcagctgcacgtgtgtrtgtgtgtgtgtgtgtgtgtgtgtgtgtgtgttaggggtgttgagtaggaccaattgaaaggtgttctatagcaaaaggcagcacagagaaaacttgagagatcagaatggtaagaaggagaaattgagctctgtaggtgaaggagagtgagtagttcccaggaatttcagacatctgaataaattagaatttttaaaaatctattgactcaggggtggctggcaagatgactgaataggaacagctccagtctgcagctcccagtgagatc

SEQ ID NO: 147004 - DNA, 548 bp, Homo sapiens
attgctatactccagcagatctttaagagaccacaaatgatttctgtgagcatttgtaagtctttgtcttacctaatctctcactaatagaaacacaactgattgctcccttaaaatactttctttccatattttttatgtcaccacactgccmggtttcctccaggtctttctatgttaatttatggttactttgctgttttctcttcctctgccaataccttttaagttggtgtgactccacatgtgttttagatgcttttcctatgtcattccacactcgtgtaggaggcagaggaagagctccttttctaaagatgtgctcattctaactgccagaacctgtgaatatgttacattacatggaaacagggactgtgaacatgtgattccattaaggaccttgagatgggaagattatcctggattatccaggagagcccaatgtaatcacaagagtcctaataagagaaagataaaggccagatagtcagtgaaggagatgtgatgatggaagcagaggtcacagtgatgaaagcagcctctag

SEQ ID NO: 147005 - DNA, 511 bp, Homo sapiens
tgatttctgtgagcatttgtaagtctttgtcttacctaatctctcactaatagaaacacaactgattgctcccttaaaatactttctttccatattttttatgtcaccacactgccaggtttcctccaggtctttctatgttmatttatggttactttgctgttttctcttcctctgccaataccttttaagttggtgtgactccacatgtgttttagatgcttttcctatgtcattccacactcgtgtaggaggcagaggaagagctccttttctaaagatgtgctcattctaactgccagaacctgtgaatatgttacattacatggaaacagggactgtgaacatgtgattccattaaggaccttgagatgggaagattatcctggattatccaggagagcccaatgtaatcacaagagtcctaataagagaaagataaaggccagatagtcagtgaaggagatgtgatgatggaagcagaggtcacagtgatgaaagcagcctctag

SEQ ID NO: 147006 - DNA, 580 bp, Homo sapiens
agattcgtcaaagaaatgaaggctcctctgcaagacaggatgtgcccactaacaagagttaaataaaaacttcagaattcagtatgcattacatgaatcaatatataaaaagaggtaagaacagtgcttggcatgattaaacacgatgcgtttgctctcatcattattgttactgctgttgctgatattgctacagagtaaactgctactagctccagtcaataggggttctttgaaaatttaaatgattttatttttttccccagtctmtactaccccagcccatggtaaacatcattctgctctctacttctatgagttcgacatttttagattccacatgtgcatgagacaatgtgatatgatatttgactttctgtgactggtttatttcacttaatataatgtcctgcaggcttatccatgtcgttgcaaatgacaggatttccttcctttttaaagctgtatggtattctgttgtgtatatataccacattttctttatccattcatctgttgatgagcacttaagttgattccatattttggctattgtggtaatgttgcaatgaatatggga

SEQ ID NO: 147007 - DNA, 488 bp, Homo sapiens
tgtctttggtaaaattaatcattcttcttaaaataatgatagacttgtgtctcataacttatgtttataaattataaacttatgcctcatgtctaattctaatatactactagtcaactttatgttcaggacttcatacatccaaagttctctgttagaggtgcatgacattctctaaaactattaacagactaatttttggccatagcttgttctttttcyccttatttccttcctaatataatacttacattctatctagaattccaagagactttcattcctctgtttggtaaatgaaaaataaaagttacacttgcagaacttcctcctctgcccttctaatgttgtaagtgtcttgggtgatcagcatgagaggtacgaaacctagtgttattctagctgtcttcagtcaccagtaatcccatgttcctggactatgaagcaagttagaggtcttgtcagaggactgtgcgtgtgtgtgtgtg

SEQ ID NO: 147008 - DNA, 545 bp, Homo sapiens
acatttctcacaccctcacaggtaatgttgatgctgcaagctgacatgacactttgagtatcattcatttgcttgactgtttttgtggtttacctttaatttttacatgtgaagcagacaccactgatgtctcagccatccaaaagccatttcccctttctccttaataataaatcctaattttctatagggagtcaccaaggccttttgcttcaagaaagcctgccttaaatttcagttccaggatgagagttgtaataactctaagataattgagttaataaattgaaaataataggcatttcattcccctgtgaattgcctagcatgaaacatgaataagattgtctgaggagcttctgagacaggattcttctctctcaagaatacacctggaagagctaaacccttttcagaaccctggattgatgggatgtgattgcaagacaactgcaaccagcttgtgaccatcaagatttatatgaaaacattacattgtaccccacaaacatayatgcaatttaaaaaaggagagagattgccat

SEQ ID NO: 147009 - DNA, 545 bp, Homo sapiens
ttcttgtcagtagcatgagttcctaggtcatcccaactgaaaaactgaaaatgcctcccagtgggccttcctggttcactatcgtgtatgggtcatccgaggtgggcattggagaaggtgtgctttttggactggccgagttttttttttttttttgagacggagtcttgctgtgtcatccaggctggagtgcagttgcatgatctcggctgactgcaacctccgcctcctgggttcaagtgattctcctgtctcagcctctcaagaagctgggattacaggtacccacccaccacacgtggttaatttttgtatttttagtagagacggggtttcatcatgttggccaggctggtctcaaactccagacctcaggtgatccatccacctcggcctcccaaagtgctgaattagaggcgtgagccactgcacccggtcctgcccagcttttgtaggctgccttttgctggtcctgctttggtggccaagggaatgccttgggggttgaataggtttttgttttyttagtaatataattttgtcaa

SEQ ID NO: 147010 - DNA, 564 bp, Homo sapiens
aacatcctacctctcctttccaagtgaaagcttaagatccatggttatggaggacaagagcattagtaccagggcttggggcctgggctttggggaggctttatcctcccacctggggcatgtctcagtgctagcaattatgaaaataaaactatttgattacacagaatttaataacagtacaaacatccatgtatacaccaccccattcactacatttgttttaytgaatatttaatacatataaaaggatatttataaaatatatgctcagtttaaagaataacagtagaagaatacccatttaagaaaaagaagattatttttgcttttgaaatcccctgtgtatctctccctcattctgtctttatttttctctcagaagtaaccaatattctggattttgtatttatttcatttattctcgttataaaccttgccgtacagtatggtagcccctcaccacatgtgacaatttaagttcaaatttaaattaaataaaaattcagttcctcagtcacattagccatattttaagtgctcagtagccacatgacacttgtt

SEQ ID NO: 147011 - DNA, 450 bp, Homo sapiens
tgattccaatgcacatctcttacggaaacaccctcacagatactcccagaagttgtgattaccagccatctggatatcccttagccccattaggttgacacataagattaatcattacatgagctttatataaatggaatcatatgataaattttcttttgcagctagtttttgtttttttactcagcattaggttctttacattcatttctgtggttatctaactgcaattyatttactctctcccacacatcatatgcatatgccacaatgtatttatctactttggaatctattattgatggatatttgcattatttccaggttttttctattacaactaatactactatgcatatgagatgagtctctctggactacatactagtggtaggattactgagtcataaagaataccatcatcttctccaaataatgccaaattgtttt

SEQ ID NO: 147012 - DNA, 338 bp, Homo sapiens
agaatatacatttttgtaatccacacataacacatactctaaaatagaccacacactcagccataagacaattcttaacaaatttttaaaacccaaaatcataccatccacactcttggatcacaacgtgataaaaatagaaatcaatgccaccatctctcaaaaccatataatwacatggaaattaaacaatcttctcttgaatgattttcgggtaaatgctgaaattaaggtagaaatcaagaaattctttgaaactaacaaaaacaaggatacaacataccagaatctctggcaaacagctaaagcaatgttaagaggaaagtttatggtgctaa

SEQ ID NO: 147013 - DNA, 547 bp, Homo sapiens
tattaagaccagcctttagcttaatttctggacccactactcatactagcatctccattgcttggtgctattctccgtgcttatcatctgcctctgtcccttgttcttggtttagtctttgtagacttttatctctggcacactgtgggtgactttacaaggcctaggcctgaaggcatctgatttgtcagactacttcccacctaaccatctttcttctactctgccctgtccttcaggagaattggatctgacatttcaggttctgcattggcagaattggggaaagtagatttgggaagattctggaaatctgatagcaattaacattgaataarcagttgtagtatgttctgcaaggtaatatgaataatatgaactgccattcctagatatacaagcggcatatagtctaagtggagagacagcagaactgtgcaaaacacatgcaaattaaacaaatgtttacctggtactcacaaaagcaatgaaaataaattttctctgtaatttaaaccaacaactccttcctacgattatgaataac

SEQ ID NO: 147014 - DNA, 562 bp, Homo sapiens
atagtcagttctcgtgaggcctctcttcctggcttgtaggtggctgtcttctctctctgcactccacatggcctttcctcagtgtgtctgcgtggagagagagagggaaatctctggtatctcttcctcttcttataaggccaccaattctatcaaatcagggccctaccctttgtgacctcactaaaagttaattaccacctgaaagccccatcttcatatacagtcacattgtgggctaaggcttcaagataaaatttaagggaacataattcagcacatagcacagtctcactctcatttacattctctcccagtctccctggctagatataaatatttcctcagctacaaggctttctattgtgtcctgctcctccttaggcatgcctgccttgaatgactgaatacttgcccgcatagagaaatcartcaactctgtggtattcctcagctcagaaaagtgaactaactgaaaccctgtagtatgtagcaaaaacaggcctttcatccgcagttctcataaagaaagtggatacgtcgttccagacttgtcacttgt

SEQ ID NO: 147015 - DNA, 561 bp, Homo sapiens
aagcttagcaaattaggcagttgtgagtcccagtgctggctgctgcccttccctcaaggagttcaaagggcctagacagcacgcagctgcagctgtggtgctggttgacactccccacgtgagctcrgtaggcttaagcagattccagctgagagactgttgagaatctgcatggctctggggttgggaagctaggccacaggggcatgggctcacaaatgggattttctgatctgtggtttgcacagttatgtggaaaaagcacagtttccccgacttgatagcctgctcactcaccgcctcccttggtttaggggtgggggcccccctgccccgtgtggttctcagatgggctgcctcaccacactgctcttccttcctctctgtggatcacgccagcctcctaatcagttctgatgagagaacctggataccttgcttgccggtgaagcagtcatacacttattatagttcttttccatgggtgcctctgatcacagctgtttctagttggccatcttggccctgcccccactaaacatttacaattaaaggtctcct

SEQ ID NO: 147016 - DNA, 561 bp, Homo sapiens
aagcttagcaaattaggcagttgtgagtcccagtgctggctgctgcccttccctcaaggagttcaaagggcctagacagcacgcagctgcagctgtggtgctggttgacactccccacgtgagctcagtaggcttaagcagattccagctgagagactgttgagaatctgcatggctctggggttgggaagctaggccacaggggcatgggctcacaawtgggattttctgatctgtggtttgcacagttatgtggaaaaagcacagtttccccgacttgatagcctgctcactcaccgcctcccttggtttaggggtgggggcccccctgccccgtgtggttctcagatgggctgcctcaccacactgctcttccttcctctctgtggatcacgccagcctcctaatcagttctgatgagagaacctggataccttgcttgccggtgaagcagtcatacacttattatagttcttttccatgggtgcctctgatcacagctgtttctagttggccatcttggccctgcccccactaaacatttacaattaaaggtctcct

SEQ ID NO: 147017 - DNA, 561 bp, Homo sapiens
aagcttagcaaattaggcagttgtgagtcccagtgctggctgctgcccttccctcaaggagttcaaagggcctagacagcacgcagctgcagctgtggtgctggttgacactccccacgtgagctcagtaggcttaagcagattccagctgagagactgttgagaatctgcatggctctggggttgggaagctaggccacaggggcatgggctcacaaatgggattttctgatctgtggtttgcacagttatgtggaaaaagcacagtttccccgacttgatagcmtgctcactcaccgcctcccttggtttaggggtgggggcccccctgccccgtgtggttctcagatgggctgcctcaccacactgctcttccttcctctctgtggatcacgccagcctcctaatcagttctgatgagagaacctggataccttgcttgccggtgaagcagtcatacacttattatagttcttttccatgggtgcctctgatcacagctgtttctagttggccatcttggccctgcccccactaaacatttacaattaaaggtctcct

SEQ ID NO: 147018 - DNA, 511 bp, Homo sapiens
tgaagtgtacctgacaattccccacggactggaaagagagaatgaagcttatgtttatattttttaatttttatttatttatttatttattttgagatggagtcttgctctgtcgcccaggctggagtgcagtggcgagatctgagctcactgcaagttccgcctcccaggttcacgccattctcctgcctcagcctcccaagtagctgggactacaggcgcccgccaccatgcccggmtaattttttttatttttagtagagacggggtttcaccatgttagccaggatgatctcaatctcctgacttcatgatcctcccgcctcagcctcccaaatatgtttatatttcatcacattattttaaatcaatattttacgtgtgtttgaaaatgtgcataatacactggaacactagattgcatatcaaataataagtaaatatacatatagggaagaatgcttaattttttattggtaagaagacatgcaatctaaaaagtttggacaca

SEQ ID NO: 147019 - DNA, 511 bp, Homo sapiens
tgaagtgtacctgacaattccccacggactggaaagagagaatgaagcttatgtttatattttttaatttttatttatttatttatttattttgagatggagtcttgctctgtcgcccaggctggagtgcagtggcgagatctgagctcactgcaagttccgcctcccaggttcacgccattctcctgcctcagcctcccaagtagctgggactacaggcgcccgccaccatgcccggctaattttttttatttttagtagagacggggtttcaccatgttagccaggatgatctcaatctcctgacttcatgatcctcccgcctcagcctcccaaatatgtttatatttcatcayattattttaaatcaatattttacgtgtgtttgaaaatgtgcataatacactggaacactagattgcatatcaaataataagtaaatatacatatagggaagaatgcttaattttttattggtaagaagacatgcaatctaaaaagtttggacaca

SEQ ID NO: 147020 - DNA, 530 bp, Homo sapiens
cctgtgacccataaacagcctatggtaacacaggaatgatagctgctaaacaataaaaccaagagaaaaaatctgaacaaggttatcagaagctgyacattaaggaaggaaatagacttcatagaattagttctttcaactcattaaacaaataaacaaagaccaaacaaaaacaataataatattaataatatttccaatgggatcagtaccagtgttgctacaatatattatctaaaatgtccacttttgaacaaaaaatatcacaagacatgcaaagacacagaaattataacccatatgtagtaaataaatgaaagttcttttgagctgagacaagtattagatataacagaaatgggtttcggagagcaaagaaagccctgtctaaacaattaaagaaaatataataaacattttccactaaataaaaatataaacaaagaaatagaaattactttaaaaagaacaaaataaaaattctaacattgaaaactgtaatcaataaaatgaaaaattattggagggtt

SEQ ID NO: 147021 - DNA, 530 bp, Homo sapiens
cctgtgacccataaacagcctatggtaacacaggaatgatagctgctaaacaataaaaccaagagaaaaaatctgaacaaggttatcagaagctgtacattaaggaaggaaatagacttcatagaattagttctttcaactcattaaacaaataaacaaagaccaaacaaaaacaataataatattaataatatttccaatgggatcagtaccagtgttgctacaatatattatctaaaatgtccacttttgaacaaaaaatatcacaagacatgcaaagamacagaaattataacccatatgtagtaaataaatgaaagttcttttgagctgagacaagtattagatataacagaaatgggtttcggagagcaaagaaagccctgtctaaacaattaaagaaaatataataaacattttccactaaataaaaatataaacaaagaaatagaaattactttaaaaagaacaaaataaaaattctaacattgaaaactgtaatcaataaaatgaaaaattattggagggtt

SEQ ID NO: 147022 - DNA, 530 bp, Homo sapiens
cctgtgacccataaacagcctatggtaacacaggaatgatagctgctaaacaataaaaccaagagaaaaaatctgaacaaggttatcagaagctgtacattaaggaaggaaatagacttcatagaattagttctttcaactcattaaacaaataaacaaagaccaaacaaaaacaataataatattaataatatttccaatgggatcagtaccagtgttgctacaatatattatctaaaatgtccacttttgaacaaaaaatatcacaagacatgcaaagacacagaaattataacccatatgtagtaaataaatgaaagttcttttgagctgagacaagtattagatataacagaaatgggtttcggagagcaaagaaagccctgtctaaacaattaaagaaaatataayaaacattttccactaaataaaaatataaacaaagaaatagaaattactttaaaaagaacaaaataaaaattctaacattgaaaactgtaatcaataaaatgaaaaattattggagggtt

SEQ ID NO: 147023 - DNA, 405 bp, Homo sapiens
caaaccttaattcttgacttctgtgcamacacaggcccaatgccacatggaagctgccaaggcttggggcttgcatcctttgaagcattggcctgaggtgcatgttgaccccttttaaccacagctggatctgaagcagctgggatgcagggcactatgttacaaggctgcatagagcagctgggccctgggccaagcctgcaaaatcatttttccctcctagtcctccaggcctgtgattggagggctgctgtaaaagtatctggcatcccctgaagacattttccccattgtcttggtgattaacattcagctccttgttacttatgcaaatttctgcactggcttgaactctccagaaaacgggtttttcttttctattgcatcatcaggctgcaaattttc

SEQ ID NO: 147024 - DNA, 589 bp, Homo sapiens
ttgtttcctgaacataggtgtgtcttgtgcttctatatttggcagctcttctcttccttcttaaactccaactaagtctaggggatctcctgccaatagacgcaccatgtttctattgttgaaaataagaaatgttggttttctcttctaataattgttatctactttgcactgcaatgtcctgtaggtctctccttagatctgcacctctgtttaatttttttttttctttttcttttttttyttttttttttttttttgagacggagtcttgcccttgtcatctaggctggagtgcagtggtacgatctcggctcactgcaatatccacctcccgggttcaagcaattctcctgcctcagcctcctgagtagctgggattataggtgcctgccaccatgcccggctactttttgtacttttagtagagatggggttccgccatgttggccaggctggtctcaaactcctgacctcaggtgatccacccacctcggtttcccaaagtgctgggattacagatgtgagccaccatgtctggccacctctgtttaatttttatggtatttgacaacccattctttcacat

SEQ ID NO: 147025 - DNA, 589 bp, Homo sapiens
ttgtttcctgaacataggtgtgtcttgtgcttctatatttggcagctcttctcttccttcttaaactccaactaagtctaggggatctcctgccaatagacgcaccatgtttctattgttgaaaataagaaatgttggttttctcttctaataattgttatctactttgcactgcaatgtcctgtaggtctctccttagatctgcacctctgtttaatttttttttttctttttctttttttttttttttttttttttttgagacggagtcttgcccttgtcatcyaggctggagtgcagtggtacgatctcggctcactgcaatatccacctcccgggttcaagcaattctcctgcctcagcctcctgagtagctgggattataggtgcctgccaccatgcccggctactttttgtacttttagtagagatggggttccgccatgttggccaggctggtctcaaactcctgacctcaggtgatccacccacctcggtttcccaaagtgctgggattacagatgtgagccaccatgtctggccacctctgtttaatttttatggtatttgacaacccattctttcacat

SEQ ID NO: 147026 - DNA, 415 bp, Homo sapiens
aaaaacaaaaaaaaaaccttccccactgggagggctgcagggaaattargagtcttcatccatagttggggatacaataaaactaaacactccccaagaaactatgctcaccgtcaattcagagaccaacacaacagcaggagaccaggaggaaatagaatcagatcaaatcagagagagaacaaggacaccacctagagacaccttcttgggacacacattgggacacaggccattttcatagtacaatctattctcttctagtctctcccttgtcctgcccacaggggatagattttgaaggggaagtgtgcccagagccacagctgcctttctgcctcacctcaaatctctttgattcaacagtctagttttgctgagaagggggcaggctttgagtcagataaaaaatatg

SEQ ID NO: 147027 - DNA, 426 bp, Homo sapiens
agaagtgtgacatgaactccatggatggcgatgccaytgggcttcaggctagggtgtacccaggaactggaacactgcaaaacttttctatttatcattttgattgtctgcacatcacctataatttctctgttgacaaagtagtttcttctgcctctctttagtctgaatttttacactagaatctttaaatactctacaacaaattttattgtattatttaagacctaagtgtctccaaaaaaaaaaaaaattctcaacacctaaccagttgtcccagctttctaatgaaaaattgaccttaccttactgattaatgtttctactttattatatattaaattatataataaaatttatttatagtcagactaattcttcacaattctgtactgatttcataattatagtttcagaacatgtttt

SEQ ID NO: 147028 - DNA, 629 bp, Homo sapiens
ataaggatttttttttcatgcattcaagaacacataaattgctaaagatacacttttcaattgttatccatcctactgagactattgcaagggttcaggttctcctcaattacactgaaatgatgcamttttgtctgctgttcttttaaatccctattatctctaaatgggtttttctgcaatattaaaaggtgtcaagaaaacatcaagaagctcaaaaggttgttggttttttctttatctttttctgcattactttttcccctttttttttctttttgtgagggttcatgggtacagtttaactttattcttccaaagcaagtgttctcaactgggacattttgcttcttaggggatatttgacaaggtttgaagacatttttggttttcacaactgtgcatggatggggagatttgctactagctagtgggtagaggccagagatgctgctaaacaatctatattgtataggacagccgccacaacaaagatttattcagcccaaatgtcaataagattgaaattgctccagaagaaaaacacaagattgattagaaatatctttaatatgacttttagagaaggcaaatttacatattttcactctataattttgaatttagat

SEQ ID NO: 147029 - DNA, 520 bp, Homo sapiens
gaattcaacttatatttctaattttatgttttaaaatccatatttgtaactttatcttgtacaactttgctcactaatcaycctctattcccactctttcttcaacaacctcttataaaacagttacatcaagtctgtcttcattattcatccctatgtttttcctcatcactggaacaatgtttccccacattgcttcatggcagcatcttactcattgaagatctgtttcaaatgatacctcatttctaaggcttccttcaaattcccttgttaaaataggcctgtcttccaggtacaaaatataccttagttacagattttatgacaggctgtcttgtgtttctgcccctcgtgtatttttctgccttctcgaacccacactagatctcctataaaaatattacacaaattaaaattattgctaacgctattgatagtgtgattattcattcaagagggacaatggactatcatgcaagcctcgagaagaaaataggagagctgtaaattttgcagg

SEQ ID NO: 147030 - DNA, 520 bp, Homo sapiens
ttatcttgtacaactttgctcactaatcaccctctattcccactctttcttcaacaacctcttataaaacagttacatcaagtctgtcttcattattcatccctatgtttttcctcatcactggaacaatgtttccccacattgcttcatggcagcatcttactcattgaagatctgtttcaaatgatacctcatttctaaggcttccttcaaattcccttgttaaaataggcctgtcttccaggtacaaaatataccttagttacagattttatgacaggctgtcttgtgtttctgcccctcgtgtatttttctgccttctcgaacccacactagatctcctataaaaatattacacarattaaaattattgctaacgctattgatagtgtgattattcattcaagagggacaatggactatcatgcaagcctcgagaagaaaataggagagctgtaaattttgcagggaaagatgttcaaaatctattgctaattgaaaagtgtaacttacagaattc

SEQ ID NO: 147031 - DNA, 600 bp, Homo sapiens
tggccttatgaaatatacttctgtgaaatgttacaggtagaagagagattactatgaattaatgagagagtgggaggagaggaaatagaaatattccagatggacttgtatttcaagtaaactttccaagaaagaaaggaaggaattctacataaaaacatgaggatgtcaaggaagtctatgtacttcatttgttcattcttaaaattagtatttcttgagtatgtctaaatatcaaatatatgttggtggaagaaaagccagtggagaaagatgtattctttctctcatgagatgtattccttctcttatagaggtattctygtctctcatgtatttttctcctctctccactggctttgataaggaaaaattgaatgcaggaccagagactgaactatcgtaacatacaaaaagacagctttctttctgcagttagtagagctgggtcgatatatgaaaatatctcatctagaaagatacagctttgccaagctcaagctcaagctgtgccagggaccagaaatgaatgcagaagtagaagaatggactagaaagaaccagtatggcaatacagaaccagaaaaacaaaagagatgg

SEQ ID NO: 147032 - DNA, 561 bp, Homo sapiens
atgccagttgcaaatggggtacccagactacccacatttctacctggctgactgtaactcttggaccctaacctgatggtgggccacctatgcgtgcagaactgacaatatgtgctgctggagggcatagaacctgagagaatgctctctttgtatccaaattaagctctttctggacacaaaattgatataraaggacaacatcatccaatttaataggtatctcacaaactcacaagtcagtgaggccatctcaaacaacagccttatatgcctgtattctggcctatgattctcttccttatggcacacaacaagaaaaaacagagacaaatgggcagacacagttactatcacttgaaagggaaggacccataacaagaaaatgcaaaagaagagaaacaatactctaaagaactagtctctacaagtgttttctcctgccaatctaaattttggaaaggaaagacaaaaaaaggctaataccaatctcgctcaactggacctgaagcagacacccagtagtctgcctggtaggaaaatttgcccttattggcttaa

SEQ ID NO: 147033 - DNA, 533 bp, Homo sapiens
aaattttgttagtttgagatctcttttacaagatgagggacaatttctttgaattttccaaaggccttctgaaaratctcagttactttgaggttaaaaagactatttagaatttgatttgaggaagtttatcaaaaaatgtcaaaagattcgaatacaattaaatatgaccttggtgatctatttaaccaaaatagcaataaaagattctaaaggcaaatacagaaaattacacagatgtgaaaaaattaacccttttaatattgaaaggacttgatttccttaagtaaacatagacctgataaagacaacatgaagcacaggaaattattttaataagacagaatttttatttcctaggcatattacttgaaaggtgaagaaaaatctttctacaatcttgtattaagagcagaccaataatccaagaacactttgtccttttaaaaaaaggaaaaccaaattctagttttacatcagtgtactattcttactgaaactaacttttacgaaatcttataaataaatccatc

SEQ ID NO: 147034 - DNA, 533 bp, Homo sapiens
aaattttgttagtttgagatctcttttacaagatgagggacaatttctttgaattttccaaaggccttctgaaaaatctcagttactttgaggttaaaaagactatttagaatttgatttgaggaagtttatcaaaaaatgtcaaaagattcgaatacaattaaatatgaccttggtgatctatttaaccaaaatarcaataaaagattctaaaggcaaatacagaaaattacacagatgtgaaaaaattaacccttttaatattgaaaggacttgatttccttaagtaaacatagacctgataaagacaacatgaagcacaggaaattattttaataagacagaatttttatttcctaggcatattacttgaaaggtgaagaaaaatctttctacaatcttgtattaagagcagaccaataatccaagaacactttgtccttttaaaaaaaggaaaaccaaattctagttttacatcagtgtactattcttactgaaactaacttttacgaaatcttataaataaatccatc

SEQ ID NO: 147035 - DNA, 533 bp, Homo sapiens
aaattttgttagtttgagatctcttttacaagatgagggacaatttctttgaattttccaaaggccttctgaaaaatctcagttactttgaggttaaaaagactatttagaatttgatttgaggaagtttatcaaaaaatgtcaaaagattcgaatacaattaaatatgaccttggtgatctatttaaccaaaatagcaataaaagattctaaaggcaaatacagaaaattacacagatgtgaaaaaattaacccttttaatattgaaaggacttgatttccttaagtaaacatagacctgataaagacaacatgaagcacaggaaattattttaataagacagaatttttatttcctaggcatattacttgaaaggtgaagaaaaatctttctacaatcttgtattaagagcagaccaataatccaagaacactttgtccttttaaaraaaggaaaaccaaattctagttttacatcagtgtactattcttactgaaactaacttttacgaaatcttataaataaatccatc

SEQ ID NO: 147036 - DNA, 421 bp, Homo sapiens
tgccgccataattcaatcacttctcaccaggttcttcctacgatatgtgggaattgtgggagttacaattcaagatgagatttgggtggggacacagccaaactatatcagtaattattaaaatcttgaaatatttctacatggatgataagttgctgtggccatgagtcmcctagatgttgatggcttttcccttagggcccagtggactttgtcaccatgtagaaactaaaaggcaatgcttgttacagagcaggatgctggtgttctagctattatcctttcagattgtatggtgtgcaccatctaatcgttaaatatttttattctcacccttgggtatgactgcagcaagtgctttttactactccaagttatttctttacttaataaatgctttattgaattcaacagaatactt

SEQ ID NO: 147037 - DNA, 503 bp, Homo sapiens
tgcatgcatgccctaatgtgcatgcttgcatgtgtgtttattattaattttactgatataaaggacatgtaacatgtaatttataaatatgaataaaataatcactactcttgattgtaaatcctggatagccagtagattctcacacactgctttggttgatttttgccaaaytcttatatccatagccagtctatgtttgcaactgatgaataatcatctttctgtcatacatattgtatgatagtttataatactggaagaatgggttctccatttgtgtgtgtgtgttattcagaatataacagccacagatatggcacactttaagttaatctgcatattctccatcactctcaagtcaacgaaatgatattgagtcttgatttgtggcatttgccagtttggctgatttcaagctaccaatgtgaatttactgcaagtgaattaggaagagatacatgtagcactctattatgtagtgtttccactctacaaataca

SEQ ID NO: 147038 - DNA, 599 bp, Homo sapiens
ggtataagtactcaaaaataaaccaggtggtaactaagttatttacatcactgggactcttccagtgttattaaagttgaagaacttgaaaagcagcatttattaataacaggggcattaatccagctgcctgccctgtactccacttacccagagagtctctcccagtcctgccaagcaaggattaagtagaattaagmcggcagctaaccaggtagaccttgtgccctgggccacaggtgactctggcaagggtgggcgcctgacctacatcaaaccattcagattctttcccccaggaaggaggaatacagttagtctctatcatccccttgaatgaggcacagggagttgcacgggtagccatagctggctggatatgcaaagaagccagtctgcagacagaagaggtgagaggctatgaggatcctgagacagtctcctgctctttaggatgggatgctgagagatatgtttgtccatttacccatcccactctggttagtttttgagggtcaaccacttcctggcctaaggcttcaggaagctcaccatctaaccttttgtcaaatgagtaagctatcctgtggccttgtaga

SEQ ID NO: 147039 - DNA, 493 bp, Homo sapiens
tcttcttttgagaaatctcttattattatcatcttcattatcactctaattattaataatgttcactaacccatacagctacagtgatttttgttacaacaggagctttctgctttcaaaaaaaagtgctgctaccttaagtaatcatttatcctaactctaggctgcaacttactattattattattcattcaacattcactcaacacttacttcctagagccactgtttgggcactggggaaatagcactgaacaacacagagcaaagtctttgccctgtggctcacattctggtgaagcagagaaacagtacacataataaatsaatgttaattacagtatgtttggcagtgatgaatgctagagaaaaaatagcctatgacctggcaaaggcattacccattaaggtaaaggacctatctcctagagcacttgagttttgtatcacataattcatcaaggcctttagatattacagtctgatctttggg

SEQ ID NO: 147040 - DNA, 567 bp, Homo sapiens
ggaaattgtaagaatgtggatttgggaattttgtacaagttaaacgaagcactgagatcttagtatagggaaatcttttcrgcactgagcagaggactcataagtaacacaacacgtggagttgtatggtcaaggaaatggcagaaacaggttctttttgcaaaggaagttttccctggacattcttaggtagcagacgtttctttttcttggacctcctatagcatttattcagaccttttttatgacttgcattacttcttgtactatattttagtacttttattgttatcatctctcttactagactctggtctttttgaggacaggaatgttttcagatttactttgccaactctgtggcacctctagcacacagcctagaatgtagtggttaacaaatacacattttctggaatttctagagacttatactttctccttgatgtgatactatctcatttgaatattttacagtaagcaggtattaccatgcaatcaggagaaaaagtgaagatataaatttcttttgaatgattaaatggataagtgaatgattaagaattc

SEQ ID NO: 147041 - DNA, 552 bp, Homo sapiens
atgtggatttgggaattttgtacaagttaaacgaagcactgagatcttagtatagggaaatcttttcggcactgagcagaggactcataaktaacacaacacgtggagttgtatggtcaaggaaatggcagaaacaggttctttttgcaaaggaagttttccctggacattcttaggtagcagacgtttctttttcttggacctcctatagcatttattcagaccttttttatgacttgcattacttcttgtactatattttagtacttttattgttatcatctctcttactagactctggtctttttgaggacaggaatgttttcagatttactttgccaactctgtggcacctctagcacacagcctagaatgtagtggttaacaaatacacattttctggaatttctagagacttatactttctccttgatgtgatactatctcatttgaatattttacagtaagcaggtattaccatgcaatcaggagaaaaagtgaagatataaatttcttttgaatgattaaatggataagtgaatgattaagaat

SEQ ID NO: 147042 - DNA, 567 bp, Homo sapiens
ggaaattgtaagaatgtggatttgggaattttgtacaagttaaacgaagcactgagatcttagtatagggaaatcttttcggcactgagcagaggactcataagtaacacaacacgtggagttgtatggtcaaggaaatggcagaaacaggttctttttgcaaaggaagttttccctggacattcttaggtagcagwcgtttctttttcttggacctcctatagcatttattcagaccttttttatgacttgcattacttcttgtactatattttagtacttttattgttatcatctctcttactagactctggtctttttgaggacaggaatgttttcagatttactttgccaactctgtggcacctctagcacacagcctagaatgtagtggttaacaaatacacattttctggaatttctagagacttatactttctccttgatgtgatactatctcatttgaatattttacagtaagcaggtattaccatgcaatcaggagaaaaagtgaagatataaatttcttttgaatgattaaatggataagtgaatgattaagaattc

SEQ ID NO: 147043 - DNA, 552 bp, Homo sapiens
atgtggatttgggaattttgtacaagttaaacgaagcactgagatcttagtatagggaaatcttttcggcactgagcagaggactcataagtaacacaacacgtggagttgtatggtcaaggaaatggcagaaacaggttctttttgcaaaggaagttttccctggacattcttaggtagcagacgtttctttttcttggacctcctatagcatttattcagaccttttttatgacttgcattacttcttgtactatattttagtacttttattgttatcatctctcttactagactctggtctttttgaggacaggaatgttttcagatttactttgccaactctgtggcacctctagcacacagcctagaatgtagtggttaacaaatacacattttctggaatttmtagagacttatactttctccttgatgtgatactatctcatttgaatattttacagtaagcaggtattaccatgcaatcaggagaaaaagtgaagatataaatttcttttgaatgattaaatggataagtgaatgattaagaat

SEQ ID NO: 147044 - DNA, 544 bp, Homo sapiens
ctgaaccagccaatgaaatgcattattctactggccagcgttctctagcagaaacaagagacagcatgcattactgagaagtcagacacatttgcactaaatcaaaaaataaaaataaaaagactctctagctagaggttaataacacaactcaatcaaaaccagtgacattttttatcaaacagtcgtgaaattgccatttggaactctaacttgctacaaatagrattaaaagtgccattctaattctgtctccttgtacaatacgaccctgatatggaaaacaaggtgtctacactgaacacatccagtttacaagagaaaaaacgggatgattttttgattctctcaaatattaggtaagtgtttaacacatgactcctgagtgggagtgccagttaaagagttgtagtacctgtcaacgctggtttaacatttcaacaaagcaaatcatcaattaaaactcatcagcaacagtcatcctgttaattgaccaaatgattatccttcttttagttaagactctacctgacacacttgaaga

SEQ ID NO: 147045 - DNA, 190 bp, Homo sapiens
gccactagccaaatgtgactattaacatttcagttagttaaaattaaatraaattaaaattcaaggatttatttgcactaaccacatttaagttctcaattagcacatgtggctaatgtctgccatatacattttaatcatcacagaaacttctattggacacatcactgaacaaagaagacaaagatct

SEQ ID NO: 147046 - DNA, 622 bp, Homo sapiens
tttcaaccaatcttcctgttctcacaccctcttttggcacctggcatttccaaatgatgacccttttaaatgcaaattcattcactttctgtggaagttctcaacttcaagatatagctctctttttttctgacacatcaattaacaccactctccaaaatttgcttaaatctttcataccttaatgtctcatcccctgcttcttttcaccccttatgggttaatattattttttggccttattactattttaacagtatattggaaactaaggtggtctccataatatgtaaagggaatactgaaaaacaattttgggttaactgtcctcaaattttttcaatagactttatttttagagtagttttacctttacagcaatagtgaacgtaaaatacagatagctctcatttactccctgtcccccacatacacacaacttcctccactatcaacatcctgcaccaaaayggtacatttgctatctttgacgaacctacactgacacatcgttatcactttaagcccataatttacattagagattactcgtggtgtagtactttctatagatttggaaaaatttataatgacacatatctacattatagtatcataccag

SEQ ID NO: 147047 - DNA, 622 bp, Homo sapiens
tttcaaccaatcttcctgttctcacaccctcttttggcacctggcatttccaaatgatgacccttttaaatgcaaattcattcactttctgtggaagttctcaacttcaagatatagctctctttttttctgacacatcaattaacaccactctccaaaatttgcttaaatctttcataccttaatgtctcatcccctgcttcttttcaccccttatgggttaatattattttttggccttattactattttaacagtatattggaaactaaggtggtctccataatatgtaaagggaatactgaaaaacaattttgggttaactgtcctcaaattttttcaatagactttatttttagagtagttttacctttacagcaatagtgaacgtaaaatacagatagctctcatttactccctgtcccccacatacacacaacttcctccactatcaacatcctgcaccaaaacggtacatttgctatctttgacgaacctacactgacacatcgttatcactttaagcccataatttacattagagattactcrtggtgtagtactttctatagatttggaaaaatttataatgacacatatctacattatagtatcataccag

SEQ ID NO: 147048 - DNA, 546 bp, Homo sapiens
ccattcttgtgcgggtccatttatatatgttcctgaacagctaatatttcatttagtttccaattaaacttgctcaaatacatttttgaagtgcattgcttaaaatttacattcaaggcaagaaaacgagtttgtcagtaaatgtagtaattaaggaagtcccaagtctgtatttttaagatactagaggtaattgtaactaatcactttaacttaaagaaatagaattggaaatacccccctccccccgccaccccctaccaaaaccataccttagtcactttggaattataaccgtcttttacgtctatcaatataaatgtattgcatttggcattcaaattactttcaaagggataaatttcgaatttttttttttcattgtagcttctgatctttaaatgtactgaacaggaggatttggggagcttgtcttgtctgataggtgttaagtatctatgacgacaaatttgagctgaagcaatgtgcaatatggactagtaatatcttyacaagactattttggaaattctcacgttgatgtta

SEQ ID NO: 147049 - DNA, 546 bp, Homo sapiens
ccattcttgtgcgggtccatttatatatgttcctgaacagctaatatttcatttagtttccaattaaacttgctcaaatacatttttgaagtgcattgcttaaaatttacattcaaggcaagaaaacgagtttgtcagtaaatgtagtaattaaggaagtcccaagtctgtatttttaagatactagaggtaattgtaactaatcactttaacttaaagaaatagaattggaaatacccccctccccccgccaccccctaccaaaaccataccttagtcactttggaattataaccgtcttttacgtctatcaatataaatgtattgcatttggcattcaaattactttcaaagggataaatttcgaatttttttttttcattgtagcttctgatctttaaatgtactgaacaggaggatttggggagcttgtcttgtctgataggtgttaagtatctatgacgacaaatttgagctgaagcaatgtgcaatatggactagtaatatcttcacaagaytattttggaaattctcacgttgatgtta

SEQ ID NO: 147050 - DNA, 627 bp, Homo sapiens
ctacattataaagaaagaaaaattttgttttcaaaatcagaatatgaagtactatattccaaatcccaaaatacatattgagtacatgttagttcagacatgatgggatgagagtgggcaccattgtaaatatcaagaaaatatatttaggtagcagaattaataggatttattgaatgtgcaggggatgagggagaagtctaggcctcacaacttccaaatgtcttgcttgaacaataaatggggtgaattkcaaggccattcacgaggtctgggaaaaaagatggaaaattgatgactttctcttttgactaattgggcccaacactgaaactctaataaatataattttgcatttttcagcttactcatttgcctttacttaaaagtacctggatataaatagagcaacatttaactatgctgaagaaatattgtttagagggcaatagaaattgtcatacaattgctcaatataattgctggagttatcttgttcagaattgttccacatattcaattttgtcaagcaaagaagtagtattttatgcatgcaacagatagcttttgtgtgatggttatgtattgggcactattctaagaactggagatagaggagggtttgat

SEQ ID NO: 147051 - DNA, 621 bp, Homo sapiens
gttctgttttatgtattacatcatcatctggtacaattgctattagtaatagtcacttataaaaaaatagtacatttaaaaagaaaagggaaaaatatttgttgttatactttgaatgtttttatgtatatattcaccttcttcagactgtatctgtcagagatgccacgttactggacatcattagcaccttcaaaatgtggggaaagagctagtgstctttggaagaaaaaatattctctcaaaatggcatttgctaacactgaatgctgtattttatgttctgaagagatgctctgcttgtcatctccatgttaataatactccagatttggtgaactcctaattaaagataactagaatagttaaaataagatagaaaaacaaactctaattaatgaagctatgtatttgcctcaagacatcagttaatgcttttccattaatggtaccaaatttctgatgatgttgaagtactttatttggggcagagtaggaatattaaatcttaaaattgttccttgacttttacaaataaggagaaatctatcatttgccttagcaatttctgaccaatgtatgcaaatagaagtatgaattgcctaagaatttcaggatgat

SEQ ID NO: 147052 - DNA, 588 bp, Homo sapiens
tgatagtcaaagaaagactgaggaggctgttatcatcgaaggaaactaaagaaacctgacaaacgtataatgtgattctaagctggatctttttgttagaaaggtcattattggcacaattggtgaaatttaaatggagttctgaggagtaaatggtactgatgtatttgtgataatttattaccttttttgtaatttcttgattttaatgatcgtagtgtggctgtttagaaaaatatccttgttggtaagaaatacaccccatactatccaagggtaatggggtagcaggttggtaacttgttctcaaatggctcaggaaaacagaagtttattatacagttacttctgagttttctatttgtgattattttaaaaattataattttgaatytgcttttataaccaatgacaatcctgcagttttgactatgcaaattgttactctaaatatattgatatttatataatcaaattagatgatccaagtaccattataaagcattttgtctgatcacctgacaaatgatgacagtacaaacttatattggggtttcatttgtattcagataatcatttttcacatac

SEQ ID NO: 147053 - DNA, 491 bp, Homo sapiens
caaacaacgagatctcatgagaattcactatcatgaggatagcaccaagccatgagggatccrcccctatgacccaaacacctttcaccaggccccacccccaacattggggattacattcaacatgagatttggggaggagaaatgtcccaaccatataattccactcctgggcctccaaatctcatttttttcttccattgcaaaatataataatctcttccagacagtcccctaaagactttattcattccagcactaactcgaaattcccaagtcccaagtccaagtccaaagtctcatatggagctgagttccttccacccatgagcctgtaaaatcaaaacaagttatttactcccaagatacaatggtattacaggcattaggtatattcccattccagaagggaaaaattggccaaatgaaaggagctataggctccatgcaagtctaaaacccagaagggcagccattaaatcttaaagctc

SEQ ID NO: 147054 - DNA, 491 bp, Homo sapiens
caaacaacgagatctcatgagaattcactatcatgaggatagcaccaagccatgagggatccaccccyatgacccaaacacctttcaccaggccccacccccaacattggggattacattcaacatgagatttggggaggagaaatgtcccaaccatataattccactcctgggcctccaaatctcatttttttcttccattgcaaaatataataatctcttccagacagtcccctaaagactttattcattccagcactaactcgaaattcccaagtcccaagtccaagtccaaagtctcatatggagctgagttccttccacccatgagcctgtaaaatcaaaacaagttatttactcccaagatacaatggtattacaggcattaggtatattcccattccagaagggaaaaattggccaaatgaaaggagctataggctccatgcaagtctaaaacccagaagggcagccattaaatcttaaagctc

SEQ ID NO: 147055 - DNA, 437 bp, Homo sapiens
taaaactcaaataatttgtataactggctggtttatgaccaaaaatgctatttgcctaatgagcatttagaacgtggaaactgattttgaagcttgtamcagaaataggataaaataaaaataaaataaaatgatgtttacagaaatgtatctgtattacatggctaaagatatgggaagtttttttctagttatgagacgtgttctacttaaattgaatagacatctaggagagagagattgaacattttattaatcttattttacaaaagaggaaggggaggcaacagaacattaaaggattgtttctcaagctacatagcaggatgcaacatctgaatggcattgcccccaaaatcagcctatgcccacctcagtccatttgcactgcaataatgaaataccacagactgcgtaatttataaacaatagatatt

SEQ ID NO: 147056 - DNA, 541 bp, Homo sapiens
tgtaaatatagatatggagaggataatactggagtcaagaagataagttaatatgttgttacaacagtctggrtaagaggtgatgaggtctaaaattgagaatagagcaatgggaatgtagaaagaaatctgagataatttaggggtgataaaattgagtaaatttcaaatgagctttccttttcttaaaaagtaattttctaacaaattgctgcgctggcaacacagagctggagatcagatagggcgggatgactttggactttgaaatcagagaagcctggacttgagacccaaatccatcacctccaaggtgagtgactcacagccagatactttacttaactcaccccttagtgaactggaggtaattcctgccttgcaagattattggattacttaaataaagtataaaaaatgcctagcacacgtgggcagccaattaacattagctacctttctgccctcttttccaactttaaaatacatgacagtaaatcctttaatataaaaaaaaaaagactttttttaaattggcaga

SEQ ID NO: 147057 - DNA, 541 bp, Homo sapiens
tgtaaatatagatatggagaggataatactggagtcaagaagataagttaatatgttgttacaacagtctggataagaggtgatgaggtctaaaattgagaatagagcaatgggaatgtagaaagaaatctgagataatttaggggtgataaaattgagtaaatttcaaatgagctttccttttcttaaaaagtaattttctaacaaattgctgcgctggcaacacagagctggagatcagatagggcgggatgactttggactttgaaatcagagaagcctggacttgagacccaaatccatcacctccaaggtgagtgactcacagccagatactttacttaactcaccccttagtgaactggaggtaattcctgccttgcaagattattggattacttaaataaagtataaaaaatgcctagcacaygtgggcagccaattaacattagctacctttctgccctcttttccaactttaaaatacatgacagtaaatcctttaatataaaaaaaaaaagactttttttaaattggcaga

SEQ ID NO: 147058 - DNA, 566 bp, Homo sapiens
ctttgtttgctggaacactcactcttggagccctgagccaccatgtaaagaagtaggaagattcactgtcctgaagctgccatgttgtgaggaagcccaagccacatggaggggccatgtctaggtgctccagtcaacagtcccagctgagcttagccatctaacatccccagctattttagtttttcctgaaatcccagaaatcatggaatagagacaaatctctcctgctgtgctctgtctgaactgctgacccacagaatctgggcacataataaaattattttgtgccattaggtatatagttgatttgttatgcagccatagataaccaggacagctatgccagctatgargtgccatgcagtcatctcgggggtcccactcacaacatctccccatactcctaggaagctggctgggctcaactctaagtgcaaagcattgtgcaaagggaagggcatgaaactggggggccctgcatctcctgggggttagagtactgaacttcctccacccactgccttctcagagatgagcaccctacatctggatctgcctcaggc

SEQ ID NO: 147059 - DNA, 557 bp, Homo sapiens
ggaatgacacctggcttgtggagagaatacaacgaatgtttccaaagtgcgtggcatacagtaagtactcaatgaatgagattttcttcccacctctctagtctcaattttagatgttccctggctcccttaagttccagaagtgagaggtggagagtggggacagagaaggcagctcctggacaggtgggaatccccactgtgtacccgcccccatcccagcccagcctaggaggccatactcgccgcaccctacacaagtcctttgcttccctcagggacctcaagcctcccacccccaccatcctgctggcctccagattttctgcctcctgaaacctgggcccaggccccagcaatggtcctctccccaatctgctggtggctcccacaggacagggaaattaacagcacttgagtgtgctctgaaggttggtacaacctggcggccccacactgcccatgycctcctagtggagccaggtgacttctgggcctgcaggggctgagcaggatgcatcttccagctctgggccacgaggaagtgatggcactgt

SEQ ID NO: 147060 - DNA, 540 bp, Homo sapiens
ataatttagacttgggtctggggcctaggcatctgkattccctttaaggcctcccctccctgcccaggacagggaggtaccttgccccaggccttgcctgactcaggtcccaggcacagggttctggggacacagccagcctcaaggtgggacttttcagggaaggcagctggtgcactggcagcttgagggtgatgggcatgtgggggtggcagggagggcaagtggagccagaaatctggcccagtcagtcccaggacagaggcttcttgtcagcatccccgggcgttggccctgctgacaaatgggccacgacttctctcgtgaatttgcggagtgacgtgtaataataaaacgctccttaaagccgggacatggcaggagtgactgcttttccaggtcctaataaggatcattaactgtgtatgaaaggttttataaacatttgttaagctccctgaactaactgtgcccatggcctgtagctccctgagatgtcacggccagctggagccagctggaagggtagagacacaggac

SEQ ID NO: 147061 - DNA, 607 bp, Homo sapiens
taaaccctgacattccactggctcagtatctaatatatagaagtacatcacttaccgatgtaatagtccaacacaacacaaaggttcctggtaagtggatagtcttcttccatacgatcgtttaggggctaaaggaattttccatctcatggctcagccatctgaaccttagaggcctatgtatgcagctggtggatggggaagagaagagagagaagggttagtttctgaattgccttggctcagaagtaacatacaacaattttgctcatattctattggcaagaactagttaatggtcccaatcagcttcaagggagctataaaaagtattccatgcagccactttgtagcaacaactatttatggaaaagggaacatggatttgagtagacagttggtcatttcaggctactatcatcttttctctactgkttttctaatggtttagggtttactcatgacttttcttattcttgactgatctcatttgcattactaaagaagtacttgtaggcaattggctttgtagctcctggtgtgtggttaatgcattactttagaacaacaatttagtggatataaagagtccttcctggatgggaat

SEQ ID NO: 147062 - DNA, 607 bp, Homo sapiens
taaaccctgacattccactggctcagtatctaatatatagaagtacatcacttaccgatgtaatagtccaacacaacacaaaggttcctggtaagtggatagtcttcttccatacgatcgtttaggggctaaaggaattttccatctcatggctcagccatctgaaccttagaggcctatgtatgcagctggtggatggggaagagaagagagagaagggttagtttctgaattgccttggctcagaagtaacatacaacaattttgctcatattctattggcaagaactagttaatggtcccaatcagcttcaagggagctataaaaagtattccatgcagccactttgtagcaacaactatttatggaaaagggaacatggatttgagtagacagttggtcatttcaggctactatcatcttttctctactggttttctaatggtttagggtttactcatgacttttcttattcttgactgatctcatttgcattactwaagaagtacttgtaggcaattggctttgtagctcctggtgtgtggttaatgcattactttagaacaacaatttagtggatataaagagtccttcctggatgggaat

SEQ ID NO: 147063 - DNA, 339 bp, Homo sapiens
gcaggtggttgtgaggattagacgtaatctagaacagagattggcaaattttttctgtaaagggccagatactaaatgttttagggttgggggggatatgtggtctctgttacaactaaactatgctattgtagcacaaaagcagccacagacagtatggaaatgartgggtgtggctgtgttccaataaaactttatttataaaaatgggcagcaggctggatgccacctaagggccatagtttgccaaccacctcatctagaacgtgactactacacaccccctggttggggtcctgggcctgggcccattgtccccagatccattccttgtcctcc

SEQ ID NO: 147064 - DNA, 339 bp, Homo sapiens
gcaggtggttgtgaggattagacgtaatctagaacagagattggcaaattttttctgtaaagggccagatactaaatgttttagggttgggggggatatgtggtctctgttacaactaaactatgctattgtagcacaaaagcagccacagacagtatggaaatgagtgggtgtggctgtgttccaataaaactttatttataaaaatgggcagcaggctggatgccacctaagggccatagtttgccaaccacctcatctagaacgtgactactacacaccccctggytggggtcctgggcctgggcccattgtccccagatccattccttgtcctcc

SEQ ID NO: 147065 - DNA, 538 bp, Homo sapiens
ccacccacctaggggtggtagcggctaatctctgggcagcctcaccatggctttctagctctcctggcctctttataactagctctccatattcaatcgtgtccattgaactatttgtggcttgagcttttccatttttatgactggaccctgactaaaagttttatgctatttattcatcttagcactctgaatgtttttaattttaggaggtaacagttctgcaaataggttcttacacggtttttatgagaaaagcagaatgttagtcatttagtcaacaagaatataataagcacctgctgtttgccaggacctgttccagaccctaagaatacaattctgaacccagaggtctgcagtctaataaactcgttgactttagccatcaggtacccaacccaacccttcatattatacatgacaaaaaaaaaaagacccgaaagataaccatagctaatgtttatgaggaatgtaatttcttctatgctctccmttaatcattttgcatgagttaactcatctctcataacagccc

SEQ ID NO: 147066 - DNA, 496 bp, Homo sapiens
cgcaaggggctagaatatgatctattgatatacccaaaaaagaaaaggaccaaatattggcaagcacatgaattttgccmtatggccttatttagacccaggctacttagataaaagccatcgtagatccaggactagccacataatttggacagcccagtgcaaatgaaaattcagggctccttgttgtaatagcaggaaaatggggataatgatacctttgtgggagggtgtttataatgtatttgtacactaaaaacataaaaagtactaaaatataaaacttttttttcttctcacaactcttttttgacattgcattaaaaaaagtttccatttactataaccctctttgcaacatgcagatatttgcagggattatgtacagtctcccatgcactcagagcactggcccaggaatctgtgtccatttgtgacttaccagctgctgagttctccctccttccagctgctgaactgacatgtttattggccg

SEQ ID NO: 147067 - DNA, 496 bp, Homo sapiens
cgcaaggggctagaatatgatctattgatatacccaaaaaagaaaaggaccaaatattggcaagcacatgaattttgccctatggccttatttagacccaggctacttagataaaagccatcrtagatccaggactagccacataatttggacagcccagtgcaaatgaaaattcagggctccttgttgtaatagcaggaaaatggggataatgatacctttgtgggagggtgtttataatgtatttgtacactaaaaacataaaaagtactaaaatataaaacttttttttcttctcacaactcttttttgacattgcattaaaaaaagtttccatttactataaccctctttgcaacatgcagatatttgcagggattatgtacagtctcccatgcactcagagcactggcccaggaatctgtgtccatttgtgacttaccagctgctgagttctccctccttccagctgctgaactgacatgtttattggccg

SEQ ID NO: 147068 - DNA, 572 bp, Homo sapiens
cattatgtaatgtaaaatgttccaccaagaacacaggtcaataaaaaacatacattcaaacaacagtgatacaaaatatataaagcaaaaaatgatagaactgaaagaagaaatagactaatccacagttatagttggagactgcaacaccctctctcttaatatttgatagaacaaatagaaaatcagcaaggatacagaagaatgaaacaaaaacactatgatgtcaggggtccacaaagacaattctcagtcttgatrattctctagaaggacttaacagactaaaaaagctattacactcatgtttatatttctgatgaaataacatatattaaatatgcaagaaatttttttcacatcttgacaactgtgaatagtgctgcaaagaacgtcaaagtgctaacatctctgagatcccaatttcaattttttgggataaatacccaaatttatccaaaatgctaataaatgcattgctgtattatatggaagttctattttaatttttttaatcaacccccatactgttttccatagtggctgcagcattttgcactgatcaccaatat

SEQ ID NO: 147069 - DNA, 572 bp, Homo sapiens
cattatgtaatgtaaaatgttccaccaagaacacaggtcaataaaaaacatacattcaaacaacagtgatacaaaatatataaagcaaaaaatgatagaactgaaagaagaaatagactaatccacagttatagttggagactgcaacaccctctctcttaatatttgatagaacaaatagaaaatcagcaaggatacagaagaatgaaacaaaaacactatgatgtcaggggtccacaaagacaattctcagtcttgataattctctagaaggacttaacagactaaaaaagctattacactcatgtttatatttctgaygaaataacatatattaaatatgcaagaaatttttttcacatcttgacaactgtgaatagtgctgcaaagaacgtcaaagtgctaacatctctgagatcccaatttcaattttttgggataaatacccaaatttatccaaaatgctaataaatgcattgctgtattatatggaagttctattttaatttttttaatcaacccccatactgttttccatagtggctgcagcattttgcactgatcaccaatat

SEQ ID NO: 147070 - DNA, 436 bp, Homo sapiens
gatctataaaacaaaaacacaatacataaataaataaaacaaggtattcaggacacaaatagaatgatgaatagaatagtacctcacatcccaatactaacattgaatgttaatggtctaaatgtttcaattaaaagayacagaatagcagaatggggaagaattcacaaactaagcatctgttatcttcaagagactcacctaacacataagcactaacataaacttaaggtaaaggggtagaaaaacatattccatgcaaatgaacaccaaaagcaagcaagagtagctattgttatataggacaaaacaaactttaagcaacaccaattaaaaaagacaaagagggacattacataatgataaaaggacttgtcccacaggaaaatatcacggtattaaatatatatgcacctaacactggtgctcccaaatt

SEQ ID NO: 147071 - DNA, 436 bp, Homo sapiens
gatctataaaacaaaaacacaatacataaataaataaaacaaggtattcaggacacaaatagaatgatgaatagaatagtacctcacatcccaatactaacattgaatgttaatggtctaaatgtttcaattaaaagatacagaatagcagaatggggaagaattcacaaactaagcatctgttatcttcaagagactcacctaacacataagcactaacataaacttaaggtaaaggggtagaaaaacatattccatgcaaatgaacaccaaaagcaagcaagagtagctattgttatataggacaaaacaaactttaagcaacaccaattaaaaaagacaaagaggracattacataatgataaaaggacttgtcccacaggaaaatatcacggtattaaatatatatgcacctaacactggtgctcccaaatt

SEQ ID NO: 147072 - DNA, 493 bp, Homo sapiens
tttttatcattcagtaaactacatggttaatttactaattaccatgacctcaatttccacaaatgtgaacattttgccaagtcttcaatagttacgtatggccaattcatacaatgtaaatgtgtcagagataactaactggtgggtgacactcaacattcaattcactcattccaaaggtcttattatgccttctcagtcctgaatgtacccttcttactaatctgaattaagaggattggttcccttttgacatttgccttgccaataatattgcctgccatttaacccaaggtttccaatgcctggcagatagtctctgtcaccacacacagcactggtcacatagtgtgttctcaatacatgtgtgtttaaygaaactgaaaagaatacatagcaggatataagaagatgctaagccacatgaaaggatagtaataatggcagcttaatgtactgggtgaaatggtcagagagacatgagggctggcac

SEQ ID NO: 147073 - DNA, 493 bp, Homo sapiens
tttttatcattcagtaaactacatggttaatttactaattaccatgacctcaatttccacaaatgtgaacattttgccaagtcttcaatagttacgtatggccaattcatacaatgtaaatgtgtcagagataactaactggtgggtgacactcaacattcaattcactcattccaaaggtcttattatgccttctcagtcctgaatgtacccttcttactaatctgaattaagaggattggttcccttttgacatttgccttgccaataatattgcctgccatttaacccaaggtttccaatgcctggcagatagtctctgtcaccacacacagcactggtcacatagtgtgttctcaatacatgtgtgtttaacgaaactgaaaagaatacatagcaggatataagaagatgctragccacatgaaaggatagtaataatggcagcttaatgtactgggtgaaatggtcagagagacatgagggctggcac

SEQ ID NO: 147074 - DNA, 543 bp, Homo sapiens
ccatagcggtccaccaccccagggccattcatggcagagaggtcaggagaatggatctagaggagcagagaatcacacacacagcaatgggtcaatcatttggaagtatgcactgttaaaatgctggtataaatctttccaagcttttccaaacttacctcctatgatgattgggactacttttttcccctttctgagacttgtatcaaattgtaagtatgtgtgtccacggcaatatttcaaaggataatgacatctgttagaagaatcagaagaaccttcttgtcctcttcttataagtagaaagttgcctttcagaaaagtcctgcctggagtattactttctacatgttgattaggttttaatgaattagattttatagatcaaggaaaaagacatggatctaaaatccagctaccctgaattatcttttttttccttctcagaagtgactaagaaaaaatgttcatatgtagtatctagtgcakttccagatattcacagctgttgactgggatgataaaaaacaaagcttgtagttt

SEQ ID NO: 147075 - DNA, 505 bp, Homo sapiens
ccctagcttttaagacagtaatgaattattacagataatggaaattgcattcaagcaatagcacaataaacaggttgttctgtgtggagtgtttatttatttatttttaatttaatattcatggccaattccacattgtatcttttctagacatagtactcattagccttctggagtagaaaaagtgtgaactttaragcggactctcaggagaacagcaatttggctcaggccccaatccaacattacacagagagtactggtggctgacaggatttctgtacaaatgggctcctggaatgcctcaaaccctacagaaatggctttaaattgttaacatgttagggctgaacacaatgccagaaaatgtgcttatattttcccagatgacaaagaccactccattataactaagtctgcacctgtaaacctggttatgttaatcaaaatgcctgacttattgtgtgtggtttgttttgttttgttttgttttgttttacctgac

SEQ ID NO: 147076 - DNA, 434 bp, Homo sapiens
agaagaatgaagatctgggatacatactgggacgatacatactttttagcaatatttatttatccaataatttatttttcaaatacatcgtaattgagcatctaaggtttagcactgccagtataacaacaatatagaatcactgaactcaagctctggcaatgcagtgagctaatrctagaaagggaaacagtttttatgttgatcaaagagatccacagaggagattttggtcaagcagaacaatctagcccactgaaaagaatcaccaaaatctttatatatatatatgtgtgtgtgtgtgcgcgtgcttttgtgagtagctttgttcgctacttctaaagacaaaaatgtgaaaagatattgaccctgaaatctcttgggaaatgtgttcatactgcaaaagcaggaaagtacatgcctaaacatttgac

SEQ ID NO: 147077 - DNA, 434 bp, Homo sapiens
agaagaatgaagatctgggatacatactgggacgatacatactttttagcaatatttatttatccaataatttatttttcaaatacatcgtaattgagcatctaaggtttagcactgccagtataacaacaatatagaatcactgaactcaagctctggcaatgcagtgagctaatactagaaagggaaacagtttttatgttgatcaaagagatccacagaggagattttrgtcaagcagaacaatctagcccactgaaaagaatcaccaaaatctttatatatatatatgtgtgtgtgtgtgcgcgtgcttttgtgagtagctttgttcgctacttctaaagacaaaaatgtgaaaagatattgaccctgaaatctcttgggaaatgtgttcatactgcaaaagcaggaaagtacatgcctaaacatttgac

SEQ ID NO: 147078 - DNA, 434 bp, Homo sapiens
agaagaatgaagatctgggatacatactgggacgatacatactttttagcaatatttatttatccaataatttatttttcaaatacatcgtaattgagcatctaaggtttagcactgccagtataacaacaatatagaatcactgaactcaagctctggcaatgcagtgagctaatactagaaagggaaacagtttttatgttgatcaaagagatccacagaggagattttggtcaagcagaacaatctagcccactgaaaagaatcaccaaaatctttatatatatatatgtgtgtgtgtgtgcgcgygcttttgtgagtagctttgttcgctacttctaaagacaaaaatgtgaaaagatattgaccctgaaatctcttgggaaatgtgttcatactgcaaaagcaggaaagtacatgcctaaacatttgac

SEQ ID NO: 147079 - DNA, 500 bp, Homo sapiens
agatctttttcagacaagcaaatgctaaggaaattaattaccaacagaccagtcttacaagagttcttgaagggagtactaactatggaaaagaaagacattaccagccactaaaaaaaaaatgcacttaaatacatagaccagtgacattataaaacaatgaaacaaacaaggtttcatcatagccagataataacatgatggcagaattaaatctatacttcttattactaattttggatgtaagcagactaaatgccccaaataaaagacatagagtaacaagttggataaagaagcaagacctaagccttacagtcttcaagagactgagctcatatgtagtgacacccataggctcaaagtaaagtaataaagaaaaatctaccaarcaaacagaaaacagaaaaaaggcatgcgttgctattctaatttaagacaaaataggctttaagccaacaaagactaaaaaagagaaacaagagcactacataatggta

SEQ ID NO: 147080 - DNA, 664 bp, Homo sapiens
aactcccatttttaaaaccatcagatctcatgaaacttattcattgtcatgagagcaacataagaaagacctgcccccatgattcaattacctcccaccaggtctctcccacaacacatgggaattcaagatgagatttggttgaggacacggctaaaccatatcaattactgagtatgtaacctctcaatcttatgatatatatttgatattctcttatattcaatttccattgactgtacactttcagactaatagattcactatagcataatcagcttggtgcttttaaatagaaaagtaattcatattaaaaatgatagatttttaaagcstctaattattttagtatcatcaagtacctttttgttaaccagattttattattatgtatatttaatctataagatgtaaaagaagagaatagacaatattcaatagaacaaaatacagatgagtatcagtagtgacatctgtttgaaaaaaatggacatttaatttaagtcatttagttccatgatccggaaatagcatccatatttcctggacataccaatgtaagatgaatgaaaggattaggcagcaggcagtcttagaacatatccacattctatgccccacttcttgaagacatactcaagtaattaaaaaatccaggagaata

SEQ ID NO: 147081 - DNA, 546 bp, Homo sapiens
tttctcacttaaccttcacatttaatccatgagagtgctactcatatccctcactttttatgttagaaaagtaaggctcaagtgtatctcacacaaagatgcacaatatgaagtagcgactcaggcatcytaaagagttctgatttagtctccggacttttcaagtgatattctttccaatacacatcccttctatacattcatgtgcttatttttacatagatgtagctattctcacacatctgaggtatttgcatttccttttttgatacgagtagaaacaccaatgtttgctgtattttgaacaaattactattagtccaattaatggaccaaaattaaccatttatctggcccctaatttcttgctcagccaataatggacaacaggaaatatgtatagtgtattttataaatttttttccatttctaccttatcaagatttttaacaggaataggtaataaaatgtattaaatgctattatggtacatccattgagatgaatatgtttttcttcatacttaaactttcatgtagtgaggaa

SEQ ID NO: 147082 - DNA, 607 bp, Homo sapiens
gaaactccaggaggatggctgaggtcaggagtcaggttaatggttttgtgtaggcagccagaaaagaggcattttagcgaagagtagatgagccattaaccagaaacctaacgggcaaaaaataaaaaaataaaaataaagaagtagatcagtcaagatgccaaagccagaggatgtagagagctaaagtctcttgggcagacaaaggcatgcaaagataagacaagttacagatgagactgaatgccaattcagggcaaatatcaggarcccagagactaattgtgcgctacatttttgcagtgttaagaacaaaggatctgttaacagagaagagctgtgtggataactaaaaccactgaaatacagagataaaatccatataaaggggaaactcaaattatcttaactagagtgatgacttcctaaactgcaatatcagtgtcatggtgtgaactttctgacatacactaaggatacctcttcaattcttatgtctgtgacttggaagccactttttgatgaaagattttccttgtggtttaatatttgaggttcctttttcaaatactatatcaaaaaatagctgcacagcttcctgaaataa

SEQ ID NO: 147083 - DNA, 517 bp, Homo sapiens
gttggcttcctacaagcacctcttccagcatccattctctcttgcgtttccatacagaagccctcatacagtctggggccttaaaaaaaattaaggtttgattgcaccaccatcctcatccaacctgtcctgccttatcccacttactgtcttgaaaacaaaggaggagtcatctacattctagtaagaagacagagttaagggcaatttgtccattaaaaatacacttaggtgaaatatttatcaatcttctgaaagagaagggctttctatgtttaaagagagaagaaatcttaaagcaagtgactgatcaatagacttaactgttgaaaaatttaaatattttgatgtcaatatagaaacactgagaccaggcacggtggctcatacctataatcccagcactttaggaggcygaggtgggaggatcacttgagcccaggagttcaaaaccagcctggacaacatactgcccatctctacaaaaaataaacaaaaataagctgggcgtggtggt

SEQ ID NO: 147084 - DNA, 519 bp, Homo sapiens
gggatatgttcactaggcaaaaatcctcaagactgcaggctcccattagatggtcttctttgccaaagcaaaagaaaatatggggccatctctcatctccccaagcttcaaatgtggtcaataaattggggtgtgaaaaatgccaaaaaataagtggccaaatattcacagtgatactgcttatgacatactctctcacgctgaaagcaaatcaggctgtgaagtctctcatctgagcccagctggctcaccagaactccgattggggttggagatcaactggcccccatgcactgaaactcactggccagagatctggataagtggcagaggcccacctataccatttgttttgytactccagaccttaattctgccacgtgttcactttttctaagggatattctggtttctttttctcttctttagccctgtaaaattcaccaattctgagaattcattgggactgtagaggttgtgataatgtctttattaaatatttttaatataaaaaaacct

SEQ ID NO: 147085 - DNA, 388 bp, Homo sapiens
agaaaaaaaaaaaaggtacttagaggtcgcacttaaagattatgcacatcagcagaggaaaggccagccaagcttggggcaagcttgatgcagtaggagagactccttatgaggcttagcccttgtcttactgccagcctttgccacaggcaggtgagaaaggcagggccactcctcagcaaagttggcctcttctacacttcctcaccagtgttgtttcttccttttttcccctcttccccttcccgtcttgtgttttttctgaaccccacatctgccatcatttctctcctctagagtccctggcttctggccactgcctcctccctcttctaagccttggcctgaatctggttgaycagaggcaagtgtggatcctttgggtggc

SEQ ID NO: 147086 - DNA, 421 bp, Homo sapiens
catctcatcacagatccagacctcctgagcccactttccccatctcatcacagatccagacctcctgagcccacttcccccatctcaccacagatccagacctcytgagcccactttcccgatctcatcacagatccagacctcctgagcccactttccccatctcatcacagatccagacctcctgagcccacttcccccatctcatcacagatccagacctcctgagcccacttcccccatctcatcacagatccagacctcctgagcccacttcccccatctcatcacagatccagacctcctgagcccactttccccatctcatcacagatccagacctcctgagcccactttccccatctcatcacagatccagacctcctgagcccacttcccccatctcaccacagatccagac

SEQ ID NO: 147087 - DNA, 406 bp, Homo sapiens
gaattcttagttggcctaggaaatccagctagtcctgtctctcactggtgctgaggggttgggcttcttttcaacccctggggcacacccagaaagactggagggagccatcatgaccacagtgctccttgcctctctccctagcctcagtcctggggcatttcccccttctctcttgctctctcaaatctctggctctccctatccctcctggacatctgtatttctgtgataggcctgagcttccacaatgggcagaaattcsctctggctttctctttgccttacatttagagggggacaattagcatggacatacatgcatcagggatattgtgactcccgttgatattatctcagatccttaaagccaatttggtaaagcagctaggcaaattttaggggt

SEQ ID NO: 147088 - DNA, 602 bp, Homo sapiens
aagctttattctttctgttttcacaataaaccttgctactgcagggtccctgccatctttaagagctgtaacactcaccagcaaggtccatggcttcattctygaagaccaggaacccaccggaaggaaccaactccagacacaagaggattgtccaagcccaagagtttgatacctgcctaggcaacatatccagaccagatctctttaaaaaaaaaaagagctgggcatggtggcaaacctatagttggctagtctaggcagagatgaaggatggcttgagcttaggaggttgaggctgcagtgagtggtgattgcaccactgtaatccagcctgggcaacagcaatactgctctctaaacataaaaaattaaataaagacttagtgctaggtgctgatttctggcaagttccaggtgggagactggcaggcagcattatagtcctctaagagaattcaaaccctaatttctgggactatgaatctgttactttacaaggcaaaagagccttgtggacaggtttctaatcagttgactttaaaatagggaggttatcctggatttatctgggttggcctggtggaatcacccttaaaccc

SEQ ID NO: 147089 - DNA, 602 bp, Homo sapiens
aagctttattctttctgttttcacaataaaccttgctactgcagggtccctgccatctttaagagctgtaacactcaccagcaaggtccatggcttcattcttgaagaccaggaacccaccggaaggaaccaactccagacacaagaggattgtycaagcccaagagtttgatacctgcctaggcaacatatccagaccagatctctttaaaaaaaaaaagagctgggcatggtggcaaacctatagttggctagtctaggcagagatgaaggatggcttgagcttaggaggttgaggctgcagtgagtggtgattgcaccactgtaatccagcctgggcaacagcaatactgctctctaaacataaaaaattaaataaagacttagtgctaggtgctgatttctggcaagttccaggtgggagactggcaggcagcattatagtcctctaagagaattcaaaccctaatttctgggactatgaatctgttactttacaaggcaaaagagccttgtggacaggtttctaatcagttgactttaaaatagggaggttatcctggatttatctgggttggcctggtggaatcacccttaaaccc

SEQ ID NO: 147090 - DNA, 602 bp, Homo sapiens
aagctttattctttctgttttcacaataaaccttgctactgcagggtccctgccatctttaagagctgtaacactcaccagcaaggtccatggcttcattcttgaagaccaggaacccaccggaaggaaccaactccagacacaagaggattgtccaagcccaagagtttgatacctgcctaggcaacatatccagaccagatctctttaaaaaaaaaaagagctgggcatggtggcaaacctatagtkggctagtctaggcagagatgaaggatggcttgagcttaggaggttgaggctgcagtgagtggtgattgcaccactgtaatccagcctgggcaacagcaatactgctctctaaacataaaaaattaaataaagacttagtgctaggtgctgatttctggcaagttccaggtgggagactggcaggcagcattatagtcctctaagagaattcaaaccctaatttctgggactatgaatctgttactttacaaggcaaaagagccttgtggacaggtttctaatcagttgactttaaaatagggaggttatcctggatttatctgggttggcctggtggaatcacccttaaaccc

SEQ ID NO: 147091 - DNA, 505 bp, Homo sapiens
aattacttttcttccttctcaattgggtagactaatacagtggggagatctgaaagtcaaggcctgctgttcagattctcttgtcccactgggtaaccccttgatgtagtgctctcccctttcttctaggaatggggcttcctgagagctggactgcagtgattgttatttstcttctgggtctagctaccagtgaggataccaggctctggactggtcctgggggatgtctgcaaagattcctgtgatgtgatctgtcttcaggtctccaagccatggataccagcacctgctctggtagaggtggcagggaagtgaagtagactctgtgagagtccttggttatagataggtttagtgtgctggctttcttgaatgctggttgtcataacagtgaaattgtcacgtggacatcttcaggacctctgtttagccaggatgttgcaggcagtagaattaggtgttgtcttctccttcctaagatcagcattattctgtcatgagt

SEQ ID NO: 147092 - DNA, 442 bp, Homo sapiens
gaatcatgcagtattttccttttgcgtccggcctatgccacgtagcataatgtcttaggtccatctgtgctgtagcgcacatcagagcttcactccttttgtgactgaataatatttcacgaacacccatccaccgcattttgtctgtttgtcatctgttgatgcatatttggtttttctaccttttggaagagcacagtgagatggtagctatccacataccgataaaggaggactccggggaacccaaatctggtgacgccttgayttcagacttccagcctccagaactgtgagaggaaatgtctctgtgggttaggcctcccagcctgcggcatttggttagggcagcccgagctgacagatacaccaggtttttgtttttccatgattgttatgtgttatgtaatttagtaatttttgctgcatttagagtgcattt

SEQ ID NO: 147093 - DNA, 559 bp, Homo sapiens
agacataagaatttacatattacatttatgtattgagtggttcttaagcaggagtgtatccagattttgagaaaattgttgttgttgtcgtcgtcgttgttgttgttgttgttgttagagacagggtctcattatgttgaccaggctagactcgaactcctgagctcaagcaatcctcccacctcagcctccctagcagctgggactacagccatgyaccaccatgcctggcttcaaggaaacattttcaaatatacatatccaggctttattagacttactgtatcaaaatattcagaaaaagcctagacttgttgattatttaaacattttcctcaggttactgggatgcacaattctagctgaaagctagtgcaacagacaattacttcagtctcatttctcacccatatgaccagttccctttctcatttgaagatttggccaaaaagagtaaggagtaggagagagacccatttgctgaaaacaccacatgattttccccggtaagagaagaacagggtctagtcaactcaaaatccaacttgatcttgttact

SEQ ID NO: 147094 - DNA, 521 bp, Homo sapiens
tttacatattacatttatgtattgagtggttcttaagcaggagtgtatccagattttgagaaaattgttgttgttgtcgtcgtcgttgttgttgttgttgttgttagagacagggtctcattatgttgaccaggctagactcgaactcctgagctcaagcaatcctcccacctcagcctccctagcagctgggactacagccatgcaccaccatgcctggcttcaaggaaacattttcaaatatacatatccaggctttattagacttactgtatcaaaatattcagaaaaagcctagacttgttgattatttaaacattttcctcaggttactrggatgcacaattctagctgaaagctagtgcaacagacaattacttcagtctcatttctcacccatatgaccagttccctttctcatttgaagatttggccaaaaagagtaaggagtaggagagagacccatttgctgaaaacaccacatgattttccccggtaagagaagaacagggtctagtcaa

SEQ ID NO: 147095 - DNA, 512 bp, Homo sapiens
tttacatattacatttatgtattgagtggttcttaagcaggagtgtatccagattttgagaaaattgttgttgttgtcgtcgtcgttgttgttgttgttgttgttagagacagggtctcattatgttgaccaggctagactcgaactcctgagctcaagcaatcctcccacctcagcctccctagcagctgggactacagccatgcaccaccatgcctggcttcaaggaaacattttcaaatatacatatccaggctttattagacttactgtatcaaaatattcagaaaaagcctagacttgttgattatttaaacattttcctcaggttactgggatgcacaattctagctgaaagctagtgcaacagacaattacttcagtctcatttctcacccayatgaccagttccctttctcatttgaagatttggccaaaaagagtaaggagtaggagagagacccatttgctgaaaacaccacatgattttccccggtaagagaagaacaggg

SEQ ID NO: 147096 - DNA, 519 bp, Homo sapiens
atcacattgtaatatataatgaaataattacacaacttaccataatgtagaatccgtggaagctctgaactcatttttctgcaactggatggtctcatctgggggcaaagtgagacagtgacagatcatcaggcattagattctcatacgaagcacacaacctagatccctcagatgggcagttcacaacaggttcatgctccaatgagtatctaatgctatcactgatctgactggaggcagagtacaggcggtaatatgagccataaggagtggctgtaaatacagatgaagcttccctggcttgcctgctgctcacctcctcctgtgtggtgtggttcataatagtccatggactggtatgagtstgtggcctgggagttgaggacccctgctctgcgtggtcctaccatagataaaaaagtaaaagtaaggaatttttgatcacaaaagaacactgaagcacaagtcatgttacatatgcttgtcccaataaggtctcactattattgacttcat

SEQ ID NO: 147097 - DNA, 519 bp, Homo sapiens
atcacattgtaatatataatgaaataattacacaacttaccataatgtagaatccgtggaagctctgaactcatttttctgcaactggatggtctcatctgggggcaaagtgagacagtgacagatcatcaggcattagattctcatacgaagcacacaacctagatccctcagatgggcagttcacaacaggttcatgctccaatgagtatctaatgctatcactgatctgactggaggcagagtacaggcggtaatatgagccataaggagtggctgtaaatacagatgaagcttccctggcttgcctgctgctcacctcctcctgtgtggtgtggttcataatagtccatggactggtatgagtgtgtggcctgggagttgaggacccctgctytgcgtggtcctaccatagataaaaaagtaaaagtaaggaatttttgatcacaaaagaacactgaagcacaagtcatgttacatatgcttgtcccaataaggtctcactattattgacttcat

SEQ ID NO: 147098 - DNA, 260 bp, Homo sapiens
tgggtcacaccacatgctcattcccaaaccaggcactgggaaggtaaatacctgattagcttagaataaacatttctgtttctgaggctgaggagggggattgggataataaatatcccaatagacttggatttcttcttcaagaaagaataaggaatggctaytgatagggagccaacaatgtgtgctgcaggggctcattggagaaatttgagcaggggagtcacaagattaaatttgagtattaaggcattctggtt

SEQ ID NO: 147099 - DNA, 592 bp, Homo sapiens
gtggctaaaacagtaagaaccagagttgttttggttgttcattgatatcctaggatcccacttttccctctttcagctgtgctgttggcagtgttttattcacgtctcctttcatggttggctaatccgcagcagctccaaacatcttgttctcacaacacaacatcgcaagggctgcttttcttcacatgtgtcttttaaacagggagaaaacttagaagcatgcaaggggcttcctgtaacatttcattggctgggtcacaccacatgctcattcccaaaccaggcactgggaaggtaaatacctgattagcttagaataaacatttctgtttctgaggctgaggagggggattgggataataaatatcccaatagacttggatttcttcttcaagaaagaataaggaatggctactgatagggagccaacaatgtgtgctgcagggkctcattggagaaatttgagcaggggagtcacaagattaaatttgagtattaaggcattctggttatggtgtaaaacgggttagcaagctttttctgtaaatggccaggtgggcaatattttagactatgtggtctctgtcat

SEQ ID NO: 147100 - DNA, 620 bp, Homo sapiens
aaactatgacatctcacctgatatgtaagatgcaactgttataattattttaaacctcaattcagcattaactagccttttaatgtgaacacttacacatgatgatgactagaaacagcatactctctggccgtctgtccagatagatcttgagaagatacatcaatattttgctcaagtagaaggctgactatacttgctgatccacaacatacagcaagtatgagagcagttctaaaatgacagagataggaactgtaataaagttatttttaaagctaatttgatatactttaccaatgtaacatcttgcctgtctgtgcagaatcaaacatttacatgcactaaaagacataagcatcttgagtgctcaagtgttcatctttgtaaaataccacaaargttaaaaggaagggaccaaaaaaaaccctcttatctcagtggggtattgcatagcagaagctactaatttaacatcctttgatgggcaagaaacaatgttagggccacttatctgaagtggacaaagatttaagtgaagagtttgtcacagcttccctagacagatatgctgtaatagaaaatcagctagggggtaagagaaataagagctctctgca

SEQ ID NO: 147101 - DNA, 452 bp, Homo sapiens
aaaaacatgatggtgctcactgaaaatgggagccaaagtttgccacaacacaagaagcagagtgaaactgctgacgtgcaagcatggaattccagaaaatgagatgctccccaaatttcacattgaatagccatacaattttctagctggaagatacacagaataagaagctatcttctttagccacattatctattgataatcagactaaaaccaagaaagataaaatgattggtccaaagctcctaaagtggcattacctagcattttatggcaccattcaggattgttccataataatcaaagaatatctctaggctttgtatctcttgaaaactcaawgtacagaattctttctgagttaaatattaactttttcactcatgatttatgctacttacatgataggatcatgtatgcctacacttactacattttgttaaacaacataa

SEQ ID NO: 147102 - DNA, 452 bp, Homo sapiens
aaaaacatgatggtgctcactgaaaatgggagccaaagtttgccacaacacaagaagcagagtgaaactgctgacgtgcaagcatggaattccagaaaatgagatgctccccaaatttcacattgaatagccatacaattttctagctggaagatacacagaataagaagctatcttctttagccacattatctattgataatcagactaaaaccaagaaagataaaatgattggtccaaagctcctaaagtggcattacctagcattttatggcaccattcaggattgttccataataatcaaagaatatctctaggctttgtatctcttgaaaactcaaagtacagaattctttctgagttaaatattaactttttcactsatgatttatgctacttacatgataggatcatgtatgcctacacttactacattttgttaaacaacataa

SEQ ID NO: 147103 - DNA, 560 bp, Homo sapiens
gtaggcaccatttaaattattaggagccgaaatcaacaccaaacagaaagagatgcaawttctcaaattttaattgagattatatactgtcatatgatagtgttatgtatccagattatctgcttaagtccagttctaatatattctaatgtgtactaattacagtggataaagatttttttaataatatgtactaattttctgcaactgaaataaattagaatgttattgtgtttgtgcactaacaccaaaggttccattctgcaagatatgattcttgtaataggcagctgtgttgcttttatgacctggttccctccctgaacagaaacgctgaggtcaatgagagaccataaggcagaatatatttttaaccttggtatcagtgactgacaatataaaactgcagattttcaatcactggccatgattactccttaaccatgaatccagctcagggaccatcagagttacattgttcataattctattgcttaataacataatccaataattgatgtaccttcttcatcatgttcgggtgttgtaaaaataaaaga

SEQ ID NO: 147104 - DNA, 560 bp, Homo sapiens
gtaggcaccatttaaattattaggagccgaaatcaacaccaaacagaaagagatgcaatttctcaaattttaattgagattatatrctgtcatatgatagtgttatgtatccagattatctgcttaagtccagttctaatatattctaatgtgtactaattacagtggataaagatttttttaataatatgtactaattttctgcaactgaaataaattagaatgttattgtgtttgtgcactaacaccaaaggttccattctgcaagatatgattcttgtaataggcagctgtgttgcttttatgacctggttccctccctgaacagaaacgctgaggtcaatgagagaccataaggcagaatatatttttaaccttggtatcagtgactgacaatataaaactgcagattttcaatcactggccatgattactccttaaccatgaatccagctcagggaccatcagagttacattgttcataattctattgcttaataacataatccaataattgatgtaccttcttcatcatgttcgggtgttgtaaaaataaaaga

SEQ ID NO: 147105 - DNA, 560 bp, Homo sapiens
gtaggcaccatttaaattattaggagccgaaatcaacaccaaacagaaagagatgcaatttctcaaattttaattgagattatatactgtcatatgatagtgttatgtatccagattatctgcktaagtccagttctaatatattctaatgtgtactaattacagtggataaagatttttttaataatatgtactaattttctgcaactgaaataaattagaatgttattgtgtttgtgcactaacaccaaaggttccattctgcaagatatgattcttgtaataggcagctgtgttgcttttatgacctggttccctccctgaacagaaacgctgaggtcaatgagagaccataaggcagaatatatttttaaccttggtatcagtgactgacaatataaaactgcagattttcaatcactggccatgattactccttaaccatgaatccagctcagggaccatcagagttacattgttcataattctattgcttaataacataatccaataattgatgtaccttcttcatcatgttcgggtgttgtaaaaataaaaga

SEQ ID NO: 147106 - DNA, 560 bp, Homo sapiens
gtaggcaccatttaaattattaggagccgaaatcaacaccaaacagaaagagatgcaatttctcaaattttaattgagattatatactgtcatatgatagtgttatgtatccagattatctgcttaagtccagttctaatatattctaatgtgtactaattacagtggataaagatttttttaataatatgtactaattttctgcaactgaaataaattagaatgttattgtgtttgtgcactaacaccaaaggttccattctgcaagatatgattcttgtaataggcagctgtgttgcttttatgacctggttccctccctgaacagaaacgctgaggtcaatgagaraccataaggcagaatatatttttaaccttggtatcagtgactgacaatataaaactgcagattttcaatcactggccatgattactccttaaccatgaatccagctcagggaccatcagagttacattgttcataattctattgcttaataacataatccaataattgatgtaccttcttcatcatgttcgggtgttgtaaaaataaaaga

SEQ ID NO: 147107 - DNA, 328 bp, Homo sapiens
taaaactatcttcactccctctctccataccaattaaaactaaaaacaccaaaatacactggaaataaaaaaggaaaaaagctgttgaacccacagtatgtgggaacagcaattaattgtcatgtagcgataagctaacattaatattcttcaaagaaagcaacttaaagcagagtcattgaaaagacaaaaggattttcaacccctatttatgtttaatacagyatatttagtggaaaagcatgtaagacacagaggttaaaaactattagaaagggttaagaagttcaatactgagtcataaagtaaactaaaagttaaagttcaa

SEQ ID NO: 147108 - DNA, 553 bp, Homo sapiens
acatttacaaaatggcttttatttaaaaaaaaagcctgccaactattaatgttatttcttacatgaaaaaaaattaagcaaaacaaatgaaaaaagcatawcaccaaaaaaacaaaggccaacatattaaaacaagtagttgagattcctaactttatgtatttcactaaggacgggtgaaaaccttgtaatacattgatgctactccaaggatgtatgacaaggaaactatagctgactactgcaaaaacttcctttgtctcctggtttctttacatggtaaagaaccttccatcaatcccagcaaactataggccacaggccaaatccaatctgcattatggttttgtaaataaagttttataggagctcagtcatgcctgtttgcttacatataatcatggtggctttcacactacaacagcagacaacagcagggttaagtagatatgacagagaccacatagtctaaaatattgcccacctggccatttacagaaaaagcttgctaacccgttttacaccataaccagaatgccttaatactcaaatt

SEQ ID NO: 147109 - DNA, 467 bp, Homo sapiens
tgcctctgctttatattcccactgccactgggaacacaaacatttacaaaatggcttttatttaaaaaaaaagcctgccaactattaatgttatttcttacatgaaaaaaaattaagcaaaacaaatgaaaaaagcatatcaccaaaaaaacaaaggccaacatattaaaacaagtagttgagattcctaactttatgtrtttcactaaggacgggtgaaaaccttgtaatacattgatgctactccaaggatgtatgacaaggaaactatagctgactactgcaaaaacttcctttgtctcctggtttctttacatggtaaagaaccttccatcaatcccagcaaactataggccacaggccaaatccaatctgcattatggttttgtaaataaagttttataggagctcagtcatgcctgtttgcttacatataatcatggtggctttcacactacaacagcaga

SEQ ID NO: 147110 - DNA, 553 bp, Homo sapiens
acatttacaaaatggcttttatttaaaaaaaaagcctgccaactattaatgttatttcttacatgaaaaaaaattaagcaaaacaaatgaaaaaagcatatcaccaaaaaaacaaaggccaacatattaaaacaagtagttgagattcctaactttatgtatttcactaaggacgggtgaaaaccttgtaatacattgatgctactccaaggatgtatgacaaggaaactatagctgactactgcaaaaacttcctttgtctcctggtttctttacakggtaaagaaccttccatcaatcccagcaaactataggccacaggccaaatccaatctgcattatggttttgtaaataaagttttataggagctcagtcatgcctgtttgcttacatataatcatggtggctttcacactacaacagcagacaacagcagggttaagtagatatgacagagaccacatagtctaaaatattgcccacctggccatttacagaaaaagcttgctaacccgttttacaccataaccagaatgccttaatactcaaatt

SEQ ID NO: 147111 - DNA, 553 bp, Homo sapiens
acatttacaaaatggcttttatttaaaaaaaaagcctgccaactattaatgttatttcttacatgaaaaaaaattaagcaaaacaaatgaaaaaagcatatcaccaaaaaaacaaaggccaacatattaaaacaagtagttgagattcctaactttatgtatttcactaaggacgggtgaaaaccttgtaatacattgatgctactccaaggatgtatgacaaggaaactatagctgactactgcaaaaacttcctttgtctcctggtttctttacatggtaaagaaccttccatcaatcccagcaaactataggccacaggccaaatccaatctgcmttatggttttgtaaataaagttttataggagctcagtcatgcctgtttgcttacatataatcatggtggctttcacactacaacagcagacaacagcagggttaagtagatatgacagagaccacatagtctaaaatattgcccacctggccatttacagaaaaagcttgctaacccgttttacaccataaccagaatgccttaatactcaaatt

SEQ ID NO: 147112 - DNA, 552 bp, Homo sapiens
ctcaagtcttcatggcgattcatacagtgactttgatgttttttaattcccatacctatgcttatatgctcagccattgttcccagagcaccagccccctgctctggccgctgggcatcttgactttatccgcacacaaagtgaccaaattgacccttccccacatattcagaacctaatgtggaacccacatcttagccaggaattagctgagaccttcatggtaagagatcctttgaggctgttgttggtcttttctctrgcagatattaggtgggcttgttctaaagggtgagaggggttcaaataatgtggcagaaagagatcagtgtttgtttcttcttctttgctaccagatctgtactgtgaggcacctttatatcctgtatagaaccttgggcagtagaaagtcccatatgaaccttcccctgagcagtggctcccagctgtggttggccccttgagtgatctgatttacatgataatgaaaatcgtggaagctacttccatctctagctcaagattttaaaatattttcaaactctagctcac

SEQ ID NO: 147113 - DNA, 552 bp, Homo sapiens
ctcaagtcttcatggcgattcatacagtgactttgatgttttttaattcccatacctatgcttatatgctcagccattgttcccagagcaccagccccctgctctggccgctgggcatcttgactttatccgcacacaaagtgaccaaattgacccttccccacatattcagaacctaatgtggaacccacatcttagccaggaattagctgagaccttcatggtaagagatcctttgaggctgttgttggtcttttctctagcagatrttaggtgggcttgttctaaagggtgagaggggttcaaataatgtggcagaaagagatcagtgtttgtttcttcttctttgctaccagatctgtactgtgaggcacctttatatcctgtatagaaccttgggcagtagaaagtcccatatgaaccttcccctgagcagtggctcccagctgtggttggccccttgagtgatctgatttacatgataatgaaaatcgtggaagctacttccatctctagctcaagattttaaaatattttcaaactctagctcac

SEQ ID NO: 147114 - DNA, 552 bp, Homo sapiens
ctcaagtcttcatggcgattcatacagtgactttgatgttttttaattcccatacctatgcttatatgctcagccattgttcccagagcaccagccccctgctctggccgctgggcatcttgactttatccgcacacaaagtgaccaaattgacccttccccacatattcagaacctaatgtggaacccacatcttagccaggaattagctgagaccttcatggtaagagatcctttgaggctgttgttggtcttttctctagcagatattaggtgggcttgttctaaagggtgagaggggttcaaataatgtggcagaaagagrtcagtgtttgtttcttcttctttgctaccagatctgtactgtgaggcacctttatatcctgtatagaaccttgggcagtagaaagtcccatatgaaccttcccctgagcagtggctcccagctgtggttggccccttgagtgatctgatttacatgataatgaaaatcgtggaagctacttccatctctagctcaagattttaaaatattttcaaactctagctcac

SEQ ID NO: 147115 - DNA, 552 bp, Homo sapiens
ctcaagtcttcatggcgattcatacagtgactttgatgttttttaattcccatacctatgcttatatgctcagccattgttcccagagcaccagccccctgctctggccgctgggcatcttgactttatccgcacacaaagtgaccaaattgacccttccccacatattcagaacctaatgtggaacccacatcttagccaggaattagctgagaccttcatggtaagagatcctttgaggctgttgttggtcttttctctagcagatattaggtgggcttgttctaaagggtgagaggggttcaaataatgtggcagaaagagatcagtgtttgtttcttcttctttgctaccagatctgtactgtgaggcacctttatatcctgtatagaaccttgggcagtagaaagtcccatatgaaccttsccctgagcagtggctcccagctgtggttggccccttgagtgatctgatttacatgataatgaaaatcgtggaagctacttccatctctagctcaagattttaaaatattttcaaactctagctcac

SEQ ID NO: 147116 - DNA, 400 bp, Homo sapiens
cttaaatattgagactagccagattaaaaggggtagagggcaggaaagggtgacggcataccaygcagcagcaagagcgggagcgaggcctgaaagagtgaaagtatttgcctacaatagaaggatgagtgagtagggcattgccagcagctcagtaatgccagagacagtgcacacagggaaaagggctaaagatggagagtggggcagaagtcagattatgaaagccttatgtgtaattttaagatgcttggacattaatgttcaaaagtggtcccgggtcctatctgcatttagatatagatcatttcaatgccaaaaccaatattcctagtgaacaattattcattaagacaaggtgacagatagctcatgtggacacagctgagatgatacaatg

SEQ ID NO: 147117 - DNA, 400 bp, Homo sapiens
cttaaatattgagactagccagattaaaaggggtagagggcaggaaagggtgacggcataccatgcagcagcaagagcgggagcgaggcctgaaagagtgaaagtatttgcctacaatagaaggatgagtgagtagggcattgccagcagctcagtaatgccagagacagkgcacacagggaaaagggctaaagatggagagtggggcagaagtcagattatgaaagccttatgtgtaattttaagatgcttggacattaatgttcaaaagtggtcccgggtcctatctgcatttagatatagatcatttcaatgccaaaaccaatattcctagtgaacaattattcattaagacaaggtgacagatagctcatgtggacacagctgagatgatacaatg

SEQ ID NO: 147118 - DNA, 550 bp, Homo sapiens
tctgtggatgctgactttctgtcacggacgrtgatgcacatggacatttattactgactttcagattcttggatctttgacaagtcttattactgagaatcaaactagtaggatgtgagttataaatgctgattatccaatgacctactcaaaatatcctacacgaatattccattaaacatgcatagaaaaaaattagtcattcctgctgacctgctgctctttgctctcctgtattcaccagaaaatttcctactccttcctcatgtccaggttaaatactagtgtacaatctggaaacctgtacatcatctgagatttctctctgtcccccaagcctttctcattcaattatcactaaatcatattgactatacctctcttctgcctctgttttatattcccactgccactgggaacataaacatttacaaaatgacttctatttaaaagaaaactgccaactattaatgttatttcttacaggaaaaaaaaattaagcaaaacaagtgaaaaaggcataacgaaggccaacatagtaaaatgagta

SEQ ID NO: 147119 - DNA, 543 bp, Homo sapiens
tctgtggatgctgactttctgtcacggacgatgatgcacatggacatttattactgactttcagattcttggatctttgacaagtcttattactgagartcaaactagtaggatgtgagttataaatgctgattatccaatgacctactcaaaatatcctacacgaatattccattaaacatgcatagaaaaaaattagtcattcctgctgacctgctgctctttgctctcctgtattcaccagaaaatttcctactccttcctcatgtccaggttaaatactagtgtacaatctggaaacctgtacatcatctgagatttctctctgtcccccaagcctttctcattcaattatcactaaatcatattgactatacctctcttctgcctctgttttatattcccactgccactgggaacataaacatttacaaaatgacttctatttaaaagaaaactgccaactattaatgttatttcttacaggaaaaaaaaattaagcaaaacaagtgaaaaaggcataacgaaggccaacatagtaaa

SEQ ID NO: 147120 - DNA, 550 bp, Homo sapiens
tctgtggatgctgactttctgtcacggacgatgatgcacatggacatttattactgactttcagattcttggatctttgacaagtcttattactgagaatcaaactagtaggatgtgagttataaatgctgattatccaatgacctactcaaaatatcctacacgaatattccattaaacatgcatagaaaaaaattagtcattcctgctgacctgctgctctttgctctcctgtattcaccagaaaatttcctactccttcctcatgtccaggttaaatactagtgtacaatctggaaacctgtacatcatctgagatttctctctgtcccccaagcctttctcattcaattatcactaaatcatattgactatacctctcttctgcctctgttttatattcccactgccactgggaacataaacatttacaaaatgacttctatttaaaagaaaactgccaactattaatgttatttcttacaggaaaaaaaaattaagcaaaacaagtgaaaaaggcataacgraggccaacatagtaaaatgagta

SEQ ID NO: 147121 - DNA, 481 bp, Homo sapiens
ttctacattatggtaagtcgtataattattttattatatattacaatgtaataataatataaagtagcacaataagtgtaatgtgaccgaacaatcctgaaaccatccccaccttcccccagcccatggaaagattgtcttccacaaaaccggtccctggtgycaaaaagattgtggacaactgacctaaagtaattcactatcacaagtcttacctgggttgctgttttcagaagagtattttggcatctgtttttctttgtagtcagaaactaattcgcaaattctatgtataaaaatataacaaataaaattactgttttaaaatactgatctggaaacttaccaaatgtaaaattcttagagtatttcaaacaatatcagaatatcagaacttaacagtattatcccatccacttatgcgtacgttctacaaacttctcatgaagcttctaattaaagaagaaaaaaaagtaagatg

SEQ ID NO: 147122 - DNA, 420 bp, Homo sapiens
taaaaaacttaaactaccttagggaaagcctctatttcctcggatagactgtgcatagaaatstagaatttaaggcttccatggttgagagctcaccaggtggggggtatgccactggaaacggggtaggtcctggtggcgtcacagcagaaattgtgtccagctgctgtgtagggagcaaactttcaggggcctgtttgcacatatgtgtaatcacatatcaccagacaggttcttcctgcctgctgcacagacaaaatcaatctactgagactgtgctgttgcagtagagaaagactttcattgaccaagcccagctcacacaggagaactggcattctcactcaaattggtctccctgaaggctcagaagccaggggattttatggacaattgatggacagggggttagggaataag

SEQ ID NO: 147123 - DNA, 598 bp, Homo sapiens
tgtttatattgtcattttttggtagtgtgtttctgaacatatgtgkcatttttatattattagagtttctgatgtttctgcattgtggtcatacaattgtgattccttagattttttatttttttttgagatagggtattactctgcctgcccaggcagggtgcaagcacggctcactgcagcctggaactcctaggctcaagtgatcctccctcgtcagcctcccaagtagctgggactacaggtacgtgccaccaagcccaactagtttttgtgtttttgttgtgggtcttgccatgttgcccaggctggtctcaaactcctggagtcgagtgatcctcctgccgtggcctcccaaagtgctgagattgattacagggttcactactgtgcctggcagaattttttaaagacttattttctatcttagtatttgctcagtttttgtaaatattctgtgagtgctttaacagtatatttgctgtatttgttgattgtagttctctctctctcatctttcttgtcctctagagagggcaagagagattttaacgtatttatacatatatattcttggtaatttgattatttttaaaaa

SEQ ID NO: 147124 - DNA, 598 bp, Homo sapiens
tgtttatattgtcattttttggtagtgtgtttctgaacatatgtggcatttttatattattagagtttctgatgtttctgcattgtggtcatacaattgtgattccttagattttttatttttttttgagatagggtattactctgcctgcccaggcagggtgcaagcacggctcacwgcagcctggaactcctaggctcaagtgatcctccctcgtcagcctcccaagtagctgggactacaggtacgtgccaccaagcccaactagtttttgtgtttttgttgtgggtcttgccatgttgcccaggctggtctcaaactcctggagtcgagtgatcctcctgccgtggcctcccaaagtgctgagattgattacagggttcactactgtgcctggcagaattttttaaagacttattttctatcttagtatttgctcagtttttgtaaatattctgtgagtgctttaacagtatatttgctgtatttgttgattgtagttctctctctctcatctttcttgtcctctagagagggcaagagagattttaacgtatttatacatatatattcttggtaatttgattatttttaaaaa

SEQ ID NO: 147125 - DNA, 542 bp, Homo sapiens
atattgtaacatatataattaagactactggagaaatagttttacatgcaaggtgtataaggaaagtaaaatgtgtttttggtaaaagattataataaggcataggaatgtgggttgttgttrtcattgttgttttgcctagtttagagggttaaaatgttgttttaagttagataggtaaagcttcatgttaaaaccttcagtgtatgacaatgtagttttttacataagggctataagaatctgttttcttttataacaggacacaattggagacgctggttattttacgaggctttgactggaatggcatgctttcagatacaaacatactgctttaaggaatcaaagttggcttatagagccagtaaaagccccttgggaaaactggtctcatactttgcatatgaaatccctgtacaagtttcctgacctgtagtaagtaaagaatgtcaatttctgacaggctcagtagcccccaagttattttggtacctcaagagaaggagaatttacccaactcatgcaggtacttgcagaca

SEQ ID NO: 147126 - DNA, 448 bp, Homo sapiens
aacacaagatacaggtcacaaagaccctgctgataaaacagaatgcagtgaagaagccagccaaaacctgccaaaaccaagatagtaatgaaagtgacctctggtggtcctcactgctcattatgtgcttattataatgcatgagcatgttaaaagacactcccactagcacyatcacagtttacaaatgctatggcaatgtctggaagttaccctatattgtttaaaaatgggagaaacccttagttctgggaattgcccacccctcttttggaaaactcatgaataattcaccccttgtttagcatataatcaagaaataaccataaaaataaccaaccagcagcccttggggctgctctgcctatggagtagccattcttttgttttgtttcttccttctctgagaaactcactttcactttactctgtggacttaccctgaatt

SEQ ID NO: 147127 - DNA, 498 bp, Homo sapiens
ggtgaaaatagatgggccttagagaatggggatggtttataatgaatagttgtgtggtaatcccaattctgtctgccaaattaaatattgatttaatgtatattgtctgaatactagtcagcagaaggcattagaagcwatttgtttttgctttttaggtgcatcttcactgtcttgccctgagttacattgactctagcttagtgccacaatttggtccacagggaacttagccattatcccataggacaccacagtgtgcccacatgttgatagtattcttctaggacccagagaataccaaatataaagtagtctagatgccctgataagtcacaagagtgcaagggaatgggagaaaaattgcataaaataacaagtacctgacacctcagtgaggtttctgggtatctagtggtttggggattgtcaggttactcttctcatgtgaatgatgaattggtaaacattgccctaacccttcccacagccatcatt

SEQ ID NO: 147128 - DNA, 440 bp, Homo sapiens
ccttattcttagagctcccaagatggtggcgggcggctcccaagatggggcaagcggctcccaagatggcggcaaaccttttgttctctgacctaaggttcttggcctcacagattccaaggaatagaagcttgggccatgtggtgagtgttatagctctattagaagctgtgggtcacagaagagaaccatggaagccaccgactagtgttcagctcaactaggtcaaagccgggcacttacctgtgcaggaacaatggtgagcctttagcccaatcaggagcggcaatgggcacctcgctggatcaggagtgcaatggacaccctgctggatccagaagggtggaagtcaacggcgggtctgggacggcggcaaacagcaktggtggatggcgagcgaaagctcagcttgagccataacaaacacggacctgaagagt

SEQ ID NO: 147129 - DNA, 427 bp, Homo sapiens
tgctagactgccttggtttatatcccaatcattgtccctccccctgtgctctcaggtgatatatgatatgactctttacctcctgcttttagcctaatttgtattttagtgagccctctttactacctgattggtcgggtgtgagctgagttrcaagctccgtgtttaaaggtagatgcagtcacactccccagctaggcttaggaattcttagttggccccggaaatccagctagtcctgtctctcagtaccccctctcaacaggaaaacccaagtgctgttggggacgttggccaacgacagctcttaactgcttcctgctgaattggggcatagtaggggtcgtgcagttgagatttcctcgtgaggggtgccttcaatgtcatcaacatcaaagcatgggctagtgggccggtccaggggtcc

SEQ ID NO: 147130 - DNA, 581 bp, Homo sapiens
ccatcacactaaggatttggtttcaacatatgatttttttggggggtggggagggggacacaaaccttcagtctattgcatcatcttaacaatataaagtcttccaatccacaaacatggaatgtttttcttttatttakatcttatttaatctctttgaacagtgttttagctccaggtaagttttttgtaaaatgtattcttaagtattttattatttttgatgctattgtaaatgaaattgtcttgttaatttcatttttggattgttcattgtaagtttatataaatagacttatttttgtatattaactttatatcctgcaacattgttgaactgatttattagtttaaaaagtttttagtgaattccttaggatttgctatatataaaatcatattatctgtgcataggtatagttttccttcttctccactgtgaatgacttttatttttcttgcttattgccctggctagaatttgcagtaaaatgttgaatagaaatggtaagagcagatatccttgttttattcctgatcttaggaggaaagcatccagtctttcaccactaagtacaatg

SEQ ID NO: 147131 - DNA, 581 bp, Homo sapiens
ccatcacactaaggatttggtttcaacatatgatttttttggggggtggggagggggacacaaaccttcagtctattgcatcatcttaacaatataaagtcttccaatccacaaacatggaatgtttttcttttatttagatcttatttaatctctttgaacagtgttttagctccagrtaagttttttgtaaaatgtattcttaagtattttattatttttgatgctattgtaaatgaaattgtcttgttaatttcatttttggattgttcattgtaagtttatataaatagacttatttttgtatattaactttatatcctgcaacattgttgaactgatttattagtttaaaaagtttttagtgaattccttaggatttgctatatataaaatcatattatctgtgcataggtatagttttccttcttctccactgtgaatgacttttatttttcttgcttattgccctggctagaatttgcagtaaaatgttgaatagaaatggtaagagcagatatccttgttttattcctgatcttaggaggaaagcatccagtctttcaccactaagtacaatg

SEQ ID NO: 147132 - DNA, 581 bp, Homo sapiens
ccatcacactaaggatttggtttcaacatatgatttttttggggggtggggagggggacacaaaccttcagtctattgcatcatcttaacaatataaagtcttccaatccacaaacatggaatgtttttcttttatttagatcttatttaatctctttgaacagtgttttagctccaggtaagttttttgtaaaatgtattcttaagtattttattatttttgatgctattgtaaatgaaattgtcttgttaatttcatttttggattgttcattgtaagtttatataaatagacttatttttgtatattaactttatatcctgcaacattgttgaactgatttattagtttaaaaagtttttagtgaattccttaggatttgctatatataaaatcatattatctgtgcataggtrtagttttccttcttctccactgtgaatgacttttatttttcttgcttattgccctggctagaatttgcagtaaaatgttgaatagaaatggtaagagcagatatccttgttttattcctgatcttaggaggaaagcatccagtctttcaccactaagtacaatg

SEQ ID NO: 147133 - DNA, 520 bp, Homo sapiens
acccaaacaaaacacacctgattaatgaccaagtcaagactagaatccacattcatgataaagggcctctttgcactgaacactctgaggcaggagttgaactgccttttcctttcctcttttccatttgctgaatcccacaatgtgtcagayaaaagtagtgaccagaagacaggatccaatccatggaaagtggagaagtggagaatcagagaaatctgtggtcactgggacatgacacaggacggagtgactgcaaacacgtgggcagagtgaaaggaagggccaatacgtgacaccatcttgaaacagggactacttgatatgcagccagatgctctgccctcaaaatatgccctctcaactgtttagactttcctgattgacactgtttcacctatgttcccacgcccaaggatctaatagacattgtaatttctcatcattttcagtgaaccactggcaactgacctccttcagacagacctctatctggctttgaacttaccctgtccttccc

SEQ ID NO: 147134 - DNA, 520 bp, Homo sapiens
acccaaacaaaacacacctgattaatgaccaagtcaagactagaatccacattcatgataaagggcctctttgcactgaacactctgaggcaggagttgaactgccttttcctttcctcttttccatttgctgaatcccacaatgtgtcagataaaagtagtgaccagaagacaggatccaatccatggaaagtggagaagtggagaatcagagaaatctgtggtcactgggacatgacacaggacggagtgactgcaaacacrtgggcagagtgaaaggaagggccaatacgtgacaccatcttgaaacagggactacttgatatgcagccagatgctctgccctcaaaatatgccctctcaactgtttagactttcctgattgacactgtttcacctatgttcccacgcccaaggatctaatagacattgtaatttctcatcattttcagtgaaccactggcaactgacctccttcagacagacctctatctggctttgaacttaccctgtccttccc

SEQ ID NO: 147135 - DNA, 520 bp, Homo sapiens
acccaaacaaaacacacctgattaatgaccaagtcaagactagaatccacattcatgataaagggcctctttgcactgaacactctgaggcaggagttgaactgccttttcctttcctcttttccatttgctgaatcccacaatgtgtcagataaaagtagtgaccagaagacaggatccaatccatggaaagtggagaagtggagaatcagagaaatctgtggtcactgggacatgacacaggacggagtgactgcaaacacgtgggcagagtgaaaggaagggccaatacgtgacaccatcttgaamcagggactacttgatatgcagccagatgctctgccctcaaaatatgccctctcaactgtttagactttcctgattgacactgtttcacctatgttcccacgcccaaggatctaatagacattgtaatttctcatcattttcagtgaaccactggcaactgacctccttcagacagacctctatctggctttgaacttaccctgtccttccc

SEQ ID NO: 147136 - DNA, 612 bp, Homo sapiens
catttccccctatgttagctgatttgattctaacaactctacaaggtggacaaaacagatattactattttacaaatgtttttaaggttgttctccagatgacaaaacaggttttgaagttaaattaattgctcaaggtcacacaacaaattaggaactaaaactttggtcttcccaaagtctacattgcttgacatctgtactgttacaatcagttttacctgcagactccaatccatgaggctttactgatatgtaaagccaaagaaagtaactcatgtttcactgattgcctaaattgtactctttagctgttagtgtacaacatgacattctagagagagttcatcatgtgtctttcatcatcaacagactaaggagagctcttggcagtaagaataaattctaaaaggggaggagcaatttaaytcttacgacattagagatctgcagaagggtactttgttcatatgctgcccactagccaccactggatccctattacattaagaactatttttttccctagatttcacagcttctgaaaacacagtataatcattgaccaattaacaatataaatttgataatgttcacacacacacactgaga

SEQ ID NO: 147137 - DNA, 545 bp, Homo sapiens
aggatataaaatcaacgtacaaaaattagtagcatctctatatgccaagagtgaacaatctgaaaaggaaatcaagaaatcaagaatcccatttacaatagctacaaaaagataaaatacctaggacttaaccaaagaagtaaaaagacctctatgataaaaactataaaacactggtgaaagaaattgaagaagacacagtaaaatggaaagatattccatgtcaatggattggaagaatcaatattgttaaaatgtccatcctaccaaaagcagtctatagattcagtgcaacccccatcaaaatacctatgacattctttatagaaatagaaaaaaaaaaacgctaaaacttatatggaaccacataagacccagaatagccaaagctatcctgagcaaaatgattaaaactggaggaatcacattacctgatttcaaattatactacagagctataatcaacaaaacagcatggtactggcataaaaacagacacacagmccaatagaacaggagagagaacctatagataaatccataca

SEQ ID NO: 147138 - DNA, 596 bp, Homo sapiens
cttactgctgtaaatctggtctattttagtttcctctgggtagttagtgttgctaataagatggacgtaagtgtttttgaactggtgaattctgattgcttttagcccccagttttccaaataggggtgaattytgggtagagatagaacaatcaccaagttaccttgctccaaaaaagaaatttacgtatgggattgttttcaaagcgggaagttagctgtgtaaataacaacaattttatatatttaatctgggcttctccttatcttgaatgatataaaaatctactttctagattaatttagttccatataactttgtattgctttgactgtactgataataaagtttgaaagtgttaaatttacattgtgagcttttttttaaaattcgaatttattttctatgacttttatagaatgattcttaaaaaatagtttcaaggacctcttcatagccacaagatttccttttttatatcattaatattattttatgtgaatactataatgaaacccaagtattcagtttacacacagatattataacacaatataccactacacaaaggcaatgaacagataacattctacaa

SEQ ID NO: 147139 - DNA, 491 bp, Homo sapiens
agagaaattctcgaggcttttggcaactttccaaggtcttcactcctctactcctcaactgatcgactatttcttaacactctatgacaaaaaaatcccgatccagccaagcagttccatggacttgtgcctacaccgtgctcattcttgccctttgctcacgccatacatcccatctaaattgtctcctcccctcttaagcaaccaccaacccacattttcttaaaaggtgactctggacrtcttatttttgcttcattactctgcttcctggctcttacttaatccacatgttgaggcgtatctgcattccgcctggggtgcctgtgtttctatatccaaccagaatctacttaacacagcgagttctgggggtgccttactggtgtctagtagagaaaataaaaccatgaacagcagtaatcgcaggcttgactgtgtgtcaagtactccacatatatattaatttaatcaccataacacggtgaggt

SEQ ID NO: 147140 - DNA, 629 bp, Homo sapiens
tggtttcattgcacctcgcttgtttcgctcagcacattttcagggttaatctatgtagcaacacgtatcagaatttcctttttttttttattttactttaagttctagggtacatgtgcacaacatgcaggtttgttacataggtatacatgtgccatgttggtttgctgcacccatcaacctgtcatcwacattaggaatttctccttaatgctatccctcccccagccccctaccccctgacaggccccgtgtattatgttcctcaccctgtgtccatgtgttctcattgttcaactcccacttatggttgtgaagtggagcatctcacatttgttttgcccttgatccttcctctaaaatgtaacaagccaagataatgtggggggagggggtatgccaactaaagaaatgtgtggtgtccaccagtgtctgtgagacaggaatgtcattctgctgagaggactgagtccatgtttccaggtggtgaccggcaaagagggactggggtccccagggttgctgggagcgcctgggaagagcatgtggctccttggagcaaccacccagaagatgtgggagatgagaaacaagcccttttgctatctacatcaacctagagaagaggg

SEQ ID NO: 147141 - DNA, 571 bp, Homo sapiens
atttgggctttttaaacaatgggtaaggccagrcacagtggctcacacctgtaatcccagcactttgggaggccgaggtaggcctccctcaacacttgagcccaggagttccagaccagcctgggcaacatgaccaaaccttgtctctacaaaaaaattatgcccgcatggtggtgcatgcctgtggtcccagctactcaaaaggctgaagcaagagaatcacctgagtctggggttccgtcaaggctgcagtgagccatgatcacaccattgcactccagcctgggtgacaagaagactctgtctcaaaaatatataaataaaataagcaagagataaacttcttacaaatataagcatacacacaattgttttgatatgtataatatattcctgtaaagataaattctgatctggtaacatgagttacctctgggagagagaacttgatggcaaaaggcagaagaaggagagagatttttcacttcttgaattttgaaccacatgactatattacccatattccaaagatatatataatttaaactttagaaatcacttggcataactc

SEQ ID NO: 147142 - DNA, 534 bp, Homo sapiens
ggaaggcagctaagatggatgtgaagggacatgaaaagcatcctgcagactaatttctttttttgttgagaaaactatagcatttattggggaaagataagaggacacactaaaaactgctgctagccttttctcttagagtaggcagcagaagaaaccacacactgaccatcttcaaaccacacttcctcagagctaaatgacccataataacgtttggcctgaaacagccggcaggatccccagctgccagtttactggtcccaataccttacccaccagcaataattaaaacaagaagctcacttggtgctggagtaagaaatccatttttaaaaaacaaagcaacttaaattcaaatacttgtggttttgaaattgcagtatataagaatctggggtgagaaatttggggcagatttaatttaaaaaattatttaagaaattatagtcagttcagwgaatgggttggtagttactctattctaaatattttgacaagcattacataatcacatgctagaaactacattaa

SEQ ID NO: 147143 - DNA, 621 bp, Homo sapiens
gcaaaataaattactgttgttataatacattaagctactaccttcggggtggtttttatacagaaaaaggaaaccaaagaacattctctttcctgcttcatttctccttcagcgaatgattatcttaccccatttctggatgccatcttaatttggcaatcttaaagtctttgttttggtactatctcttaatatgtaccagctgttgtgcttatatgtcatctaactctcttaacaaccctatgaggtaagtactattattatcctcattttatagatacataaactgatctatagagaggtccaargtcacatggttaataaatggtgaagtggagttttcaagccaggtctctagaacctgagctcttacctgctgtactatagcccctcttgtaggtctctaatattacagaaaagctcctggcattgcgttgtttacattgcagtccccttccctcctgctgctctctttgaaactgatccctctgtgccttgtttgttaagctttttagagggcatttcttctaataagcaaccatcaaaaaaggactataacatcccactatggactgtttgtgtctcctcaaaattcatatgtggaagccccaattcccatga

SEQ ID NO: 147144 - DNA, 633 bp, Homo sapiens
aatactcagtggccacagtgtcattaaaacctttagagtcagttttaacaaaagtgtgtcagttgccaacttaatctcagctacttttgattcatttcccaaaggcttgtatatagaactgcagtaaagaaaagataggggcttctttgcttttcatgcatttaaaaaatcatgagggaatcagaaaatcaccatcagaataccacagtaatcattgttgcagacatgatccagtcctatatgatacaataaatactgtatatatttgtatagtatgtgacactatacaaatccactgctatatgatacaaaaatttgaggataaacaggawattctaacatagccccagagtactacccctaccacagagaaaagactaaaagagtaacttcatagtggagaaacctggggtcaatcagtacaacatattgacatcatatgccccctaatgtgatgtgctgagaaaggtacatcacttctgggatattcttgccaaaaatgcataacttcaaatttgactgatgggaaaatatcagtcaaatccaaattgagaaacagtgtacaaaaagctaacctgtgctccttaaaagtggttaaggtcatgggtgatagtgaaagactgaattggcaca

SEQ ID NO: 147145 - DNA, 566 bp, Homo sapiens
gtcaatttaaaaataggcattaagggaaacagctgaatttctataytaccagaagtcaaaggatctaaaattgcattacactggtaaatgagaaccagaaattgattctaattctaaaatggaacaatgttcccacatataatgtccaaggcaaagtgacaccccacaactattccaaaaagatcacaacatttaaaaccacggaagtgtcagttatgcttattgagtgtcttttatctgccgggttgtactctaagtacattcctattatttcataaaggaagaatcctaggcacaaaaggttaagtgacctcatagagctgagaaagcagcagaaacagaagctgatgtcaggtgtgactctaagatattattcctattgaagggaccatattggtgacattctccttcaactctcacagggtacttattacaatgctatgataacatagaaaagccctgaggttcagggttatattcagattaaaacttgtaagaaggggtccctagttatctccacccattctcctggttcagttacctgcatcctttcttcctgttgcttt

SEQ ID NO: 147146 - DNA, 566 bp, Homo sapiens
gtcaatttaaaaataggcattaagggaaacagctgaatttctatattaccagaagtcaaaggatctaaaattgcattacactggtaaatgagaaccagaaattgattctaattctaaaatggaacaatgttcccacatataatgtccaaggcaaagtgacaccccacaactattccaaaaagatcacaacatttaaaaccacggaagtgtcagttatgcttattgagtgtcttttatctgccgggttgtactctaagtacattcctattatttcataaaggaagaatcctaggcacaaaaggttaagtgacctcatagagctgagaaagcagcagaaacagaagctgatgtcaggtgtgactctaagataktattcctattgaagggaccatattggtgacattctccttcaactctcacagggtacttattacaatgctatgataacatagaaaagccctgaggttcagggttatattcagattaaaacttgtaagaaggggtccctagttatctccacccattctcctggttcagttacctgcatcctttcttcctgttgcttt

SEQ ID NO: 147147 - DNA, 503 bp, Homo sapiens
cctggacagatcaaaagaaaacaaagttagggattaggaagttgttactagccttcagcaagattttccttgaatgttattaatggtgttcttatttaggaaaatgttgctcatttgagagctgtttgtttcagtacttggagttattgccaatgctggctttcttccaatcctggtaatcctccgaggtttcccagagaaagaaaygctttgttttgtttttcccttctccccatgggataattggtttatgtataatttaattattttgttaaccagttatcctatcacagcatacaaaaacaaccttaaaaacccaccttcccgctctgtgctaagatgttcataattgattttcccaccattacgagtgcatgtataacagcaaaatttcttgctaaaagctaaattggattgactctatattttatattttcaggagtgcccttggagccttagggagtaatacccagtgatttagaataagaagaactaagataaat

SEQ ID NO: 147148 - DNA, 540 bp, Homo sapiens
tcggtgctttttatgtatattaattcattatagatgaagctgcatatttagtgtcactgatgctttttaggttgaaaattggtgtcctcatttaccttggagagcaaaaaatccctacgaagaagctgatcataattcattggtaagtgattttggaaaactctttctagacttgtgcatttaggtcagatgccaagtgatacatgtggaatcttctagaaatgccaactataacctgaaatagtgttacactgaaaaacttctgtattcgtctctgtggaagtctaagtgactaaatcagtcaaccattagcataggtttgtttactgagcaattctctgagggttcctgaatgataggctactgatatgagtaagacctggtacsagctgtggaggcccttagtgatctaataaggctgatggcaaataatgaccatctctgtcacaaatgctgtaatataggcctgtgggaattaatgaggaagaggtcattttagtctgcaaggttcagggtagattgaatagtgaagatgacatt

SEQ ID NO: 147149 - DNA, 577 bp, Homo sapiens
ttgcagtgtggaagagaagaattaatggatggtaggattggtgatgttatgtaaaaacactatgaccttgagtttgaattggaagcaccagtctaaactcatgatttgttttatctttgaggaagaacaaatttcctagctagggccactatcaggcctataaatagtaataaaattgagtcccttaagccccacactttagtctctaaatgctgtttctactaagtggtataagaggttcttggaaaaatggcttattaaggtccaagacagaagttgtacctgttgagcctacaacagtcttgtcaggcacatctgtctacccatgtgcagagaagctgtcaaagaagactaggatcgtgtcaaaagaacttaggagccagcttggatagcctaccacaggcctagatgggacaattggatagtcagtgagaggaatakccacaatattttgaagcatatcaaatatgctttgatgtcataatgattttttaaattaaaaatcctcatagatcatcattagagtaggctaaagaacaagtttattattctgaaaaactggcaaatgaagagaaag

SEQ ID NO: 147150 - DNA, 560 bp, Homo sapiens
ggactctcatgtctagcttgtcccgttttatggctttggagtagtattagcaccttgtttttaaaagcaagggtacatacttaaacatattttaaatgcattttattcccagtgctggctcagcactgtacatgtaatagttgtctaaaagaaccattaagtggtattacttcctatttatggatgagacatttgccatcaagttgcaaatacaggaccattgctctttccgtaccacccatttagcctcagaaatctccctatgtctgtctttggaccagaaaccaaaattctcacctaattggacagtagagaataataagtaaagtgtttgtggctgttctttcytcctgttcgttcccccagataggcaaattctagagccactcagtatcatacttgagacccattgcccaagatgaatcctaatttataccagatgagctcaagccaagactaaatgtggaggccagtacatgaaaggaagcagactcccctctttttagggcctgtgggccaataggtggaccacagactgggctggaaacaagacagcaagc

SEQ ID NO: 147151 - DNA, 560 bp, Homo sapiens
ggactctcatgtctagcttgtcccgttttatggctttggagtagtattagcaccttgtttttaaaagcaagggtacatacttaaacatattttaaatgcattttattcccagtgctggctcagcactgtacatgtaatagttgtctaaaagaaccattaagtggtattacttcctatttatggatgagacatttgccatcaagttgcaaatacaggaccattgctctttccgtaccacccatttagcctcagaaatctccctatgtctgtctttggaccagaaaccaaaattctcacctaattggacagtagagaataataagtaaagtgtttgtggctgttctttcttcctgttcgttcccccagataggcaaattctagagccactcagtatcatacttgagacccattgcccaagatgaatcctaatttataccagatgagctcaagccaagactaaatgtggaggccagtacatgaaaggaagcagactyccctctttttagggcctgtgggccaataggtggaccacagactgggctggaaacaagacagcaagc

SEQ ID NO: 147152 - DNA, 538 bp, Homo sapiens
actttccacaagcttcccttttttctcttgtattaagactctacatattgccaccttcaaatttacctggtctgaataagacattacaggggctaagccaaatgttttaagatgaaggaccatatggattcatgtaagccattaccaaaattcagaagtccttagatatttttaaccattatctagattgagcctgaggaatggaatgttaaaagtgggtatctcaggcactgcacaggctggagcactagggggcagtcacgagaaagtgagtaaacagcaagtaattgggaaaaaaatctatcagtacttaggaaccaaccaaattagccaatgctgaatacatacataaacttactgctcccgctcaaatgttatcctcagaatagggttcacacttaccttctcgccaagttctttatacttgggctccaggttcttacartgaccacaccaaggggcataaaattcaatcagcacatctttattttcattattcactatttcatcaaaattctctgctaccactacctggaaa

SEQ ID NO: 147153 - DNA, 546 bp, Homo sapiens
agttgcaacatacctccggaaggacagaggattccatgctcttcaagggttccatccctggttgtttctcactgaaatcaaagaaagttctgaatctaatcccatgtcaacagagatcacttaaaaacagactgatctggtacctgaagataataaacaagaaggcataagcaaggtatttaaattaccttttactctagtaaaaacacagtctccaaaccttaaattggtcatgttccaaatgtttaagtatttaaatttacaatgcatttttctataaaggtaataagtaagattttcaaggctagcagctcatgaaagcagacttaaatccataaagctacccaaaatgtggtaccagagagcacccctgccactacacctaatatgaacaatactgtttctataataaaatgcagttctgtattgggatggcaggattccatctaaccgaaaatttcacaggcagagaggataagtaaaatcttttgagacactagcagcaygttaatgcatgccacatcccaagcttaatcgaatccatag

SEQ ID NO: 147154 - DNA, 476 bp, Homo sapiens
ctgctggtctcactttgactgctttataggtctcttagctctaatacaatagagtttgygctgactggggatgagacagaatagcagggaagaagactcacttatttagagagcttgggggctgggaagaggaaggctgaggccaccatgatcacttgtactgtgccagacatacttcttcactggagtgtaataatgaaggcaatgatcatacttccagagcctagtacagtgccaggctcagagaagtcactcaataaacacatgggcagtgggaagcattagcacatattatatccaataaatgtttgttgaataaatgaatgagaggggagtaggaccagttccccaaggtgactttaagaacacagaggtaacagaaggcccagggcctgtgggaattccagagctcccagactcattgcccagagtcccacccaggtactaggtagagaggcagggaggacttacctttg

SEQ ID NO: 147155 - DNA, 392 bp, Homo sapiens
ttagatcactgtccctgtctccccagctgaggaaggccccagatctgccagttaccatcacttttcagccactgctgaacactcacataattaggcagtctcagtctcttcttatgccaacatttacccaattaccttcctttaaaaaaatctttctctgtcagtcacttttcttactacttctcttcccaataacctttcatttccttctttttcatctgttcctaaatccacagtaaaactggatgactagttttctggatttgcaccctgagtttcagaattctgttcactttggaaggtacctgcgtccctcaagttgccsaggagattccacagtgcccttgactgcttcctcagagacaactgcataattttctagaggcagacac

SEQ ID NO: 147156 - DNA, 498 bp, Homo sapiens
tggttcatgaggttgaaagaaagaagctgtctccataactaaygtaacagaacaaggtgaagtaccaagtactgatgtagaagctgaagcaagttatccataagatctagctaagaagactgaggaagataactccactaagcaacagattttcaatttagacaaaacagctttctataggaagaagatgccttctaggattatcatagctagagatgcaaagccaatgcctgccttcaaagcttcaaaggataaggtgcctcttgttagggtctaatgaaactgataactttaaattgaagccaatgcttatttgtcattcaaagaccctaggtcccatcagaataatgctaaatttactctgcctgttctctataaatggaataacaaagcttggatgataatgcatctgtttatagcatggtttcctgaatttttaaaaatattttaagcccactattgagacttactgctaaaaagaaaaagataatgttcaaa

SEQ ID NO: 147157 - DNA, 601 bp, Homo sapiens
acagtgataatgtcaatgagataggaaagggaggagaaatttaagagatacttcataaatagaatcaacatgatttaaagattggatgggaggtcaggaggaaaagacatatcaagratggttcccagggctctgacaacagaatggatggtaatgtcatccactgtgatagaggatgtgggaaaaggttcatgtatggaaaggatgaacacaatggctttggacattttgagttggaggttttagtgggatatccaaactaaaatatccagtagtcattaggataaatgggatgacatatctggtgtagagatactgatttaaaagtcatttgtatataagtatttaaagctatgagcagtatgagttatcccaagaaggatgtgtatcagaaagaaaagaagcatggggaagaaccctagagaacacttatgattttggttgagaaaaagttaattgtatcatcatgagacactgagaataattagccaaagagatggaggggtgaaaataaggacagaatggttttaccaaaaccaagggaagaacttttttcagggagtactgcaagtggtattatacgaaacaaacaagattggta

SEQ ID NO: 147158 - DNA, 464 bp, Homo sapiens
tatttgaatgctcatatcaaaaaagttcatggaaatggataatttgaatacacagaaaatagaagatgattaagttacagagaatgaagagaagaatctctagaacaggtatttgtgcgaaatacagcttactcatcgtattagtttattctcacattgctataaataaatacctgagattgggtaatgtataaaggaaatatctttaattggctcacagttctgcaggctatacaggaagcttagtggcttctgcttctggggaggcctcaggaaacttactattatgttagaaggcgatgaggaagcaggcacatctcacatgccctgagaaggaagaagagagagagcagggaggtgccctacacttttgaacaaccagatctcatgagaacagcacaacggggatgctrctaaaccattcatgagaaactgcccctatgatccaatcacctcccaccagg

SEQ ID NO: 147159 - DNA, 556 bp, Homo sapiens
attctctcaaactgagtgcaaaaataaaatttagacatatttttaaaacaaaattgatagtagtataatatataggatttttaaaataatttaacatgcctttttaagtacaaaaaaatttagaagatgtaaaaatgactgamagatcttaacataaaaatttaagacttcaaaaagttaaaagacaaagagatttggagaaaaatgtgcaatatatttacacaggcaaaagttaactatctattgtgatctgtaaagagctccagactattaagaaaaagacaatccaatgtaataggcaatgaatctgaacaagccagtgaacattgaacaataaaaatttactaacaatcaggttggtaaaaacctatcttaatttttatttatgaggaatgattttcaaactattaaaagaaatgtaaatttggattggcacttgggcagtatctataaaagtgacttaagaatcaaacttctgggccgggcgtggtggctcacacctgtaatcccagcactttgggaggccaaggcaggcggatcacgaggtcaggagttt

SEQ ID NO: 147160 - DNA, 556 bp, Homo sapiens
attctctcaaactgagtgcaaaaataaaatttagacatatttttaaaacaaaattgatagtagtataatatataggatttttaaaataatttaacatgcctttttaagtacaaaaaaatttagaagatgtaaaaatgactgaaagatcttaamataaaaatttaagacttcaaaaagttaaaagacaaagagatttggagaaaaatgtgcaatatatttacacaggcaaaagttaactatctattgtgatctgtaaagagctccagactattaagaaaaagacaatccaatgtaataggcaatgaatctgaacaagccagtgaacattgaacaataaaaatttactaacaatcaggttggtaaaaacctatcttaatttttatttatgaggaatgattttcaaactattaaaagaaatgtaaatttggattggcacttgggcagtatctataaaagtgacttaagaatcaaacttctgggccgggcgtggtggctcacacctgtaatcccagcactttgggaggccaaggcaggcggatcacgaggtcaggagttt

SEQ ID NO: 147161 - DNA, 556 bp, Homo sapiens
attctctcaaactgagtgcaaaaataaaatttagacatatttttaaaacaaaattgatagtagtataatatataggatttttaaaataatttaacatgcctttttaagtacaaaaaaatttagaagatgtaaaaatgactgaaagatcttaacwtaaaaatttaagacttcaaaaagttaaaagacaaagagatttggagaaaaatgtgcaatatatttacacaggcaaaagttaactatctattgtgatctgtaaagagctccagactattaagaaaaagacaatccaatgtaataggcaatgaatctgaacaagccagtgaacattgaacaataaaaatttactaacaatcaggttggtaaaaacctatcttaatttttatttatgaggaatgattttcaaactattaaaagaaatgtaaatttggattggcacttgggcagtatctataaaagtgacttaagaatcaaacttctgggccgggcgtggtggctcacacctgtaatcccagcactttgggaggccaaggcaggcggatcacgaggtcaggagttt

SEQ ID NO: 147162 - DNA, 556 bp, Homo sapiens
attctctcaaactgagtgcaaaaataaaatttagacatatttttaaaacaaaattgatagtagtataatatataggatttttaaaataatttaacatgcctttttaagtacaaaaaaatttagaagatgtaaaaatgactgaaagatcttaacataaaaatttaagacttcaaaaagttaaaagacaaagagatttggagaaaaatgtgcaatatatttacacaggcaaaagttaactatctattgtgatctgtaaagagctccagactattaagaaaaagacaatccaatgtaataggcaatgaatctgaayaagccagtgaacattgaacaataaaaatttactaacaatcaggttggtaaaaacctatcttaatttttatttatgaggaatgattttcaaactattaaaagaaatgtaaatttggattggcacttgggcagtatctataaaagtgacttaagaatcaaacttctgggccgggcgtggtggctcacacctgtaatcccagcactttgggaggccaaggcaggcggatcacgaggtcaggagttt

SEQ ID NO: 147163 - DNA, 387 bp, Homo sapiens
atgctaaacatcacaatgaccaaagatragagcctcatctggatgagcacttgatgctttattttttatgagctttgatttaaaaagttgatagggaaaggacatagccttgatgaggacttgtgaatccctttcctacacatacagaaacacacagtaccatgaaaggcacatgttgacatgacgggttgtaagtctacagatgtcagaccaacaagtattaattaactagtagttatgaattccttgtcctagcacaggactggccctgatctggctctgctaaacctcatcttcaccactcctccaacacaaagttatgaaactccttcacattccacaaacaagctatgttgtttcaaatcttgcatttattttcatagactg

SEQ ID NO: 147164 - DNA, 572 bp, Homo sapiens
aggctactttagccacttcaacttccatcagaccacagctgcttcacagaagtggtagacacactgccctttaacagatgcaggtgttgttttgttaaagttattcattcattcaaaaatttactgtagaaaacaataaaaatatacactatggggtttttgtttgccatttgctgtgctaggacatggacacacaaatatgaccaaggtgtggtctcagctgtcaggagtcacacagtctgcagttagaacagatctgtcaccatgtcaggggtctgatagctgatccctgacataatcacagatctgttccaactgcagagggaaaaaaagcactactggtgctccacagaaagtcagtgctggatacagaagagacacaaagagagcagtgctctgtggagaggtgttggcaaaggcttcacaggagaggagacatgtgggtggaatcttctacaactccagcsagataagcagagggaaagcatttcctatagaaagaatgacacatgcccttgccccaactgtgtgaccaggccctttaaagagaaatagaactagagatgatcacc

SEQ ID NO: 147165 - DNA, 580 bp, Homo sapiens
gaataggctaaagggcactcattccacctgcaagatttagcttggatggaggagggggcaggtatacaggcaaaagactgaacaagcacagtgggaattgagcctgagtcggtgggcccagagatttggcaacagggcaccgtgtttgggaaggatcctgaccaccaagatataggagtctgtgattccttctcattccttctcctgttcactcatatcagagttagtactttgaagccaactaaattaaacactaaaacaaaggtaatttcttggaacttaagagtgaaatgaaatatgaccagttgcaggccctgacaatatatttgcaatttgtaattttcagtagcaaatccttgtcaatggtgaaaaggaaatcagagagagattttcaaagtctaattacaatagcttgmggctttgaatttggcaaattgacaatccatatagaatgaagatgagatcccagaccgggatttaatgccaaaagatccttctttccttctgtgcatgtaatttaccatgatgtcttcagtgctttcaggattagggacagtatctgtttactcatttgcaatcc

SEQ ID NO: 147166 - DNA, 580 bp, Homo sapiens
gaataggctaaagggcactcattccacctgcaagatttagcttggatggaggagggggcaggtatacaggcaaaagactgaacaagcacagtgggaattgagcctgagtcggtgggcccagagatttggcaacagggcaccgtgtttgggaaggatcctgaccaccaagatataggagtctgtgattccttctcattccttctcctgttcactcatatcagagttagtactttgaagccaactaaattaaacactaaaacaaaggtaatttcttggaacttaagagtgaaatgaaatatgaccagttgcaggccctgacaatatatttgcaatttgtaattttcagtagcaaatccttgtcaatggtgaaaaggaaatcagagagagattttcaaagtctaattacaatagcttgaggctttgaatttggcaaattgacaatccatatagaatgaagatgagawcccagaccgggatttaatgccaaaagatccttctttccttctgtgcatgtaatttaccatgatgtcttcagtgctttcaggattagggacagtatctgtttactcatttgcaatcc

SEQ ID NO: 147167 - DNA, 480 bp, Homo sapiens
cagtgaactagcttactgtcatgtcagtttcttactggaaaacaaggctcagtgcttttgaatcctctttactatcccttcaatctgcccagtgacagagatgtcctctgaaagggacaggtctgagaatgacttgtcgactgtttgaagttgaatgcaagacttatagtttgcacaaatgacaatccaaggtgggtgctgtggcttttcaggtccttcagttatcaaaacatttaaggatatacatttggctttataggctttgtrtatgtgtgtgtataacatgggtgtgtgtgtgtatgtattttaaacacaaatatataaaaagatatatacatatattctaaagtatctgttgcatgatcatgaacaaaccttatttcagaaggactgaaagaaaaatgattttaaaagaatagtgtcatttaaaaaaaaatacctagaccaatggtttgcaagctttactgcatgtaagaattc

SEQ ID NO: 147168 - DNA, 540 bp, Homo sapiens
agatggcaaataaacacattaaagatgtccaacaccatcagccagtagataaatgcaaattaaaaccacaatgagatgtaactatagagctatcagaatgtctaaagtaaaaaatagtgacaacaccaaatgctctccagaatgtggatcattcatacattgctggtaggaatataaaatggtagagatacttggaatacagtttgacagattatttaaaaagtatacatgccactgccatatggcccaacaattgtacttcttgacactgattcagagaaataaaaaattatgattatacaaagctttgtacacaattttcacagtcttgtttgtaatggctcaaaactggaaacaatgtattatcttttgataggtgaatggttaaacaaactgtggtacatccacaccacagaaaactactcagcaaggaaaagaaataagtaaatgggaaagaaaagaaaaataaatagttgatacwtgcaactccatggatctctagagaattaagttaaatgataaaagccaatctcaaaggtt

SEQ ID NO: 147169 - DNA, 534 bp, Homo sapiens
atcacattgcaataaatattacccatcatgcataactggtggctgaggtccagaatctttgggtaaactatttaagaactctcaactaaaagtggaagagctagaatttgagctaagatctgcctgatttcagtggttagatccagaagcataaatcagtgctttcctaaaatggtctgcaaggaagagttaaataataaataaaaatccctgggaattcatttaaatatacatgttgcaatggggacaagagaagcaggaraggaccttgtgggcttgaattttgaacgagtaaaataattttgggatatgaaagaggggagacttacatggtgagctgtcaacatcagcatttctcaaaaacaaggtggtgagttgcccaaataggaacttcactggtataaagtctgaggttcatatacttttacatccacagcttttagcaggatgtttgacctgtggtaagttcacagcaaactctcattaaattagttgcctttttagagctgattctgcttcaagttcaacttccct

SEQ ID NO: 147170 - DNA, 519 bp, Homo sapiens
accaacacagtccaaaccagggtctttgcatacctggatcactattgtggatttctaactggtctcctgcatccatcaattttcactcctctattttattctctatcatgcgaatcttataatttcttgacttacagagcatctttaatggtagctcattgctttttgataaagtcaaaacttcataaaatgtcttatgactgtatcaataatgtctacctctcccatgtcattattcagtgttccaccaccctcccgtgactaccactgggcttcagctattctgaatctccttcaaatcytgctaatgcatgtgtgttctcccatggggtaaagcatgcggttttcccaccaccgggaatgccattttctcatgtcagtctgattcctatcatctttcaggtttcatatacaatgttacttcatgtggaaagtgggttttgaccctagtgtagattgctcctttctgctaaaggctcccgtgacccctctgtacttacattatctcactctagtata

SEQ ID NO: 147171 - DNA, 519 bp, Homo sapiens
accaacacagtccaaaccagggtctttgcatacctggatcactattgtggatttctaactggtctcctgcatccatcaattttcactcctctattttattctctatcatgcgaatcttataatttcttgacttacagagcatctttaatggtagctcattgctttttgataaagtcaaaacttcataaaatgtcttatgactgtatcaataatgtctacctctcccatgtcattattcagtgttccaccaccctcccgtgactaccactgggcttcagctattctgaatctccttcaaatcctgctaatgcatgtgtgttctcccatggggtaaagcatgyggttttcccaccaccgggaatgccattttctcatgtcagtctgattcctatcatctttcaggtttcatatacaatgttacttcatgtggaaagtgggttttgaccctagtgtagattgctcctttctgctaaaggctcccgtgacccctctgtacttacattatctcactctagtata

SEQ ID NO: 147172 - DNA, 600 bp, Homo sapiens
ccactgatgggccattcccctatctcactccctctccttgggcctccttattgcctgacacacaacaataaatattgaaaatagarcaactaataaccatgcaatagcctctcagtactcaagtgaaaggaatatttgcacctctctcactttaagtcaaagctagaaatgttcaagcttagcaagggagacaagacaaaagccaagacaagctgaggcctaggcctcttgtaccagttagctaagttctgagtgtgaagaaaaagttcctgaaggaaattaaaagtgctacctcagtgagcccacaaatgataagaatgcaaaacagcctcgaaaatgttagtagtctggacagatgatcaaaccaaccacagcattttcttaagcagtagccccatctagagaaaagccttaactcctttccattctgtaatggctgaaagaggagagaaagcttcagaagaaatatctgaaactagcacagctctgcttatgaggtttaaggaaagaaactgtctccataacatacaagtgcaaagtaaagcagtaagtgctaatgtagaatttgcagggaattatccagaagatctagatgacatc

SEQ ID NO: 147173 - DNA, 600 bp, Homo sapiens
ccactgatgggccattcccctatctcactccctctccttgggcctccttattgcctgacacacaacaataaatattgaaaatagagcaactaataaccatgcaatagcctctcagtactcaagtgaaaggaakatttgcacctctctcactttaagtcaaagctagaaatgttcaagcttagcaagggagacaagacaaaagccaagacaagctgaggcctaggcctcttgtaccagttagctaagttctgagtgtgaagaaaaagttcctgaaggaaattaaaagtgctacctcagtgagcccacaaatgataagaatgcaaaacagcctcgaaaatgttagtagtctggacagatgatcaaaccaaccacagcattttcttaagcagtagccccatctagagaaaagccttaactcctttccattctgtaatggctgaaagaggagagaaagcttcagaagaaatatctgaaactagcacagctctgcttatgaggtttaaggaaagaaactgtctccataacatacaagtgcaaagtaaagcagtaagtgctaatgtagaatttgcagggaattatccagaagatctagatgacatc

SEQ ID NO: 147174 - DNA, 600 bp, Homo sapiens
ccactgatgggccattcccctatctcactccctctccttgggcctccttattgcctgacacacaacaataaatattgaaaatagagcaactaataaccatgcaatagcctctcagtactcaagtgaaaggaatatttgcacctctctcactttaagtcaaagctagaaatgttcaagcttagcaagggagacaagacaaaagccaagacaagctgaggcctaggcctcttgtaccagttagctaagttctgagtgtgaagaaaaagttcctgaaggaaattaaaagtgctacctcagtgagcccacaaatgataagaatgcaaaacagcctygaaaatgttagtagtctggacagatgatcaaaccaaccacagcattttcttaagcagtagccccatctagagaaaagccttaactcctttccattctgtaatggctgaaagaggagagaaagcttcagaagaaatatctgaaactagcacagctctgcttatgaggtttaaggaaagaaactgtctccataacatacaagtgcaaagtaaagcagtaagtgctaatgtagaatttgcagggaattatccagaagatctagatgacatc

SEQ ID NO: 147175 - DNA, 600 bp, Homo sapiens
ccactgatgggccattcccctatctcactccctctccttgggcctccttattgcctgacacacaacaataaatattgaaaatagagcaactaataaccatgcaatagcctctcagtactcaagtgaaaggaatatttgcacctctctcactttaagtcaaagctagaaatgttcaagcttagcaagggagacaagacaaaagccaagacaagctgaggcctaggcctcttgtaccagttagctaagttctgagtgtgaagaaaaagttcctgaaggaaattaaaagtgctacctcagtgagcccacaaatgataagaatgcaaaacagcctcgaaaatgttagtagtctggacagatgatcaaaccaaccacagcattttcttaagcagtagccccatctagagaaaagccttaactcctttccattctgtaatggctgaaagaggagagaaagcttcagaagaaatatctgaaactagcacagctctgcttatgaggtttaaggaaagaaactgtctccataacatacaagtgcaaagtraagcagtaagtgctaatgtagaatttgcagggaattatccagaagatctagatgacatc

SEQ ID NO: 147176 - DNA, 609 bp, Homo sapiens
acatcactgatgaaggtggctacactaaacagattttcaatgtagacaaaacagcctttcttttggaagagaatgtgatctaggactttcatagctagagaggagaagtcaatgcctattttcaaagcttcacagaacaggctctttctaggggttcatgcctctggtgtcttaacattgaaaccaatgctcatttaccattctgaaaattctagggcccttaagawgtatgctgatataatctacttgtgcctcataaatggaacaacaaaacctgaatggcagcacatctatctatagcatgatttcctgaatatgttaagcccactgttgagatttactgctcaggaaaaaaaaaaaaaaaaaaaagattcatttcaaaatattactgctcattgacaatgcacctggttacccaagatctctgataaaaatgttcaaggaagttagtgtgttttcatgtctgctaacacaacatccattctgcagcccatggatcaagtagtaattttgactttcaagtcttattatttaaaaaatacgtgttgtaaggctatagctgccagttagtggttcttctgatggatctgggtagagtaaattgaaaac

SEQ ID NO: 147177 - DNA, 609 bp, Homo sapiens
acatcactgatgaaggtggctacactaaacagattttcaatgtagacaaaacagcctttcttttggaagagaatgtgatctaggactttcatagctagagaggagaagtcaatgcctattttcaaagcttcacagaacaggctctttctaggggttcatgcctctggtgtcttaacattgaaaccaatgctcatttaccattctgaaaattctagggcccttaagatgtatgctgatataatctacttgtgcctcataaatggaacaacaaaacctgaatggcagyacatctatctatagcatgatttcctgaatatgttaagcccactgttgagatttactgctcaggaaaaaaaaaaaaaaaaaaaagattcatttcaaaatattactgctcattgacaatgcacctggttacccaagatctctgataaaaatgttcaaggaagttagtgtgttttcatgtctgctaacacaacatccattctgcagcccatggatcaagtagtaattttgactttcaagtcttattatttaaaaaatacgtgttgtaaggctatagctgccagttagtggttcttctgatggatctgggtagagtaaattgaaaac

SEQ ID NO: 147178 - DNA, 609 bp, Homo sapiens
acatcactgatgaaggtggctacactaaacagattttcaatgtagacaaaacagcctttcttttggaagagaatgtgatctaggactttcatagctagagaggagaagtcaatgcctattttcaaagcttcacagaacaggctctttctaggggttcatgcctctggtgtcttaacattgaaaccaatgctcatttaccattctgaaaattctagggcccttaagatgtatgctgatataatctacttgtgcctcataaatggaacaacaaaacctgaatggcagcacatctrtctatagcatgatttcctgaatatgttaagcccactgttgagatttactgctcaggaaaaaaaaaaaaaaaaaaaagattcatttcaaaatattactgctcattgacaatgcacctggttacccaagatctctgataaaaatgttcaaggaagttagtgtgttttcatgtctgctaacacaacatccattctgcagcccatggatcaagtagtaattttgactttcaagtcttattatttaaaaaatacgtgttgtaaggctatagctgccagttagtggttcttctgatggatctgggtagagtaaattgaaaac

SEQ ID NO: 147179 - DNA, 609 bp, Homo sapiens
acatcactgatgaaggtggctacactaaacagattttcaatgtagacaaaacagcctttcttttggaagagaatgtgatctaggactttcatagctagagaggagaagtcaatgcctattttcaaagcttcacagaacaggctctttctaggggttcatgcctctggtgtcttaacattgaaaccaatgctcatttaccattctgaaaattctagggcccttaagatgtatgctgatataatctacttgtgcctcataaatggaacaacaaaacctgaatggcagcacatctatctatagcatgatttcctgaatatgttaagcccactgttgagatttactgctcaggaaaaaaaaaaaaaaaaaaaagattcatttcaaaatattactgctcattgacaatgcacctggttacccaagatctctgataaaaatgttcaaggaagttagtgtgttttcatgtctgctaacacaacatccattctgcagcccatggatcaagyagtaattttgactttcaagtcttattatttaaaaaatacgtgttgtaaggctatagctgccagttagtggttcttctgatggatctgggtagagtaaattgaaaac

SEQ ID NO: 147180 - DNA, 390 bp, Homo sapiens
gagaaaatttctttcaaaggactctgtctgtctttggaatttctacttggttaatgatgtttagggatatgaggaggtgcagagaggagcagaaatcatggtggcatgcataaaaaacatgccttgaaatacattctatgatgtgcttgccattattatgattattatagttattgattcacataggcatatagaaactaaataattccaagcttacttttcaaaaagacaaaaattagtgtttttctcttaattttagataaaatcytagtttaaaaaattttaatcttacccttatcttgatttctacttttcactcttcatttcacactacatgtgggggtaggacagaaataaagagaaagaatcatgtttcctttattttaaccc

SEQ ID NO: 147181 - DNA, 463 bp, Homo sapiens
tttaccctcccgcagctcagctcagcgcacatcttttctttccttatcccgtcctttccctcatccctgcctaccccgcttctgacatgcatagtgcagcttctccgtaaaggtggagctaatgacccgtgggcctagcagttgttaggccttttgggagctcacgatgggagctccctggtaagtgaaaccgtcaattcactgcctaaaatgacaataccccatctctggtatctttgcacttgcctcttcaaagccaccttttcctttttctgtgtatggactgtcacaaatcctctgcaccccaagaacaccccattggatttccgggctggctgcttggsctacacacctgggtcaggcctctcgcagggatgctcctgccactgtaataaagaggagaaaacgtcacaggggaaaggcctgactccttcgtacagtcaggaaactcagcctcacagag

SEQ ID NO: 147182 - DNA, 615 bp, Homo sapiens
ggtggccacagggagtggcttcttatgcttgagaaaggaaagggaagagtaggaaggatgttgtctcctggcctcagtgccagctaagccacagtaaaatagggcaccaagtaaatgcctaaggttcctgactccatgttctggctaccagatggcattttgttatgccccagcccagggtgggtaagaaagctcactgccctgaagaaaaggacataagcctggcaggatttaccacctcctgactgaagagaacatgggccttgagtgaayatcagtggtagctagtcagtggtcactgtgggcctgtgtgagactcagtcttgtgctggctttgagttgcacccagtgcagtcctagtgatggtggcgacagggcacttgtgtcacccctaccccagctctgggcagctcagcatgagagagactccatttatttggtagaatgtaaggaaagagaaaaagagtccctgcctggtaatccaggaactcttttagatcttacctaagaccaccaaggtggcacttctacaagtctgcaagccttgctgtgttactggggttggggagtcccttaatgcagatatgactgcaatgactgaagacttagattaca

SEQ ID NO: 147183 - DNA, 615 bp, Homo sapiens
ggtggccacagggagtggcttcttatgcttgagaaaggaaagggaagagtaggaaggatgttgtctcctggcctcagtgccagctaagccacagtaaaatagggcaccaagtaaatgcctaaggttcctgactccatgttctggctaccagatggcattttgttatgccccagcccagggtgggtaagaaagctcactgccctgaagaaaaggacataagcctggcaggatttaccacctcctgactgaagagaacatgggccttgagtgaatatcagtggtagctagtcagtggtcactgtgggcctgtgtgagactcagtcttgtgctggctttgagttgcacccagtgcagtcctagtgatggtggcgacagggcacttgtgtcacccctaccccagctctgggcagctcagcatgagagagactccatttatttggtagaatgtaaggaaagagaaaaagagtccctgcctggtaatccaggaactcttttagatcttacctaagaccaccaaggtggcacttctacaagtctgcaagccttgctgtgttactrgggttggggagtcccttaatgcagatatgactgcaatgactgaagacttagattaca

SEQ ID NO: 147184 - DNA, 578 bp, Homo sapiens
gcttttgctatttttcttttggtattaatttctttaaggtccactggggaacttgagttaatacagaaaaaaatctttcatttattttctccaatattatacgttggtttacaaggtgttataattcactttaattattaaaaaaacytcactgaatgctttgttaaagtattgctagcttcatgcagtgtcttctatttgctgagaggaggatgcacactgcctaattcctcaattctctattcctgtgaaatattttaatcaaaccttctgtgacataagtaagtcaatagtgatattcatttgctcaaggaatctcctggtatagttactacttggatcttaggggcttgaaataaatgtgagatgaaaaggttgttagtggctaaacagtttctgtcatctttagctgcagaacaaggtcacagaatattccttctcaagcaacagctcggtattgaggggaggggttgaacagacagcagtgatggaggaactggccccggggtactagaactgagaagtcaggtttgagtgctgagatctctaataacttgctgtgtgaagttaagactaat

SEQ ID NO: 147185 - DNA, 608 bp, Homo sapiens
cattttctccactgaaggaaacttccaacagataatacaaacagctgataagcaaaacaaacaaaataatattaccttagttaatctttggggattctttgagcctaggaatgtcatcttagattatttcacatccttccaccagctaagtaaggatgagaagatgcattccagaaacttgccaagtggtgaaagaatactaactaaggtgtaacagtatcaggcatccatgggtaattatctagcatgttctaggcagcacgataattaataaaatattgtccatttctttgaagagtttataataagggaaatacaaacaagtgttttcatggaatctggtttgtggtaggcacaatatattttaggagccaccaagagtgacaatttactgatccctgaggcmtaagatacacttcctgagtcaatgtctgagctaaatccttaggaagaaggaggagtaacaatttagagtgagcattccaagtaaaggaaagtgtttgagtccatccatccaggatggaacatcatgtgacctatgtgggaaagcaagcaacacagtacttgtagtgaatgaatctcaagatggcagaagatggtgctaccaa

SEQ ID NO: 147186 - DNA, 600 bp, Homo sapiens
cactcacatctgatgctcaatgctagcctttctactgtcaggagtttccaaagctgcatgagcctcaagctattttttcaagaactgatttagtttcttcaagccaggcaagaagagtggccattcaattgtactaagacctattttctttttcgtatctccaaagtaatcccataatttgggggaccatttattttgggataattttggggattactgcattaagccttgccacatttatcccaaaattataaaaatgtacaaaatttagaaaacaggtcatcataatttacaagtatttctctttaatttttgatttttgtgggtacagagtaggtgtatatatttcttgattacgtgagattttgatacaggcatgtgatgtataataatcacatcagggtatggggtatacatcacctctcatacttatcctttgtgctacaaacaatccaagtatactcttttagtgtttgcaagtaatttgactcaagtcatatgaagtttccatgaatactttacctcgtctwgaacagtggctgttttggggggctacacatgagtgtttggcatagttgtctcttcatctgcagaggaaac

SEQ ID NO: 147187 - DNA, 635 bp, Homo sapiens
acgtcttgagcaaatccagtacaaaggctgtttggcttccatctattgatggcatgatgtaggaaagattacgatcaacacagtggcttctagcagattgtcaaagccctcaacatactgccgtggctgtgctagtggtggaccaccaccaaatgacaagccaggtgacacttacgagctgtgagaagtacaaacgtctggtgcaaaccagaacagattttcaggagaaaaacaggsaattcagtttggagcaaggctgttatttccacattaacaacaacacaacaaaatgctcttcatgatcaaatctgttttattccagatttgcatgcaactgatgggaatcaaaaatataacatgaaaaattccataaacaatgtctatgaagtggtccaagactggaaaataagacattatttcttgctgcatatatcatgaaagcctttttcaagaaagtggaatttgtgctggctcacaatgggtaggcaatatttaagtgtgataaataagtaggatgataaatgacataaaaaaaagcataggaattaggtaatgagacaggaactggcaggagacaatagttcagtttgacgggcttgaacagttgatggggtaggaaaaactaagatagaaaa

SEQ ID NO: 147188 - DNA, 635 bp, Homo sapiens
acgtcttgagcaaatccagtacaaaggctgtttggcttccatctattgatggcatgatgtaggaaagattacgatcaacacagtggcttctagcagattgtcaaagccctcaacatactgccgtggctgtgctagtggtggaccaccaccaaatgacaagccaggtgacacttacgagctgtgagaagtacaaacgtctggtgcaaaccagaacagattttcaggagaaaaacaggcaattcagtttggagcaaggctgttatttccacattaacaacaacacaacaaaatgctcttcatgatcaaatctgttttattccagatttgcatgcaactgatgggaatcaaaaatataacatgaaaaattccataaacaatgtctatgaagtggtccaagactggaaaataagacattatttcttgctgcatatatcatgaaagcctttttcaagaaagtggaatttgtgctggctcacaatgggtaggcaatatttaagtgtgataaataagtaggatgataaatgacatwaaaaaaagcataggaattaggtaatgagacaggaactggcaggagacaatagttcagtttgacgggcttgaacagttgatggggtaggaaaaactaagatagaaaa

SEQ ID NO: 147189 - DNA, 568 bp, Homo sapiens
tgcagcctcaatatccaggaccaaagtgatcctcctaactcagcctctcaggtggctagaactacaggcacacaccaccacgtctagctaactttttattttttgtagagattggggtgttactatgttgcccaggctggtctcgaattcctggacataagcgttcttcccacttcgacctcccaaagtgctaggattacaggcatgagccaccatgcctggcctgttgtattagttaatctgcaacattaattcacaattttaaaaagcaactatgcaaagataccctggtataagtagataattttcaagaaatggcagacctgattattcccttgmaggtcatgaggataaaatctagttgaagtttcagagcaacctaaaattccatttgtatcctctgaaattagtaatgtgctcttttttttttttttttttttgatggttaaaaaaatttgggttttattgtttttgctaaataatactaaaaaaaaaatttcattttgaaggcagggcttgaattatttaatttgatccatttatttaattaaaaaaaaaaggaagggga

SEQ ID NO: 147190 - DNA, 578 bp, Homo sapiens
catactttttcaggtggatgtggaattgagcttcctttctccttggttcctccgtgtgtaaaatggcagtgataattgyatccacaatcacatagcacctaatacatgtgacatgcttagcccaggggctagtgtacagcaattgctcagtcaagactatccctcaaaatgatgaatataaaatagctattttattcttctttttgaatgagacaagtgtatggtgaatatgattcaaaaaacaaatatataatcatagaattttgcattccgagaacataacagggctaatattggcaggtaaatatttgccctttctagagtatcattgccttacttgcatgcgattcagtcattcaggtcgcattgtgtgtctatgttaccctcagagtccatggcagtgttacagaaaaggggtcctgatccagaccccaagagagggttcttggatcttgctcaagaaagaattcagggaaagtccacagtgcaaagtaaaagcaagtttattaagaaagtaaagtgctgaaagtacagctactccatagacagaataggatgttcctgaaagtaagaggagg

SEQ ID NO: 147191 - DNA, 445 bp, Homo sapiens
tgcatgcgattcagtcattcaggtcgcattgtgtgtctatgttaccctcagagtccatggcagtgttacagaaaaggggtcctgatccagaccccaagagagggttcttggatcttgctcaagaaagaattcagggaaagtccrcagtgcaaagtaaaagcaagtttattaagaaagtaaagtgctgaaagtacagctactccatagacagaataggatgttcctgaaagtaagaggaggaacacatccactgtaggtacaatgcttgtatatgtggggagatgtgctctgctacaagggtttgtgataaaggattaattttcttaattactatattttgcaagagttgatattatctttaaagcaaaattaggaatgcctttgttctccagatatcaggatatctggagactcccaagtctgggtttgtttagtaaacattatt

SEQ ID NO: 147192 - DNA, 581 bp, Homo sapiens
aacattgaactgaaaaggtcccggaaaacaggcaccaagactgggacgagataaaccattctaccaaaacctagttagctggtcatttactgcttctgtatggttggggatatgagaaacatcttagaggggagggattctcacttccttcttgaatctattggttccggttggtaagccaagcatcctactacagagaacttccaaatgattgaagcagtaaggctgagtggagaggcaagcatttgagaactgtgtcaaattcctccccaagtgcccattaccaggtgtgtttgagaactggctggaaacagtaaccacagcaggatgctgctgatggctttgtcagtgcaataatgagtggtggataaaaagctcarggccaggtgttggtaggcaccgggctggggttggcatggtactgaatgttaactactattccagaattctctattttgtccagaacaagttaggatcctagactatgaccatcacccttttatttaaagttgaccagaaataaagcattttatttattttcccttctccatttcttccctcctcttacatttctcttcctt

SEQ ID NO: 147193 - DNA, 607 bp, Homo sapiens
tttaattctttttatctttttggtaagtggactttccctctttccactgctttttctagctccatctcactaaaaacaatgcaatgtatcayttcttagagctaatatataatcctgaagaatattatttctctttgtttttaacttttaattttatgtttcagttattgctagtgttacccatgccatctgaaaaagagaatagtaatagtatttgattatttgattcatttttattagaattataaactccatgaaggaagaaaccctgctttacgcaggtaatatgaatactgaatttaaaagctgctgacttttggtgttaaacttatagtaaaaacagcacctctattaaatggttcttatatgccaggcactgacatttttagggtatataaaaaactccaatgttcttaacccaaggaactatatttctaaaagcaaatcagcaaaatcaaaatgcaggaagcctttctttacatgatgaagaattctaataacaattctgagttaaattttaactcagtgttttcaaggcactgatattaactattcttttcatcaatgtaataaattaacaatagtaataatttctcttatcccaaaa

SEQ ID NO: 147194 - DNA, 323 bp, Homo sapiens
tctaggtgtgaggaaagaaaagttaaaaccccgagagggacacagcatccctcctgagatattctggccaaaaagcayaacctaatcatgaggaaatatcatgtaactccaatcaagaaacatcataggaaataaatggccagcacgcttcaaaaatgtctatgtcataaaaggcaaagaacagctggggaagattaaaggagactaaaaagacctgccaatgaaatgagaaatcctggactggattctgaaccagaaaaaaaaaaatgctggaaagtatgacagtgggatctctgaaaacacttgatctacatatactgtat

SEQ ID NO: 147195 - DNA, 323 bp, Homo sapiens
tctaggtgtgaggaaagaaaagttaaaaccccgagagggacacagcatccctcctgagatattctggccaaaaagcataacctaatcatgaggaaayatcatgtaactccaatcaagaaacatcataggaaataaatggccagcacgcttcaaaaatgtctatgtcataaaaggcaaagaacagctggggaagattaaaggagactaaaaagacctgccaatgaaatgagaaatcctggactggattctgaaccagaaaaaaaaaaatgctggaaagtatgacagtgggatctctgaaaacacttgatctacatatactgtat

SEQ ID NO: 147196 - DNA, 571 bp, Homo sapiens
agtgtggcaaacattaaaaattgatgaatctttgcaaaaagattcttttctttttgcaagctcctgattttctttttgggagctcctgatatactactcttgaaacttttctctaagttgaaatcatttaaaaataaaaagttaaaaaacagcctaaggatgtcatccctaagaaaatctatgagcacctgataagtcatacattataattcatgtcacgtgtggtatagagttcttagccatgagacttatgagacataaatggaagtctgctggaggcacgtccttccctttgcccagtcttcccgccaccggagctggacgagagaggcacagacaagcaccgaagtcaacacgctaaggatggacagkagacagggaggggagcctcagtccctgatggcatcacagagagcacaacctgactcgctctggacttctcccctttgagcttcttgttataaaatgactcctagttaagctagtcaagattttctctgctgtttgcagttgagtactttcttaactgacacatttatggagggtacactcaattcaaagtctatttgtt

SEQ ID NO: 147197 - DNA, 571 bp, Homo sapiens
agtgtggcaaacattaaaaattgatgaatctttgcaaaaagattcttttctttttgcaagctcctgattttctttttgggagctcctgatatactactcttgaaacttttctctaagttgaaatcatttaaaaataaaaagttaaaaaacagcctaaggatgtcatccctaagaaaatctatgagcacctgataagtcatacattataattcatgtcacgtgtggtatagagttcttagccatgagacttatgagacataaatggaagtctgctggaggcacgtccttccctttgcccagtcttcccgccaccggagctggacgagagaggcacagacaagcaccgaagtcaacacgctaaggatggacagtagacagggaggggagcctcagtccctgatggcatcacagagagcacaacctgactcrctctggacttctcccctttgagcttcttgttataaaatgactcctagttaagctagtcaagattttctctgctgtttgcagttgagtactttcttaactgacacatttatggagggtacactcaattcaaagtctatttgtt

SEQ ID NO: 147198 - DNA, 547 bp, Homo sapiens
cgggcaggggcggaggggagccgcagcccggtcacgggctctggggaacccgggctcccgttcggctgcacctgggcccctagctcctgtccgggcggggatagcgggaagcgcaccaggcccccgggacgccggtgcttctttgcacggcccagcgcgggaatgtggacaccagcgaagccggctcaggtcggccctcgggagaagcaggggctacacggaaagggagcccgagggtcctgcagagcccgaggtcgggaccccgcgcgtgcagtgccaatgggctgcggctgggctgagcgcccttccaaccttgcaggccccgggggggttgccgcggagagcttccgctggggctccgggcctctggccgccacctccctcgggaggccgaggggggcggtggccccggcccggccctcccgcttccctcacggcctggccctcccgcttccctgattcccggtagggtcgcyctccccgcctcctggcccctcttggctcggatgacaaagattgggtaaaggctttcaacgagctagcgtct

SEQ ID NO: 147199 - DNA, 422 bp, Homo sapiens
tccccttgcacagtctgcatttctccctggaatcccccaacctcctaaatgattcttaaaaatgttcctattttgaagtccggtttttgtgctgtacagctctatgacatttgacaaatgcataatatattgtacccacaatacaatattacacaaattaattttactactccagaattcctgacctatttattttcctctcttcccctcaaaccactgattgttttgctgtctctatagttttgtggttttcagaatgtcatataattgaaaccatacagtatgtagctttttcacattggtttgtttcactatgacttgtttcaccaaagttcatccatgtyttttcatgacacaatagcttatttctttttattattgaatagtattccattgcatgaatgtaccacagtttatttatc

SEQ ID NO: 147200 - DNA, 516 bp, Homo sapiens
ttcattttaaacctagttagctcctaacacctatttttcttatatgcctgtgttaatgtktaggccttgtatactcaatgctgtaacccaaattgtttcctctcgcctaaaggctatcaagctccaaagggcaatgcaataaaaccacgcataaatacgcctttctttcaaaaaccctttaacctgcgcccccgcccgccccgcaaaaaccttagctgctgttccccacacaacacccctttccagcaaaaaattgccaaaaaattcaacacccaatctccctaacagcagttaggagtggagaccctaagggggaactgaaaggagttagttagcttggtagatagcaagggaagtgtctctggagagcccctggccccacgggtcagtgcctcattcccacataacaaaaaagcagcctgggaaaaagtcaagcttcgggcaaactatcaccggaggttgcgcctgaaaacatgccggtggctgcacaaataggagagcctccgactttctgag

SEQ ID NO: 147201 - DNA, 516 bp, Homo sapiens
ttcattttaaacctagttagctcctaacacctatttttcttatatgcctgtgttaatgtgtaggccttgtatactcaatgctgtaacccaaattgtttcctctcgcctaaaggctatcaagctccaaagggcaatgcaataaaaccacgcataaatacgcctttcttycaaaaaccctttaacctgcgcccccgcccgccccgcaaaaaccttagctgctgttccccacacaacacccctttccagcaaaaaattgccaaaaaattcaacacccaatctccctaacagcagttaggagtggagaccctaagggggaactgaaaggagttagttagcttggtagatagcaagggaagtgtctctggagagcccctggccccacgggtcagtgcctcattcccacataacaaaaaagcagcctgggaaaaagtcaagcttcgggcaaactatcaccggaggttgcgcctgaaaacatgccggtggctgcacaaataggagagcctccgactttctgag

SEQ ID NO: 147202 - DNA, 516 bp, Homo sapiens
ttcattttaaacctagttagctcctaacacctatttttcttatatgcctgtgttaatgtgtaggccttgtatactcaatgctgtaacccaaattgtttcctctcgcctaaaggctatcaagctccaaagggcaatgcaataaaaccacgcataaatacgcctttctttcaaaaacccttyaacctgcgcccccgcccgccccgcaaaaaccttagctgctgttccccacacaacacccctttccagcaaaaaattgccaaaaaattcaacacccaatctccctaacagcagttaggagtggagaccctaagggggaactgaaaggagttagttagcttggtagatagcaagggaagtgtctctggagagcccctggccccacgggtcagtgcctcattcccacataacaaaaaagcagcctgggaaaaagtcaagcttcgggcaaactatcaccggaggttgcgcctgaaaacatgccggtggctgcacaaataggagagcctccgactttctgag

SEQ ID NO: 147203 - DNA, 517 bp, Homo sapiens
ttcattttaaacctagttagctcctaacacctatttttcttatatgcctgtgttaatgtttaggccttgtatactcaatgctgtaacccaaattgtttcctctcgcctaaaggctatcaagctccaaagggcaatgcaataaaaccacgcataaatacgcctttcttccaaaaacccttcaacctgcgcccccgcccgccccgcaaaaaccttagctgctgttccccacacaacacccctttccagcaaaaaattgccaaaaaattcaacacccaatctccctaacagcagttaggagtggagaccctaagggggaactgaaaggagttagttagcttggtagatagcaaggraagtgtctctggagagcccctggccccacgggtcagtgcctcattcccacataacaaaaaagcagcctgggaaaaagtcaagcttcgggcaaactagcaccggaggttgcgcctgaaaacatgccggtggctgcacaaataggagagcctccgactttctgaga

SEQ ID NO: 147204 - DNA, 627 bp, Homo sapiens
gaattcttagctgccaaaagggtgggctagataggaagaagaggagagagcacaggaggagagaaagggactgcaacaggatgggaagctttcagggggttttcattaagtggttgttgaacaattctcaaattgagtgttgttggatttstaagggttaattttacagtaatggataaaatgcaaaattttggcctatggtggcttattgtaatcccagcactttggaaggccaatgtgaggtggaagaattgcttgaggccaggaatttgagaccagcctaggcaacatagaaagaccccatctctactaatatagtaataataataatagccagatgtggtggtgcatgcctgtagtcccagctacccaggaggctgaggcaggaggattgcttgagccccggagttagaggctacagtgagttatgttcatggcactgcactctagcctgggcgacagagtgagaccctgactcttgggggggaaaaaaaaaaagcaaaatttttacaaaagggtagatggtcttgggatatcatatattgaagtgtttatcttcatgtttgcttttctttcttctccttccctttttcttccttcccctcctcttctctccttttctcattg

SEQ ID NO: 147205 - DNA, 627 bp, Homo sapiens
gaattcttagctgccaaaagggtgggctagataggaagaagaggagagagcacaggaggagagaaagggactgcaacaggatgggaagctttcagggggttttcattaagtggttgttgaacaattctcaaattgagtgttgttggatttctaagggttaattttacagtaatggataaaatgcaaaattttggcctatggtggcttattgtaatcccagcactttggaaggccaatgtgaggtggaagaattgcttgaggccaggaatttgagaccagcctaggcaacatagaaagaccccatctctactaatatagtaataataataatagccagatgtggtggtgcatgcctgtagtcccagctacccaggaggctgaggcaggaggattgcttgagccccggagttagaggctacagtgagttatgttcatggcactgcactctagcctgggcgacagagtgagaccctgactcttgggggggaaaaaaaaaaagcaaaatttttacaaaagggtagatggtcttgggatatcatataytgaagtgtttatcttcatgtttgcttttctttcttctccttccctttttcttccttcccctcctcttctctccttttctcattg

SEQ ID NO: 147206 - DNA, 609 bp, Homo sapiens
agatctgttttatattttatgaaaagtactctgacagcagtccaaggaatgagttagaggggagagagatggaaggtggagggaaaagttrgaagattatttcaacagtctagttgagacaagagccactctgtttaaaaagtggatatgcaatggaagcatccaggagagaagttaggaaggaaggatggacaagacttggtgagtgattggctgaggggtgatgaagggggagaggtctgggtgatgctcggatttctaatttgggtgataaggaggatggcagtagctttcatggacaaaagaaaaatgggaagatgagcaggctttgggagggagagacaatgatttcagcttttgatgttattgagtttgaggtagctgtgaaggtttcaggtgaagatttccagtaggcagtgagacacatggccctggaactcagaagacaggtcttgacaaaagacacaatttaggaggcaccaacacggttgaggtttcaaacctctgataaaaacctttgggccttctcccaagaaaggatgcaaatatacacattatgtttcctttaatttaagaagctctatttgaatccatccagagatcctaggt

SEQ ID NO: 147207 - DNA, 615 bp, Homo sapiens
aatttctccctgaccacatttaccaccggagccctgcagattcctgtatctggccatgttcctctctccctccctcacttgtctgcwcctatctcagacctccaacctttgttcttattcttttaggagcaatatacatttcttctgttaggtagagtcaataagctgtctttagattcactgcctgtttccatgtcaggttgttgagatacacagttctcacttaaagtggcctatcaagatattttctaaataaagatggttcctactctgactggaactcttgatgacggcttaaaaattacattccattcttttttaaattcacacagtgtatgctatggtacttattgcactaaagcaataaaaccagtagactcagtatctacaagtcttacagtacgagaaataaagccttcaaattttcatgtcatgggtactgttttttaacattttaaactcagattcacagaattaaattattctactctatttcatgaaatgctattatattgatttgtataagtatagtttttacatcctttttttaattattagtttactttgtttcctatccctatgttcatgccttttctacccttatggatttagtga

SEQ ID NO: 147208 - DNA, 615 bp, Homo sapiens
aatttctccctgaccacatttaccaccggagccctgcagattcctgtatctggccatgttcctctctccctccctcacttgtctgctcctatctcagacctccaacctttgttcttattcttttaggagcaatatacatttcttctgttaggtagagtcaataagctgtctttagattcactgcctgtttccatgtcaggttgttgagatacacagttctcacttaaagtggcctatcaagatattttctaaataaagatggttcctactctgactggaactcttgatgacggcttaaaaattacattccattcttttttaaattcacacagtgtatgctatggtacttattgcactaaagcaataaaaccagtagactcagtatctacaagtcttacagtacgagaaataaagccttcaaattttcatgtcatgggtactgttttytaacattttaaactcagattcacagaattaaattattctactctatttcatgaaatgctattatattgatttgtataagtatagtttttacatcctttttttaattattagtttactttgtttcctatccctatgttcatgccttttctacccttatggatttagtga

SEQ ID NO: 147209 - DNA, 553 bp, Homo sapiens
cttcagggaaagctgcaataagagaagaaggcagcgcagcaggcttctactgtatcccttaggatagccttcgtcagaaactcaaactttttggtttcagaatacttttacactctggaaagttattaatgacctcaaaaagcttttgcttttgtgtgtttcatcattgacatttatcatgttaraaattgaaacacgtttttaaagtatttgtttacttaaaattaacagttataaatccattgtgttaacataaataagctgtttaagtaataattactatattttctaaaacaaaaaatatttaaaagaatggcattaaaaaaattttgggcaatatctttaatgtctggcttaatagatggcaactagactctcacctttacttttgctttcagtcttctgcgacattttgttttggccgatgaacaagaagaaaatccaaattcacacagatttatagttgtaaagggaaaattttatgaagcttccaaaaaagttttggagacacctaagaggttctcagaccactctttgagaacttctgagcaag

SEQ ID NO: 147210 - DNA, 553 bp, Homo sapiens
cttcagggaaagctgcaataagagaagaaggcagcgcagcaggcttctactgtatcccttaggatagccttcgtcagaaactcaaactttttggtttcagaatacttttacactctggaaagttattaatgacctcaaaaagcttttgcttttgtgtgtttcatcattgacatttatcatgttagaaattgaaacacgtttttaaagtatttgtttacttaaaattaacagttataaatccattgtgttaacataaataagctgtttaagtaataattactatattttctaaaacaaaaaatatttaaaagaatggcattaaaaaaattttgggcaatatctttaatgtctggcttaayagatggcaactagactctcacctttacttttgctttcagtcttctgcgacattttgttttggccgatgaacaagaagaaaatccaaattcacacagatttatagttgtaaagggaaaattttatgaagcttccaaaaaagttttggagacacctaagaggttctcagaccactctttgagaacttctgagcaag

SEQ ID NO: 147211 - DNA, 388 bp, Homo sapiens
aagcttccaaaaaagttttggagacacctaagaggttctcagaccactctttgagaacttctgagcaagactatcctagagtcctcaaatctcaatagtttacagaaatgccacctaagtctcagagacttattacaacaaaggtttgtttgcatcttgctctcactgcgtttcatgtggatcagctggggtttttactccatggtgccctcactcrgcgacacaggctgcctgagcagccactgtctgggtcttgcccctcactggagaagagcaaaaggatcacagtgataaatgggctagttctaaaaggttctgctgggaagtcacctcactggtttcacacttcattagccagagcaactacttcaaagaggtgacaagcagt

SEQ ID NO: 147212 - DNA, 388 bp, Homo sapiens
aagcttccaaaaaagttttggagacacctaagaggttctcagaccactctttgagaacttctgagcaagactatcctagagtcctcaaatctcaatagtttacagaaatgccacctaagtctcagagacttattacaacaaaggtttgtttgcatcttgctctcactgcgtttcatgtggatcagctggggtttttactccatggtgccctcactcagcgacacaggctgcctgagcagccactgtctgggtcttgcccctcactggagaagagcaaaaggatcacagtgataaatgggctagttctaaaaggttctgctgggaagtcacctcactggtttcacrcttcattagccagagcaactacttcaaagaggtgacaagcagt

SEQ ID NO: 147213 - DNA, 576 bp, Homo sapiens
gctcaatatctgtcaaactgatgaatgaatgattaaaaacaaaaagtcccatatcacaaacattcataccaaatatcctaaaatagggaaaagactcacattttaatttaataattattcccttatgtaagttaaaaggacttagtttagtccaatcatccaatagtaaattgcatctttttatttttacaacaactattttgtctaatgaaataaacatctatattttaagcatatataatacagtatactaatattataaagtaatagtttgatttaaattatatggtctgacttttaaaycataatcagtcaggggacctgcaaaaacactcatttggaaatatataaaatatactattaatttgcaaagcagtactaaagatatttaaaaatctatccctcggaaacaatctcatgtacataaacacaccctagtaccataaatcacagtgttatcaaattagaatagtaaaagcaagtttcttttccagacgttttcttttttgatttaagagatttgtattttaccctctctttgggagtgtctagctatagcttttaggtaaaaataga

SEQ ID NO: 147214 - DNA, 589 bp, Homo sapiens
atagtaagagaacactattagaacttaatagcctaatccatcaaaaaataaaaaaaaggccatttaatttccctttaacacaggaactaaatctttttgaaaccttgtgtatgtcaggctgtctttgcattataattccagcaaggtgatcttgctaagaatttgttgcaaatagctttggtccttaatgtcacaacctccctcctgcgtgactgagatagtaagcacttaaaaaatcaaggcygggaatgattatcctttgtgtattctttcattacttcattaaaaaaaaatagttttctctatttcaatttcctgtgcctttatatggtttttgtctttcttatagtctctgacctaaaaagcaggaagtaaaaatgttcaaacgatctggaataagtacaagttcagaacaaaaataatttttgccctttaactgactatgaaccacatagtttgaattttagaatttgaatttaatgctcttccgactccatatatttattcactaaaaatattaaattactcatattcaagtggacttgtatttttttttgctgtccatttatagttatttgaacaaaatcac

SEQ ID NO: 147215 - DNA, 473 bp, Homo sapiens
caatataatgttatatctcaaagaactagaaaaaaatcaactaagcacaaagttaatagaagaaaaaaataaaacagataagagttgaaawaaatgaaatagagactagaaaaacaattaaaagatcaacaaaaccaaactgactttatgaagagattaaacaaaattgacaagtctttggctaaactaaaaagagagaagagaaataaataaaatcgaaaatgaaagaggaggcattacaactgatgtcacagcaagacaatgaattataaaacactactttgaataattatacactaacaaattgtataacctagaagaaatggatgaattcctagacacataaaacctaccaacactgagtaatgaagaaatagaaaaaatctgaacagactaataatgaataaaaagattgaatcactaataaaaagtctatcaaaggaaagcccaagactgatggcttcactacagaa

SEQ ID NO: 147216 - DNA, 546 bp, Homo sapiens
tttctattctttgctctggaatatgaaaaaatttctccaaatggaattctgtactatctcccagctgcttataaaaattatgtctatgcttctaaaagttcaaaactattctctttctgaaatatctttctaagttttttaaaggcttacacatttactttgcatttaatgaaaagactgagtttccaaaaaagtaaacttgagaaactgtttaggttgaaactaaaatttacttaaaattctcttatttatttattctccagactaacaggaaatgttctgttaggcagaaggaaaaaaattaaaaaaaaaaaaaaacagaagygtatttatccacaaaagtcaagacaagaaagtgttttaaggagaatgttgtcacctgtgtccaatactactgagaaatcaagtagaaggtcaatctttaatggccatgatttggcaaaatggaagagttgttagtgaccttgcaaagagcagtttcagaggaacagaagcataatcagagtgagtgagaagaaataagtgaatcactgaatacagacagtc

SEQ ID NO: 147217 - DNA, 426 bp, Homo sapiens
gaattccattccttgtagtcatagctctaaagttccagtgttgttgctggctgttgagcagaaaccaaacatccatccttgccacatggtctgctcttgaagaagaaattcacttcttccaggacagaagtagcacatctctcctgcttttgtgcatcatctctcatttttggaatccctccactgcttctagtctccttttaaatggctaatttgattacctcagctccactcaggataatctmcctttttagtaaattatagtcaactgattagaagtcttaattacatctgcaaaatccgttctcccttggcagataactgaatcacggagtgtatcctacctgtggtatcctattcagagacctgattcacactgaaaggcagtgagttatacatgagcactagaggctggcaccataattg

SEQ ID NO: 147218 - DNA, 634 bp, Homo sapiens
aatatttttaagctttacaaattaaaacttacaaagttgctgtctttgacttcccagtagtatacttcctttttcagttatgatttcttctgacatcttaatgttctttgccaaaccctttagaaacccatggtgatatttatcaggtgacttgggttagaaatcttttattatattccagcttcagcctctaactccttgaatgaccttgagaaattaatattcytcctactatctgtaacggtaaaaaaaaaaaaaaaaaaaaaaaaaagtaactcagagggaggttctgcagcttcattataattatgattcataataaagtccactgagatatctcaagaaaaggcattgtactaagacaaaataatattataaaactctccggagtcttcatttgtatgttattatttacaaacttcaacagaattatacttcagtgtgcctatagggtctctgatgttttcctttaaaccaaaactttttcttttaataaaaaatgttggctaagccggggattccttgaggaggaaagggaatgactcaaaattgttaattaaggctcatgaatttaaaactcccttccctttatgatcaaattgggaagagtttaagtttaaagtattaagatatc

SEQ ID NO: 147219 - DNA, 451 bp, Homo sapiens
atacctcaagtatttatgataatctggcaagaaaagacagaatatctataaaaaatgtctatagatatctggaagcatctctgtggcaatagccagagctaaaagataatggatccttttctatggagctgaaaaagaacagatactgttataaataaatctttaacagagccaaataactctttatatattcataacaccaggagaacatccttaggtatattaggtattgaacagcataccatgtataaacattcaggaagttatacaacaacacataaacactaaaaaggcaaattcatcaaaattaggaatttttccattgagaaattgtagtagcataattgacagtagccataataaagaatttttaaattgaggaattctagtacaataattgacagtagccataaagtgtttttgatgtgtttrcttatcccctctccattgg

SEQ ID NO: 147220 - DNA, 545 bp, Homo sapiens
tggggacgtacactaacacttgttgatttatatttcaaagccatagatattaaggcattgtgatattgacacagcgcagacgaatagatccatggarcattataaaggttctagaaataggcatacatatattgccaaggaataatttatgacaagcatatcactgcagtgtaatataaaaagtccattcttcttagtaaatggcaccagatagtcattttgaaaacaatgtatgttgccactatctcataaaatacaagaaattaaactccagatacagtatatatctaaatttaaaggtgaaataataaagctttttgaagtaaatacaggtgactagcttcattgcactggactagacaaagacactataaataggatacagcaatcactaaccataaagaaaaaaaattccaaaagttgaaaaaacaagccagagtagaagacattttcaatacgtatatctaataaaagacttgtgattgttccttcctgcctgttctacagatttcagacttcttcagccagccccccaaattacaaaa

SEQ ID NO: 147221 - DNA, 545 bp, Homo sapiens
tggggacgtacactaacacttgttgatttatatttcaaagccatagatattaaggcattgtgatattgacacagcgcagacgaatagatccatggagcattataaaggttctagaaataggcatacatatattgccaaggaataatttatgacaagcatatcactgcagtgtaatataaaaagtccattcttcttagtaaatggcaccagatagtcattttgaaaacaatgtatgttgccactatctcataaaatacaagaaattaaactccagatacagtatatatctaaatttaaaggtgaaataataaagctttttgaagtaaatacaggtgactagcttcattgcactggactagacaaagacacyataaataggatacagcaatcactaaccataaagaaaaaaaattccaaaagttgaaaaaacaagccagagtagaagacattttcaatacgtatatctaataaaagacttgtgattgttccttcctgcctgttctacagatttcagacttcttcagccagccccccaaattacaaaa

SEQ ID NO: 147222 - DNA, 545 bp, Homo sapiens
tggggacgtacactaacacttgttgatttatatttcaaagccatagatattaaggcattgtgatattgacacagcgcagacgaatagatccatggagcattataaaggttctagaaataggcatacatatattgccaaggaataatttatgacaagcatatcactgcagtgtaatataaaaagtccattcttcttagtaaatggcaccagatagtcattttgaaaacaatgtatgttgccactatctcataaaatacaagaaattaaactccagatacagtatatatctaaatttaaaggtgaaataataaagctttttgaagtaaatacaggtgactagcttcattgcactggactagacaaagacactataaataggayacagcaatcactaaccataaagaaaaaaaattccaaaagttgaaaaaacaagccagagtagaagacattttcaatacgtatatctaataaaagacttgtgattgttccttcctgcctgttctacagatttcagacttcttcagccagccccccaaattacaaaa

SEQ ID NO: 147223 - DNA, 578 bp, Homo sapiens
accacacctacattttaagtattttttttttacagcatcattctacttcctggtaccaaaatttgtattcattatctatttccgcttaacaaatttctacaaaatttgtggctgaaaacagtatagttgtattgcttcatagtttctgtagctcaagaatttgtgcctggcttaactggtcttctgctcagtctcatcaacctgaaattggggtgtcagctggggctttgatcccatctgagggttggagcactcttccaaactcctgtggttagtggcagaattcatttccttacagctctagaatttatggcagcttgcttcaaaatcagcaacccagagaaagagaaaatctgctccttcaaatctctgaactctagaaactcttttaaagggctcatctggttatgccaggcctgcgtgtgataatttcctctttgatcaccttaaagtgatttggraccttaataagatctgcttaaatctcttcacctctgccatacaatgtaacctaatcacagaagtgacatcaattatgttcacaagctccatgcacactcatagagagattgtacagt

SEQ ID NO: 147224 - DNA, 352 bp, Homo sapiens
gtggaatcttacagcacttgaccctgagtggaaggctgccacccctggacctatgaggatattatattgtatttacagggttaataatcttttcacgaagaactatctcaaagataggcatccttccctttattaatgaattccagataggcactattctatcaagaagtcagcctgaacgtggaaaaacaatatcacacatgcaccccrtcaatataggttgagattgtcaagatgcctggaaaataatcacactttagatttaacagaaaaattttgaattatttgtcagtatcatatagacaccacatgaacctgacctgataaagcagttttctttttacccttgaca

SEQ ID NO: 147225 - DNA, 629 bp, Homo sapiens
accttttttgttatcatcaattatgagtatttgtaaacacatgaaaaggtagagggaattaatctccatttaaccatcaytcagattccagatttttaaatttattgtttcactcactttggtatcattttcattccttaaatattattaaaagaaaacatgttatttcataattactacatcttttagcatgaatctgtagaaaacatggccattatcttacagaaccaatgtcgttgttgttgttgttgttgttgttttgtcacaactagcacatttaaagtaatttcctggcattattttataagcagttcttactaaaatttccatgatgatctttttatagttggtttgtttgaatcaggatattcattttaaataacagatttagagtttgaaactacatatatctggtacagtgttttttccactataacacagagacttccaaattaatcagttaattaaccaaaaaagaatgatgtgctttttcagagaaaatgcctggtgatttgacactttacctcttacgtgtaatactttgctagaggagaaacaatgtgattctgctctgttagtgcccttgtatcaccaattccgtgtttctgtaattgcttttccattcatgc

SEQ ID NO: 147226 - DNA, 610 bp, Homo sapiens
gccactaggtggacaatgagattatctgcaaaggcttcatgaatgtcatcagggctagactttagctagacagctagatggcagatagctagatggagaaaacatttatgttttcctagatcatgaaacagaaaaaaaatccttgaaaagatactgtaacctaaaatctaaacgyttattttataggaccattagaattaaaagatatgatgcatatgaagtgcttaacatagtgaatgaatcataacaaatgttcaatatatcttaactttcattaaggccaaattcgaagagcacttctgatgtggtttggatttgtgtccctgccaagtctcatgacaaatggttatccccattgttggagaagggaccctgtgggagatgattggatcatggaagcggatttcccccttgctggtcttgtgatagctgagtgagttctcatgagatctggttgtttaaaagtgtgtagcacctcgccctgctctctcttcctccttctctggccatggaggatatgcatacctcccctttgccttccaccatgattgtaagtttcctgaggcatccccagccatgcttcctgtacagtctgcagaactgtgattca

SEQ ID NO: 147227 - DNA, 610 bp, Homo sapiens
gccactaggtggacaatgagattatctgcaaaggcttcatgaatgtcatcagggctagactttagctagacagctagatggcagatagctagatggagaaaacatttatgttttcctagatcatgaaacagaaaaaaaatccttgaaaagatactgtaacctaaaatctaaacgcttattttataggaccattagaattaaaagatatgatgcatatgaagtgcttaacatagtgaatgaatcataacaaatgttcaatatatcttaactttcattaaggccaaattcraagagcacttctgatgtggtttggatttgtgtccctgccaagtctcatgacaaatggttatccccattgttggagaagggaccctgtgggagatgattggatcatggaagcggatttcccccttgctggtcttgtgatagctgagtgagttctcatgagatctggttgtttaaaagtgtgtagcacctcgccctgctctctcttcctccttctctggccatggaggatatgcatacctcccctttgccttccaccatgattgtaagtttcctgaggcatccccagccatgcttcctgtacagtctgcagaactgtgattca

SEQ ID NO: 147228 - DNA, 610 bp, Homo sapiens
gccactaggtggacaatgagattatctgcaaaggcttcatgaatgtcatcagggctagactttagctagacagctagatggcagatagctagatggagaaaacatttatgttttcctagatcatgaaacagaaaaaaaatccttgaaaagatactgtaacctaaaatctaaacgcttattttataggaccattagaattaaaagatatgatgcatatgaagtgcttaacatagtgaatgaatcataacaaatgttcaatatatcttaactttcattaaggccaaattcgaagagcacttctgatgtggtttggatttgtgtccctgccaagtctcatgacaaatggttatccccattgttggagaagggacccwgtgggagatgattggatcatggaagcggatttcccccttgctggtcttgtgatagctgagtgagttctcatgagatctggttgtttaaaagtgtgtagcacctcgccctgctctctcttcctccttctctggccatggaggatatgcatacctcccctttgccttccaccatgattgtaagtttcctgaggcatccccagccatgcttcctgtacagtctgcagaactgtgattca

SEQ ID NO: 147229 - DNA, 421 bp, Homo sapiens
tcaattatgcctgtgtaatggaatcccagtaaaaattctgaacactgaagcttaatgaagctttctggtatgtgaacatatatcaatatgccagagggttatgcaccctaattttrctgccagagggcatgaaagctttgcattcaggaccctctaagatctctccttctgtgtctcttcatttaaatgatcctgatatgtattttatataataaaactgtaatcataagtatcatgctttcctgagttctgtgagtcattttagttaattctcaaacctaaggaagtttgggagaagcgcccagattttgagctagttggtcagaagtgcaggtggcacaggatagctcaaactcattgctagcatttgaagtgggagcagtctggctgtggaccatgacttttaacttgtggggtatgg

SEQ ID NO: 147230 - DNA, 551 bp, Homo sapiens
agagggttatgcaccctaattttactgccagagggcatgaaagctttgcattcaggaccctctaagatctctccttctgtgtctcttcatttaaatgatcctgatatgtattttatataataaaactgtaatcataagtatcatgctttcctgagttctgtgagtcattttagttaattctcaaacctaaggaagtttgggagaagcgcccagattttgagctagttggtcagaagtgcaggtggcacaggatagctcaaactcattgctagcatttgaagtgggagcagtctggctgtggaccatgacttttaacttgtggggtatggactaattccatatggtaagtgtaaaacttgarttacagtattgcaaaagacagtaaaagtaatgaaagtcatagaacaggaagagaattctaggaggaaactgtatatgagtgagtgaagagatccataaacatatccccagaagagcatatatttaaaggacaagcaaagatggaagagccagtcaaggagactgagagggtaactattgtaatggtagaa

SEQ ID NO: 147231 - DNA, 475 bp, Homo sapiens
taccatttttccctgcctgaaagttgaaggggaggaataaatgtggctttctcactagcctaacagctttatatcagcagtccctaatctttttggcaccagggactggtttcctgtaaggatattttcatagaccagggcagcggggcatggtggttttgagataatttaagcacattgcatttattgtgcactttatttctattattattacattgtagtatgtaatgaaatacttatacaactcaccataatgtagaataagcatgagccctgagcttgttttcctgcaactagacagtcccatctgggggtgatgggagacagcgagagatcatcaggcattagattctcgtaaggattgtgcaacctagatccctcgcatgtacagttcacaatagagtctggacttctctgagaatctaatgccaccrctgatttgacaggtggtagtgctgaggcagtaatgtgagca

SEQ ID NO: 147232 - DNA, 449 bp, Homo sapiens
gcactgctaagcgttcctcatgctgtgttagaaggagccaggcagccaagagagtcagcattaataacatctccagttccaccatttctagctaaagggtaaatcttttaaatttttaagacctatgtttctttatacatatagtaggggtaaaggtaacattgccccttccctataagatcctgactatagaatgattatacattctaaaagacctgcataaatgcaagagatattgtggaagtgtttgcatgcrtgtgtgtgtgtgtgtgtgtgtgtgtgtgtgtgtttcatgtttattcttcacccctctgtttctctgttttcactaacagtaaacacatgaaacctaaaagaagcctccatgctttgtattgaaacaaaaagaggcacctgggaaaccgttctgctttgttgctttactttaaagaagagggatattgacaaca

SEQ ID NO: 147233 - DNA, 370 bp, Homo sapiens
ctgtaagagaccattgttcctatctaatgtgagaagcagttagctctttagaaacccataagagagcctcaccaaactaaatttcaaaaaattatgagaacttgccgtgagaaaaaagacacaggattactatcatctctagcagagaacaaactcaccacaggccagaaaattgaagaagaaatccaaccttctacacatttatgaaacgtatgtgggaactagaaaaatggattcaaatcctgaagagtactagccccaggctgagactacaccaacacaaacactcattcccgtatgaaatgcaaaacaggaaatgcgccaaaggccagcaggaaagctcayagaaatctctttttcacaagtgtac

SEQ ID NO: 147234 - DNA, 593 bp, Homo sapiens
taggcctgcttttactattgctattcaatagcaatagtaaaatttgaaatatactgaaatttgtagccaaagtatttgaaatacactgaaatttgtagccaaagtattaaggcaagaaaaataaataataaaacattattattggaaagaaggaactaaaactattcaccgatgacatgatcttctatagaaaaaaaagccaagamttcataaaaagtaactagagttaacaaacaaattgaacaaagttgcatgatataagaccaacagggaagaatcaatcatgtttccatacaccagcaataaacaatccaaaaaggaaattaaaaaaaatatttacaataccatccacaagaatgaaatatacctattcaaagtgatgttagaccaaaaacacgtctgaataattttaagactaaaataatgcaaaatatatcctacaaccacaatggaatgaagttaggaatgacatactaaggcttaaatttaatccaacatgtggaagacttgcaggctgaaaattatgagacattgctgaaataaatgttaaaagatgtaaacaagttgaaagttatcatgtgttcatgaattgg

SEQ ID NO: 147235 - DNA, 593 bp, Homo sapiens
taggcctgcttttactattgctattcaatagcaatagtaaaatttgaaatatactgaaatttgtagccaaagtatttgaaatacactgaaatttgtagccaaagtattaaggcaagaaaaataaataataaaacattattattggaaagaaggaactaaaactattcaccgatgacatgatcttctatagaaaaaaaagccaagacttcataaaaagtaactagagttaacaaacaaattgaacaaagttgcatgatataagaccaacagggaagaatcaatcatgtttccatacamcagcaataaacaatccaaaaaggaaattaaaaaaaatatttacaataccatccacaagaatgaaatatacctattcaaagtgatgttagaccaaaaacacgtctgaataattttaagactaaaataatgcaaaatatatcctacaaccacaatggaatgaagttaggaatgacatactaaggcttaaatttaatccaacatgtggaagacttgcaggctgaaaattatgagacattgctgaaataaatgttaaaagatgtaaacaagttgaaagttatcatgtgttcatgaattgg

SEQ ID NO: 147236 - DNA, 593 bp, Homo sapiens
taggcctgcttttactattgctattcaatagcaatagtaaaatttgaaatatactgaaatttgtagccaaagtatttgaaatacactgaaatttgtagccaaagtattaaggcaagaaaaataaataataaaacattattattggaaagaaggaactaaaactattcaccgatgacatgatcttctatagaaaaaaaagccaagacttcataaaaagtaactagagttaacaaacaaattgaacaaagttgcatgatataagaccaacagggaagaatcaatcatgtttccatacaccagcaataaacaatccaaaaaggaaattaaaaaaaatatttacaataccatccacaagaatgaaatatacctattcaaagtgatgttagaccaaaaacacgtctgaataattttaagactaaaataatgcaaaatatatcctacaaccacaatggaatgaagttaggaatgacatactaaggcttaaatttaatccaacatgtggaagacttgcaggctgaaaattatgagrcattgctgaaataaatgttaaaagatgtaaacaagttgaaagttatcatgtgttcatgaattgg

SEQ ID NO: 147237 - DNA, 598 bp, Homo sapiens
ccagaataattttgaaaaacaagaacaatattggaggactcagagttcccaactttaaaatttactagaaaactgcagtaataaaaatagtgtgcttttggcataagaatagacagaggctaatggaacagaattcagaatacatcaatatgtccatctatctacgacctgttgatttttaagaagttgctaagactattcaatggggatagaatatcctcttcaacagacagtgctggaacaaayggatatttataaacaacaatgaagttggtagagtactattcagccatgagaaagaatgaaaatagtgtcatgtgtgacaacatggatgaacctggagaacattatcttaaataagtcaaacacagagagataaatactgcatgttctcacttatacgtgggagcaaaaaaaaagcttataaaagtagagactagaatacaggttatgagaggctaggaacgggaaggggaagggagaataagaaaagactggtttatggatacaaagttacagctaatgctaggattaaattctaatgctctgtagcactactgggtgaatatggttaacaataattttattttcaaaaagc

SEQ ID NO: 147238 - DNA, 598 bp, Homo sapiens
ccagaataattttgaaaaacaagaacaatattggaggactcagagttcccaactttaaaatttactagaaaactgcagtaataaaaatagtgtgcttttggcataagaatagacagaggctaatggaacagaattcagaatacatcaatatgtccatctatctacgacctgttgatttttaagaagttgctaagactattcaatggggatagaatatcctcttcaacagacagtgctggaacaaacggatatttataaacaacaatgaagttggtagagtactattcagccatgagaaagwatgaaaatagtgtcatgtgtgacaacatggatgaacctggagaacattatcttaaataagtcaaacacagagagataaatactgcatgttctcacttatacgtgggagcaaaaaaaaagcttataaaagtagagactagaatacaggttatgagaggctaggaacgggaaggggaagggagaataagaaaagactggtttatggatacaaagttacagctaatgctaggattaaattctaatgctctgtagcactactgggtgaatatggttaacaataattttattttcaaaaagc

SEQ ID NO: 147239 - DNA, 507 bp, Homo sapiens
ctactctttggcatttcctcaagatatacaaacacatatgtgcacctgcatgcatgcacatgcacaagcacacacaccctattaaagaatcattagcaaccatattcataatggccccaaactagaagtaactcaaatgcctatcagtaggaagtgcataaacatatgtggtatattcatatgagagagtgctagtcagtgatgaaaaagaataaattgctgataattgcaacaacrtgaataaattagaaagcatactgctgatccaaagaaacacgacacaaaagagcacacacagtataattccatgtataagaagctcaagaacaatcaaaactaccatgtgttatgcaaaatcaggaaaataccctcagggctgagggtgcagagaaagttgacctgagggaagtacaatgtgacatgatggaaatgtttaaaatgtttttggtggtaattacatgcatgtataaaattgtcaaaaataatagaactgaatttttaagatct

SEQ ID NO: 147240 - DNA, 463 bp, Homo sapiens
aaaaattaaatgagttaatatatttataatgggttataaaaagaaaatgttttgtaaagtccttagaagagggtcttgtattatcccattttcacactgctataaagacatacctgagactgggtaatttataaagaaaagaggtttaattgactcatagtttcacaggcctgggaaggcctcaggaaacttacaatcatggtagaaggggaataggcatgtcytacatggtggcaggagcaagagagaggtgtgaggagcaaagtgggaagagctcctcataaaacgatcagatcttgtgagcactcactcaatatcacaagaacagcatgggggaaactacccccatgatccaatcacctcctatccctagacatgtgtgaattatgggaattgtaattcaagatgagatttggatggggacacaaagcctaaccgtatcaggcctgttacagaataagca

SEQ ID NO: 147241 - DNA, 573 bp, Homo sapiens
aaagcttggattttctcaactttatgtaaaaaagagtgttcttgttggtatttggcaattttctatgttttgatccctctgaaaatttatcccaaccactctctctcttccagaatttcctaaaagtttgtgctttgtaccttttcttactttctattatttatataaaagtattatttctgcaatttcagttaacttttagtgcagagaaaagtaaaaaaaaaaaaaagggctcagtttacagtcttgatccaactcctctgttgtatgttggttttatatgcaagaaaacaataaatgttactctttaaatatagcaataattaaaattaaagaaggtagtcatgttaamaaaacagctaagtagaatagctcacttctcagtgatgatcaatataatgaggcatttctgtgccatgaaaaaacaacaacttgtagaaaattccttttgagactcacattgtaaattacttaattttttacaatttgtttttgtcctactctatgctactcttaaaaaggaactgtgggtttaaaaaaaaccatttctaataacatagtaactgtgtgtga

SEQ ID NO: 147242 - DNA, 416 bp, Homo sapiens
ggttcacaccattatcccacttcagcctccccagtagctgggactacaggcacacaccaccatgccccgctaattttgtttttgtacttagtagagatggggtttcaccttgttagccaggatggtctcaatctcctgayctcgtgatccacctgccttggcctcccaaagtgctgggattacaggcttgagccactgcacctggccaatatctttaatttttaaagattacaggacagaggccatgaaaaggatagcagctcttcaaagcctccagtcagcttgggaattgaaaatgaaagtagttgcatgctctcagaattgggctccatggaaccactgggaatgcagttccctgggatttggcaaacatgttgtaagggctttcaggcagaaagcagcctggaaacattact

SEQ ID NO: 147243 - DNA, 510 bp, Homo sapiens
gcatgagtttctaccccatcatctatgcagggcagaggcagtgaatcctgctggagtgtaataacaatctataagtaaaccagttgtggtgaaatctatcaaaaaatgtggcaatttatgaaaatatgtccctcaagcacaccaaagttgtcatcaaagtgagttaactgacaattaacttctacatcttgcacaaagggtgtggaattctagtgtaaaaataaaaccagctaagacatatctactgtctatgaacaataaatcagaaacaaaaaaatgaacaatgccacttggtgcttttcaatgtacactaccatattatggaacactgctgttcagtcttctgatttagaaaggctactttcaagggagactwtaatggtgatatttttgcctacatattttaacttaaaatttcagccaacgagcagttgttgagtgaccactgtgttcttggaactgggtcacaaaaaggataatttgttaacaactattagcactgctatgcat

SEQ ID NO: 147244 - DNA, 510 bp, Homo sapiens
gcatgagtttctaccccatcatctatgcagggcagaggcagtgaatcctgctggagtgtaataacaatctataagtaaaccagttgtggtgaaatctatcaaaaaatgtggcaatttatgaaaatatgtccctcaagcacaccaaagttgtcatcaaagtgagttaactgacaattaacttctacatcttgcacaaagggtgtggaattctagtgtaaaaataaaaccagctaagacatatctactgtctatgaacaataaatcagaaacaaaaaaatgaacaatgccacttggtgcttttcaatgtacactaccatattatggaacactgctgttcagtcttctgatttagaaaggctactttcaagggagactttaatggtgatatttttgcctacatattttaacttaaaatttcagccaacgagcagttgttgagtgaccrctgtgttcttggaactgggtcacaaaaaggataatttgttaacaactattagcactgctatgcat

SEQ ID NO: 147245 - DNA, 438 bp, Homo sapiens
aaggaattaaagtgcagagataactgcttccagaaatactagccactrcttatactgtctctcctttaccaaaaggagacacttacatatgcacatacgcaccccaaactgagttctgaaaagccattcactgggggtgcaatgagttccttcacgtgtttttagtaagattgactggtctactcaaagttctttcaatacttactctacaaagcaatttgtttaaaacccagggagattcagggggttggttgatcggggaccacaagacttacagctccaatattattcagtattttaaattacacaaaggactgctgcttttaatctctgggtgggctgtgactgagctgaagagaatctgtttttgggttcacttccaggatgtcggtaatctctgtcttgttgaatatttgtttttcctttttttctgctaaa

SEQ ID NO: 147246 - DNA, 560 bp, Homo sapiens
tataatatcatatgtaaaaataaacaaagttggtttaagaatatattcaccaatacctcatgagtgaagcttgtatgactagcagtacttaaactagtactgctaggagagacgaaaaaatatcacgtgaaaaaagcagamcttgggaattaaaaaaaaaaaaaaaaaacacactaagagaagagatgttttgttttcagttattgccaaactccagatctaatagtgcattagttcatctggtcctttatagctaaatgacattctgcactcattagaagatatgcagatttttattagagtttttcattactatacaaactgaccaatttcttgatattttgactaattaacaagaaagttgtttataaaaatggaagattctgtgtcccattgtcaaaacatcagcattttgaactagggaagacatgtaacactgagatcatgtgttatgaaaaatataaaatatatcccagtatttgaggaaaccgccggcttcatcagtctgtgtcagggaattaattttcagtcatacatccctgctgatatatctgaaacct

SEQ ID NO: 147247 - DNA, 560 bp, Homo sapiens
tataatatcatatgtaaaaataaacaaagttggtttaagaatatattcaccaatacctcatgagtgaagcttgtatgactagcagtacttaaactagtactgctaggagagacgaaaaaatatcacgtgaaaaaagcagaacttgggaattaaaaaaaaaaaaaaaaaacacactaagagaagagatgttttgttttcagttattgccaaactccagatctaayagtgcattagttcatctggtcctttatagctaaatgacattctgcactcattagaagatatgcagatttttattagagtttttcattactatacaaactgaccaatttcttgatattttgactaattaacaagaaagttgtttataaaaatggaagattctgtgtcccattgtcaaaacatcagcattttgaactagggaagacatgtaacactgagatcatgtgttatgaaaaatataaaatatatcccagtatttgaggaaaccgccggcttcatcagtctgtgtcagggaattaattttcagtcatacatccctgctgatatatctgaaacct

SEQ ID NO: 147248 - DNA, 486 bp, Homo sapiens
tttacaacaatcatggaagggaggtacatcattggcatcattttatacctcagtaaactgagatacgaggaggttttataacttgcccactatgctaactgcaatgccatggtcagcagaaaattgttttttttttcttttaagatgcctggatactgcatattcatgaatccacacaaggtcagggttccattctytgacctctttgctgaggaggtaccagagaaaattcatcctgaagatgaaaaagggttttgtgaggtgggagagaacgtgcgtgttgtctgaagtggcagaacataacaagtcacaatgcaagggagacgaggaactgcccagatcatctggtttttttttggcacaatgcacataccacgcaaaatcacactcatacaccaaatcaagcactttaatcacaattccagaagagtttaacaaaagactcagggatgattttgctgattctcagagagcactcactttcta

SEQ ID NO: 147249 - DNA, 443 bp, Homo sapiens
tcacatggctgataacagatgctgtccatggataaaaacttgctttaagttgtcaaatggagagcccactcatgacctctccatgttttgggtttctcataacrtggtgactggtattctcagacacctacgtagaagcttgaagacttctaatgacttaacctcgagaaatcccggaacattacttttaccaaattccactggtaaagtgaattccaaagggaagcccagattcaagcagagtagaggcacagcctctatctcttgatagaagaatgccttgtgttaaaggaaaaagagataaagatggtggccactttggaaacaagctaccacattattaattgtcattctgctggcattgatatctttagttttataaaatataaataaattcctctgatttctaatgaagcttaatgatctctcccccacttactcaa

SEQ ID NO: 147250 - DNA, 394 bp, Homo sapiens
actttgcatgtttcaatccaatcaacacttaatattaaccatcacaataactcaaagtcaaagcaatcaaatatttaccaacaagatgttgcaaaaataaattgttttataactatacattagaataatttgaaaaagtaataagggcaaactaaagatgtacacaaaaactttcattactgatatggtttggctgtgaccccacccaaaatattatcttgaattttaatcccttattgtaacccacacctgataggggaaggaacttgtgggaggtgattagatcatggggacagttcycccatgctgttctcatgatagtaggttctcatgagatctgatagttttctaaacggcttttcccctttttgctttgcacttctgtctcctgcca

SEQ ID NO: 147251 - DNA, 394 bp, Homo sapiens
actttgcatgtttcaatccaatcaacacttaatattaaccatcacaataactcaaagtcaaagcaatcaaatatttaccaacaagatgttgcaaaaataaattgttttataactatacattagaataatttgaaaaagtaataagggcaaactaaagatgtacacaaaaactttcattactgatatggtttggctgtgaccccacccaaaatattatcttgaattttaatcccttattgtaacccacacctgataggggaaggaacttgtgggaggtgattagatcatggggacagttcccccatgctgttctcatgatagtaggttctcatgagatctgatagttttctaaayggcttttcccctttttgctttgcacttctgtctcctgcca

SEQ ID NO: 147252 - DNA, 418 bp, Homo sapiens
tttccattttaaaaatcattattgcacattaaattatataaagcagaaataatatactatggtattatcaacatttacagaagcaaaatggctaaacctaatagcagaagttaggcaaaaggaatggaagtagtgtgctttaaggttcttacagtgtacatgtagaaatatggtattattttaaattagaaggtgataagtaaaagatgcatattgtaaaccayagaaacttcagtaaaacaaagatgtataattagtaatctagtagtagtgataaagtaaaatcaaaataaactgtgacgataaatcatatagaaaaataagaagttatattttcaatatcactcttcaataaaataactggggctccttgaagatatgactaattctaagactctatgcatcttgtagttccagg

SEQ ID NO: 147253 - DNA, 421 bp, Homo sapiens
aacatttcaatgcgttttctttgttcctgtagagcttctgtctcctgttttagtactctggcctctccttatgaattactgttatgaaataaaagctataagaggaatgaatctattcactttccaattatttaaatgacacagccaaaacctggccaacacgaaaataatgcaactgacttttatgaatcttgggatgatatcacgagcatacttctgrgtttgtctggatttgtgaaaagaggccagtatttgcagaagttacacaatgtgttgaaatacatgattggatcagtgcagattaaaattcccactagaggaaggaagagcctgaatgcctttattccatgtatgatgcatttataaaatatcatataatatgtacttcatattatatgtgtgagtgcatgcgtgtgtgtgt

SEQ ID NO: 147254 - DNA, 576 bp, Homo sapiens
ccttccttagaaaccaaaagagtaagtaaatcaagaaagaaaaatgtaatgggatctagaaagcaatggctccaacttaaaaaaaaaatgaagcccaagatcacagtgaaagagctgtgccccaggtgtagagggcaggtcacaaaactccatctctaagacaaggcaacactaggaccctaaggtattaatatttgaatatactgagagaatatgtagataatgctgagtgagcttggggctgaattagtaggaaacagaacaccaaaatgtaaaaaccagataaatattactttcaataagataaagaaaagttgtatcacccataaagtaaccatgatctagtatatagcttatytaggaatactgtttacattatcataataatctaaggacagaattttgacctaactaaaagtatgataaacaaatattgagaggccaggtggatctagatatatttcagaagtgaaaatgattttcgagaaatacaatttttttatcgttggtggtagagatgagtggtgtttgacagatagctaaattcttatttttcccactgggaaattgattaat

SEQ ID NO: 147255 - DNA, 609 bp, Homo sapiens
gccttgcttactaaaatgttaagttttcctctatatgctgcaatatttatgtgaaaggtatttctttctaaattgaaaaacccttacggattgtatctgttcattttctgtctgggatgtacaaactttcagttgtatttgacaacttaagagaagttaaatcagcagctatatatttaactttgaattataattgaaataaaacaaaaartatatgaaatgctaaatttgattagctttgatataatcatgcaaccctgagattattatcaatatcaagatagtaaacatttctattatccccaaagtctccttctgcccttttctgattcatccctcaccacccccacccaaagcaacagttaacctgtcatctgttacaattgagtttacattttctagaacttcattgtattaatgcacatagtatttttggcccaatattttcctttacattaataattttgagaatcatctacattgctgcatataatgttagttactttatgttatcacctaggaagtgttttatttaacaaatatactccaatttgtttgttcattcatctattgataagcatataagttgtttcaagtatgggactattg

SEQ ID NO: 147256 - DNA, 609 bp, Homo sapiens
gccttgcttactaaaatgttaagttttcctctatatgctgcaatatttatgtgaaaggtatttctttctaaattgaaaaacccttacggattgtatctgttcattttctgtctgggatgtacaaactttcagttgtatttgacaacttaagagaagttaaatcagcagctatatatttaactttgaattataattgaaataaaacaaaaaatatatgaaatgctaaatttgattagctttgatatawtcatgcaaccctgagattattatcaatatcaagatagtaaacatttctattatccccaaagtctccttctgcccttttctgattcatccctcaccacccccacccaaagcaacagttaacctgtcatctgttacaattgagtttacattttctagaacttcattgtattaatgcacatagtatttttggcccaatattttcctttacattaataattttgagaatcatctacattgctgcatataatgttagttactttatgttatcacctaggaagtgttttatttaacaaatatactccaatttgtttgttcattcatctattgataagcatataagttgtttcaagtatgggactattg

SEQ ID NO: 147257 - DNA, 567 bp, Homo sapiens
gatgctagctcaagtcaaaattacagaaggagattcactgtctctgttaatactactctctagactaagggccactccccctactccatcatggctgatccacctcctyccaatcttgcctaatctggggtgggttcaagaggggacatgtggcacggctctcaaggcagctgggtttggagtttcatctactcttctcaggtttctagtattttattcctgatctgcttgagcaccagggtgtttctaatggaacctcttaaaaagttttagctttatctattcagtgatcagacttttctcctaatgatatcttaaaatgaaccttacatgctgactcatcacttacaaatcttcatggatatgtgccatctttgcgaagtagctaaattatcccatagaattccagacttttttttcgctgaccagagagattagactaaatgtgttttgggaatttcgagatgagggactagagattctggagaaagttgcagtggagaaagttaaagtagaaatcaattagcagagcatgaggcataaggaaacaattgaagagtaagatat

SEQ ID NO: 147258 - DNA, 586 bp, Homo sapiens
taattatcagcatagaaataatatttaaatttatgggtgcataaagtcatccaaggaatcaatataaacagaaaggaggtccaatgtaagaatgttgagatattacaacatttccaaattttgcagaggttgtagaaccaacaaaggggagttagtgggagcagtccatctggtaggaagaaaatcgaaacaggatgaggtcctgaaaaccaagagaagaagcttgcttgcaagagaaaagagtggtcaactttgccacatcctgtagatgagtcaagtaagacaaagactgagactggaaagttggatctagcagcatctagattattggcagccccaaaactagcagttgaagagatagaaaattgcttayagatcatgcggcttgcagatttcaggcatgccaaagtaagtggaaggaaggttacgctagggcagatggggaaaatggtcatttagttaaagagaactgaaagatcattgttgagtatgctgtcttgtatctcaaaaattgaccttggaaaattatttaggagtttatcctaaggaaaatatctcagatataaatttgagaggaatagaaagt

SEQ ID NO: 147259 - DNA, 586 bp, Homo sapiens
taattatcagcatagaaataatatttaaatttatgggtgcataaagtcatccaaggaatcaatataaacagaaaggaggtccaatgtaagaatgttgagatattacaacatttccaaattttgcagaggttgtagaaccaacaaaggggagttagtgggagcagtccatctggtaggaagaaaatcgaaacaggatgaggtcctgaaaaccaagagaagaagcttgcttgcaagagaaaagagtggtcaactttgccacatcctgtagatgagtcaagtaagacaaagactgagactggaaagttggatctagcagcatctagattattggcagccccaaaactagcagttgaagagatagaaaattgcttacagatcatgcggcttgcagatttcaggcatgccaaagtaagtggaaggaaggttacgctagggcagatggggaaaatggtcatttagttaaagagaactgaaagatcattgttgagtaygctgtcttgtatctcaaaaattgaccttggaaaattatttaggagtttatcctaaggaaaatatctcagatataaatttgagaggaatagaaagt

SEQ ID NO: 147260 - DNA, 580 bp, Homo sapiens
taatcctattcttgaacctgtgtcaactatattgtcatttctgtttttctccccagcatattaaaaactattcatcaaagaatcaccaagacattctaaagtagaatccttttaacaggaggtgtatgattcagaaggtgtatggccatgacaataaggtccttgtgcttgtagtaacttagctgagcctatgattggcaaagttcctattcctgctgcaaaacaccccaaatatctgatattcagctctagtctgtggtcttttgttattgcttcacatgatttttctttccaaaggaaatttccttgctacactcatttgtctataggatcccacatgcagtgatactcccccacatgactgctgatttaaagggaactaaggtattttctgtgagtgtccatcacacttccagttctcaagaagccataaaaatggggtcctttgagctctgaagtaactggaaattcttyacattatgttattgtttcagcagctcaagcaaagacttttatcctttgtctgttccttatttctcaaagaacagaaatagaactgccaaaatgccacaagggaagc

SEQ ID NO: 147261 - DNA, 501 bp, Homo sapiens
ctagatttatctatcatttatctacccatctatataatctaatctgccatattgttttccatagaggttatactaatttacagtgtatgagtgttccctttcctccacatcctcactatacttgttgctttttgatgttctaatagtggccattgtggttagtgtgagatgggatctcatagtggttttaatttgcatttctctaatgactagtgatgttgagcattttttttggtttttggccacatgtatgtcttcttttgaaaatgtcagtttatgtcatttgctcactttttatgtcatttgctcacttttatacgttttttccttgttgarttgatttccttgtagatactgaatattagccctttgttggatgcattgtttacaaatttttttttcccattctgcatgttttccgtttactctgttgattatttcttttgctgtgaagaagctttttagtttaatgcaatctaatttgtttatttttgtttttgt

SEQ ID NO: 147262 - DNA, 463 bp, Homo sapiens
acacaatatatattatcttataggtctctatgttaaaattctgacagtggtatccctggactaaaatcaaggtgttggcaaggttgcactccttctgaagactctaggtaaaacaaaacaaaacaaaatgtttccttcctttttccagcttctagagactccccacattccttggttgctggcccacttcctgcatcttccactccagcaatgcagcatttctctgaccctgtttctatcattgcatctctttctctgatcttctcttctgcttcactcttccatttkgaaagatccctgtgattatattgcatccccataagccaagataatctgtctatcttaaggacggctaattagtatcttaattgcatttgcaaccttcattcccctctgccatttaacctaagatattcacaagttccagggcttatgatatggaaatcctgggggaaccattatt

SEQ ID NO: 147263 - DNA, 543 bp, Homo sapiens
tcttctttcacttagcatagtattttgaaagtttgtccatgttgtattagtattttattcctttgcatggatatagtatatgttatctatctatccctcagttgtgttatgcttttattattgttataagagttcttcattttacatacwattcttttgtcagatacatgatttgcaaatatcatcttcaattctgtaggttggctattcacttttttgatgatgtcttttgaagtaaaaaaaaaattttgatgtagtccaatttatttatttttcttttgtcatgtgtaattttggatcatatctcagaaattattgcctattccaaggtcatcaatattgaatcctatcttttttcctgaaagttttatagcaatatctcttacatttatgtctgtgatctattttgaattaacatatagtatgaggtgggtgtctcactccattctttcacatgtatctagttgttctagcactatttattgacaagattatttttccgctttgaattgtcataccacctttgttgaaagttgattgact

SEQ ID NO: 147264 - DNA, 499 bp, Homo sapiens
gggggtttgtttctgagctctgtattatatataccacggatgtatgtttctatcctttcccaatatcataccatttaaaattcctagtaagtttatagtaagttttgaaagtggataatgtgaatccttttaatggatttttctatatcayattaattttgtctactcctatacctttgtttttccaaatacattttacaatcagtttgttgatacccatgaaatacttgctgtgatttaattggtgttgctttgactatgtagatcaaattggggatacgtgatgttttaacaatattgaatcttttaatagaagaaaataatatatttctttcatgtgcgtctgtgtgaagagaccaccaaacaggctttgtgtgagcaacatggctgtttatttcacctaggtgcaggcgggctgagtctgaaaagagagtcagcgaagggagatggattatcattagttcttataggttgtgggttaggcggtgaagttaagagc

SEQ ID NO: 147265 - DNA, 443 bp, Homo sapiens
ggttgactccattaaattcctttaatataagactcatgagaacatagaattttatttagctattaatgacattgatttgtagagctaagatgtgttttataaaaacagaaattacactttctttttaaatagaggaaaagaatgtacgaaaataattcagacacatttgtagtcaataaagcattcaaagttactcycccaccatggttcagagataactttttctacatatatgttgcaaatttaaaagtaacaactaaagtaatagaagtggggcaaatagcttttaaggaagcttttaaggaaaaaaaattaaaatagtttttttttccaagaaaggaaggaaaggagaaaattatggaataaaagaaaacatggtaagctgagaatataaaataacaatatagaaattagatcaaatattttaacaattataataaatg

SEQ ID NO: 147266 - DNA, 443 bp, Homo sapiens
ggttgactccattaaattcctttaatataagactcatgagaacatagaattttatttagctattaatgacattgatttgtagagctaagatgtgttttataaaaacagaaattacactttctttttaaatagaggaaaagaatgtacgaaaataattcagacacatttgtagtcaataaagcattcaaagttactctcccaccatggttcagagataactttttctacatatatgttgcaaatttaamagtaacaactaaagtaatagaagtggggcaaatagcttttaaggaagcttttaaggaaaaaaaattaaaatagtttttttttccaagaaaggaaggaaaggagaaaattatggaataaaagaaaacatggtaagctgagaatataaaataacaatatagaaattagatcaaatattttaacaattataataaatg

SEQ ID NO: 147267 - DNA, 443 bp, Homo sapiens
ggttgactccattaaattcctttaatataagactcatgagaacatagaattttatttagctattaatgacattgatttgtagagctaagatgtgttttataaaaacagaaattacactttctttttaaatagaggaaaagaatgtacgaaaataattcagacacatttgtagtcaataaagcattcaaagttactctcccaccatggttcagagataactttttctacatatatgttgcaaatttaaaagtaacaactaaagtaatagaagtggggcaaatagcttttaaggaagcttttaaggaaaaaaaattaaaatagtttttttttccaagaaaggaaggaaaggagaaaattatggaataaaagaaaacatggtaagctgagaatataaaataayaatatagaaattagatcaaatattttaacaattataataaatg

SEQ ID NO: 147268 - DNA, 562 bp, Homo sapiens
atctgctttctggccttagagctgatctcatcaggggtaaacctggagcagcacttccagacagttatattgagcttgtaaccctgcgtggcgtattggccttttcttttggtgaatcaagacataagccctgcctcagcaaatttaaatagacagttattgagatcaacaggatcytccttgcaagttgtccagaaattgcccagttgaaatattaaaaatggagtattttcactggcctggcgtgaatcatgttttagttctgtctgcctgcttcacatctgtaaaaaaatattcttgctagaaaaggaagtttcttggttcagtggtagaccactgtcacttgatgtctgttcttgtatcgatacatccccataggctcagctgctggtgtctatggaactgcaggttggaatcctttttgctttttgtgatggctttgcactgtgccagctgagttaagctagagctttgtttcccagaactgccttttttgatggtggtgagttagggttgaccacgataataatttgcacacaagatttggaagacagaagtaaag

SEQ ID NO: 147269 - DNA, 562 bp, Homo sapiens
atctgctttctggccttagagctgatctcatcaggggtaaacctggagcagcacttccagacagttatattgagcttgtaaccctgcgtggcgtattggccttttcttttggtgaatcaagacataagccctgcctcagcaaatttaaatagacagttattgagatcaacaggatcttccttgcaagwtgtccagaaattgcccagttgaaatattaaaaatggagtattttcactggcctggcgtgaatcatgttttagttctgtctgcctgcttcacatctgtaaaaaaatattcttgctagaaaaggaagtttcttggttcagtggtagaccactgtcacttgatgtctgttcttgtatcgatacatccccataggctcagctgctggtgtctatggaactgcaggttggaatcctttttgctttttgtgatggctttgcactgtgccagctgagttaagctagagctttgtttcccagaactgccttttttgatggtggtgagttagggttgaccacgataataatttgcacacaagatttggaagacagaagtaaag

SEQ ID NO: 147270 - DNA, 562 bp, Homo sapiens
atctgctttctggccttagagctgatctcatcaggggtaaacctggagcagcacttccagacagttatattgagcttgtaaccctgcgtggcgtattggccttttcttttggtgaatcaagacataagccctgcctcagcaaatttaaatagacagttattgagatcaacaggatcttccttgcaagttgtccagaaattgcccagttgaaatattaaaaatggagtattttcactggcctggcgtgaatcatgttttagttctgtctgcctgcttcacatctgtaaaaaaatattcttgctagaaaaggaagtttsttggttcagtggtagaccactgtcacttgatgtctgttcttgtatcgatacatccccataggctcagctgctggtgtctatggaactgcaggttggaatcctttttgctttttgtgatggctttgcactgtgccagctgagttaagctagagctttgtttcccagaactgccttttttgatggtggtgagttagggttgaccacgataataatttgcacacaagatttggaagacagaagtaaag

SEQ ID NO: 147271 - DNA, 539 bp, Homo sapiens
attgatttgctctagaattttggtaatgacatgtgtagtaatcagtagaactattcgcaatattcgtaacttttcagttttcctttccttccaggtacatggtgagattactaccacctttgaagttagatgtggtcactgacttgcttaggccagcagtgacatatatctcacttgaggaaaagggttaagaaccagtaggtgactttccatcttctctgacttctgttgtcaaggttgtgaaggtgaatctctgacagcctgtgtctctgcataacggcaaggaacacrgggatccctgagaactgcactgggcatgtagcatgagcccaaaacgacttagttgtactgtctctcctgactaacagagcatgttttgagaaagttgcagggtagtcgacactgtaaacaacatccttccttttcccatcacttaaaatagcattgccctctacaatgtcataagaacaacatactcttctcacacatgggtgtaacaaaaaccagggagctaggttttatgtgtggatttaggcaat

SEQ ID NO: 147272 - DNA, 581 bp, Homo sapiens
tcacgcctgtaactccaacactttgggaagctgaggcaggcggatcaagaagtctggagattgagacgatcctggccaacatggtgaaacatcatctctactaaaaatacaaaaattagctgggcatggtggcgcacgcatgtaatctcagctacttgggaggctgaggcaggagaatcgcttgaaccaaggaggcagagattgcagtgagctgagatcgtgccaccgcattccagcctgggtgacatagcaagactccatytcaaaaaaaaaaaaaaattgtgtgtaaagtttgaacgcaaattgtgtttatcaatggaatatattttcattgtgtaaatagattcttcaagcaatgaagtccttctcaatatggttcctctgaatagtgaattttccagtccatgtaaaatatctttaaaaaatttatatatctatatatatcagaaaaaaattggacataatgatgtataagtgtatcaacatttgccaactagagtaaactagagcatattataattatatttaatcagtgatgccagtttccatgatatgcaatcagtatagagaggtgaataaaa

SEQ ID NO: 147273 - DNA, 534 bp, Homo sapiens
actctacgggggcagggagaaaggaaaaggggtccttctgctgcagcaagagacgtgtatgcataggcctattgctgaccttgctctgtgtcttycctatgtgaagcattgtcaatccagtgcttgactgccttgtattgtccttggtgactttaatagcaacatgttaatatagtatagtgaatttaataccaagatagtaggcataagtgtttagatttctatttctgatagtttgcttagtgataattgttgctatcctgcatgtagttggcgttctcctctggcattggtaatcactgcatgctgttctgatccacaaaataaagcagggatgtccataagagatagattacctgtatctatatttgtatttgcatctaatgtatttaattcgatttctatgctcctactctcttaaacaacatgtttggttttcagcaaaaaaaatatgtgtcacacaagacacagtctgtgtctgcaaaacaaacacagtcaaaagatgtaaatcaatttcaaatacattatacatat

SEQ ID NO: 147274 - DNA, 546 bp, Homo sapiens
gctaacaattgtttcatgtagttttctaactgtttatgttgcaagttcaagttgtgaatgtcttactctagcatggtcagcaaggtaagtaacaaaatrtagtttattttaaaaatcacatcaataaaagaaagcaaaatatgcagtctttccaattaattgaattatatcaaactaataaatatgaatgaatttcccagtttagaatattatcactttaaatgaataacagtatagctccagaatctaaaatgattgaccatatgtgtatatatacaagtgtatgtgtgtgtgtatgtttataataattaatatattgttatataattaattgattataaaattgatatattgttatatatcacacacacatatatatgtatatccttgtagtagaaggagaaccggtataaaattcaatattttctaattttatacaaatattatattaaataaatgcttaacatcctgatgaaaacaaatacattttgaaacaatatcatgatcataaaaatataaaacaaaggagtaataatttatattgca

SEQ ID NO: 147275 - DNA, 417 bp, Homo sapiens
atctgaggcatgaagaagttaagaaacttgcctgggtayatagttactaaatgatgaagccagtttttaaatcccagacagtctaaatccagcactgtgctcttaagcaccatatgcatattaagtaagtttttagcttacacatgaactttgtattccaggaacagttatgttagtaaaatattaaatggtagagaattttttcataaagcaagacagataactgtcttgcaagagtcacccattcaccacgagagagaaaaataaaagaaatgtgagtgagtgagtttagggctaaatacatgtaaatactgagtttgtcagaggaatcagggagggaagtaaagtagattttttttcttgggtaagaaataaaagcatttagctcatttgcttataaaaaatagtaagaggaaa

SEQ ID NO: 147276 - DNA, 416 bp, Homo sapiens
tagcttcattttaaagatggagaatctgaggcatgaagaagttaagaaacttgcctgggtatatagttactaaatgatgaagccagtttttaaatcccagacagtctaaatccagcactgtgctcttaagcaccatatgcatattaagtaagtttttagcttacacatgaactttgtattccaggaacagttatgttagtaaaatattaaatggtagagaattttttcataaagcaagacagataactgtcttgcaagagtcacccattcaccacgagagagaaaaataaaagaaatgtgagtgagtgagtttagggctaaatacatgtaaatactgagtttgtcagaggaatcagggagggaagtaaagtagattttttttcttggrtaagaaataaaagcatttagctcatttg

SEQ ID NO: 147277 - DNA, 578 bp, Homo sapiens
aagcaactttctaagatcacacagatagaaactgatattttcttactccttcagtctgtttattctcttttcttgcaacgtgtaagtcatatatacataatttatttttagatgcttgccctgagtttaaattctttttagcttagccattgtagatgttgcctcggacttgttggctaaaactggttttattttggatatgattttttgtacaactgatttttataatgtaaatgatatttgatatcattgacaagaygaaaaataaatatatatattttatagttatagaaaagagcaaatagcagggcatgaatcatatatatcattgaagcagatttaattgttttaatttgattttgattaaatttcatagcagtgaagctgtgaatggctcactcatttctgagtaacctctatagatcttgattcaccttccattcccagttgtaggaactctatgatatcatgcaacttaagaaaaaaacacaataaaataagtggtgacttttaagctaagataagataatgtaaaatattttcaattctgtgaatgaacaagaaatgaagctaattaa

SEQ ID NO: 147278 - DNA, 623 bp, Homo sapiens
gcatcgtcctaaccagtttggctctctgtggagaatactcatcatcatatggacaatgttaataaacattacgacgctttgattcaggtrtagcttcagttgtacgaaagtgccgaaaactaataatttctttttacttcagctctatctatatctaaacaaagtttaattcaaaggtttccaaacattcttactatttttgcatttatgcgttgtatctaatttcagttaaaagtcaattccccaagtcattggagcttaatgtgtttatctgataggaaaaaaattgaactcagtattatattttaaatagttattaaagattattaaaatgtctatttgaaatacaagcttcaaaatataagcctacctgtataaatatgtagaaaacaaatacacacacacacacacacacacacacacacacactttagagatgatagaatcttcaacttatgaattttttgaaatatgtatacttacaattgaaagtttgtgttattatgtaaatgaatctaccaaagcttccaacttagtttgtgtaatctgttaaaagaaaaactttagacaaattaaatttagcagagtttatttaaaaaaagaatgttcatgaattgggcagc

SEQ ID NO: 147279 - DNA, 623 bp, Homo sapiens
gcatcgtcctaaccagtttggctctctgtggagaatactcatcatcatatggacaatgttaataaacattacgacgctttgattcaggtatagcttcagttgtacgaaagtgccgaaaactaataatttctttttacttcagctctatctatatctaaacaaagtttaattcaaaggtttccaaacattcttactatttttgcatttatgcgttgtatctaatttcagttaaaagtcaattccccaartcattggagcttaatgtgtttatctgataggaaaaaaattgaactcagtattatattttaaatagttattaaagattattaaaatgtctatttgaaatacaagcttcaaaatataagcctacctgtataaatatgtagaaaacaaatacacacacacacacacacacacacacacacacactttagagatgatagaatcttcaacttatgaattttttgaaatatgtatacttacaattgaaagtttgtgttattatgtaaatgaatctaccaaagcttccaacttagtttgtgtaatctgttaaaagaaaaactttagacaaattaaatttagcagagtttatttaaaaaaagaatgttcatgaattgggcagc

SEQ ID NO: 147280 - DNA, 436 bp, Homo sapiens
ctgtaagttgttgagcagtcgcagtgactttgccacctgcctttccaggggactagaattctcctgcactgcctccagttttgcttcagggtgaatttacagtgactttgctttgttttgtttttgattttgcattttcctttcaactagcctatttcaattgtgttatatggtaatttctctgatatctttatactactcctttgtcgtatcataaaaatatgcaacccatcaaacacatcttgaagcaaactgacatgstagcaaattgcggaaggatgacatattgtcagtttcatagacataaaattaaaggtctagaagggactgtaaagatcgactacactcgttttcatagtaaatgctctgaatatgcacctaggggtggcatccagtgaactggggtacagtcacataccatgcttcagttcaacca

SEQ ID NO: 147281 - DNA, 422 bp, Homo sapiens
gaattagtcagcttcctttattttatattggtgtatccttttgtggctatcagggtagtacctgtttgctaaatttagyttcctgttcccattctgcatacttggtgttaagcaaagtcaggcctatccattcacttaacaaatatttattgataccagacactgttctaggtccttgggagccaggaggaaataaaacagacagagatctactcccttgtgagatgttattttagtttggggagatagtctgcaataaatacaataaataaataaataatatagtataagagaagataataagggctatggatggaaacacaatagggacctgcattgaaatatatttttatgattcataacttattacttaacaaattttttgaacatttactacttgagatagaaggttccataaagac

SEQ ID NO: 147282 - DNA, 422 bp, Homo sapiens
gaattagtcagcttcctttattttatattggtgtatccttttgtggctatcagggtagtacctgtttgctaaatttagtttcctgttcccattctgcatamttggtgttaagcaaagtcaggcctatccattcacttaacaaatatttattgataccagacactgttctaggtccttgggagccaggaggaaataaaacagacagagatctactcccttgtgagatgttattttagtttggggagatagtctgcaataaatacaataaataaataaataatatagtataagagaagataataagggctatggatggaaacacaatagggacctgcattgaaatatatttttatgattcataacttattacttaacaaattttttgaacatttactacttgagatagaaggttccataaagac

SEQ ID NO: 147283 - DNA, 422 bp, Homo sapiens
gaattagtcagcttcctttattttatattggtgtatccttttgtggctatcagggtagtacctgtttgctaaatttagtttcctgttcccattctgcatacttggtgttaagcaaagtcaggcctatccattcacttaacaaatatttattgataccagacactgttstaggtccttgggagccaggaggaaataaaacagacagagatctactcccttgtgagatgttattttagtttggggagatagtctgcaataaatacaataaataaataaataatatagtataagagaagataataagggctatggatggaaacacaatagggacctgcattgaaatatatttttatgattcataacttattacttaacaaattttttgaacatttactacttgagatagaaggttccataaagac

SEQ ID NO: 147284 - DNA, 422 bp, Homo sapiens
gaattagtcagcttcctttattttatattggtgtatccttttgtggctatcagggtagtacctgtttgctaaatttagtttcctgttcccattctgcatacttggtgttaagcaaagtcaggcctatccattcacttaacaaatatttattgataccagacactgttctaggtccttgggagccaggaggaaataaaacagacagagatctactcccttgtgagatgttattttagtttggggagatagtctgcaataaatacaataaataaataaataatatagtataagagaagataataagggctatggatggaaacacaatagggacctgcrttgaaatatatttttatgattcataacttattacttaacaaattttttgaacatttactacttgagatagaaggttccataaagac

SEQ ID NO: 147285 - DNA, 574 bp, Homo sapiens
tgtgtactctaaagatgcagaaatactcctaatagttactgtctataagcattttctaacatttctattttctgcaaattctggggatcttcctagaatgctctttctagtcctcgagacaagtttcagactaaagcttttactatttccccttggcagattccagtactgttagttctccctttgtactttgtatgtatctccattataacatgtgtcttttcttgtgataatttatttttatatcttcctgttaatttagttagtgttttctatgtgatcagagaccatgtcatttcatttttttatatctctagatcttagcaccatgtctgtctcagaatgtgcaatcayaaaatgttttctgaattagcaaataaatgaatgaaaattgaatacatgaatgcaaaaaatgattttatctaaataatcatggatatattctctgccacaggaaaacaatggtgagagaagattttaggcaaggttcaaatcagattatttgggttttatcttgtggcatctactgaaaattaggctaccataagccaatattatgcttcattttcaaatt

SEQ ID NO: 147286 - DNA, 415 bp, Homo sapiens
gatctcctgtttttacttgaattgagcctatctagcaaatggtttgctaagctgaatgctttcctgcatagagaaagggcttagcaaaccatttgcttacattgccattgttattaccattattattattatttacttttagaagatttgtttgatattttctttatcctcattattgtgcatatcaagaagatattaattatgcttctctttcactgaatattttggctttctgggaatttttaatctaaagactgrtactcttttctaccattattattattattactattattattttggataatttcagacatctattttctgaagtctaacatcctaggactcgtagatatttcacattgtcaatctatatgtctattattttttctgtcatattttaaatttttttcct

SEQ ID NO: 147287 - DNA, 553 bp, Homo sapiens
acatttccccagcaattattgatgtctggtgtttctgttctgttttcaatctcatggcaacttctctctggtaagtctcatgtgatgttggtctgagcatgtattgcccagctcttgaccaagaaatcccagagaacccccctactcaagcttctagggttcccctctgggaaatacccttttccctagtgctttactctgctcagatcagctgcttaatctgctctgaactctaatcttggcctcagctcagcaagatcataacactccacttaaattagagcttgccctgcagtcaggagagatggaatgttttgggggcttgcatcatttgtttcctgsctttctgaaattgcagtcttgcattactgaatgctgaaaagcatttgtcgtgtatattttgtctcacatatgttgctcggatttgcattattttaaataattaagaataatctgatgttattctttcaatatcagagcagaagttcattcaaatattttaatcatattatttcccacaacttgcacaaaattaggatatgattcattaaga

SEQ ID NO: 147288 - DNA, 553 bp, Homo sapiens
acatttccccagcaattattgatgtctggtgtttctgttctgttttcaatctcatggcaacttctctctggtaagtctcatgtgatgttggtctgagcatgtattgcccagctcttgaccaagaaatcccagagaacccccctactcaagcttctagggttcccctctgggaaatacccttttccctagtgctttactctgctcagatcagctgcttaatctgctctgaactctaatcttggcctcagctcagcaagatcataacactccacttaaattagagcttgccctgcagtcaggagagatggaatgttttgggggcttgcatcatttgtttcctggctttctgaaattgcagtcttgcattactgaatgctgaaaagcatttgtcrtgtatattttgtctcacatatgttgctcggatttgcattattttaaataattaagaataatctgatgttattctttcaatatcagagcagaagttcattcaaatattttaatcatattatttcccacaacttgcacaaaattaggatatgattcattaaga

SEQ ID NO: 147289 - DNA, 585 bp, Homo sapiens
gcccattgcagggcacttgggagtaaatagaggaagagggatgagtagaagcaagatttcacacaactttctgaatgcttccagtattttaacattacattaacctaatgttaaaaataaattgattagtaggtccagaacataatmttcacagtaggaattgaaagttttccttagtataagagttgaaatattaaagaataggataaatatgtatataatgacaaataaaacacattcataactgtgaatgtgttttattcaatgataaattgctcatcaatatggaactggggaaaattggaggttcagagatttgatagtgtattctcaagagaacaattacaaggcatttcaaaagaagaaaaggggaaatctcaggtagaaaagtgaaattattctctgagacacttacttgctaaagaaactctttcgtgtgtttttatcttataaaggtgttaatattttccctgacaactgccttgtccctctcttttctgattaggagaacatcacttataggttcctgaaaatcatgtcagatttcctgggaaaagactagtattattctcaatgtagaatgct

SEQ ID NO: 147290 - DNA, 471 bp, Homo sapiens
ttgtatgtatgcttcacaaagcatgcctcaccagaagcaaatgccagcatcatgcttcctgtaaagcctccagaaccatgagccaaaataaayctcttttctttgtaaattacctagtctcaggtatttctttataccaatgcaagaagcctaacacagtgacattatataccttgatgttatatttaccaaaacaatatctactatatgcatatctatctactgatctataaaatacccactaggtaaaaagatataaagcttacattcctttcttattttcttccttccttttgttttttttttatgtatttctatatttaacaaatgttaattgggctactattacatccatgggattgttcatgtaactgtattcagggtcctggttcttaagggcgcatattgtagaataaacttgtattctagtgatttgtatgcagtaaaaatttatagaactgaaataataat

SEQ ID NO: 147291 - DNA, 471 bp, Homo sapiens
ttgtatgtatgcttcacaaagcatgcctcaccagaagcaaatgccagcatcatgcttcctgtaaagcctccagaaccatgagccaaaataaatctcttttctttgtaaattacctagtctcaggtatttctttataccaatgcaagaagcctaacacagtgacattatataccttgatgttatatttaccmaaacaatatctactatatgcatatctatctactgatctataaaatacccactaggtaaaaagatataaagcttacattcctttcttattttcttccttccttttgttttttttttatgtatttctatatttaacaaatgttaattgggctactattacatccatgggattgttcatgtaactgtattcagggtcctggttcttaagggcgcatattgtagaataaacttgtattctagtgatttgtatgcagtaaaaatttatagaactgaaataataat

SEQ ID NO: 147292 - DNA, 471 bp, Homo sapiens
ttgtatgtatgcttcacaaagcatgcctcaccagaagcaaatgccagcatcatgcttcctgtaaagcctccagaaccatgagccaaaataaatctcttttctttgtaaattacctagtctcaggtatttctttataccaatgcaagaagcctaacacagtgacattatataccttgatgttatatttaccaaaacaatatctactatatgcatatctatctactgatctataaaatacccactaggtaaaaagatataaagcttacattcctttcttattttcttccttccttttgttttttttttatgtatttctatatttaacaaatgttaattgggctactattacatccawgggattgttcatgtaactgtattcagggtcctggttcttaagggcgcatattgtagaataaacttgtattctagtgatttgtatgcagtaaaaatttatagaactgaaataataat

SEQ ID NO: 147293 - DNA, 471 bp, Homo sapiens
ttgtatgtatgcttcacaaagcatgcctcaccagaagcaaatgccagcatcatgcttcctgtaaagcctccagaaccatgagccaaaataaatctcttttctttgtaaattacctagtctcaggtatttctttataccaatgcaagaagcctaacacagtgacattatataccttgatgttatatttaccaaaacaatatctactatatgcatatctatctactgatctataaaatacccactaggtaaaaagatataaagcttacattcctttcttattttcttccttccttttgttttttttttatgtatttctatatttaacaaatgttaattgggctactattacatccatgggattgttcatgtaactgtattcagggtcctggttcttaagggygcatattgtagaataaacttgtattctagtgatttgtatgcagtaaaaatttatagaactgaaataataat

SEQ ID NO: 147294 - DNA, 582 bp, Homo sapiens
ttgcaaaacgtgttgatttttcctacactgttttgcctctctgtgtgtcaactttggccttcttttcttgctcctttgcagcactgctgtctctttgaagacattgtctgcctgatacaaaaaaaaaatgtacattaaacctcatgactaattatgtggatagaaaattcccgacctcaaacataaaatacccctgcccagaaaccataacaaaagcttctgactatgtacaaaacccttaatcaaacctttcacagacttggattaaaagaaatcccaataatttattttctgttaacgttgtgcttacattctttgaaaagttgatttcttatgcatgttacatgcatacatacrtaagtcaatccattttatagtaaacaccatgcttttccccacaaacgtttatacttgctattaggtctacttcaattaaatactactcagaagaactgttttattagaaagagaaaactgatttgtcttaacacaatgtccattttttagtcccctctccatactatgctttaacagagtagactcttcacaataaattctacaatctatggattaagtacacag

SEQ ID NO: 147295 - DNA, 314 bp, Homo sapiens
aagtagatgatagtgaacacagtgaaactttttctcaaagatagaaaaatacagaaaacaccctgggcatcccttataatagaaggatactacacaaatgtgtgatatttycaagaaagtaggtatgaaaatgaggtagtttttatttaattttccattggaacttcacactgttctataaaatcaagaatacctttggactcctaaaaattaataaaccaaaaatgtgcttctaattaagaatctgtatttcactatcctcatatacagaaaataaagagaagttcatagaattattttgagacttaaagctt

SEQ ID NO: 147296 - DNA, 383 bp, Homo sapiens
ctagtaactggcaaagctgagatttgaacctaaatcaatctgaccagaagttctgagttattttccatgtgcctcacatagcagaaagggagatggcataagcacatctacaggcctagaggtaacatatactctgacaaaagcataaaagtctatgaaattttacagcaaggaaaggctatttctaacagggagactcagagaaagaagcaacatttaagttgggtactgaataatttctaagacttccacagatggagacagggaagaagaaacatacaagagggcaaccagagcatgtgtcagtgtgtgttgagggcggagaagttggtggraacacaacacaagccaggaaaaaaaaagaaagaaagaaagaaaggttt

SEQ ID NO: 147297 - DNA, 608 bp, Homo sapiens
tctgttaaaaagtttatcaaagagatgatgttctggtgcctcagtgcgtagggtatgcaccctcacaagccatgtctgggaacctgacttcaccaactgccagaatgcgagcttggggacattgtgaggtgcagcttcatctatctgagcctatttctcctttagtgagattagaataagagtggcacccccctaataaagttgacttgggtatgaaaggagttaatccctatcaaatagttggcactgttaatgttacctactagtgagaatgtgatctcgctttttwaaaaaagaaagaattccttaagggagcataagaattaaaggagttgacaaggagcatgggggtaaagcagcactcatcacctgcagggttcttccaggagagcatgagggcagagagcaagagcggggtcaatgtgcagcttgcacagcccaaagagtagctcaggagggagaaagccatggacatcacgggccgccaagtcctgcaaggaggctgtgaatgagaggggtgcactgaatctcagatctttggctgctgaagccatgtgctaaggtttggccaggagtgaaagttgagcagtgagcttggaagtctgtag

SEQ ID NO: 147298 - DNA, 641 bp, Homo sapiens
acacaaaaacaaatgaacaatatccaacaattggttgcttcggcaagacatccttaatgaagttttcctctgtctatcgacctrtagtttgactggcttattttagtatatttatagatccaatcaaatctcagcttacaatttttttgacaaattaaaagtgattaaaatatattttttagaaagatgacttaaatattggatattctttgggacaatttttataaaactgtaacaaaaagactttaggactcaccacatgaaatgtatttactatttacagcctatatacttgagagagaaagaaagagtattaaagcattagtttatagactgtagagttcagatataaatctggagggtattagcccagaaatgaagcttaaggcggcaaagggtttaccttcacgaatataaaatagaataaaaatacaaaataaaatgtttacacctatgacacagtgtggcagcaagctgtaggtaggtatagctgagagctacactgacaatgagatacagtttggagggggaattgattagacttgatcatgacatacacgagcaatttgccaggtaaaattgtcatctcagtcaagccagccaggagattcaaatgatgatttgtgtaccaagtctcatac

SEQ ID NO: 147299 - DNA, 641 bp, Homo sapiens
acacaaaaacaaatgaacaatatccaacaattggttgcttcggcaagacatccttaatgaagttttcctctgtctatcgacctgtagtttgactggcttattttagtatatttatagatccaatcaaatctcagcttacaatttttttgacaaattaaaagtgattaaaatatattttttagaaagatgacttaaatattggatattctttgggacaatttttataaaactgtaacaaaaagactttaggactcaccacatgaaatgtatttactatttacagcctatatacttgagagagaaagaaagagtattaaagcattagtttatagactgtagagttcagatataaatctggagggtattagcccagaaatgaagcttaaggcggcaaagggtttaccttcacgaatataaaatagaataaaaatacaaaataaaatgtttacacctatgacacagtgtggcagcaagctgtaggtaggtatagctgagagctacactgacaatgagatacagtttggagggggaattgattagacwtgatcatgacatacacgagcaatttgccaggtaaaattgtcatctcagtcaagccagccaggagattcaaatgatgatttgtgtaccaagtctcatac

SEQ ID NO: 147300 - DNA, 546 bp, Homo sapiens
taggagatagattggcactgaagaaaaggatttgggaatcttcagcatactgagggcattaagaaccatggaacccgttgaggctgcttaaatagagcatagatgggaaaggacaatgacccagcagacagtttggagttcttgatattgagagatcttggagacagagacaacccagaaatggagtcttggaatgggtgaccaatggwtagtagtaaggaggctgttttgtttggaacacctagaaaataaaatatttcatgaagaaaggggtggaccaatgctgatgaaggtcaagtaatataaagcttgagagtggaccattgatttgatgacatcagcttatttgtaaacaaatcaagtataacttttaaaaagtgttagctatttaactcttaaataaaaattgctatggtttttttgaaaaataaaaagctaattagcaaatttcagctgagttactatgaaacacattattgggtcatgtagataattcacacttcaccttattcatcatgcttattcatcatttgtaaaaagcataat

SEQ ID NO: 147301 - DNA, 487 bp, Homo sapiens
actccagcgcggctcggcccggctctggcgctctctccgcccgtgctccctccctcccgctcccgtaccgcacgccgcaccgaatcagacagaacttctctgaggtgcacaccgtgaggtgcacatctctaaatggggagggggcggcggagrgcgacgaagcgaacgcctgcaaggtctacaactaggtccgcaggctaggcgacaccggtgcgcgccgcgccgccttcatcccacagaccctcccctcagaaggcaatcacaccgaaactcacgtccgcgccttcccttcagagcgcagcgtccgggccagggaccaagccccgcggcgtccggcccgcgcccttcgccgaccgggcgccccctgaccgtcaccacgaaagcagcgcaggagacaaagcccgggactcgggttcagagtccccggcgcagcgcaaagcccgcgccttcccgccagcccgccgccgcgctccgccgggcagccgag

SEQ ID NO: 147302 - DNA, 462 bp, Homo sapiens
atgctcagccatcaaactcctccagaggagctgtccatggaggggtaggtgtcagcccccatatttctgccacractaagaggaagctggcttcctcatcttcactgtaggtatctgagatgagagccacatttccctaccagactgaagctcagctggtgcaatctcctctttccagggacctggtattttagtgccaggtcttccttccctaccaggaaggagcctgcccctcctatgtggggcccagggcagaattacaaagcaagcttacaacatgttgaagaaaatctactctgccctcctgccctgacaaatgtagctttgttcatccagaaggccagattcgaatttagaatgcccaggctcctagcagttatgtgaactctgcagcatggtgagaagcagccctttggcccacctctctctcattgcacctccaggtctaccctacactgtgca

SEQ ID NO: 147303 - DNA, 462 bp, Homo sapiens
atgctcagccatcaaactcctccagaggagctgtccatggaggggtaggtgtcagcccccatatttctgccacaactaagaggaagctggcttcctcatcttcactgtaggtatctgagatgagagccacatttccctaccagactgaagctcagctggtgcaatctcctctttccagggacctggtattttagtgccaggtcttccttccctaccaggaaggagcckgcccctcctatgtggggcccagggcagaattacaaagcaagcttacaacatgttgaagaaaatctactctgccctcctgccctgacaaatgtagctttgttcatccagaaggccagattcgaatttagaatgcccaggctcctagcagttatgtgaactctgcagcatggtgagaagcagccctttggcccacctctctctcattgcacctccaggtctaccctacactgtgca

SEQ ID NO: 147304 - DNA, 527 bp, Homo sapiens
tttcctgctttaagttctattctgcaaggacctttccttccaggtgcaggctggctttccrtgaccttgaagcagctcttgggccctggatgctcacctcttttctctgctcaccggcctttggtctttcttccctctatcctgtgttttctcctaccatttgcttcttgcttctctcttgttcttctcctactgtccatctctccccatttgcaggaggtgaagctcctgggctcccctggaggttacatgggcatctcagaggcattttggggtacagagggcagcgacagagcccagccccagagaccacacctccaggcctgcttctagtggtcctcatggcctccccgacttgggatgccgcagccccctctgagtttcttcacatctagagtgagaggtgaaaagagatgtaaccaaaggcccctcctcctctcaccatttcaccttcttgctgactttcatggtgctctggctggcttctctagcacattcggttagaaactaacagattggggttggga

SEQ ID NO: 147305 - DNA, 397 bp, Homo sapiens
tagaattccaagacagcagggtaaacaaatctccctcaacatcctgctacatatgagaaaaagggaatatgggagaaaggatacagagagcaccctgatgtccacagttcccagcttgtttccyacggagaaagagaagtgcccagacaggactgtatcccggattcgggggccagctgcaggattcttgtctggtctctgagacccagtgaaatgctgagcccaggtcagagttgaagtacaaggtgctttcctccactggcccactcctctacccttcgcccctgccacccttgcctgtcccagcctcctctgcaccagaatctccctttgctcagaatgtggcaggtgacagttctgcaaggtggagcaggtgaaatagtccctgtctagggag

SEQ ID NO: 147306 - DNA, 360 bp, Homo sapiens
ttatccctcttaacctgtaggggaaaattctgttggttataagcaatctttggtgttccaattttcccatgtccttcttctctctgtgtctatrtgtcccaattttctgcttattataagaacagaagtcatatttaatttgggtctacattagctcagttacattttccaagatcttatttccaaataagattctgttcacaggttctaggtgcatatgaattttggaggaatgctattaaactcactatagagttaataaactgttttgagaaaaacatggaaattccttttgcaatagcctatatctaaaatctatatctttcctagcaaaataatttagataacttttgttaacac

SEQ ID NO: 147307 - DNA, 481 bp, Homo sapiens
tggtaagaaaatctatgcgtaccaagaggatcacctggatgatgaaagaataagtcttttaaattaaaaaaaaatgttaaactaatttgagttggctagagagggcatctcctaatctacaataaattcaaggtcatgaaaataatgaatttcaatggttctagaaaagaaaatctatactaatgattayaagtgaagactcaaacaggcttaaaacttttaattagtgacagttatttaaccatgacaagcaataccacaacagattttcatgtttaattgatcaatgacagatcactatggtgaacattctgaaagcaaatcaattggtagctgcctcacattttgaaagtcagctgatctgtagtagattcactctcatcaacaaaatttaagaggtaacttcaatccctttttgcctttgaactaacacaaatacacttctacagcagaaatcaactgagtctttcctcaatagata

SEQ ID NO: 147308 - DNA, 560 bp, Homo sapiens
gttatggactgaatgtttgtgtcccgcccacgctacaaattcatgtgttgaaatccttactcccaatacgttggtattaggaggtggggcctttggcaggtaattaggtcataagggtagatccttcagggatggaactaattccctaataagagggtccagagagctcgttagttcttcatctaccatcttctctttggggatacaaagagaagtctattttctggaaaagggtattcaccagaacctaagcatgcaccctgaacacggacttccagcctccagaactttgagaaatgaatgtttgctgttcaattcacctagtttatggaaatygttatagcaatctcagcttactaagagaagatctatacttaaactcaaatcttttagttccttgacttaagcactttgcaaaactgaaagactaagacaatgtcaaatgaaagtgggcactgaatgtcaggttgaagaggttagagttaatgaaataagaaatgtggtaacataagcagatctgcaagtcagtaccttctgctggagtttatatttagaagtca

SEQ ID NO: 147309 - DNA, 624 bp, Homo sapiens
cactgaatttcctagatttgagaatcagcctggattatgacaaaaaggctatcatttaaaaggcatttgttattttccaagtattgatcaaatacatataatatttgatagagtatatttctggatattacaggtgatgatataatataagaaaatcccattacactcatattttcttaggcttatagttctatttgcaacatttccactttttttttttaaagtttacttacatttgaggcagtataatgtatgtcaaatcttttgtgaaaatatatagctaacttgaatatacccttaggcagaattagtctaatggagaaagaataaaggaatatgaagttagatgacaaaagtatgaaaagaaattatgaataaattatgaaaagaaattatgagttttggaagaaattatgaatagcaaatatgtttaaatctaccaggcacttatattcacaaaacgatctcaacattgccktaatcatttggcttcaatattaacagttctgcaatatttgatcagtgccatttttccatttcttctactaataatttagaaataaatattaattaaatgtacttcattcagcatataccatttccttttcttattcatcaattaag

SEQ ID NO: 147310 - DNA, 603 bp, Homo sapiens
tctggtgctatcctttttacattcataatatgaaatatatttttctttttttctcttggtgcttcttagtagggtctttacaattttattgtttcctaactttaggcattttttctattagatatttcttaccttattgttttatggttttaactattttctaatatacgtttttaaaggtacaagtttctttttaatcataggttcrgctagatcccgcaacttttgattgttctgatacttttaagaaatttccactggaagttctccttgatgcgtgggttagaactatattgtttatttcccaaatatttagagatttttttattatcttacctttttcttgcttaattttattgttttctgcatgatcttgaagtttgctaacgtttgctatttgaacatgcaatgtgccaatgtatacaaatgttccaaaacacaagaaaataattttcatcctgaaatttgtgagtaaagcattcatataagtcaattaggtgaagtcacataaactttttcaaatattctacatctatctctcgtttactcagttattgaaaaggatatattagcccacaacaagttgtacatttacatatgtgc

SEQ ID NO: 147311 - DNA, 457 bp, Homo sapiens
aagaacacatttacagtttaaaaattaaaaggtagttctcaaagagtcccatattacgtgatggctatatccattttggtgggtgcgagagtgataggaggttgtttaagagatggataaaatgcacaaatcaagaagacaartagaatgatgatggcccaaggagattttccaggcttgcttttaaggttggcttcccaaactctactctcaattctgttacagaagagtaattgaatatttactccaattatttttccaatttcattatttctttttgtaggaaacataaggagatagaacagcaatcttaaacctcagatccaacaaaatcagcctactttatcttgtacagatgttatcacctttattgttttattccaagaaaagcaatccttttcaaatgtctctttattctttctcttccttggattaaaatgaaggaatttctatctct

SEQ ID NO: 147312 - DNA, 587 bp, Homo sapiens
caaaggatcattagtggctatcatgagcaactatatagcaataaattggataatttataagaaatggacaaattcctagacacacacaacctaacaagattgaaacataaagaaatccgaaacttgaaaagacaaataaaaattaacaagattgaagccataataaatagtctcccagtaaagaaaacccaggacttgatggctttaccactgaattataccaaacatctaagaataaatactagttctacccaaacygttacaaaaaatagaggagggaggaatacttccaaactcattctgtgaggccagaattaccctgatagaaaactacaggccaatatatctgatgagcaataatccaaaaatcctcagcaaaattctagcaaatcaaattcagcaatacattagaaggatcattctttattaccaactgagatttatctctgagaggcaatgatgcttcaacatatgcaaatcaatcaatgtgatacctcatatcaacagaatgaaggataaaaaccaaatgattatttcaattaatgctgaaaaagcatttgataaaactcaatatcatgataaaaagc

SEQ ID NO: 147313 - DNA, 451 bp, Homo sapiens
ggagtactatttagtcataaaaaataatgagatctagtcatttgtacaacatggatggaactgcagaccattttgttaagtgaaataagccaggcacagaaagaaaaatatcgcatgttctcacttatatgtgggagctaaaaattaaaaacaactgaactcatggacacagagagcagaaggatgattaccagaggctgggaagagtggtagggggctgacaggaggtggggatcactatctggttaaaaaaaaaaaaagaaaaaaaagaatgaataagagctactatttgatagcacaatgagatggctatagtcattaataacttaattgtacattttaaaataacttgagtataactgaattgtttgyaagtcaagggataaatgtttgagggacatctctatgatgtgcttattttacattgcatgcctgtatcaaaacatctcag

SEQ ID NO: 147314 - DNA, 632 bp, Homo sapiens
aagtaggagatagaagtcaatacttgagaattttgagaatagttttattcagggtcaaaatatagagtttaaagaattgatggccatgtcttgcactttgcagagggcattctttcagagcaagatggagaaaccagtgagaaagaaaaacaamaaagagtaaagcaaaaataagaatgttgtattttcatacaggaaagatagtttatgaactatggaaatataatattgaaaaatcatttttaaggattttggaaagtgaaagatttgtataatatgtgcatttttaaatttttcttttggtttgaatagattctgttgtggttttagtttggttctcaagtatatattttccttctataaactgtagtcttctaaagaaagctcagattcctgtttaggatttcttccagaaattttctattgtgttcttatttttaaaaaatgaatgcttttatgtttaagaaaaaaaaacgatgaaaaagcaaaaaaaaagtttctttaccaaaaaaactaaattttctgaaagagtttgctatgaaaattcaatctgttctattttgtttaatacaagagattgcaaaaaatgtatgcaatgtctactctcaggaatgacacactaaaagattatg

SEQ ID NO: 147315 - DNA, 632 bp, Homo sapiens
aagtaggagatagaagtcaatacttgagaattttgagaatagttttattcagggtcaaaatatagagtttaaagaattgatggccatgtcttgcactttgcagagggcattctttcagagcaagatggagaaaccagtgagaaagaaaaacaacaaagagtaaagcaaaaataagaatgtwgtattttcatacaggaaagatagtttatgaactatggaaatataatattgaaaaatcatttttaaggattttggaaagtgaaagatttgtataatatgtgcatttttaaatttttcttttggtttgaatagattctgttgtggttttagtttggttctcaagtatatattttccttctataaactgtagtcttctaaagaaagctcagattcctgtttaggatttcttccagaaattttctattgtgttcttatttttaaaaaatgaatgcttttatgtttaagaaaaaaaaacgatgaaaaagcaaaaaaaaagtttctttaccaaaaaaactaaattttctgaaagagtttgctatgaaaattcaatctgttctattttgtttaatacaagagattgcaaaaaatgtatgcaatgtctactctcaggaatgacacactaaaagattatg

SEQ ID NO: 147316 - DNA, 548 bp, Homo sapiens
aactgtagtcttctaaagaaagctcagattcctgtttaggatttcttccagaaattttctattgtgttcttatttttaaaaaatgaatgctttkatgtttaagaaaaaaaaacgatgaaaaagcaaaaaaaaagtttctttaccaaaaaaactaaattttctgaaagagtttgctatgaaaattcaatctgttctattttgtttaatacaagagattgcaaaaaatgtatgcaatgtctactctcaggaatgacacactaaaagattatgataccttggataaactgcatagctctcattaattttgataattcatgttggctagtagaacaaacttgtttaaaacatttaaagcactcttacctacacatggcttctaattttaagctgctataattttcatatacaatggcttacattatgctgaggatagatccaaggtttacaaagtagtggatgataatcacaaagttgatttgaacctcatcttttcttaagaaatttaaagactgtggttctaaaatatgaactgatcttcataatatcac

SEQ ID NO: 147317 - DNA, 513 bp, Homo sapiens
tattcacctacacatctatcctttcaagattagaggtcaatttttcagaattagtagtaacatcttataatatatcagttttcataaacagaacttataacttaaaaaatttatatgcctttgaatataaaataggagaaattgcagaaacttgaggaaaatatgattcagtgcaaaagacatcaaagtgttttgtcatatttgtttcagtaaaagagttcatgaaaaaggatgcaaagtgagaaataaactcttgtttaaaccaataatgataagctttctacccaatgttattataaggacttacgacttaatctaatctaatcttcaccttatgaggggtggctaatgatgtacctaytctaattttcctcattttacagagagaaaaacagaggcatagagagttgataacctgttcaaggtcacagacctagtaagtggttagagctgggtggcaacccaaattatctgactccagagcttatactgctaatcagctctatcttttgc

SEQ ID NO: 147318 - DNA, 257 bp, Homo sapiens
catgaacttccatctcaagtcccacccgcagaccttatttcattctgacactgctcatggctttcactaacttccccctaactccagctgttgatctgtcattagtaaatctcaacaacattccaacctgttagaaaaaaaaacaataaggcagaggctcaggtacccctaaagtctggagtcataagaaaattaaaaatctgtgagttcagaggacaggrgtaaagtgtatatggaaagaggagggaaattctcca

SEQ ID NO: 147319 - DNA, 480 bp, Homo sapiens
gatttattttattttatttatttatttttttgcaagacgtagtctttctgtgtcacctgagatcaagtgattctcctgcctcwgccctgaaggtagctgtgattacaggcgtgtgccaccatgcatggctaatttttgtatttttagtagagacaggtttcatcatgttgttcaggctggtctcgaactcctgacctcaagtaatctgcccacctctgcctcccaaagtgctgggattacaggcatgagccacagcacccagacagaatagagaacttaaaaaaaaattattctcagtctcttaatgctgtccataatcttctctttcaaacggtaggcatcttttagaaacttaaaactcttttatgtgaagaccaatgtactttatcttactttatttgcttataaattatgaacgtttagataaatgaagcttaatatattttaataaaaatagtttgcacagtaacttcatttttt

SEQ ID NO: 147320 - DNA, 610 bp, Homo sapiens
tggtgggaggtgattggatcatgggggtagtttcccctatgcttttctcctgatagtgggggagttctcatgagatctgatttttttataagtgtctggcacttcccccttctctttctctcttctgctgctttgtggagaaggtacttgcttctcctttgccatctgccatgattgttaagtttcctgaggcctccgcagccatgcagaactgtgagtcaattacwtttctttcctttataaattacccagtctcaggtagtatctttatagcagtgtgaaaatggactaatacattgggtgtttgagtagttattctaaagatattttatagtgtcaaattgtttgcagaaaacattaactcaaagggaataaactcatattttagagatctggtatagtccaccaagggaaaatactagctaacatgatggaattattttccaaaatttccgatcctgaggacagtattgtatgttttggtgtggggctgtgtgtgtgtgtgtgtgtgtgtgtgtgcacgcgcatgtgtctatctcagtgtcctcccagccaacaatttccattgagcctttagtgactagaacatgaggctggtagtgaggagagt

SEQ ID NO: 147321 - DNA, 471 bp, Homo sapiens
tctatacaatgaataacgatattttctgttttcattttcttttcaaaagatgaattaactattcatcatgttatctgagaaatttacttccataaaaggggtggctaaattggttattaatattttcttatatatatatatatacgtatatatgtgtgtatgcatgcatacacacaaatacacacacacataccccacacacatttacagtttttcagtgtgtcctcctgtacattggaasatttagtcaataagacagtcaataagatcttttatttcttttactaaagagacagggtctcactctgtcactgagacttgagtgcagtggcacgatcagagctcactgcagtcttgaccacctgggctcaagcaatcctcccacctcaatcctcccacctcaacctcttcccacccacctcaagtagctaggactacagacaccaccacagctgtctaatttaataagat

SEQ ID NO: 147322 - DNA, 546 bp, Homo sapiens
gcagcaagcgtaagcaaatgttctagagcttccaactgaatgaatgttttattacaatctgtccagagacagctcagcttagtgatcactagagaaaggcctttcttctggctcagcttttgagagtgaaaagttattttcctcatcttaaggtagataaattcctattgtactrtggtacaatcgggaagcaattcagccatgctaagcctgagactctaagacaaaataaatgactctagtttagtggtgcatatttaaaattctacaaagcaacagttttgaaagtttaccttttattttccgcttttctaaaatgcttcctctacagatgctgagagaggtccaggtcacttctgtgtttgggggctcttggtatattataaaatacaattcacattgaatgggagcccctgggcacaagagactctacacctgtcactcttctgataggtttacttcatttctaccagttcatggtgctgaataaatcttagcagtgggaagtgattggaaaaataggtggttctcaccagtggttctcac

SEQ ID NO: 147323 - DNA, 596 bp, Homo sapiens
ttttcacaactagttactttagagcactaaaggactacttatagaataaattttacaacttgttcctatgtattggacctggaaaataaagtaacataacaaaacaaaacaaaaaagcaatcaccaacaatcctactatcctacctcaacaaccrcaatgatttggttctagttttttactacagctacatggtttccattgtgctgacaagatggtttcgtgtttacctcttcttctgaagcagtgtcttcttgtcttgcttttccatactattctgatcacttacaaagaccttctaaagttgaagtagtataaaagtataaaatgttgccttaagaactagatcctgctttgacaccagtcccaaatatcatcctctagatagaaaatcaccgaatctttctgctggatatcaggaaaaataattagaaataccaattaatcccaaagaagtgtagaaacatctgcattaaaacaaaaagatcgttctgtgtctctttctcctccatgacaggtaactgaatggttcacatcaggtaagcagaacatccatgtcccagacagcagggcggggaggagccctcaccaggaagag

SEQ ID NO: 147324 - DNA, 544 bp, Homo sapiens
atgggcaaactgtagcccgcagatagtttgggtgggcaaactgcatcaaacacaaaaactttatctcagtactaaagatcagatttctgttgcttcataaaagtgcaaaaatattaaccattaatttttaattaaagccagtgtgaatgttctcaccaacactattctagtcaattgcataggctgtacatatttttaaaatgtgtattctcttatgggactgcgtaaaattakttttattttgagaggagaagttttgttttataagttttttatttttcctgaattagcatttattagaaagagagaaaaagttgctcagcttctatgtaccacgctcaaataaaaggaatcagggctccttggagaaatggcagattccattgttggacggggagaatacaagtcaagcctgagtcatcttctggtgtcagaaataaggaagtgctcaaaaacgtatggaagctgtccaaggaagagaagctaactggaaagagctccaatggccaaagtaggaacaacctgagaaacaaatagatgacat

SEQ ID NO: 147325 - DNA, 527 bp, Homo sapiens
tagtttgggtgggcaaactgcatcaaacacaaaaactttatctcagtactaaagatcagatttctgttgcttcataaaagtgcaaaaatattaaccattaatttttaattaaagccagtgtgaatgttctcaccaacactattctagtcaattgcataggctgtacatatttttaaaatgtgtattctcttatgggactgcgtaaaattatttttattttgagaggagaagttttgttttataagttttttatttttcctgaattagcatttattagaaagagakaaaaagttgctcagcttctatgtaccacgctcaaataaaaggaatcagggctccttggagaaatggcagattccattgttggacggggagaatacaagtcaagcctgagtcatcttctggtgtcagaaataaggaagtgctcaaaaacgtatggaagctgtccaaggaagagaagctaactggaaagagctccaatggccaaagtaggaacaacctgagaaacaaatagatgacattattga

SEQ ID NO: 147326 - DNA, 527 bp, Homo sapiens
tagtttgggtgggcaaactgcatcaaacacaaaaactttatctcagtactaaagatcagatttctgttgcttcataaaagtgcaaaaatattaaccattaatttttaattaaagccagtgtgaatgttctcaccaacactattctagtcaattgcataggctgtacatatttttaaaatgtgtattctcttatgggactgcgtaaaattatttttattttgagaggagaagttttgttttataagttttttatttttcctgaattagcatttattagaaagagagaaaaagttgctcagcttctaygtaccacgctcaaataaaaggaatcagggctccttggagaaatggcagattccattgttggacggggagaatacaagtcaagcctgagtcatcttctggtgtcagaaataaggaagtgctcaaaaacgtatggaagctgtccaaggaagagaagctaactggaaagagctccaatggccaaagtaggaacaacctgagaaacaaatagatgacattattga

SEQ ID NO: 147327 - DNA, 598 bp, Homo sapiens
aactcctcagaaatccaattgggggtggtggctcatgcctgtaatcccatcactttgggaggccaaggtggtcagatcacttgaggtcaggagtttgagaccagcctggccaacatggtaaaaccctgtctctactaaaaatacaaaaattagctgggtgtggtggaatgtacctataatctcagctacttgggagactgaggcaggagaatcacttgaacctgggaggcagaggttgcagtgagacaaggtcaagccactgcactccagcctaggtgacagagtgagactctatctcaaaaaaaaaaaaaaaagaaaaagaaaagaaaaagaaattcaagactgaaattcacttatacgcaagagagaacaaatcaaaatgtacctggaattktaccctccttctctactgcacccttcccaggacccaacactttttctctggtataacttatccttcctcctgcctctccgtgaaagaaaatctgtatgcaaaaatttgaatgacagttgagttctcatcagaaaccaccgagacaagaaaaaagtagtatgacatttttcaagtgctgaaagaaaaggcgtgcaaacccagaat

SEQ ID NO: 147328 - DNA, 510 bp, Homo sapiens
ttgtttgttttttcactaacctttggaaattcactaagaatagcttgtgggaagctgaaccatctagaatgttgttactgccacaaatgccaacttgaatcagatgtgatacagttggatcccaccatcccttagctttcaaccatagaaacwaaggccacccacaagcacaagccaggcagaaagaggtgaagggaagttataccccataagatcttactggaaaaaaaaaaaaaaaaaagggccacatctggtactctgcctctgtggctgtatctcaccatatccaccaacagtgttcaggccagttgcatatctttctcatactgaaggactaaatgataagattagctgttccgagtgcaaaggggcaaatgccatagctctggaggagctgatctgtgaaaacgcgtgggagcagttgtggataatagttttaatttttgatgtgattcaaaggaaaaaatatgaaaagcactgatttgctttatgttagtaatttgtgctatg

SEQ ID NO: 147329 - DNA, 579 bp, Homo sapiens
tggactgtgctttgggagaaattcatatttaaggggttggcagacaaaacagacttttaatgtaaattcacaaaaattyccaaagaagaaaagagagtctagaggaaatcaagaatcaaaaagtaaaaggttttccatactgtcaaacaatatacaaagctcaaatacaggaaagatgaaaggggtttatttactaatcagatcgcggacacactggactggagtagttccatgcactgatgaagaagaaagaccagatatatgaatctggagactaactaggaactcagttcatttatttacagaattatcttcagactgattacaaaaattcacagcaacataaaaaagaaaatttctgaccagtataacatgaaaatggatacaaaattccccaataaaatgttattcaatccatttcagaaattaagaaaaatacattttgtcttatttaagaactctcaaaagtataatctcagggtacctattaatcaaatactgcatggagtggatcaaaggagaaaaatcaaaatcacttcaagtagtttcaagaggacacgagaaaaattcaccatgttt

SEQ ID NO: 147330 - DNA, 209 bp, Homo sapiens
tagacattacctgtttctttagtttttcacaagaataataggtagatactgcctgtatgattacataaaatattcacaccaattatctatctttttaaaattaaagataattcatcrcaaaagattgttaagaggcccttgagaggcagaaagtgttagtgactttcattttttgcccagtgattgctcaaaattttgtaaatgttcag

SEQ ID NO: 147331 - DNA, 546 bp, Homo sapiens
tgtttagtttatacacacacatcctattggctctgttactctggagaaacctggctagggagcacttacttcctatttctaatatttccttccctgtggagggagcttaacctggattttccatgaacaaaagctggattgttcctgtcttctcactcacttgtctcctagggaggaggagtacattttctyagaggttagtttagaataagaaaattgggtatgcataacccccaattcctacttattctcccccatttgctctcctctgccatgcattgggacaagactgctcaagcatccatcactctgtgtaactattgatagccccatttttgcagttcaggatagaaagtccatttactagcaaatataagctacattctccaaaattcactttattagtaatgggggtggtacttttgcctccacctgctataatcttttatctaattctcatttgattcagaactcaagtggggaagtagagatttaattgttggataacctgaacctcaaatagctataatgcagaaaacacacata

SEQ ID NO: 147332 - DNA, 377 bp, Homo sapiens
taaatagtagaatatataaaaatatttttaaaaaattgaatatgctcaataacttagtaaatcctttgcgtttgtgttccatgtaacagttctaaagttttcatgtaaacaatctgaaggtctcaatgtttgtttctagttttagtttttagtctcccaagcctctgaccagatttgattctttttcatatcctttccctttttctgttcagtctttttccagaaccattgtcaaaagggcagcagcagtgcatagraaagtaacaaattgaataatccagaaatgaaacagttttcctttaacacatttctacttatgttactaaaaagaggcaatgtcagaaatatattttgaattacttgatgattgttttaac

SEQ ID NO: 147333 - DNA, 643 bp, Homo sapiens
aatcaggaccaaatgctactcaaagaagacccttataatatcaaaatcattaaaatatttcaaaaaatagaacctgaggctgtacagaaaatgattggaaataaaagcactagccaacattctggtggattctgatttttaagtaccagagagaattttccctttcacagtgttactcagagaaaacgattttatctgtaaagaggcccacagaaagctgtgaaattctaaaacagctaagattctatcccagtacactggatacaagaagaagagagcaaaggaaagggggraaataaaaacagagcctggcaaaagataaaatgggattgagagatttgttgctttgggcaaactcagaagtacataatattttttgacatttctggctcactagcattataaaagtacccaggttatagaatttgatccagcttccctttttttctttttttgtaccatgtctattgtaagaagtgaatttcacctgcttttgcaaatactttataaggtatcaagagtatgttttcatatttttgaaggcagagggtgatttttaaaagataaatatttataatttttaagcaattggcttatttgttcatattctaatatctttctcttacaaatgtgtctgtttcca

SEQ ID NO: 147334 - DNA, 573 bp, Homo sapiens
aaagcacacagaaacaaagccaaacaacttatcacaacatacactwcattcatatagtcaagggagaaaagactaaaaagtgaaaaagttctatctaaatgatagcaaattcgaaaataagaagtgacagcttcttcaaatgagaaggaatcaatgcaagaactctggcagtaaaaaaggatagagtgttttgacactctcaaaggattgcacttagccctctagcagtgaatctgaaaatcctgaaatgacaggtaaataattcaaaatgtggattgtaaggaagcacagttagattcaagagaaagctaaaaatcaacagaataaaaccagaaaaacaattcagattacaaaagataagacagatatattgttttaaaaaaatcagaatttctgaaaacaaaaaattcactggaggaatttcaaaatacagttaaaagctttaacaacagattaaaccaagcagaagaaagaatttcagagcttgaagaccagtcttctaaagtcagaaattattttttaattaacaaagtaaacaaagtctttgagaaatatggaataatgtaaagcaac

SEQ ID NO: 147335 - DNA, 533 bp, Homo sapiens
aagcaacactccttttgtaacccagtctcaaaagagacatttcatcgtttctgccacattctattcactcgaagagaatcaytaagtccagccacactcatggaaggtgaatgaagctcctgttcttgaggagaagagtactaaagaatgtagagagatatctttgagataatctcaaccagagtaaggagaactgagagtaccgggtccaggagcttagagggaaggaggaagcaggatgaaggactattataaatacggtgattataggatatctcactgagagatgagagttgaacaaagacttgaagtgacagaccagagataacctactgagtcctttccactactacccctcatttcctgagaaactcacaaggatatggggacttccattttaaacattaaaaataacttatgactaagactgagacataatattccttttgtgaagattccctctaagtggaattttttgatggttccttatgattatttgcatatgagacaagtacctacccaatgcttttgga

SEQ ID NO: 147336 - DNA, 404 bp, Homo sapiens
cttgcttgttgctatcgaggacacaacatgagagattaaaggattgttccaatttgcttgaaagtcttgtctttgttatttagtcaccaaatccaatgtgtttggtcagtttttctctcccatgaggctccttatattctaccaaaaaaaaaaagtgtataatccatattccttgcatgcaccaacacaccttagcattcctgagtatgcagtagatacttatacagcttagcccttcattcactgggatcagcagagagaggaaacagttttgagcctgggttttgmaagcagatagaattttgatgggtttagttaaggggaatgaaacctaagaccaaattcaaagtcgcaaaagtttggatcatatttataaaatagcaagaaattcacttggattagaa

SEQ ID NO: 147337 - DNA, 462 bp, Homo sapiens
caataatgagtaataaaattgaatctgtaataaaaagtctatcagcaacaacaacaatgacaaaaaacaatgacacagccaaatttgaccagatgtacaaagaagaactggtagcaatcttactaagaccattctaaaaaattgaggaggagggatttctctccaactcattctattaaatcagcatcatcctgataccaaaatatggccaggacacaacaaaaaagaaaaactacaggccagtaactttgatgaacatagatgcaaaaatcttcaacaaaatgctagcaaaccaaatccaacagtatatcaaaaagttaatycaccatgagcaagtgggttttattgccttgatgcaagtatggttaaacatacacaaatcaataaatgtgattaattatattaacagaattaaaaacaaaaaccatatgatcttctcaatagatgcaggaaaagcatttg

SEQ ID NO: 147338 - DNA, 599 bp, Homo sapiens
tgttgctaacttgacaaaggggtcttggtgaataggatgataaattattgcctggaatgtaggaaagcaagaatgggagatgataaagtagaagcagagacaatagaaaactctttcaagaatttttgcaataaaaaggagcagagaatgagccataattggagaaagatgttaaatcaaaggagttttattttaaggtaagagatattgaaacatgttcacgtgctgacataaatgataggtgatgagaaaatatgggttatgcaggtggaggggctggctgtggagagaagagagagatgagaggaaaagaagagtatatatgggttaagatgcatgtatgttgagagggaagaaagtgagaagacaagcacttttcttctagatgtttctgttttgcaataaaataagaatcaacaaacagtagaaaatgaggaaggagtattggggatttcagcagtgaagaattggtgggatatattcatctcagatagcatggaggcaaatttaagagaatgtastgggattcaagggtagtactgaggagccatttaagacatggtaatacaataaacatgaagtaagtgggatttcttcta

SEQ ID NO: 147339 - DNA, 548 bp, Homo sapiens
gatttgttcaaccggtgtcttcaaaaagtaactgtggaggcaagtgagcaaataagatagttaagtctagtcacttggagagtaataaggcaggaagggtggtcgagagtgaatttcctttcttatgtgctaaatagaatgcattatttagaaaaataagacataagagctgggagaaatctcaggagatgtctactgcccagttttaaagcataaagtgatgataaaaattgcatggyaaagtggacaataggtcaagatctctcctagcatagtactcttttcaccaccaaactaaactgccttacttgatcttggtttgacactgaagttgggaattatgtttattatttgtgaaaatgatagaaatatctgcttctaataattgaaccaaagcaaaacaagtgaaaagctccacagtatagcttctaatgcctcagaccattaataaaacaaacatatttttaaaacaccaaataagtactacatttattgatttaaataaaacctattagggataatttctagagttgtttaatgtactgtat

SEQ ID NO: 147340 - DNA, 588 bp, Homo sapiens
ggtggaagtacatttttctttacttttctagtgacccttaatatcattacttccagatataaagaatgaaagcatacataagacatatagtgaagtcagggaacaaatgtcttcataaaaggtggaaaactaacattttagaggaaatatgtaggttgagtaaacaaaacataggttgtcattgcaaattaatttttcayagtagcctaacccaaaacaaggagatctgtctcgtacctcataagatgttagaaatagtctggagatatatcacagcaaagaagatggtgaccaaagagaagtgacttcttcagtgtcacaatagaactctcacaaaataacaaaaaataaaatgtaggccttatatctcccaaatctatgttttccttccattattccagatttacagtcttttcttaataacaaaaaagacataaatgatctcctgctttgatctgcttcttgatttttgaaattctatttaaatttatactttttagctgttgcaatgcataatggtagcatatttttgtcactatggttaaattattctctctcacttaaaaaattcactatgtaaggtgacac

SEQ ID NO: 147341 - DNA, 479 bp, Homo sapiens
ttaggtctttgatatttaaagatatattttaaatagctaatttaagcttttgtctagtgtgatggttaatactgagtgtcaacttgattggatggaagaatgcaaaatatttttcctgggtgtgtcagtgagggtgytgccaaagtagattaacatttgagtcagtgaactgaggaaggcagacccaccctcaatctgggtaggcacaatctaatcagctgctagcacagccaaaatagaagcagtcagaagaatgtcaaaaggctagactgccttagcctctgagcctacatctttctctcatgctggatgcttcctgccctggaacattggactccatgttcttcaggtttggaacacagacttgacttccttgctcctcagcttgcagatgacctattgtgggaggttctgactgtgtgagtcaatactccttaatgaactcccctttttatgaacatgtatcatattaattttgt

SEQ ID NO: 147342 - DNA, 565 bp, Homo sapiens
tttgttgttgttgttgctgcttgttttggtggttgtttagtgacttttctaaactaattctgttaattcaatatctttattatatgttgccacaagtctctactcagttagcttattggaggcagctaatgaatgaacagagatttctttaaacatctggaagcaatgaatctataatttctccctctaggggctctgtgtgtttgttggagcccaccttctacacttaagtyagtcaatttactactcttcttttgccatcattttctgcttacagaacctcaagatcaatcagaggtgagaacttagaaacttctcaggttttttctgagtatgcatacactacacattgcacgtgggtcttctatattcccaaaaatattttagagcttttcaaaacccctagggacatctcatttcacaacttttcatcttaaacattttgggttagtctattgtttgtgttaactgttatttggtgcttcagactgcagtgatcctaaaacacttgacaaataactcctggcgagaagcttagtccaggacaagttgaacagaggtcaaa

SEQ ID NO: 147343 - DNA, 565 bp, Homo sapiens
tttgttgttgttgttgctgcttgttttggtggttgtttagtgacttttctaaactaattctgttaattcaatatctttattatatgttgccacaagtctctactcagttagcttattggaggcagctaatgaatgaacagagatttctttaaacatctggaagcaatgaatctataatttctccctctaggggctctgtgtgtttgttggagcccaccttctacacttaagtcagtcaatttactactcttcttttgccatcattttctgcttacagaacctcaagatcaatcagaggtgagaacttagaaacttctcaggttttttctgagtatgcatacactacacattgcacgtgggtcttctatattcccaaaaatattttagagcttttcaaaacccctagggacatctcatttcacaacttttcatcttaaacattttgggttagtctattgtttgtgttaactgttatttggtgcttcagactgcrgtgatcctaaaacacttgacaaataactcctggcgagaagcttagtccaggacaagttgaacagaggtcaaa

SEQ ID NO: 147344 - DNA, 520 bp, Homo sapiens
ccacatatgctcctatttacatggaatgtccaaaaaaggcaaatctatatatagagaaatgagattaatagttgccacaagctgggaggagagaggaatgagaagtgactgcttaaagggtatcaggttttttgaaggaagtcatgaaaatgttctggaattagatactagtgatagttgtacaacattgtaaatgcacactttgttatgcatrgtgaattttatgttgtgtgtcttaccagaataaaagataaataaataactaaaattaatgtatttatctgaatctaccccacctgatctttacaagctcgtgatccttttctaaaataattcccaacttgttattaagagtccctggggtaggggattagggggaagaaaagtaggttcttaagtgaatcctgtgaattaatcctctttaataattattctgtgccactactttcttctcttttaataccgactggctgtgatcatatcttctatagcgattaatgacaaaaacaatagctttatc

SEQ ID NO: 147345 - DNA, 520 bp, Homo sapiens
ccacatatgctcctatttacatggaatgtccaaaaaaggcaaatctatatatagagaaatgagattaatagttgccacaagctgggaggagagaggaatgagaagtgactgcttaaagggtatcaggttttttgaaggaagtcatgaaaatgttctggaattagatactagtgatagttgtacaacattgtaaatgcacactttgttatgcatggtgaattttatgttgtgtgtcttaccagaataaaagataaataaataactaaaattaatgtatttatctgaatctaccccacctgatctttacaagctcgtgatccttttctaaaataattcccaacttgttattaagagtccctggggtaggggattagggggaagaaaagtaggttcttaagtgaatcctgtgaattaatcctctttaataattattctgtgccactactttcttctcttttaatacygactggctgtgatcatatcttctatagcgattaatgacaaaaacaatagctttatc

SEQ ID NO: 147346 - DNA, 411 bp, Homo sapiens
aagattccagaaaaagtggtattgaaaattattgacattaaaagaaaggaatgtaagctaaataatggcaggatrtgaaaaaaagtctaggcagaattagagtattatacatctgaaacaaaaaagtatgctgcaatcataactatagcctacaatgaaagatagaataactagcctatatgtaacaaaagttacaaattgctgataagctggaaggaaaaaatgaaagagcgtggtgctttgtgaattagaaaagtttggtaggtataaagaaattgataaactaaaaattgtaatagtcataatattaattccctcaacaattatatttttaaagctaacatgtgttgacgttgacctttctgttaaatgctgaaaacgcaaaaacagagatgatttaaagacccctag

SEQ ID NO: 147347 - DNA, 530 bp, Homo sapiens
gctgggactgagggctccacaccatgaacaaggggaaggacccctttctcagggggctccctcatgtgacaaaaaggggccccaacaagtgacatgcacacagatgtggattgatttgattttggctggggtygaccaggagaaaattggtaggcaacccagtgaagtactattaactttatggaggcaattgtccctggagcagcaattccggaaaatgcctgaaagggagaaggacaatgttgcttgacccagtcctgcctggacactccatctaaaagactacttgaaggcgggatgggggcatagaatcttttgtgtttgattagggaactggctgaggtgccagcttggggggacactggacaactggatggccttagtcatagtaattgctgcccaaggtggcacctgtgcccttttaggaatacaatgttgtatctttatccctgacaatcaacagaacataatggcagctttgcaggggctgtcacaggagattaaagcagttgagaaccttactgacaacc

SEQ ID NO: 147348 - DNA, 535 bp, Homo sapiens
ctgggaattagaaattcagaacaatctttaaatatgcaatgcaattatgctgtaatcctgaataatgcacctaacctagaatttcaaaaagaattgagcaaaaacagatatcatgggtcatatttttgccaatgcctgaaggcatgactctatgtatatatgcatgagtaaaacatttggtattttaaatctatgacagttcataaatacagtcttatgaattaaaaactaaaatcttaagtatttcataagtgtatgcaattagaagaggcaaaacacgtaaaacagatctaaaatgtacaaagatatgtggaggcataaactaaaacatgtcatgaccatacatcatcaatttaggagaatgctgtagctcttttcaaatgcatcaatcatttttagatatataytattataacattatctcaataagctctcctcatcaaatgcttaaacttgtttgtagcttcctaccgcaataataaagcctcaaattcactatagttaaacattcttagccaaacagcagtgctctacc

SEQ ID NO: 147349 - DNA, 609 bp, Homo sapiens
tttcatacttcttacttatttttaaaattttggttatttatttttcttattgatttgtacaatatatttatgtagtctttatatcgactctgtttttcacatatacagcaaatctctctaaatctggggtttcatgtttttactttttattttatattttgataawtttttaacatagtctgtgttgtaaattttgcatttttttctgattatgttgtgccttgtttaagaaatacctggataaactgatatctgagggctagtttcctatatgcccttccaaattctaaaattttagggtttcacatgtatatttttaatccatctgtaattaactttagttatagtgtgaagcagaagttaaatttttccatattcataataaattttatcagattcttttcatggcacttatcctgaaagatataaatcatcctaatatagtttatgttaaaatatatgtgcatttctgacattacaccccatttggtaatgatttttggttatatttatagatctaacttgagttttcaaattttacatctatatcataattgagattgccctatactttttatgttgtattcacattttcatagaattttggtt

SEQ ID NO: 147350 - DNA, 651 bp, Homo sapiens
gttatgattatatgtctggacaatatgagatgccaaatgaaaggtacttcattaaaatgaaccactaatacaaattttctataaagcaatacatatattctcatggtaatgggcatttggtgtgtatcagtaaaactatcattcacatgcaacctctgtctctttctttttctctgtttttggaaactaagtctcccaagtaacatctgtgaaaaataataagcttagaagaacactatcaatctgtccgtgccycactttattttagagtgtctatcagagcttctgaccttagaataaagaataataaagcaagtcataaccttaatgtatttttaaaagattgtgtatgcttctcttatgaactctttgcttataatgccactatattcatttattcacaccacaaatatttatgaaatgtctatcatgtgccagacacaacaatgaaaaaaatactcaaaattccctgatttcatggagcttaggttctaattggagagggtgagaaacattatcaataaaaaataaaattcatgatatgtcatgaatgccagatgatagtaaactctagagagaaaatgaatacaggggtggcctaataaagtaccagggagttgtgtttaaataagatggtcatagaaagatatg

SEQ ID NO: 147351 - DNA, 621 bp, Homo sapiens
taatgtatttttaaaagattgtgtatgcttctcttatgaactctttgcttataatgccactatattcatttattcacaccacaaatatttatgaaatgtctatcatgtgccagacacaacaatgaaaaaaatactcaaaattccctgatttcatggagcttaggttctaattggagagggtgagaaacattatcaataaaaaataaaattcatgatatgtcatgaatgccagatgayagtaaactctagagagaaaatgaatacaggggtggcctaataaagtaccagggagttgtgtttaaataagatggtcatagaaagatatgcaggaatatctaagatcatctagaggaagattatttcagccagaaaataaaataaggtttgcaaaggcgttgaggaagatgcatacctgacatgcctgtagtttgaacacagtgagtgagggcatgaggagagagaactttagctggagaggaagtgagagaagtagcaggtcagaggaagaaatgaagataaattgaagtattgaaagtgttcaaaaggattttatgaggaaaagatacttttatatactacttttatgaggaaaagataagaatctatcagtggattttgaag

SEQ ID NO: 147352 - DNA, 518 bp, Homo sapiens
cgcaaaactcagttaagcacacaataatcagactgccacaaaccaaagatgatgagaaaactgtgaaagcagccagaacataaagatatcatacctacaatattgtaccaaatctctgaatagctcctactgactttgcctctctgacagaagcctgatataacaactataacaataacaaaatatatatgcaatctatctaagaatgttggagacagagcawttcagacaatttttataagggtgtcaaatattcaatagataaatttcaataacaactgacttctcatcacaaataattgaggacagagacttgctacaattactttaaagtgctgagtgaaaacagcaagaagaaaactctgttaacccaatattctacatccaatgaaatatccttccagaatagaaggaaattaaagagatttactgatacagtaaaattgaaataattaattttcagcagatttgtactctaagaatataaatatggtaaatgcaccatttcataaaggatg

SEQ ID NO: 147353 - DNA, 518 bp, Homo sapiens
cgcaaaactcagttaagcacacaataatcagactgccacaaaccaaagatgatgagaaaactgtgaaagcagccagaacataaagatatcatacctacaatattgtaccaaatctctgaatagctcctactgactttgcctctctgacagaagcctgatataacaactataacaataacaaaatatatatgcaatctatctaagaatgttggagacagagcaattcagacaatttttataagggtgtcaaatattcaatagataaatttcaataacaactgacttctcatcacaaataatwgaggacagagacttgctacaattactttaaagtgctgagtgaaaacagcaagaagaaaactctgttaacccaatattctacatccaatgaaatatccttccagaatagaaggaaattaaagagatttactgatacagtaaaattgaaataattaattttcagcagatttgtactctaagaatataaatatggtaaatgcaccatttcataaaggatg

SEQ ID NO: 147354 - DNA, 518 bp, Homo sapiens
cgcaaaactcagttaagcacacaataatcagactgccacaaaccaaagatgatgagaaaactgtgaaagcagccagaacataaagatatcatacctacaatattgtaccaaatctctgaatagctcctactgactttgcctctctgacagaagcctgatataacaactataacaataacaaaatatatatgcaatctatctaagaatgttggagacagagcaattcagacaatttttataagggtgtcaaatattcaatagataaatttcaataacaactgacttctcatcacaaataattgaggacagagacttgctacaattactttaaagtgctgagtgaaaacagcaagaagaaaactctgttaacccaatattctacatccawtgaaatatccttccagaatagaaggaaattaaagagatttactgatacagtaaaattgaaataattaattttcagcagatttgtactctaagaatataaatatggtaaatgcaccatttcataaaggatg

SEQ ID NO: 147355 - DNA, 564 bp, Homo sapiens
actgaggccacaggcccttagctccttccagatcttctgcctcacatattccaattatgagccatgcacgtaggccrcattactacaaaggtgccagcttctttttcaggtcatcctcacaatcaaggttggaggtttatactcatggattctaggttgtcttcacggattctagtcttttttctcttctctacttcatgtccagctttttaacctatattttacctttcagtgactttaaagcttcagataggtacagaggcaaaagcctttcattcaatttgccacatggttccacaactgtgtacaggctaatcacagtattatatccctaactctgcatcactcatattttttttttgcttctttgtttaatcactgactgattcagagactagtcttacaagcagttacactacatacaaccttcagaatggattgccttaaaaaaatcttctcatatgattaatattaatggcattagtgatgctgttgtccatagtgaaggatgctggtagcccaaggcaatctgtggcaaatagtcacttaaattatcatacttca

SEQ ID NO: 147356 - DNA, 564 bp, Homo sapiens
actgaggccacaggcccttagctccttccagatcttctgcctcacatattccaattatgagccatgcacgtaggccacattactacaaaggtgccagcttctttttcaggtcatcctcacaatcaaggttggaggtttatactcatggattctaggttgtcttcacggattctagtcttttttctcttctctacttcatgtccagctttttaacctatattttacctttcagtgactttaaagcttcagataggtacagaggcaaaagcctttcattcaatttgccacatggttccacaactgtgkacaggctaatcacagtattatatccctaactctgcatcactcatattttttttttgcttctttgtttaatcactgactgattcagagactagtcttacaagcagttacactacatacaaccttcagaatggattgccttaaaaaaatcttctcatatgattaatattaatggcattagtgatgctgttgtccatagtgaaggatgctggtagcccaaggcaatctgtggcaaatagtcacttaaattatcatacttca

SEQ ID NO: 147357 - DNA, 522 bp, Homo sapiens
tgagactatgttgtaaatatgatccgtgtgaggcagaaaataagttggataacttagctactgatttagataatttggatgcagtcctttttaactccacaaattaggagataatcatccctctctgtgcagatgacatggtttcattatgaagcagccttaagctattgaacctttcactaattattgtcaggataatagcttagcagcagctgagctgaaaaaaagccctaatgtttggtaaatattttctaaagtttcaccggctaatattatacagcctcacccagaggtcaaattatttatgactaaattgtcagttattcttcagggacccaaataggttccaattggggtaaaattgtccagttggaaacttttaaccttacatagttaattatctgataagaatcccagcatcacactcatattttcacaattgcaatgtggatttatctgctaagcgtttaacatggaaagcagaataggtacaatacaagagratgaatgaacacattatat

SEQ ID NO: 147358 - DNA, 533 bp, Homo sapiens
aacatttggtgaagaatctgccaactgcctttattactttctgaactacctctaagttacaggtatttccagttttgttctgcagataatttgagctccatctgtggttgatgaatattttttagtatgctattacaaattatggctttcggcactgttgcagcccctctctgctaattcagctacataaaatattgtgtttcttgatgctgggtatatttccatagtgggaaatgcagtgagagaaataggggtcctattttctattgcaatttgttggtcrgttcgtttccacataaaatattgtttttaattttatgctgaaataggtgattattaattctaaaatataaatttccaacagagtctgtactaaactcctaaggaagtcagatatgtttgtacagaaattttaattcatatcaaaacctacatagtaactatatagttacttaatttgatttgaaacaagaaacatttgattatatttatattgtggataatttagatgtggtcagttaagaattagtttt

SEQ ID NO: 147359 - DNA, 533 bp, Homo sapiens
aacatttggtgaagaatctgccaactgcctttattactttctgaactacctctaagttacaggtatttccagttttgttctgcagataatttgagctccatctgtggttgatgaatattttttagtatgctattacaaattatggctttcggcactgttgcagcccctctctgctaattcagctacataaaatattgtgtttcttgatgctgggtatatttccatagtgggaaatgcagtgagagaaataggggtcctattttctattgcaatttgttggtcggttmgtttccacataaaatattgtttttaattttatgctgaaataggtgattattaattctaaaatataaatttccaacagagtctgtactaaactcctaaggaagtcagatatgtttgtacagaaattttaattcatatcaaaacctacatagtaactatatagttacttaatttgatttgaaacaagaaacatttgattatatttatattgtggataatttagatgtggtcagttaagaattagtttt

SEQ ID NO: 147360 - DNA, 554 bp, Homo sapiens
ttttacatttttgaactaatttggtcatttatatttatttggaaattcatccattttgtttatatttcraatttagattcctgaattatttcataaagtgtttctatgacttttaaatcccaaatgtacgtgcagattgatttaaagtccttattttattctaaatattgggttttgatggtatcgcttctgggttttgcttgttacgttttgttttgctttgattagcttacttaatgatttttttctattctatcataatttttaaaggaccacatttttttccatactgaaggaaaggcaggttattttattttttaactcaatacattttgcttatggattactatagctactcatttgaatgcttacttaattataattatttttgctttctctagatgtatgaaaggctacaagttgtttataagtaacaatttgcctgcttcttgtaagttttgcaatttaatggtctcattgtgatctggttttaaatatatcttaaatgctgacataaattatgggcgatttatgggtatacttttaggttttaa

SEQ ID NO: 147361 - DNA, 554 bp, Homo sapiens
ttttacatttttgaactaatttggtcatttatatttatttggaaattcatccattttgtttatatttcgaatttagattcctgaattatttcataaagtgtttctatgacttttaaatcccaaatgtacgtgcagattgatttaaagtccttattttattctaaatattgggttttgrtggtatcgcttctgggttttgcttgttacgttttgttttgctttgattagcttacttaatgatttttttctattctatcataatttttaaaggaccacatttttttccatactgaaggaaaggcaggttattttattttttaactcaatacattttgcttatggattactatagctactcatttgaatgcttacttaattataattatttttgctttctctagatgtatgaaaggctacaagttgtttataagtaacaatttgcctgcttcttgtaagttttgcaatttaatggtctcattgtgatctggttttaaatatatcttaaatgctgacataaattatgggcgatttatgggtatacttttaggttttaa

SEQ ID NO: 147362 - DNA, 382 bp, Homo sapiens
gattactatagctactcatttgaatgcttacttaattataattatttttgctttctstagatgtatgaaaggctacaagttgtttataagtaacaatttgcctgcttcttgtaagttttgcaatttaatggtctcattgtgatctggttttaaatatatcttaaatgctgacataaattatgggcgatttatgggtatacttttaggttttaaatgtgttaggattatgttttagcaatatgatttttaataatttctaattttattgcattgagatcagtcaaatctcccaagatttttgagccaacctttcttgaatataggatggcaaatatttacaaatgtttcatgtccattttaaatgcatgcatttatctgttgg

SEQ ID NO: 147363 - DNA, 568 bp, Homo sapiens
tactcaaatattgataacctttctagatgacacataatttattaataaaacaggtaggctacagtttggactttattttttaactttaaatcartatgggagtagtttgatttttagcttaagttcatttgggctttaattgtcaagataatttgtggctttaattcctccatgacaatttggtaatgagaggcagttaattcaaataaagtaacataacactttctgatgcattgtgttagagtatctttgtaaagtctgatctctttgaagggcttttaatagactatacggaacaatatacctagaaaaaaatcagagtgggcagtagaagaggaaatacaatttcagccttaggtacagaatgatcacgcaactaacttaattaatgcagtattctaacccattttaggcctctgtgttttccaaaaccatttgcaaaatagcagtgctttatttataatctcttccttctctgttcccatatgctgaatcatcccccttgatcagagtcttaatggtcgaacacggtggcttaataaaacaaacagcatcagcgttttgagag

SEQ ID NO: 147364 - DNA, 554 bp, Homo sapiens
tgccacctaaattagacttctaccctccaacaaatactgagagatagggatactatcttcctttatgcttacctttcaaaagaatgacttccaagcccttggaatagactgtactgggatgtaaaactgacaagtctttcacaaaagattaacatctcaaaaaggcagataaataattttcaataaaagttttctaaagtaaatgatctaagggaagggatgttgagattttagagaaaagaagaagcctgtctaaagtttggtcaatcagagttaaggcactcttggtcaaccatcatgagaaaggagcaatctgatttcaaaatacacatctctggccctaacagcccayctgttctcaagtctgaattgaggaacatgtgctgaatctttcagtgcctttgggtgtctgctatgtaccatgttctgagttaggtaccagggattcacaatatttaaagaaaaatcaacatcttaccaacaataagtgctataatatatatgtatacacagattcatacctgtgaaagttcatatgtatggatatgtgaaac

SEQ ID NO: 147365 - DNA, 507 bp, Homo sapiens
gagcatctttttgagattgcaaactgcattttaaataaattggtaccatatttaatggcatgttactttttctatgtatgcttagtagcccaagattggatgaaaatgacttagatcagggctactaaaatatttaactttggagaaccatttcaaatatgggggttctttataaggaattatctgatccaagtcttcattctttttttgtgtttacttcatattctatatttaacastgcagcatttttcagtgtattagacatatttatttatgtcctatctgagctgataataataaggcccttttactcctagtgtccaacacagtgctttgcattatctacttactactggttaacaattattgtacaattggttaacaattgaccagctgaaagaaagtgctcctgagatttttatcatgattgcttctgttgaggattaatctctcaggcctccactgggttacaaaggcaaaatctggagtgaatttgtagggtagatt

SEQ ID NO: 147366 - DNA, 431 bp, Homo sapiens
gaattccctctccttgagtataaatgggacctatgaaaacaataggtaccagccctgggattatattaccttatatagcaaaagggattttgtagatgtcattaaggtccctaatcagttgactgagttaatcaaaagggagattttcctgggtggtcatgacttattcagtagagctcttaaaaaaaamcagcaacaaacacgctcctgctgaactaggtgaaaacaaacaggcatgttctaaactgcctatgcagggggcccatggctagatcttgagggtaagttctaggaactgacagtgaaccccaggtgacagtccagtaagaagagagacacttcaggcttacaactgcaagaaattggattctgccaataacctgaatgagattggaagagaaagaagaggttcaaatgaaaactgcaccccc

SEQ ID NO: 147367 - DNA, 453 bp, Homo sapiens
gcattgaaacatttggcccgtggaccactgggtaggacagagtggccttgttttggaataccgttgtgatggggatagccattacatctgtggccacaagcagtgtgtggaacctgtggtatcagccacatggactcatactcagaagtgctttatgtggtgggcatttgtcagagcctaagggggctgccagctcctcatatgtagtacaggttgagtatcccaaatctgaaatccaaaatgctcccaaatctaaagctttttgagcaccttcatgatgctgtgaaaggaaatgcttattggagcacttcaratttctggattttgggtgctcatctggtaagtatataatgcaaatattctaaaatcaaaaaaataggaaattcagaccacttctggtcccaggcacttcagatgtgggatactcatgtgtaggtttcccgtaacagaatt

SEQ ID NO: 147368 - DNA, 304 bp, Homo sapiens
ccacataaaatacataatcattgctaaagacttattcacagcatactgttgataaatcaatggagtagacggctagctggcttctgtcctaattaataaggcctgcctccctgtctgtatatgaggactaatggaaatgaggcagtttatactagtaaataccatrgtatatgaggctgcccatctcgtcactgtccaaagagcatgccatgcccctaaatacatacaaaagacaaattcatggagaagggatacataccaaaatactaacgtcaaggtagtctagcagaaggtgaattttctc

SEQ ID NO: 147369 - DNA, 580 bp, Homo sapiens
ctcattctcacaactcctattcaaaacagtagtggaagttctagccagagcaattagccaagaaaaagaaatacaaggcacttaaagaggaaaagaagtcaaattatctctttgctgacgacatgattctatacctaggaaatactaaagactctaccaaaatgttcctagagctgatgaacaacttcagtagaatttcagrgtgcaaaatcttacacacattatttctaagtatttgttgtactttgtggttacggtaaatggtatttttttaattcggctattgtttttggctaatatataaagataaaattgactttttatattgaccttactaaattcactttttaaaaataatttagattcttctggactgttttaagaatatgaataggctgtttgtaaaaaaatgagatagcctactttatatttaatattatttttcatatatttggttttaaatttagcatcttattatttgttttgtatttgtgctgcctgttctattttgtctattttcttaccagaaaatattttctgttatattaattgtgtattttatattatttcattctcccct

SEQ ID NO: 147370 - DNA, 614 bp, Homo sapiens
gttaaatatgggagagatattttagctaaatagcttgtcaaatayggaggatgaatttgaaatttatttagagtaaatgtatcatttcaataatctacatataagtggctggcattgttgcttactcaacatgtgaccttggacagtttaagtaacctgtctgtgcctttgtttctttggcaataaaatgatcacaataggtcctgtctaagaaagtaatagtaaaactttggattactatatgtaaagtgcccagagtggtgcatggcttgtaacaagggctcaataaataaaagctaataaaaactgtctaaatgaatttatttcttaatgatccacaatttgataaataaaggtcagatgagaccaaagagaaaaaaaacagattacagaggaataattttcctgagtaggatataaatatattcatataaaaattatagtgttaatagtattatatattctatggttttatttcccagccaactgtgtaaactttgtgtttggcaagaatatacaaaaaaagttgtgcaaacttttgaggagaaaacttagacaacttttcaacagaatgtgacattcacattcattcacttgcatggctaagtgcagtt

SEQ ID NO: 147371 - DNA, 300 bp, Homo sapiens
gaattcgtacatgtcaggtctaagaacagtaaaaggcatgctggaagcagtaagtattagctgttattatcggcatcattattattactacaatatcatttaagaaatggaagaataagttacaagctgaaattttatttcatagatgtatcatgttgtttacaattagaacatatatgactragtggtaatcctttcctgttcttttatttctctgtactgtccaaccacccttaaaatgcttttcatggatttcctgacaatttctctgacataaggtgagggaagcgaaaggagtta

SEQ ID NO: 147372 - DNA, 432 bp, Homo sapiens
ctcactttttattatactcatgttttcctttaaatcttgagcatctttataayagtgtcttattttactgccaattatgctgtcatttttttagtctgtttcaataaacttcatttttgtacttgtcacagttcacatttgcctgcctttcagatgtctagtaatttttcgtttgatggtagacattctgattattttgttgttgagttattatattttgttgtgtttcttgaaccattttcaagcttttgctattaggcaataacactacttgctaatcattttcaaattttaataaatttttctttttagatttgtaaggacaaatatagagtagctttcaccctagatctattgcaaccctacttcctccaatacatcaccattcttggatccctaatgaatgtccaaagtattcaatgtgttctctta

SEQ ID NO: 147373 - DNA, 432 bp, Homo sapiens
ctcactttttattatactcatgttttcctttaaatcttgagcatctttataacagtgtcttattttactgccaattatgctgtcatttttttagtctgtttcaataaacttcatttttgtacttgtcacagttcacatttgcctgcctttcagatgtctagtaatttttcgtttgatggtagacattctgattattttgttgttgagttattatattttgttgtgtttcttgaaccattttcaagcttttgctatkaggcaataacactacttgctaatcattttcaaattttaataaatttttctttttagatttgtaaggacaaatatagagtagctttcaccctagatctattgcaaccctacttcctccaatacatcaccattcttggatccctaatgaatgtccaaagtattcaatgtgttctctta

SEQ ID NO: 147374 - DNA, 454 bp, Homo sapiens
ctcactttttattatactcatgttttcctttaaatcttgagcatctttataacagtgtcttattttactgccaattatgctgtcatttttttagtctgtttcaataaacttcatttttgtacttgtcacagttcacatttgcctgcctttcagatgtctagtaatttttcgtttgatggtagacattctgattattttgttgttgagttattatattttgttgtgtttcttgaaccattttcaagcttttgctattaggcaataayactacttgctaatcattttcaaattttaataaatttttctttttagatttgtaaggacaaatatagagtagctttcaccctagatctattgcaaccctacttcctccaatacatcaccattcttggatccctaatgaatgtccaaagtattcaatgtgttctcttaactctggttgattggtactcag

SEQ ID NO: 147375 - DNA, 438 bp, Homo sapiens
gcatgtcttttatctcactttttattatactcatgttttcctttaaatcttgagcatctttataacagtgtcttattttactgccaattatgctgtcatttttttagtctgtttcaataaacttcatttttgtacttgtcacagttcacatttgcctgcctttcagatgtctagtaatttttcgtttgatggtagacattctgattattttgttgttgagttattatattttgttgtgtttcttgaaccattttcaagcttttgctattaggcaataacactacttgctaatcattttcaaattttaataaatttttctttttagatttgtaaggacaaatatagagtagctttcaccctagatctattgcaaccctactycctccaatacatcaccattcttggatccctaatgaatgtccaaagtattcaatgtgt

SEQ ID NO: 147376 - DNA, 432 bp, Homo sapiens
ctcactttttattatactcatgttttcctttaaatcttgagcatctttataacagtgtcttattttactgccaattatgctgtcatttttttagtctgtttcaataaacttcatttttgtacttgtcacagttcacatttgcctgcctttcagatgtctagtaatttttcgtttgatggtagacattctgattattttgttgttgagttattatattttgttgtgtttcttgaaccattttcaagcttttgctattaggcaataacactacttgctaatcattttcaaattttaataaatttttctttttagatttgtaaggacaaatatagagtagctttcaccctagatctattgcaaccctacttcctccaakacatcaccattcttggatccctaatgaatgtccaaagtattcaatgtgttctctta

SEQ ID NO: 147377 - DNA, 468 bp, Homo sapiens
gcatgtcttttatctcactttttattatactcatgttttcctttaaatcttgagcatctttataacagtgtcttattttactgccaattatgctgtcatttttttagtctgtttcaataaacttcatttttgtacttgtcacagttcacatttgcctgcctttcagatgtctagtaatttttcgtttgatggtagacattctgattattttgttgttgagttattatattttgttgtgtttcttgaaccattttcaagcttttgctattaggcaataacactacttgctaatcattttcaaattttaataaatttttctttttagatttgtaaggacaaatatagagtagctttcaccctagatctattgcaaccctacttcctccaatacatcaccattcttggatccctaatgaatgtccraagtattcaatgtgttctcttaactctggttgattggtactcaga

SEQ ID NO: 147378 - DNA, 630 bp, Homo sapiens
ataatacctttgatcatgtgtggagaaccaaggaacataatgaagctggttggttgctcctaagttcagcagacaaagtgatgaaagaaaatgatgaattctatctcccagcttcagaagcagatagtgagcctcaaatctgctaagattgccctgagtgagagtcttatatcctgtagagaaagagctgaagttttgggaaaacatacataagctcttatcatgtgggtggctgacctgcaatgaaaggtgcatgcacagcctcaccaggtgtctactgttaaagtgagggcattgattggaaaagaaagggaccctgcaacttggaatgggggcatgtgggaaaactatgatgaagctggggacactgagtttgtaaggtctgattaaccttttttgccagaagaaacagcytcccgatccccggtagtagcaacatcctctccccaacccatgctgccctcagcctttccacatttgaggagataaaccctgcgctgcctgaggcaacagtgatggccttccctgaggcagttgccaggccagataatgttgattctcctcagaagccacctccaacacccctgtttgcttctaggcctataactagactaaagtcttggtgggccc

SEQ ID NO: 147379 - DNA, 630 bp, Homo sapiens
ataatacctttgatcatgtgtggagaaccaaggaacataatgaagctggttggttgctcctaagttcagcagacaaagtgatgaaagaaaatgatgaattctatctcccagcttcagaagcagatagtgagcctcaaatctgctaagattgccctgagtgagagtcttatatcctgtagagaaagagctgaagttttgggaaaacatacataagctcttatcatgtgggtggctgacctgcaatgaaaggtgcatgcacagcctcaccaggtgtctactgttaaagtgagggcattgattggaaaagaaagggaccctgcaacttggaatgggggcatgtgggaaaactatgatgaagctggggacactgagtttgtaaggtctgattaaccttttttgccagaagaaacagcttcccgatccccggtagtagcaacatcctctccccaacccatgctgccctcagcctttccacatttgaggagataaaccctgcrctgcctgaggcaacagtgatggccttccctgaggcagttgccaggccagataatgttgattctcctcagaagccacctccaacacccctgtttgcttctaggcctataactagactaaagtcttggtgggccc

SEQ ID NO: 147380 - DNA, 556 bp, Homo sapiens
gaacacagagtgcttgagcttagatcagggagatacaaagggttggttttttattactaatgttgaatttttaygggtacatagtaggtgtatatatttatggggtatatgggatattttgataaagacatgtaatatgtgacagccacatcagggtaaatggagtatccatcccctcaagcatttatcctttgtgtaacaaacaatccaattacattcttttggttatttttaaatgtatgattaaattatttttgactacagtcaccctgttgtgctagaaaatgctgggtcctactctttctaattattttttgtcccccttaatgatacataataattattataataatttactctctaccttaagcaatgaataaattactatttgtgtttcacttttgagtttgtagtattactttccagttccccatccccacttcccatcatcatcccacagctacccttcccagcttctggtaaccatccttctactccctatctccgcaagttcaatcgttttaatttctagttcccacaaataaatgagaacatc

SEQ ID NO: 147381 - DNA, 556 bp, Homo sapiens
gaacacagagtgcttgagcttagatcagggagatacaaagggttggttttttattactaatgttgaatttttacgggtacatagtaggtgtatatatttatggggtatatgggatattttgataaagacatgtaatatgtgacagccacatcagggtaaatggagtatccatcccctcaagcatttatcctttgtgtaacaaacaatccaattacattcttttggttatttttaaatgtatgattaaattatttttgactayagtcaccctgttgtgctagaaaatgctgggtcctactctttctaattattttttgtcccccttaatgatacataataattattataataatttactctctaccttaagcaatgaataaattactatttgtgtttcacttttgagtttgtagtattactttccagttccccatccccacttcccatcatcatcccacagctacccttcccagcttctggtaaccatccttctactccctatctccgcaagttcaatcgttttaatttctagttcccacaaataaatgagaacatc

SEQ ID NO: 147382 - DNA, 556 bp, Homo sapiens
gaacacagagtgcttgagcttagatcagggagatacaaagggttggttttttattactaatgttgaatttttacgggtacatagtaggtgtatatatttatggggtatatgggatattttgataaagacatgtaatatgtgacagccacatcagggtaaatggagtatccatcccctcaagcatttatcctttgtgtaacaaacaatccaattacattcttttggttatttttaaatgtatgattaaattatttttgactacagtcaccckgttgtgctagaaaatgctgggtcctactctttctaattattttttgtcccccttaatgatacataataattattataataatttactctctaccttaagcaatgaataaattactatttgtgtttcacttttgagtttgtagtattactttccagttccccatccccacttcccatcatcatcccacagctacccttcccagcttctggtaaccatccttctactccctatctccgcaagttcaatcgttttaatttctagttcccacaaataaatgagaacatc

SEQ ID NO: 147383 - DNA, 488 bp, Homo sapiens
actttcaaatctaggatattgtgaatagacctgcaataaacatgggagtgtctctttgatacaytgatttcctttcttttggatatttacctagaagtcaggtttcctattcatatggtagctctatttttagtttttttaggaaccttcaaactgttctccatagtggttgtactaatttacattatcaccagcagaatatgaaggttcccttttctccacatcctcaccaatgtttattattgcctgtcttttgggtaaaagccattttgactggggtgagatggtatctcattgtagttttgatttgcatttcttcgatgatcaacaatgttgagttctttttcataaactgtttgccatttgtatgtcttcttttgagaaatttcttttcagattttttgtccattttttaataggattattagatttgttttcctatagagttgtttgagctgtttatacattgtagttattaatcccttgtc

SEQ ID NO: 147384 - DNA, 488 bp, Homo sapiens
actttcaaatctaggatattgtgaatagacctgcaataaacatgggagtgtctctttgatacactgatttcctttcttttggatatttacctagaagwcaggtttcctattcatatggtagctctatttttagtttttttaggaaccttcaaactgttctccatagtggttgtactaatttacattatcaccagcagaatatgaaggttcccttttctccacatcctcaccaatgtttattattgcctgtcttttgggtaaaagccattttgactggggtgagatggtatctcattgtagttttgatttgcatttcttcgatgatcaacaatgttgagttctttttcataaactgtttgccatttgtatgtcttcttttgagaaatttcttttcagattttttgtccattttttaataggattattagatttgttttcctatagagttgtttgagctgtttatacattgtagttattaatcccttgtc

SEQ ID NO: 147385 - DNA, 488 bp, Homo sapiens
actttcaaatctaggatattgtgaatagacctgcaataaacatgggagtgtctctttgatacactgatttcctttcttttggatatttacctagaagtcaggtttcctattcatatggtagctctatttttagtttttttaggaaccttcaaactgttctccatagtggttgtactaatttacattatcaccagcagaatatgaaggttcccttttctccacatcctcaccaatgtttattattgcctgtcttttgggtaaaagccattttgactggggtgagatggtatctcattgtagttttgatttgcatttcttygatgatcaacaatgttgagttctttttcataaactgtttgccatttgtatgtcttcttttgagaaatttcttttcagattttttgtccattttttaataggattattagatttgttttcctatagagttgtttgagctgtttatacattgtagttattaatcccttgtc

SEQ ID NO: 147386 - DNA, 621 bp, Homo sapiens
aattctgactgatactaaaaaattaatggttgaaaataaataaacattttcaaatctcatggtaatgtcaaattttcrgtgctctcatatagtgaatatcagtagaaataagtgacagaaaattaccttaatgatcacctggtgtcttcctgccctgcttgatacatggggcatgcgtgatcaaataaagagcaatagagaattcaataaacagaccctctcaaaactgaagctcatttggtctgtctgactgttatgcacctattatgttagaaaacatattctttaaaatttttttctattgatcaaatgtcattgagagcatttctataaattatttaccagggaggaaagaacagctcatttatttttataaaacatacttgaagagaaatcctgtgataaatttcagggaaagcagagaaaataaagaggaaaaaatgttcatcctacatgcatacaacctcagctataatacttctgaacaaaaggcaatttaataggaaacaatagaatctttactttctatctactaatctaggtatagctgcctatacttaaatatgtggagagaaagctatcctagagaaagaattatacagattttaagcaaaatttata

SEQ ID NO: 147387 - DNA, 621 bp, Homo sapiens
aattctgactgatactaaaaaattaatggttgaaaataaataaacattttcaaatctcatggtaatgtcaaattttcagtgctctcatatagtgaatatcagtagaaataagtgacagaaaattaccttaatgatcwcctggtgtcttcctgccctgcttgatacatggggcatgcgtgatcaaataaagagcaatagagaattcaataaacagaccctctcaaaactgaagctcatttggtctgtctgactgttatgcacctattatgttagaaaacatattctttaaaatttttttctattgatcaaatgtcattgagagcatttctataaattatttaccagggaggaaagaacagctcatttatttttataaaacatacttgaagagaaatcctgtgataaatttcagggaaagcagagaaaataaagaggaaaaaatgttcatcctacatgcatacaacctcagctataatacttctgaacaaaaggcaatttaataggaaacaatagaatctttactttctatctactaatctaggtatagctgcctatacttaaatatgtggagagaaagctatcctagagaaagaattatacagattttaagcaaaatttata

SEQ ID NO: 147388 - DNA, 621 bp, Homo sapiens
aattctgactgatactaaaaaattaatggttgaaaataaataaacattttcaaatctcatggtaatgtcaaattttcagtgctctcatatagtgaatatcagtagaaataagtgacagaaaattaccttaatgatcacctggtgtcttcctgccctgcttgatacatggggcatgcgtgatcaaataaagagcaatagagaattcaataaacagaccctctcaaaactgaagctcatttggtctgtctgactgttatgcacctattatgttagaaaacatattctttaaaatttttttctattsatcaaatgtcattgagagcatttctataaattatttaccagggaggaaagaacagctcatttatttttataaaacatacttgaagagaaatcctgtgataaatttcagggaaagcagagaaaataaagaggaaaaaatgttcatcctacatgcatacaacctcagctataatacttctgaacaaaaggcaatttaataggaaacaatagaatctttactttctatctactaatctaggtatagctgcctatacttaaatatgtggagagaaagctatcctagagaaagaattatacagattttaagcaaaatttata

SEQ ID NO: 147389 - DNA, 621 bp, Homo sapiens
aattctgactgatactaaaaaattaatggttgaaaataaataaacattttcaaatctcatggtaatgtcaaattttcagtgctctcatatagtgaatatcagtagaaataagtgacagaaaattaccttaatgatcacctggtgtcttcctgccctgcttgatacatggggcatgcgtgatcaaataaagagcaatagagaattcaataaacagaccctctcaaaactgaagctcatttggtctgtctgactgttatgcacctattatgttagaaaacatattctttaaaatttttttctattgatcaaatgtcattgagagcatttctataaattatttaccagggaggaaagaacagctcatttatttttataaaacatacttgaagagaaatcctgtgataaatttcagggaaagcagagaaaataaagaggaaaaaatgttcatcctacatgcatacaacctcagctataatacttctgaacaaaaggcaatttaataggaaacaatagaatctttactttctatctactaatctakgtatagctgcctatacttaaatatgtggagagaaagctatcctagagaaagaattatacagattttaagcaaaatttata

SEQ ID NO: 147390 - DNA, 392 bp, Homo sapiens
ataattaatttctggaaataaaactgttggctcaaagtatctaaatttgtaacttttatagatacaggttgagcatccctaatcctcaaatttgaaatgcttcaaaaatctgaaagcatttttgagcatcaacatggtgccacaagtggaaaattccagacttgacctcatgtgacagattacagtcaaaatgcaggcacaygatgcacagtttattcaatgtccccaaatgaaaaaagaccctaccagccccttcatctgatatacatgttttccaaatgccttacaaagggtaatttaaaaaaatctgtttcctgcacaaaattattaaaaatatcatataaaattaccttcaggctatctatataaggtgtgcatgaaacaagcataaa

SEQ ID NO: 147391 - DNA, 596 bp, Homo sapiens
cagcagcattccattatcaaatggaagtggtatatacatgatcaggctcgagcaggttctgaaggcatgagtaacttacatggaataacttacatgaggaagtggctgaaatgcccatggtctccactcctgccttctctcctccagcctgcagtgatggcctcatggggaattccctatgatcagttgacagaggaagagaagactagggcctggttcacagatgcttctgcatgacatgcaggcaccacacaaaagtggacagctgcagcactacagcccctttccaggacatccctgaagaaggacagcagtgaagggaaatcttcccagtgggcagaactttgagtagtgcacctggttgtgccctttccacggaaggagraatgtccagatgtgcaattatatactaattcatgggttgtagccaaggtttggctagatggtcaggggcttggaagaagcatgattggaaaattggtgacaaagaaatatggggaacgggtatgtggatggacctctctgagtggtcaaaaactgtgaagatatttgtgtttcatgtgagtgctcactaacaggtgacctcagcagaggag

SEQ ID NO: 147392 - DNA, 609 bp, Homo sapiens
ctaggaatggaaggaacctatctcaacataataaaagctatatataaaaactcagcaaacatcgtatccaattgttaaggattgaaagttttttctttaagataaaggaacaaggcaatggtacccacttttgtcacctttattcagtacagtactggacacatgagcaaaaagaactaggcaaacaactaggcaagaagaaaaaataaaaggcatccaaattggaaggaagaagtcaaatcatttctcttcacagacggtatgatcttatatgtggaaatccttaaagaaaccgtgagaactagtatattaattttagcaaagtttcaaatggaaagtcatcacacaattttcactttcttttctatacactaacaatgaaagatttgaaaaaaatacattaaaaaaatctcatttacattagcccccaaataaaatacctagaaattaatcaagaaggtaaaagtttcatacaataaaaactacaaagcattgctctaagaaataaataaatggaaagwtatctttatgaattgtaatacttaaatctgctaagacatcaatactacccaaaacagattaaatatgatctttgccaaattcccaata

SEQ ID NO: 147393 - DNA, 616 bp, Homo sapiens
tggtcgtgtcttctttcttctcaatgaaaatatcagatcaatcctgctctgtcttcttaaaactaacactactcccttgagacagatacaattctggttgtatgactatatttccatacccttcttatctattcatttctttaaaacctcacttcagtgaaaagtttggaatttgacctaatcttgcttttcaatcgcatgacctactattatctagaatgactcaaatagcagcaaagacaatctacacagtatcaaatccacttcatttcctttctttctgaactccaaaaatcttcccaagtagaactccctacaaactcacttattcatgtcctgaatttggatatagggtttcccactctcaaacttaatattttatcctttttggtttcttactcagatagaaaacaactgttgtgacttcaacaatatctcaatacagttcaggcatctacctygtgcattctaatcatcccttcctctcctcactctccttgtaaagctcagttacaagttccacgttttaaacaccttcccttactaacatctgttatgccttgaattcagtagtttataaatcatttgcataaggatcatatgtaaaattgcagaa

SEQ ID NO: 147394 - DNA, 437 bp, Homo sapiens
tagtcataaggccaactataagcaatttcctttacctggcaaggccagcaatatactctcattcttccacctcaagggtatataaactctccagttctatgtcatgattgaattcacaggaatcttgaacttctttcttttccataagctatcacacactggtccattaaattgattactttatgctgattggaacgagggatcaaggagtagcaactgctgtagacttactggtaaraccattaggtgctaaggatgttaaataaatctcacatatctcaacatttcaggagacttgcacatcagtgaaaatttcagagggcccgtggtgtggggcaataccctctaaggtgaagaataagttgttacatctggcccccaccacaaccaaaatatagatataatgactaatgaatcacttcaagttttggagacag

SEQ ID NO: 147395 - DNA, 506 bp, Homo sapiens
attatccctgcatctcaaaatccttaatttgatcacatctgccgaagtcccttttaccatttcargtaatatatattcacaggttctagagattaaaatgcagacagttttggggggccatttattcagcctaccaacttcaggttttgcaaattgtgggccgcatgattctgcagaataccattcacattatgaccatcaaagatatctgtgtttattatgacaattttctagcaagtggtaagaaagtcttttgaggaagaggtattattttacaattcacacaaaggtaccatataagccagcagaagccccataatctaaagtgattaatactatcacaacacaagtgtaacacattcattccccaactggggttggagaggtctattatagagtgttaagatccttgcagaaccaacaataatatatttcaataacatatttattaggtatgtactacatgccaggcgccatactagacactttataccctttatctagaa

SEQ ID NO: 147396 - DNA, 506 bp, Homo sapiens
attatccctgcatctcaaaatccttaatttgatcacatctgccgaagtcccttttaccatttcaggtaatatatattcacaggttctagagattaaaatgcagacagttttggggggccatttattcagcctaccaacttcargttttgcaaattgtgggccgcatgattctgcagaataccattcacattatgaccatcaaagatatctgtgtttattatgacaattttctagcaagtggtaagaaagtcttttgaggaagaggtattattttacaattcacacaaaggtaccatataagccagcagaagccccataatctaaagtgattaatactatcacaacacaagtgtaacacattcattccccaactggggttggagaggtctattatagagtgttaagatccttgcagaaccaacaataatatatttcaataacatatttattaggtatgtactacatgccaggcgccatactagacactttataccctttatctagaa

SEQ ID NO: 147397 - DNA, 497 bp, Homo sapiens
cttagctctttccaaattcagcagggaattcatctaggtcttttgaggaaaatactgcagttgaaaaggaaatcaaactttatggttacagttggatactgaatgtccctgaattcagttctgaaaggtacaaggtgggtggtagaaagggatacttatttatcaggacgtcttagaaacaggacaaggaccttgtgaaaaaagcacagaactgtgtgtgcttccaagagacagggagatagatggtcttgaccttgagagataaaactcaaggaagaaaatcamgagtcatttacctgcttcctaaaagaaagaagttccagaacccaggaacaaaaactgacacagtgtaggtttcagggttggacagagctgggttcaaagcccaatattaccacttacttgctatgtgaccttgagcaagtatttgtacttttctgagcatcagatgtgtcctctataaaacagaagaaacaaaacccaaaagataatgaagt

SEQ ID NO: 147398 - DNA, 497 bp, Homo sapiens
cttagctctttccaaattcagcagggaattcatctaggtcttttgaggaaaatactgcagttgaaaaggaaatcaaactttatggttacagttggatactgaatgtccctgaattcagttctgaaaggtacaaggtgggtggtagaaagggatacttatttatcaggacgtcttagaaacaggacaaggaccttgtgaaaaaagcacagaactgtgtgtgcttccaagagacagggagatagatggtcttgaccttgagagataaaactcaaggaagaaaatcacgagtcatttacctgcttcytaaaagaaagaagttccagaacccaggaacaaaaactgacacagtgtaggtttcagggttggacagagctgggttcaaagcccaatattaccacttacttgctatgtgaccttgagcaagtatttgtacttttctgagcatcagatgtgtcctctataaaacagaagaaacaaaacccaaaagataatgaagt

SEQ ID NO: 147399 - DNA, 426 bp, Homo sapiens
tttccttctttctgctgttctgtacatgtgagcttttctcaggatcagtcctagaccatcttctcttctcccttggaaagccccacatatccaattgttgttcacaaagtattttatgccacgactcccaatcttgttcacacagtctgtcaccagttaagagacaacttactctgcaaacattctcacattcatgcmtaccccactgccattagtccacaggtacacatgatttcagtgtctggacagtgcgataatctccagatatccagatccaaagactcacgctactgctacatcaaaccagcaatgactgccctgcctagagagtttaaagtctttattgttctagcttggtagcagcagttctgtttagctgctactacctcccctagggagaaaattattttccttattttctcacgc

SEQ ID NO: 147400 - DNA, 252 bp, Homo sapiens
aacttcacagactaggtgatgtggctgaaaaatgcatagttatcccaggcatagaaaggcatgtcgggcaaaaaataaaggtatctcagtggcttagaattctgaatgagsctaatatgttcaatggaaaaagcaggaagtttggggttgctggagttttcagggcaaaatggaagttatttggacataaaggtggagaaggagttttggggccagatggagacactcagcctctatgctgcaggcagaggg

SEQ ID NO: 147401 - DNA, 470 bp, Homo sapiens
tttactgctggaagcacagggagacaccaggacattcattcttctgtccttataatgtcagaatgtacctggctctctcttaaacttgggggtctttccccaatctagccacaatcaggctgggtgacttggctagtggaaagctcaaggttaaagtcacactcagcagatggtccatatgccaggaaaaatggtgctcttgtgtagcttaccatgatgcagggcctcscaccccttcactgctgatgggcaaggttggtggcatgtgcctatatccttctggatgtttccattgatcatctcatcttccagggtgtgggggttagttttatgtatcaacttggttaggctgcagtacctagttatttcatcaaatacaaatctaggtattgttgtgaaagtatttcatagatgtgattagcacctaaagtaaagggggttactcttgaaaatttggatggacctcatct

SEQ ID NO: 147402 - DNA, 558 bp, Homo sapiens
gacatccttgctaacactttgttaccatccttttactgtagctctcccaggtcactctaggtgtgtctctcataaacagctgataggtggtttttaaaaaactcgttcattgagtctctacctttaatagattaattctggatgttcactcccatttttttaattaaagaaatacaattaactttttctagttcaaaatataaactctgtgttaggaaacctggactctaatcggtatttttgcctaggatgaattctgtggcctagattcaatttcatcctctctggacctcctattttcttatctattaaatatgtaagtttgagagactctcctaggccccttccactctgacagcttgtgattcccaggctcagtccctatctctccttccayaactgccctcatttccccactgcccataccgaggtcgtgccttagagaccatccttgctcttcttcttagagaaaaatcttttgcttctcatggtgatcaggggcttggggtcaggctttggggggcagaatgcacagaagtggggaggaaaagattggga

SEQ ID NO: 147403 - DNA, 456 bp, Homo sapiens
tctaaagtttggcaatttatttctcagaatatattcatatcagaaggtaaacatccccttgaatgttatctccttcaagacatcagcatagcagtccatgctggtgctttggggacacctattccaatgaactgtgctttgggagatgtcttcagagtctggcatctgccgttttaaatgcctagtataaaacatctgccttgcctttgtaacagggaaaatgacccttgttcacagaacaaagaaagattgggcaatgttacatttaagggtgaaggccagacccccttttccacctgtgaaccaatcagtctggcaatggcaaaagccaacaccaaccaagcttcccttgatgctcatagtcaggccagtrgctgacctcactgttctctcatcagtcacaacacacacaccagcactttgtgcaaaatctgctatcccccaatagtggacagg

SEQ ID NO: 147404 - DNA, 571 bp, Homo sapiens
aatagacatgcttcataggaatagccaccaggtgcaagtggtaggcactgcatgaagtgctctgcacacatgatctcttttattgtcttgggatagtcctgtgagtaggtggtattaactccattctacagatgagaagactgagtctcagcattctgagactttacagtaaatggcagagacaggatttgtactttggtttttgagactctgaagmccatactttccacaccagagagataggtcctcaatgacagaagaaggggttccaagggctttagatgaagcttggaaggaaagtctcaagtgttgtttctcaggtcacagttcttctatcagaagtgaagctagtcgatctgctgagccagaggctcaggcccctgggctggggctggggctggctgctccttctcgggggagtgggagacctggctgatgagatccatatgaccttgtcagagagcaccacggagctgcctgggctggggtaagacagggcctctgctttctgggtgatggtgaggagcagggaagaagatgcacaatactatttttttcccaggtctggcag

SEQ ID NO: 147405 - DNA, 549 bp, Homo sapiens
ccccctgggcttcaaatgatcctcccatctctgccttctgagtagtgctatttcttattaatgtttatatcagttggttgattactagtcgtgaatagtaatatttctttctctttctctttcaacaggctgtagtgctgtgctgggtactgtgaaktgtggttactcttaagcatatttagaaatccaaggagatactattttggattttctataaactaatttcacttaactctctccaagtaaaatcaacagtttctttctactctaccacagtttgtttctcttgaactcttttttccacttctaacccttttcctggctccttttccttcatctttttctctaagaatgcttgggaaggttggcttggagtttcttcacctctgtggccagaatggggtatgagactccatgtcttcagtccccttacaacttaatctccttcttcaaaaatcagagccactgcctagaattacatgaagtcttcactgttggtgacataatttaagatgctgtgagaaaagaactagaatatttgacaccttg

SEQ ID NO: 147406 - DNA, 549 bp, Homo sapiens
ccccctgggcttcaaatgatcctcccatctctgccttctgagtagtgctatttcttattaatgtttatatcagttggttgattactagtcgtgaatagtaatatttctttctctttctctttcaacaggctgtagtgctgtgctgggtactgtgaagtgtggttactcttaagcatatttagaaatccaaggagatactattttggattttctataaactaatttcacttaactctctccaagtaaaatcaacagtttctttctactctaccacagtttgtttctcttgaactcttttttccacttctaacccttttcctggctccttttccttcatctttttctctaagaatgcttgggaaggttggcttggagtttcttcacctctgtggccagaatggggtatgagactccatgtcttcagtccccttacaacttaatctccttcttcaaaaatcagagccactgcctagwattacatgaagtcttcactgttggtgacataatttaagatgctgtgagaaaagaactagaatatttgacaccttg

SEQ ID NO: 147407 - DNA, 571 bp, Homo sapiens
aatagacatgcttcataggaatagccaccaggtgcaagtggtaggcactgcatgaagtgctctgcacacatgatctcttttattgtcttgggatagtcctgtgagtaggtggtattaactccattctacagatgagaagactgagtctcagcattctgagactttacagtaaatggcagagacaggatttgtactttggtttttgagactctgaagaccatactttccacaccagagagataggtcctcaatgacagaagaaggggttccaagggctttagatgaagcttggaaggaaagtctcaagtgttgtttctcaggtcacagttcttctatcagaagtgaagctagtcgatctgctgagccagaggctcaggcccctgggctggggctggggctggctgctccttctcgggggagtgggagacctggctgatgagatccatatgaccttgtcagagagcaccackgagctgcctgggctggggtaagacagggcctctgctttctgggtgatggtgaggagcagggaagaagatgcacaatactatttttttcccaggtctggcag

SEQ ID NO: 147408 - DNA, 488 bp, Homo sapiens
taatgtcaaacctgtctttctgagaatacagtctgatacttagtgagagagtttggacaatcatggcatctccaatctattaaaacatggtgttgcttctgcaaataactaatctcatctggtatgggtgtcgccctaaaatttagtttccatcacaaccacatcctgaaattttaaagaccattatcagcattcttccatgcacaaaatccatctccttcatctcgttacttaccaattcaaaaccaggtacaaaagtaggagactcattttcagaagaaaggacrgcaatgccaagagtctatactgtagtacaagatggtccccatcaagcatggcaccatcttgccctcagagccccttctgagagaatttaccccagtcacagttactgttgaagtagcaactctctaccccactctggctccagctggatagaagtgtgggcacctgatccaaggacaacaaacaaatgcagatgacagcca

SEQ ID NO: 147409 - DNA, 499 bp, Homo sapiens
ctatagactattgatatctttaaatattgattattttcacccattcactcaggttaagcctttcagcaatactttatagttttctttcaataagtttattgctaggtattttatcaattttgctgctattgttgataggactttttctgttttctagtatattctacggtggatatggaagcaaataatttgtttgttttacatatagacacccttctaaagcccataattcattctaaaatatttttactttattgttcatatgtttagatgtataatcatatctcctgaaaatgcagtcacgcaccacataaagacatttcagtcaacaaaggatcacatatataacagtggccctgtaagagtatgatggagctggaaaattcctatcacctttagctgtcctaaygtcatagcacaaccccaatactcatgtgtttgtggtgataacagtgtaaacaaacctactgcgctgccagtcatattaaagtctagcata

SEQ ID NO: 147410 - DNA, 552 bp, Homo sapiens
tccaatctaagcaacactcaggtcagggttacagtgcccattttgctttttccggtttcccagagaatgtatttttaggggagagcagagatggttaccatccatcattttggaaagtcatgagatttacagagatagatgcctaaacaaaggacaagcgtattaacaaatcgagctgtccaaaagtcagggctaatgttaaccaagatgagcrttactgcgattccatcaagatgtcctgttatttatttaacttttccattttcattttttatttgggtaagataattgcttatgataagccttgggtgtggagagccggtgcatacagagtggcgaggcaagcttcaatctgcagtctcgagatgcactggggaagcgaatcgatgtattaacatattgaaatgatctcaattaatgtcctttagtacttttctttaaaaaaagaggacctctccaaagtgaatggactactccctaccaacagggaaaagaaagcctgttaggagaaaaatgtgcttacctgcctgaggaaagaggatctcagaattc

SEQ ID NO: 147411 - DNA, 558 bp, Homo sapiens
tttttgctttgtcttatgctttttcttttgttttcttattttggtctttattttctaatatttgttatakatttcacatttacttctctagtttttatttctagtatctgttacctttatgtttttttcaacagtgtgctaaagtgtgtatttccctaactgtcagattcaaagatgaaaagtatcttttgagctcctcataatttaaggtcagaaatttaggacccaaggaagggtttttaatgctgaaaataattctaagagggtaataaaaataattgtcttggtatttggttatattatccaagttttaaactctagattattatgattaccttgtattatgtttgtatttatatcttttaagaataagacatttgtattcacttttacaatcatgcatttaaaaagtaatttattccttaattttggagttacaatcagccttttataaaagaaaggtagtagagaataatgattaggagaatgactctaatgccatactccttgagttcaaatactggttgtgtaaccttaggtaagttacttaacttctct

SEQ ID NO: 147412 - DNA, 553 bp, Homo sapiens
attctgggctccagaaagttagaacgctaaagccaaagagattccctgactctggaaccttccccaagccaccatcatgggtccaatgtctttgacaagctggacgttccccaggctatgagtttgggacttgctgggtgttcatagttccctctgatcagcagcagacaacagaaagaaatgccaccaagcctgggagggctgctgaacatggtgatggaggccraaggtactgagcctgtggtgtaaatctggctgcaaatggaatttctaagtccaaaggtgcaactgaaggacatccttttctttttagaaagtgggtccttacctgacaaggactccaagtaaaacaaacacaagcaaaaggcctcctcctagccaccctcagccagaaagaaggacaggagggtagagttagaattcttagtcttttgggcaaaatgcagggggattatctctacaacttgaagaggacccagaagaattctgggtcctcatttttgttcattggaggtggttagcttcctagagctgccgtaacaaatgaccacaa

SEQ ID NO: 147413 - DNA, 575 bp, Homo sapiens
aggtccacccttctcccttgtgacctcatcttaactaatcacatctgcagcagccctatttccaaaggtcactttctgagtagtaagggttaggacttcaataatatgaattttgggagacacaattcaacctgtatcattggtataatggaaggtattacaatttatgagccagaaattactttttcttgtctcactattggtgtccagtgttatagaagaataagtaaatctttaaaataccttttccccccctgtttatttaggacctcattagacttgttaatgccatttgaaaataactggtgctatcagaatctagctttccatccccggcgatgtatatataaaagggcctttttcttattagttaaagaaacaaaaattcatttaaaagctgaaagtaatgtaaagcatcagagtactattgaatggcaaagctaaaaaatgtatgctaattcaggtactgcagaaaagtgaactcaaaataacatgatatttgtttctttggagtagaagacatcattgggaaaattrcactttcttccatctctcaccagaaagactcatgctgg

SEQ ID NO: 147414 - DNA, 556 bp, Homo sapiens
ggtggccagcaaagagagagcttgtgtagggaaacttccctttataaaaccatcagatctcgtgagacttattcactatcacaagaatagcacaagaaagacccaccctcatgattcarttacctcccaccaggtccctcccatgacatgtgggaatcatgggagctttgattcaagatttgggaggggacatagccaaaccgtatgaatactttcatctggttcatggaaactgtaattatagctgcatgctctggagacaaaatgcctgggttcaaattttcatgtgtctagttcttagctgtgtgaccttacccatcagatttcccctaatctctaatcagcacctgtaaactagaaataataccagtaataacctcatagggattttagaaataccaaatgggagaatccataaaaagtgtttagctcaatacctggcccagaataagcattcataatgtattctagtaattgtagaatagcagcaggaggagtaaaagaataaagcaagatgtcaggcagaaataaactactctcgaatcctttctttaaa

SEQ ID NO: 147415 - DNA, 556 bp, Homo sapiens
ggtggccagcaaagagagagcttgtgtagggaaacttccctttataaaaccatcagatctcgtgagacttattcactatcacaagaatagcacaagaaagacccaccctcatgattcagttacctcccaccaggtccctcccatgacatgtgggaatcatgggagctttgattcaagatttgggaggggacatagccaaaccgtatgaatactttcatctggttcatggaaactgtaattatagctgcatgctctggagacaaaatgcctgggttcaaattttcatgtgtctagttcttagctgtgtgaccttacccatcagatttcccctaatctctaatcagcacctgtaaactagaaataataccagtaataacctcatagggattttagaaataccaaatgggagaatccataaaaagtgtttagctcaatacctggcccagaataagcattcataatgtawtctagtaattgtagaatagcagcaggaggagtaaaagaataaagcaagatgtcaggcagaaataaactactctcgaatcctttctttaaa

SEQ ID NO: 147416 - DNA, 623 bp, Homo sapiens
accaggcctttgtattgctcctgtgtttctaacttgttgcctggtatggcatcgtgagttatgggccaaggtgtttgtaggggagggtgtgagagagagagagagatcgtgtgtgtgtgtgtgtgagtgaaatactgcatctttcactctctgcatctctgcatcatcagttcatcctgttggtgaggggaacacgtgatgtaagttcctagaaccaagaagcctaagaagctttacttgttttcagcttttatgtagttttaaggtctccttcctgtgcccctgaagtccctctctaaaactttacaatacttggttttcrtaacaatttttaccaggaaataaagagcatgccatgagttgatcaacaatgattttgttagagttaataagaacaccaggctccagagaatgccaagaaagtcctcctgctcctaagataccaatgaaacaggtgatgcctggaggaaatctcagtggcttccccatgaagacagaagcagacttgtttcagcctcgaagagaggattgacaatagtcagcctaaaatatctgagtgcgtgaaccacacataaatggttcctttgtctctgtcatgtcaggatgccattcccaaggcatca

SEQ ID NO: 147417 - DNA, 194 bp, Homo sapiens
gtcagtcaccaaacaggtacaagaggtcagcaggcctttctgaggctgctttgttrtgactagagcttgccaagcatcatttcaactgaattagtgcttgccaaatgattttgagggatgtgtccatccacatctcttcctacacacacacagaggcaaaaggaaagagaacattgtccatctgcctgcagatt

SEQ ID NO: 147418 - DNA, 609 bp, Homo sapiens
agcctttaccttactaaacacctcaattaacatctctgtctaaagaaggagcacagactctggagttgggatgtccaggttcacatcccagctccaccacttaccatttgtgacttcaggcaagttgtttatcttctctgtgtcttggtttcctcatctgcaaaatggggataatagtaaaacataccatatagtgttattgtgaggattaaacaggatcaygcattttaaataggacatattttagtgtatatggtaaacagccgtttctattaggatgaccatgcattaggactagtaacaatatagtaaaagttgaggttgtggaattacattaccaatattcagggctacagtatgaaaaaaaacctcttgtttaacttgtatcaatattactggatatgcttatcagagtaactcttctgaaaagagggaatctgcccctgaaataaattctagcctatagcattagggccacaaagaatttacaaatattctcagaacctctgcaaaataaatatgtaccaatctgaaaagaaaatattgaattagatatgccaagatactgacagcagttatttctgattagtgtaattatagatttttaaa

SEQ ID NO: 147419 - DNA, 609 bp, Homo sapiens
agcctttaccttactaaacacctcaattaacatctctgtctaaagaaggagcacagactctggagttgggatgtccaggttcacatcccagctccaccacttaccatttgtgacttcaggcaagttgtttatcttctctgtgtcttggtttcctcatctgcaaaatggggataatagtaaaacataccatatagtgttattgtgaggattaaacaggatcatgcattttaaataggacatattttagtgtatatggtaaacagccgtttctattaggatgaccatgcattaggactagtaacaatatagtaaaagttgaggttgtggaattacattaccaatattcagggctacagtatgaaaaaaaacctcttgtttaacttgtatcaatattactggatatgcttatcagagtaactcttctgaraagagggaatctgcccctgaaataaattctagcctatagcattagggccacaaagaatttacaaatattctcagaacctctgcaaaataaatatgtaccaatctgaaaagaaaatattgaattagatatgccaagatactgacagcagttatttctgattagtgtaattatagatttttaaa

SEQ ID NO: 147420 - DNA, 609 bp, Homo sapiens
agcctttaccttactaaacacctcaattaacatctctgtctaaagaaggagcacagactctggagttgggatgtccaggttcacatcccagctccaccacttaccatttgtgacttcaggcaagttgtttatcttctctgtgtcttggtttcctcatctgcaaaatggggataatagtaaaacataccatatagtgttattgtgaggattaaacaggatcatgcattttaaataggacatattttagtgtatatggtaaacagccgtttctattaggatgaccatgcattaggactagtaacaatatagtaaaagttgaggttgtggaattacattaccaatattcagggctacagtatgaaaaaaaacctcttgtttaacttgtatcaatattactggatatgcttatcagagtaactcttctgaaaagagggaatctgcccctgaaataaattctagcctatagcattagggccacaaagaatttacaaatattctcagaacctctgcaaaataaatatgtaccaatctgaaaagaaaatattgaattagatatgccaagayactgacagcagttatttctgattagtgtaattatagatttttaaa

SEQ ID NO: 147421 - DNA, 472 bp, Homo sapiens
agtatgagtaacctgaatgaggagaccattgaacaacctcacaatctcatcttctctagtatctgtyagaaaagggctcaataaaaacagtgagattactaatagctctaaagttactactgtatgatttactgcctgtcataaaaaacaacacgaggataggcaatcttgaattccctttctcccagaatatctatagcagtaaatctgttgcctttccaacatttattctatggcagttgttgagatggaattaacccctccatcagctccagggctgggctctgattgctgtaatccagcaaattaatctcaccctcttgccataagtattggttcaagtaacccaggtttaagccaatcaatgttccaatcagcaggaatctcagaacttttgttagagttaaggaaagcattctttttttttttctggataattaagaggaagcacatggatctaactgtactgaca

SEQ ID NO: 147422 - DNA, 464 bp, Homo sapiens
gtgtggttcaataggtcacatgcctaccctttggaccaataactattggaatggacaccatgattggttcagtctgggacatctgactatctctgcggacagagaagaaggatgccatgatagaattccccaaaagagtcccatgaagtagaaaaagagttctcacacasagaaaaggaaactagtacaagatataagacccaaaaagctattattcctcactgtagaagaaaaaaagtctagcattttctgaaggcattttccatttttatttttattttgtttctaggtttcaccctacagattttgtatgtgtggtggcttttgtgcagacccactgtcggtctccttggtaaagatagtaagctgaggaaacccagccaactgaaaagtaaaactaatgagcagtattttaaaggtggaatctaagctgctatcacaaaggtctcccaatattgcgtggc

SEQ ID NO: 147423 - DNA, 554 bp, Homo sapiens
gtagttgagccttagtattgactgggaggaatgaccctgggtstggggactgcagccttcttggtcttgctgcctctcccttgactgcagttgtgggcctaatgcacaatccaactgctttccaaaaaaccgtttttcatttgtttggtttttaaccctgatatcttcccttggctgcaatgagttttcaccaatacccctaaggactacagttcttcgttgccctttattctaaagaataggttttattgagtagtggagagggaggaaggtctgtgtggggtttctttcctttcctgcacagctactctccccaacccccagtctgcaccacaaggtcacttctcagggctttgtccagtcttctctctgagtactcactgggcttcgtggtgcaagtatgcaagagggcgtggactccagcctcctcagcccccagtggtttcacattgtcctgccagccctcactgagctttcatggatgtacagctgttctagctgaactcttcttacctttgtatctacttgactgggccctcacatttcttctttca

SEQ ID NO: 147424 - DNA, 554 bp, Homo sapiens
gtagttgagccttagtattgactgggaggaatgaccctgggtgtggggacygcagccttcttggtcttgctgcctctcccttgactgcagttgtgggcctaatgcacaatccaactgctttccaaaaaaccgtttttcatttgtttggtttttaaccctgatatcttcccttggctgcaatgagttttcaccaatacccctaaggactacagttcttcgttgccctttattctaaagaataggttttattgagtagtggagagggaggaaggtctgtgtggggtttctttcctttcctgcacagctactctccccaacccccagtctgcaccacaaggtcacttctcagggctttgtccagtcttctctctgagtactcactgggcttcgtggtgcaagtatgcaagagggcgtggactccagcctcctcagcccccagtggtttcacattgtcctgccagccctcactgagctttcatggatgtacagctgttctagctgaactcttcttacctttgtatctacttgactgggccctcacatttcttctttca

SEQ ID NO: 147425 - DNA, 544 bp, Homo sapiens
tgactttccctccatttccgtctaactgttcctagttccaccctcctgtttcctgggaccacttcccccacgccccaactacttgcatgcacgtccttggtctccagcctgctcagggggagtggggacgggggaactcagacaaaaacaattcatatccagattttgaataggacatctattttcatttacagttaaatagtaaaatataaaaataatattttaatacatatataactcacggttagggaatgtagtagactgaatggcagcccctaaaatgtcaggttcaaacaactggaatttgtaagtgttatcttatttgggaaaagagtctttgcagaggtgartaagctaaggattttgcgatggggagattttcctggattatccagatgggccctaaatgctgtcacatacatcctctgataagattcatgtgacgaggcagagggcgattcgatacacatggaataggagaaggcaatgtgaccacagaggcaaagactggagtgaggcagtcgggtggaagaatgtccgcagc

SEQ ID NO: 147426 - DNA, 624 bp, Homo sapiens
gttctgtattgggaaaaataaattctatgggagtgtggtagatttaaaaaatatgtccacaagtgcctcgatgctcctctctttaaaggatggagcctaacctaatctctttcccttgagaatgggctggacttagcggctttcgtctcacaaatagaagtgggggtagcaatggtgcaggagcttggagattgaatcaaggggcaatacagcctcctcctggctctctccctcttagctctcttgctctaaggaaagccagctgccatgtcatgaggacattcaagcagccaagggagagcccacctgcttaggaactggagcctcctgccaatagccagagagaaactgaggtcttcattgatggtgaacagccacrtcaatgaaccattttggaagttgatctttcagtcaagctttcagatgacatctctttcttttcctcattttaaaaattgtgggcaagtacacataacataaaatgtaccgtcttgaccattttaaagtatatggtttagtggtattggatacattcgtcgtgtagtgcggccatcatcaccattcatcaccaggactcctctcttctagtaatactgaaactctatgcccattgaacaataactc

SEQ ID NO: 147427 - DNA, 488 bp, Homo sapiens
aaccctggggctggaatggaagggtgccaggaatttatgtctccagtaactctgaggaacgcagttttgcattaaaattttaagtgrggctgaaattcagacagaaaggattttgccttctccaagaaaactgtgataaataactgcagcattgacttagggaagacacaagtagttgaactagaaagtggaactggagttgactctaaaaacctaatttatggattaccaggttcccagtcaaaatgactaataattctggggctgtaattacccacctgtaggctttacttttttccctcaaatttctactttttttttgtattttacaaatttttaataatgaacatgcactccttttataatataaaaaaatccaattaacttaattagaaaaaaattgcccaccaggtgatgggaggtttcttgttaattcatcacccggcatcatactctgcccaccatggaacagttatttttgtggctaa

SEQ ID NO: 147428 - DNA, 578 bp, Homo sapiens
ttctgattactgagtttttaccctcataactttgacaccctaggtgagttctccacttgcctcatagttgttccagcccaatctagaygcatgctttcaaaaagagtaatctgacagtagcatggaagatgattcagaggggaggctgagaagagcaggctcagagaaggatatagacaagaatggatcaagacccagatgacttttggaggctgagctgagctcgtgccactgcactccagcccaggtgacagagctagaaaaaacactcaaataagcgaattgacaataaggatggaaacaatggggagagtgagaatctatatgatttggcaattgtgtggtaggagaatgatgacaaggactccaagacaatgccatgacttaaaggagttaaagataactcgggaactgtgccaccttaatgagaaaagaaaagtcaggagaaaatcctggtttggagggatgatatcaagtgtgaggttaggggtatgagacagcagcgtgcatttgaggggttttagccctatttttaggctattgctattgttacataacagctttagaatataaaacat

SEQ ID NO: 147429 - DNA, 578 bp, Homo sapiens
ttctgattactgagtttttaccctcataactttgacaccctaggtgagttctccacttgcctcatagttgttccagcccaatctagatgcatgctttcaaaaagagtaatctgacagtagcatggaagatgattcagaggggaggctgagaagagcaggctcagagaaggatatagacaagaatggatcaagacccagatgacttttggaggctgagctgagctcgtgccactgcactccagcccaggtgacagagctagaaaaaacactcaaataagcgaattgacaataaggatggaaacaatggggagagygagaatctatatgatttggcaattgtgtggtaggagaatgatgacaaggactccaagacaatgccatgacttaaaggagttaaagataactcgggaactgtgccaccttaatgagaaaagaaaagtcaggagaaaatcctggtttggagggatgatatcaagtgtgaggttaggggtatgagacagcagcgtgcatttgaggggttttagccctatttttaggctattgctattgttacataacagctttagaatataaaacat

SEQ ID NO: 147430 - DNA, 483 bp, Homo sapiens
ctgtcattcattcattgaacaaatatttgagtgctttctatgtggcaggcatggtagtaggtgctggggtacaacattgaataacacaaagcccttggcttctttcattctagtggcagagtggagagacagtcagcaaacaaataaaccaatasatatgaactgtattagatggtaataagtcctagagagaagaatgtacaaggttaggaagatgggggtgctgcaggggggtgcaggtattgctcttttacatggagtagtcagagaacttcccatctggagctacgacttgggattgtactttgtacaagtccataggttgcttttctcctcatggttattataggttgtgttgctgtgaaaactttctggcagataggatcaaagtacttgattaagagggtgcccttttttgaaattgtcctttgggactagttgtaggccttgataatgctgagattttagcagctccgtggagga

SEQ ID NO: 147431 - DNA, 587 bp, Homo sapiens
tccatttcactcagggtgccctgaaccaccacataagaaagccaacggtcctgaggccatgctgtgagggggcccaaggcacatggagaggcccwgggcaggtgctccagtccagagctggctccagccaggtccccctgccaccatgtgagtgaatgagccaatcaccacccagctccacctgccaccatgtgagtgaacaagcctcccctgtgagctgcccccagccttggaacttccagccatgcctgccgtgcctgtaaattctcaacccccagattctgtgagcataacaaaattgttgttttaagccactgaggttgggaaacatttgttacatagaaaggtaacaagaacatatgctatggcttcaatcaacatttttttcagtacctattatgatggacactaggacagaaactgtgagggagagattaataagacatagttgacaagttgtcctaagctgacaatcctaaaataaatacacataactaatcattttaatggtatacgatagcagtgaggtgcaaagtgcaaggttaagccctttcagaaagtgaaagcattcaaaaagccttcaaaaa

SEQ ID NO: 147432 - DNA, 614 bp, Homo sapiens
gtaataagggattgttttttccttgcactttgtgttttctaagtattctatagtctgaatgaattagattcataattaggaccaacagtcataagcaatttctcagaccacctgcctcataaaacccaaaaaaagaagtcagagaggggtgaatattttggtacagatgaattcaggttgtgtaagtggagaggagggaggtggccaaggagcctgaagtgggggaggggggctgatggtgaaatagggaatgggtggagagagaaaatgattgcaaaattggctggagccagcctggtcaggtcaactttgcaggtgtgtgaagtgtcaaatggttaatcagttgccctctgtttgagctgcttaatgcacaagggcctggttgaacaggtttgacctcatttactttttcttaaagctgtttagccactttcctaaaaactcctattttctgagttattaaactttccattccatgttgatcccttccgagccctctaacgcatctcttctcttgcttcttccaactggatgccttcatgaggcattaacagrtactgtgagccctgatgaaaatcatcctttcagggtacaaggaaggcacctgaatgaca

SEQ ID NO: 147433 - DNA, 545 bp, Homo sapiens
aggcacctgaatgacagatggttggaggaatcttgagaaagcagtttaggcattaacatgcaggctgtcgctgacttacacagagccaaggacgtgacatacagcatggggccatttctaaatccccactgaggacaagggtcctggagggaatgsgatttggaacaagatttgggctttgaacattcgctacaggctctgacaaagcagtgatggttcaaaagcctctgccccctggtggcaagccctgcccagatgctgttaaggggctctccaggcacgccctcctaattaggggcaaaatcagagaagcctctttggaagaagacaaaaggcacaatgagatgcggtctcctgaagtagaggctttctctctggttatcacctgaaacaggaaataaggactgagtacctgctcaattccaggcactagccaaatctgcagcaaactagcatttccaaaggtgtcttcttactttaatctcacagccaccctgtgagggaagtgtacattccccatttcgctgatgagatgagcaaactga

SEQ ID NO: 147434 - DNA, 583 bp, Homo sapiens
gcctgcacttcttggtccaaaaggcgcagggggatgggggagaggcaccggggtcatggtgcaggctcggctgttgagcctcattccccaaacacaatgtgacaggtatcaatagttctggagttgatcatttcacagaaaggaaactgctgtcaacctgcccaaggccacacagstagtcctggataaattgacttaaagaacccaggtctctgattcccaaatcagtgctcttacccctcccacgccacctctctcttctaaagatccacccaatggaactgccccagggctggtatcccagctacttctccattcatgccgcaggtcaatgattcagggcggacactcctcaagtgaccttcagaggccctgactcactcctccgacagtcctttgtgtctggactcccagccgctcctcagcagctctgtcctcttttgtacatttattactgtcagcctgaggctagcaggaggtctcaatgcctggtgatctgaggccagcctgtcccaggccctcccagtcccgtgaggtcctcctggggatgcaggcacagcgactgacaaggataaggagcaga

SEQ ID NO: 147435 - DNA, 622 bp, Homo sapiens
agagttccctcatgtcttctacccaggttgaagtccagcaaaattgcgactgtcctctttacaacttgcgagaccacactgcttctgcatttgcctgttgtatgtatgagatttacacttgttttaragcaacattttgtttcagttgggctggtggccatacccggcactagccggtcaatagtgagatggctcctcatggaggaggcttggcttgaggctgagggtctttaacccacatatacaagagagttgccactaagggatggaagccaggctaataaccaagtgccacacagagttcctatctgtccctcctcaccatttttggctggcaggatttgagcattttagggcttgggaagatagtattactaaatctactaaaatacatcacccatccttatagactttggccagttgctgagcaaattaacttcacaactgaagtgggccatactggcctttgtggtcccccactcctcttagaatttgtgagcgtggggcctactggagggtgggaggtgggaggagggggtggatcaggaaaaataactgatattaggctcaatatatgggtgatgcaataatctgtacaaaaaactctcataacacacattta

SEQ ID NO: 147436 - DNA, 622 bp, Homo sapiens
agagttccctcatgtcttctacccaggttgaagtccagcaaaattgcgactgtcctctttacaacttgcgagaccacactgcttctgcatttgcctgttgtatgtatgagatttacacttgttttagagcaacattttgtttcagttgggctggtggccatacccggcactagccrgtcaatagtgagatggctcctcatggaggaggcttggcttgaggctgagggtctttaacccacatatacaagagagttgccactaagggatggaagccaggctaataaccaagtgccacacagagttcctatctgtccctcctcaccatttttggctggcaggatttgagcattttagggcttgggaagatagtattactaaatctactaaaatacatcacccatccttatagactttggccagttgctgagcaaattaacttcacaactgaagtgggccatactggcctttgtggtcccccactcctcttagaatttgtgagcgtggggcctactggagggtgggaggtgggaggagggggtggatcaggaaaaataactgatattaggctcaatatatgggtgatgcaataatctgtacaaaaaactctcataacacacattta

SEQ ID NO: 147437 - DNA, 622 bp, Homo sapiens
agagttccctcatgtcttctacccaggttgaagtccagcaaaattgcgactgtcctctttacaacttgcgagaccacactgcttctgcatttgcctgttgtatgtatgagatttacacttgttttagagcaacattttgtttcagttgggctggtggccatacccggcactagccggtcaatagtgagatggctcctcatggaggaggcttggcttgaggctgagggtctttaacccacatatacaagagagttgccactaagggatggaagccaggctaataaccaagtgccacacagagttcctatctgtccctcctcaccatttttggctggcaggatttgagcattttagggcytgggaagatagtattactaaatctactaaaatacatcacccatccttatagactttggccagttgctgagcaaattaacttcacaactgaagtgggccatactggcctttgtggtcccccactcctcttagaatttgtgagcgtggggcctactggagggtgggaggtgggaggagggggtggatcaggaaaaataactgatattaggctcaatatatgggtgatgcaataatctgtacaaaaaactctcataacacacattta

SEQ ID NO: 147438 - DNA, 622 bp, Homo sapiens
agagttccctcatgtcttctacccaggttgaagtccagcaaaattgcgactgtcctctttacaacttgcgagaccacactgcttctgcatttgcctgttgtatgtatgagatttacacttgttttagagcaacattttgtttcagttgggctggtggccatacccggcactagccggtcaatagtgagatggctcctcatggaggaggcttggcttgaggctgagggtctttaacccacatatacaagagagttgccactaagggatggaagccaggctaataaccaagtgccacacagagttcctatctgtccctcctcaccatttttggctggcaggatttgagcattttagggcttgggaagatagtattactaaatctactaaaatacatcacccatccttatagactttggccagttgctgagcaaattaacttcacaactgaagtgggccayactggcctttgtggtcccccactcctcttagaatttgtgagcgtggggcctactggagggtgggaggtgggaggagggggtggatcaggaaaaataactgatattaggctcaatatatgggtgatgcaataatctgtacaaaaaactctcataacacacattta

SEQ ID NO: 147439 - DNA, 450 bp, Homo sapiens
tttctattaagcaaatgggaaatttatggagatggaatgtcacagcagtattgcttagggctggagatgggagtggggattaactgccagtgcgcaagagagaacttgggtgagggaaacatatttaaattagatcgtggtgatgggtgcacacagtatcaatttaataaagcatcaaattgtagaccttttcagtgggcaaactttatggtgggttcacacccaatataggtgttaaaaataaattaatgttacggaaattcttgtcgggtttttaacaagccaagagatatgctgtgaaagcagmattaattcaaatggttgtcacaggtcacttaaagttagatagttgtcctacaaatatagggtgaatgttattcatgaatttcctgaatctattgcaataatcacattttttccattaaactcttgaggtagctaattttattt

SEQ ID NO: 147440 - DNA, 444 bp, Homo sapiens
tgggtttcaggaagatcacggagttcagtgagcactcaacacctctatcagacagactgcgtgggcagtgccttcctggagaggggaacacagccggatgactgtgagtgcagggctggtgcagagtgggggcccggattcaaattccactaagccatgtggacctggcaagctcatgtcctccctctgccctcagttctctgcactgtcataatgtaattttagcaatactttttaggccctatttargccctacttcttagtatcacagtacagggctaaaaaatcactaaatacaggaaaaccttagagaggactggtacttcagtaatgttctctaagtgtttactacaggccaggaggaataagctggacacttagcagtggcggaatatggagggggaacttggatggctccggggcagtggagcatgctttcctgtt

SEQ ID NO: 147441 - DNA, 530 bp, Homo sapiens
tccggggcagtggagcatgctttcctgttcggcttttccgtgggcatgacgccttatggtttatggagaacatcagccctgcaggggtgcagaggaggggctgtggctgagattttacacttgagggtgctgacattcagagatgataagtgacgagcagaacctcaaccccgctgagtgaaggacytgagatgggaaatgtatttggttccctagagagagagattcctgaaaaactgccacctcttcatcacgccctgtgccagagacccaagagacccctcactgtctttctccagtcctcctagcccaaggtgtgtgggtggacaaaggtggtgctctggaggaaatgcctgagataaggacaggtccttaatgataaagaattctccttcctctttcagatccttgacctcccagtatgacagcttaaaggctgtcatctctgtggcctgcctcccctttcccttcaccctgccagctgcctctcagtgactgtctcctccagtgactacactgagggaccaggg

SEQ ID NO: 147442 - DNA, 530 bp, Homo sapiens
tccggggcagtggagcatgctttcctgttcggcttttccgtgggcatgacgccttatggtttatggagaacatcagccctgcaggggtgcagaggaggggctgtggctgagattttacacttgagggtgctgacattcagagatgataagtgacgagcagaacctcaaccccgctgagtgaaggacctgagatgggaaatgtatttggttccctagagagagagattcctgaaaaactgccacctcttcatcacgccctgtgccasagacccaagagacccctcactgtctttctccagtcctcctagcccaaggtgtgtgggtggacaaaggtggtgctctggaggaaatgcctgagataaggacaggtccttaatgataaagaattctccttcctctttcagatccttgacctcccagtatgacagcttaaaggctgtcatctctgtggcctgcctcccctttcccttcaccctgccagctgcctctcagtgactgtctcctccagtgactacactgagggaccaggg

SEQ ID NO: 147443 - DNA, 530 bp, Homo sapiens
tccggggcagtggagcatgctttcctgttcggcttttccgtgggcatgacgccttatggtttatggagaacatcagccctgcaggggtgcagaggaggggctgtggctgagattttacacttgagggtgctgacattcagagatgataagtgacgagcagaacctcaaccccgctgagtgaaggacctgagatgggaaatgtatttggttccctagagagagagattcctgaaaaactgccacctcttcatcacgccctgtgccagagacccaagagacccctcactgtctttctccagtcctcctagcccaaggtgtgtgggtggacaaaggtggtgctctggaggaaatgcctgagataaggacaggtccttaatgataaagaaytctccttcctctttcagatccttgacctcccagtatgacagcttaaaggctgtcatctctgtggcctgcctcccctttcccttcaccctgccagctgcctctcagtgactgtctcctccagtgactacactgagggaccaggg

SEQ ID NO: 147444 - DNA, 500 bp, Homo sapiens
agatgggtctgcaaagagtaacttcccttccactgattaaacctgaatatgcaagctactgtgaattaactggaaaagtggccgtgtgggctggtgctttggtgatttaatgaattaagtctgcaagccccactgcctccttgactattgatcagagctgcctgcaataaggtctggctaagaatgggcagtggctgcaccagctctgggtaaaatttgacctaaaatgaccagtctcattcactaacctcaccatagtcttatgggttcaatggacctgtccaatcctttgctctgttctctccatcaccttcctgtgtaattttcctccaccacgcacataatagaaacatggcacaggggagctaatcgcctcttttatcccccacttcaggctcacayataagtttatagtaaaagccttttcaaatgactgctttaactgctgctacagcatgtgtcatcagttgaatggaatctgtcacgtgactttaagcaac

SEQ ID NO: 147445 - DNA, 441 bp, Homo sapiens
ctgtatgtcttccgcatctataattatagtagcagaagagaatggtgagcctggggcactgcaagatcctaaatcaaagattaaggcatattaactctaccctcgctggaaagtggtcagttgtattttaaaaagctttacaatagactttctaataatgagagttgaagcaaagtttcyacctaaccctgtaattaaattcaccagaagaccccatttcccattatccagacgaccaaggctttgccgaacaccaccgtccctgccctctaggagaggtcatccaaggccagcaatgaaacagtcaatcaatttgcaaatggacgggaggacactgacaggatgtgttcactgggggtaggtgtctactgggggagagaggccaggcaagtctgtccttgttttcagtctagcaggagtgaaggggaggccagagtaact

SEQ ID NO: 147446 - DNA, 381 bp, Homo sapiens
agcctggggcactgcaagatcctaaatcaaagattaaggcatattaactctaccctcgctggaaagtggtcagttgtattttaaaaagctttacaatagactttctaataatgagagttgaagcaaagtttccacctaaccctgtaattaaattcaccakaagaccccatttcccattatccagacgaccaaggctttgccgaacaccaccgtccctgccctctaggagaggtcatccaaggccagcaatgaaacagtcaatcaatttgcaaatggacgggaggacactgacaggatgtgttcactgggggtaggtgtctactgggggagagaggccaggcaagtctgtccttgttttcagtctagcaggagtgaagggga

SEQ ID NO: 147447 - DNA, 443 bp, Homo sapiens
agtcgtcagcccagtctgtatgtcttccgcatctataattatagtagcagaagagaatggtgagcctggggcactgcaagatcctaaatcaaagattaaggcatattaactctaccctcgctggaaagtggtcagttgtattttaaaaagctttacaatagactttctaataatgagagttgaagcaaagtttccacctaaccctgtaattaaattcaccagaagaccccatttcccattatccagaygaccaaggctttgccgaacaccaccgtccctgccctctaggagaggtcatccaaggccagcaatgaaacagtcaatcaatttgcaaatggacgggaggacactgacaggatgtgttcactgggggtaggtgtctactgggggagagaggccaggcaagtctgtccttgttttcagtctagcaggagtgaagggga

SEQ ID NO: 147448 - DNA, 453 bp, Homo sapiens
agtcgtcagcccagtctgtatgtcttccgcatctataattatagtagcagaagagaatggtgagcctggggcactgcaagatcctaaatcaaagattaaggcatattaactctaccctcgctggaaagtggtcagttgtattttaaaaagctttacaatagactttctaataatgagagttgaagcaaagtttccacctaaccctgtaattaaattcaccagaagaccccatttcccattatccagacgaccaaggctttgccgaacaccaccrtccctgccctctaggagaggtcatccaaggccagcaatgaaacagtcaatcaatttgcaaatggacgggaggacactgacaggatgtgttcactgggggtaggtgtctactgggggagagaggccaggcaagtctgtccttgttttcagtctagcaggagtgaaggggaggccagagta

SEQ ID NO: 147449 - DNA, 441 bp, Homo sapiens
ctgtatgtcttccgcatctataattatagtagcagaagagaatggtgagcctggggcactgcaagatcctaaatcaaagattaaggcatattaactctaccctcgctggaaagtggtcagttgtattttaaaaagctttacaatagactttctaataatgagagttgaagcaaagtttccacctaaccctgtaattaaattcaccagaagaccccatttcccattatccagacgaccaaggctttgccgaacaccaccgtycctgccctctaggagaggtcatccaaggccagcaatgaaacagtcaatcaatttgcaaatggacgggaggacactgacaggatgtgttcactgggggtaggtgtctactgggggagagaggccaggcaagtctgtccttgttttcagtctagcaggagtgaaggggaggccagagtaact

SEQ ID NO: 147450 - DNA, 239 bp, Homo sapiens
ataatgagagttgaagcaaagtttccacctaaccctgtaattaaattcaccagaagaccccatttcccattatccagacgaccaaggctttgccgaacaccaccgtccctgccctctaggagaggtcatccaaggccagcaatgaaacagtcaatcaatttgcaaatrgacgggaggacactgacaggatgtgttcactgggggtaggtgtctactgggggagagaggccaggcaagtc

SEQ ID NO: 147451 - DNA, 444 bp, Homo sapiens
cagtcgtcagcccagtctgtatgtcttccgcatctataattatagtagcagaagagaatggtgagcctggggcactgcaagatcctaaatcaaagattaaggcatattaactctaccctcgctggaaagtggtcagttgtattttaaaaagctttacaatagactttctaataatgagagttgaagcaaagtttccacctaaccctgtaattaaattcaccagaagaccccatttcccattatccagacgaccaaggctttgccgaacaccaccgtccctgccctctaggagaggtcatccaaggccagcaatgaaacagtcaatcaatttgcaaatggacgggaggacactgacaggatgtgttcactgggrgtaggtgtctactgggggagagaggccaggcaagtctgtccttgttttcagtctagcaggagtgaagggga

SEQ ID NO: 147452 - DNA, 549 bp, Homo sapiens
ggaatgactttctttaaaacctctgggagcaagagcagtttcttggatggctcatctttagacctgattttttttttttttttttttttttttttgttcagacatttattgagcacttcttaagggccaggcatggtgtgaggcactgggatgtaacagtgattatgacaaagtccctcaaggagctcacagtctaatggtaaactacagagtaaactgaggcacagagtggtaaatgacttacccaatgaggtagaaatagctaggtatgtgaaaatgtgggagcagagctggagagagggcaaggtacaacttgtcctaagtaaaaccccttggactgactcaacagcaaggctgcatacacaaacattacaaaatctacttgcaaaaacctgaaaggagtttccaattatcaccatgactgaattcatgtttcacaatgaattcagctatttcctgatggcatttctatccttgccyccaaagccactgggcatgccactgatctgctgggagacagcaattaggtagacagcttaaaaccaagaa

SEQ ID NO: 147453 - DNA, 659 bp, Homo sapiens
aattagtaaaatgtctgaattaccaaatatttttcaagaacttcactgttattacttttaagtaaatactgtaactcaaactaggctaatagaatgcctaataaagatccttaggggatcctgctttaggagagaaataagaatgatttgcaattagtgcaccaattgtttatgtaaatggaatttctgaaatactagactgagcttgaaaaccgtttgttcccttaagtattttaaatagtccctacggaacccctgtgcatgctggtagttgtttatatgctgtatagagacctgtttcaygaagacataactcaaccttatatcatcagtatcagaaattccaagttagtgatggccaggatcctcaccttccaagattagattagatctctctgccaaacgcttccatagcacatgcaattgtctgttgtaacactaatcaatacatttaacaaatatatgatgtattctgctatatgctttgccagtgtgtgaaatggaggagacataaccctcatctttgtgtagtttataggctagcaaagaagtcaggcagtaaacaaataaatgcatttataattaattacaatcctgaagttagattgtacttttgtaagtaatggtttaatcaactagattttaagttccattaagat

SEQ ID NO: 147454 - DNA, 568 bp, Homo sapiens
ctgccaaacgcttccatagcacatgcaattgtctgttgtaacactaatcaatacatttaacaaatatatgatgtattctgctatatgctttgccagtgtgtgaaatggaggagacataaccctcatctttgtgtagtttataggctagcaaagaagtcaggcagtaaacaaataaatgcatttataattaattacaatcctgaagttagattgtacttttgtaagtaatggtttaatcaactagattttaagttccattaagataggggttacttctgtgttgtttgtcatggtgtcccaaatccttccttagcctactgcctggcatagagtaaatatwaagttgagctttattgccattttgataggtcagaagcagtcgaatgtcaataatgtcacatagttcaacctaatagttgctcagtcaatatgtattgaatgttgaatgcatgttgtaatcagtgatcctatggtaggctgcatttcacacagttttctctagccaaagaaatgctagctatggttttgaaaaggaattctaaaacttcaaacagctaaaactggtgat

SEQ ID NO: 147455 - DNA, 552 bp, Homo sapiens
cacaatcagtcctcaataaagagctgctggctaagacatatttctgctggaacattctgtggctctggatccatagaggacaggatttggccaatgactgcttaaggacatttcaacggccccttgacaatgacaccatcactgggctgcccacctcatcccacagctgcagcccattcttgtgatagcttcccttttcccccacaaatgggaatggyggctgccctggctatgcctatctgaagtggatccagctggtgaacagccgggacagctcaaatactagtggagtgcagctctctgcccagcccagcaggtgactgtgcctcagtgtaagctaatctaatctgcaagatgacagacctcaaaacggcccatacaatgaaatgcccatggcttgcaaaactttaattcatgcagaacctttcctcacaaacaaaatcttacacagcaccccatcttggcttcagcagaaccaggaaaaataaaaaattggcaggggaaggaaataaacagaacaagtggtatctgaatttatttgatatattctgg

SEQ ID NO: 147456 - DNA, 627 bp, Homo sapiens
gcacctgtagcctgtgcatcacccttagggcaggtctgcctcccgggcccatgcacagaggacctggtctcccagcctgcaggtgcccctgtggtgtccaggatgtcgagggggtctctgtgtacttggtggggctgggaccctcccacttcccacctccttgtgtccctcactcccctgtttcattccatgctgagcctcccctgccttgggctccctggggagggggtggtggcaggagttgcccgagggcwgctctgcccatgagcagctgctctagcggctcctcctgctgctgttcgccgggtgctgctgacacctgcgaggcagagaaaaggcgttcaggtggttcacaccccacacaggtgcccctcacagggtcctcactggcggccagcgctgtgggtgtgacgatgatgacaagcctaaactgcgcaaggactcgtgtcccgggcgctccatgtgaccacctcgggagaggtctccggcttgtcgtaacccagaggagtgacccactgcctcctgcagctctttcagacccagttgcaaagaagagctgcatgctcaacctgctgtcgtccctgccggaggccaacctgctcaccttccttttccttctagaccgcc

SEQ ID NO: 147457 - DNA, 627 bp, Homo sapiens
gcacctgtagcctgtgcatcacccttagggcaggtctgcctcccgggcccatgcacagaggacctggtctcccagcctgcaggtgcccctgtggtgtccaggatgtcgagggggtctctgtgtacttggtggggctgggaccctcccacttcccacctccttgtgtccctcactcccctgtttcattccatgctgagcctcccctgccttgggctccctggggagggggtggtggcaggagttgcccgagggcagctctgcccatgagcagctgctctagcggctcctcctgctgctgttcgccgggtgctgctgacacctgcgaggcagagaaaaggcgttcaggtggttcacaccccacacaggtgcccctcacagggtcctcactggcggccagcgctgtgggtgtgacgatgatgacragcctaaactgcgcaaggactcgtgtcccgggcgctccatgtgaccacctcgggagaggtctccggcttgtcgtaacccagaggagtgacccactgcctcctgcagctctttcagacccagttgcaaagaagagctgcatgctcaacctgctgtcgtccctgccggaggccaacctgctcaccttccttttccttctagaccgcc

SEQ ID NO: 147458 - DNA, 422 bp, Homo sapiens
ctgcttctgcatttgcctgttgtatgtatgagatttacacgtgttttaaagcaacattttgtttcagttgggctggtggccatacccggcactagccggtcaatagtgagatggctcctcatggaggaggcttggcttgaggctgagggtctttaacccacatatacaagagagttgccactaagggatggaagccaggctaataaccaagtgccacacagagttcctatctgtccctcctcaccatttttggctggcaggatttgagcattttagggcttgggaagatagtattactaaatctactaaartacatcacccatccttatagactttggccagttgctgagcaaattaacttcacaactgaagtgggccacactggcctttgtggtcccccactcctcttagaatttgtgagc

SEQ ID NO: 147459 - DNA, 590 bp, Homo sapiens
gattcaattctaggcaaaacagtctatggtatttattcactaatcctttgttataactgctgatgggagaattagaagtactgaaattatatcctttaaaattaattaaagcataattattaatcacacartattttttcatccaggcctccttttctttgtcatgcatgcatattaattgaggatggagaatatctacgcttgttcaggccagccaacatacgacagtttacttcaagacaggagacatgggttgaatgctggtatgttttaactctgcagcgcaaacagttgcaacaagtgtggtgaactaatcaccagatggccctttgctgccttatttgtcattgtgccttacatgtagcttgcaggatttgattacgcttatgttttgtggtgatcatactttcaactattcctaaaatactgcttcagtcttatctgtttggggtcaactgctgaggatttcatacaaattaatgaagtttgtgaatctaaacttctacacaaagggggaaatatttgcaaatcatttatcttgtaagagactaaaatttagaatatttttaaatatatttaagatatattca

SEQ ID NO: 147460 - DNA, 590 bp, Homo sapiens
gattcaattctaggcaaaacagtctatggtatttattcactaatcctttgttataactgctgatgggagaattagaagtactgaaattatatcctttaaaattaattaaagcataattattaatcacacaatattttttcatccaggcctccttttctttgtcatgcatgcatattaattgaggatggagaatatctacgcttgttcaggccagccaacatacgacagtttacttcaagacaggagacatgggttgaatgctggtatgttttaactctgcagygcaaacagttgcaacaagtgtggtgaactaatcaccagatggccctttgctgccttatttgtcattgtgccttacatgtagcttgcaggatttgattacgcttatgttttgtggtgatcatactttcaactattcctaaaatactgcttcagtcttatctgtttggggtcaactgctgaggatttcatacaaattaatgaagtttgtgaatctaaacttctacacaaagggggaaatatttgcaaatcatttatcttgtaagagactaaaatttagaatatttttaaatatatttaagatatattca

SEQ ID NO: 147461 - DNA, 590 bp, Homo sapiens
gattcaattctaggcaaaacagtctatggtatttattcactaatcctttgttataactgctgatgggagaattagaagtactgaaattatatcctttaaaattaattaaagcataattattaatcacacaatattttttcatccaggcctccttttctttgtcatgcatgcatattaattgaggatggagaatatctacgcttgttcaggccagccaacatacgacagtttacttcaagacaggagacatgggttgaatgctggtatgttttaactctgcagcgcaaacagttgcaacaagtgtggtgaactaatcaccagatggccctttgctgccttatttgtcattgtgccttacatgtagcttgcaggatttgattacgcttatgttttgtggtgatcatactttcaactattcctaaaatactgcttcagtcttatctgtttggggtcaactgctgaggatttcatacaaattaatgaagtttgtgaatctaaasttctacacaaagggggaaatatttgcaaatcatttatcttgtaagagactaaaatttagaatatttttaaatatatttaagatatattca

SEQ ID NO: 147462 - DNA, 610 bp, Homo sapiens
aaaaatctacagcaacaaactaactaaataaaaatcagacaactctttaaaaatgggcaaaagacttcaacatatatttccctaaagaagatatagccacaratagtagcacaggaaaagctgctcaggatcattagtcattagggaaatgcaaatgaaaaacacaagcagccaccaatatacacctactaggatgatttaaaggaaaataagtgtgaacaaggatgtaaagaaattgtaaccctgatacattgatggtagaaatggataaagttgcagccactgtgaaaaacagtctgcagtggctcagaaggttaaatatagaacccctgttggacccaggaactctactcttaggcaccccaaagaatagagaacagaaatcaaacagatgtttgtatactaatgtttgtagcatcacttttcacaggagccaaaaggtggaaataatccaaccatcagtgaacaaatgaatgtaataaaagcaaggtggtctgcatgcaatgctacatcatccatctgtaaaaaacgaacatcattttgatagatgatacaacatgggtggacattgagaacattatgcttagtgaaataagccagacacaaaagg

SEQ ID NO: 147463 - DNA, 610 bp, Homo sapiens
aaaaatctacagcaacaaactaactaaataaaaatcagacaactctttaaaaatgggcaaaagacttcaacatatatttccctaaagaagatatagccacaaatagtagcacaggaaaagctgctcaggatcattagtcattagggaaatgcaaatgaaaaacacaagcagccaccaatatacacctactaggatgatttaaaggaaaataagtgtgaasaaggatgtaaagaaattgtaaccctgatacattgatggtagaaatggataaagttgcagccactgtgaaaaacagtctgcagtggctcagaaggttaaatatagaacccctgttggacccaggaactctactcttaggcaccccaaagaatagagaacagaaatcaaacagatgtttgtatactaatgtttgtagcatcacttttcacaggagccaaaaggtggaaataatccaaccatcagtgaacaaatgaatgtaataaaagcaaggtggtctgcatgcaatgctacatcatccatctgtaaaaaacgaacatcattttgatagatgatacaacatgggtggacattgagaacattatgcttagtgaaataagccagacacaaaagg

SEQ ID NO: 147464 - DNA, 610 bp, Homo sapiens
aaaaatctacagcaacaaactaactaaataaaaatcagacaactctttaaaaatgggcaaaagacttcaacatatatttccctaaagaagatatagccacaaatagtagcacaggaaaagctgctcaggatcattagtcattagggaaatgcaaatgaaaaacacaagcagccaccaatatacacctactaggatgatttaaaggaaaataagtgtgaacaaggaygtaaagaaattgtaaccctgatacattgatggtagaaatggataaagttgcagccactgtgaaaaacagtctgcagtggctcagaaggttaaatatagaacccctgttggacccaggaactctactcttaggcaccccaaagaatagagaacagaaatcaaacagatgtttgtatactaatgtttgtagcatcacttttcacaggagccaaaaggtggaaataatccaaccatcagtgaacaaatgaatgtaataaaagcaaggtggtctgcatgcaatgctacatcatccatctgtaaaaaacgaacatcattttgatagatgatacaacatgggtggacattgagaacattatgcttagtgaaataagccagacacaaaagg

SEQ ID NO: 147465 - DNA, 610 bp, Homo sapiens
aaaaatctacagcaacaaactaactaaataaaaatcagacaactctttaaaaatgggcaaaagacttcaacatatatttccctaaagaagatatagccacaaatagtagcacaggaaaagctgctcaggatcattagtcattagggaaatgcaaatgaaaaacacaagcagccaccaatatacacctactaggatgatttaaaggaaaataagtgtgaacaaggatgtaaagaaattgtaaccctgatacattgatggtagaaatggataaagttgcagccactgtgaaaaacagtctgcagtggctcagaaggttaaatatagaacccctgttggacccaggaactctactcttaggcaccccaaagaatagagaacrgaaatcaaacagatgtttgtatactaatgtttgtagcatcacttttcacaggagccaaaaggtggaaataatccaaccatcagtgaacaaatgaatgtaataaaagcaaggtggtctgcatgcaatgctacatcatccatctgtaaaaaacgaacatcattttgatagatgatacaacatgggtggacattgagaacattatgcttagtgaaataagccagacacaaaagg

SEQ ID NO: 147466 - DNA, 549 bp, Homo sapiens
gttgctgaagactgtatgatggaagtcatctgcattgggaaagaaattaatggagagaggagaaaacttgagaatccacactactcaccctgcagggccaagaactctgtctcccatgcattgctgacccatctcagtatttcctgtgaccacctcctttttcaactgaagactttgcacctgaaggggttcccaggtttttcacctcggcccttgtcaggactgatcctctcaactactgaccatttcacctccattcatgtccatgccacatcaggctgtgttgtctagatggcatgaatctaccccaaatgtccctttctggaggaagccaccattatgctgtacctccaagcataatgatacgtccacacacaccaaggcacctcactcatgcaaggtgtgtgtcctctaacaaagtttcacgctctaaacccagataacttttgaaacccaagttctgttgattcccctactttgggtgctccatagatgctcatktgtctactaaacactgccccaggcaattaaatattccaaagtgaccag

SEQ ID NO: 147467 - DNA, 324 bp, Homo sapiens
tgctcaaagctactttactcatcaaagaaaawaacaaaacaattaaatgtccattaactgataaatgaataaacactatctgtatgaataaacacagcagactatgaaggaaaacacatgaccagcacgtgctaacacgtcaattaacttcaaacatagtatgctaaatgagggaagtcagattccaaatatatatatatgtccatttctataaagcaagtgggaaatttatggagatggaatgtcacagcagtattgcttagggctggagatgggagtggggattaactgccagtgcgcaagagagaacttgggtgagggaaa

SEQ ID NO: 147468 - DNA, 324 bp, Homo sapiens
tgctcaaagctactttactcatcaaagaaaataacaaaayaattaaatgtccattaactgataaatgaataaacactatctgtatgaataaacacagcagactatgaaggaaaacacatgaccagcacgtgctaacacgtcaattaacttcaaacatagtatgctaaatgagggaagtcagattccaaatatatatatatgtccatttctataaagcaagtgggaaatttatggagatggaatgtcacagcagtattgcttagggctggagatgggagtggggattaactgccagtgcgcaagagagaacttgggtgagggaaa

SEQ ID NO: 147469 - DNA, 324 bp, Homo sapiens
tgctcaaagctactttactcatcaaagaaaataacaaaacaattaaatgtccattaactgataaatgaataaacactatctgtatgaataaacacagcagactatgaaggaaaacacatgaccagcacgtgctaacacgtcaattaacttcaaacatagtatgctaaatgarggaagtcagattccaaatatatatatatgtccatttctataaagcaagtgggaaatttatggagatggaatgtcacagcagtattgcttagggctggagatgggagtggggattaactgccagtgcgcaagagagaacttgggtgagggaaa

SEQ ID NO: 147470 - DNA, 324 bp, Homo sapiens
tgctcaaagctactttactcatcaaagaaaataacaaaacaattaaatgtccattaactgataaatgaataaacactatctgtatgaataaacacagcagactatgaaggaaaacacatgaccagcacgtgctaacacgtcaattaacttcaaacatagtatgctaaatgagggaagtcagattccaaatatatatatatgtccatttctataaagcaagtgggaaatttatggagatggaatgtcacagcagtattgcttagggctggagatgggagtggggattaactgccagtgcrcaagagagaacttgggtgagggaaa

SEQ ID NO: 147471 - DNA, 609 bp, Homo sapiens
acagttcctcctgctttaggactcagagcctgcccgtggtcacagtgggtaggtgcagactctgaagatgcactttggtcagagaccctgctgaactctgtctaatgaggacctctgtcctgtctgctgaccaccggtcagaggtgcaggctgcagtggggagtaagaatgccaccttctcaatgttgggaaaactccctgccagaactgagaatggccctttctaagcagaaggcaagctcagactaaagaaggaggccgaacacatcaggttggcagattgccaaagattcactcagggagagcccacatcctgggccatcttgggtggtggcaagatgaggtagacgactgcttttgcaacacacacctgacaacaaaaattcaacaactgtaaaagagccacaaaatccccaaatatttgcaaattagcaatgcacttttaaataactcwtgggttaaagaagaagtctcaatagaaaattaaaaatacttttaactacattaaaagaaaatgtgacttggcaagatttctggatgtagcaaaagcagtccttagagggaaatctatagcattggatgcaatatactaaaaatcacaagacctaa

SEQ ID NO: 147472 - DNA, 620 bp, Homo sapiens
ggctgcagtggggagtaagaatgccaccttctcaatgttgggaaaactccctgccagaactgagaatggccctttctaagcagaaggcaagctcagactaaagaaggaggccgaacacatcaggttggcagattgccaaagattcactcagggagagcccacatcctgggccatcttgggtggtggcaagatgaggtagacgactgcttttgcaacacacacctgacaacaaaaattcaacaactgtaaaagagccacaaaatccccaaatatttgcaaattagcaatgcacttttaaataactcttgggttaaagaagaagtctcaatagaaaattaaaartacttttaactacattaaaagaaaatgtgacttggcaagatttctggatgtagcaaaagcagtccttagagggaaatctatagcattggatgcaatatactaaaaatcacaagacctaaaatcagtaatatcatgtttcaattagggaactatagaaaatagaggaatgcaatggaaagcaagtaaaagtaataaacaacatcacagaaatcaataaaattaaaacactgaaatcatcagaaaatcaataaaaccaaaagctggttctttgatatgct

SEQ ID NO: 147473 - DNA, 614 bp, Homo sapiens
cacaaaatccccaaatatttgcaaattagcaatgcacttttaaataactcttgggttaaagaagaagtctcaatagaaaattaaaaatacttttaactacattaaaagaaaatgtgacktggcaagatttctggatgtagcaaaagcagtccttagagggaaatctatagcattggatgcaatatactaaaaatcacaagacctaaaatcagtaatatcatgtttcaattagggaactatagaaaatagaggaatgcaatggaaagcaagtaaaagtaataaacaacatcacagaaatcaataaaattaaaacactgaaatcatcagaaaatcaataaaaccaaaagctggttctttgatatgctcattacaatgaatgaattgatatgcaggctaaccaagaaaaagaagataacacaaatgaccaatttcagaaataaaagaggagccatctctactgaactgttaggcattaaaaggaatatcatgaacagttctatgaccgcagtctgataacctcagtgaaatgtatcaattccttgaaaggcaatcttcccaaggtcatgctaggatcctaatttgaataaacttatgtctactaaataagttgaatt

SEQ ID NO: 147474 - DNA, 614 bp, Homo sapiens
cacaaaatccccaaatatttgcaaattagcaatgcacttttaaataactcttgggttaaagaagaagtctcaatagaaaattaaaaatacttttaactacattaaaagaaaatgtgacttggcaagatttctggatgtagcaaaagcagtccttagagggaaatctayagcattggatgcaatatactaaaaatcacaagacctaaaatcagtaatatcatgtttcaattagggaactatagaaaatagaggaatgcaatggaaagcaagtaaaagtaataaacaacatcacagaaatcaataaaattaaaacactgaaatcatcagaaaatcaataaaaccaaaagctggttctttgatatgctcattacaatgaatgaattgatatgcaggctaaccaagaaaaagaagataacacaaatgaccaatttcagaaataaaagaggagccatctctactgaactgttaggcattaaaaggaatatcatgaacagttctatgaccgcagtctgataacctcagtgaaatgtatcaattccttgaaaggcaatcttcccaaggtcatgctaggatcctaatttgaataaacttatgtctactaaataagttgaatt

SEQ ID NO: 147475 - DNA, 614 bp, Homo sapiens
cacaaaatccccaaatatttgcaaattagcaatgcacttttaaataactcttgggttaaagaagaagtctcaatagaaaattaaaaatacttttaactacattaaaagaaaatgtgacttggcaagatttctggatgtagcaaaagcagtccttagagggaaatctatagcattggatgcaatatactaaaaatcacaagacctaaaatcagtaatatcatgtttcaattagggaactatagaaaatagaggaatgcaatggaaagcaagtaaaagtaataaacaacatcacagaaatcaataaaattaaaacactgaaatcatcagaaaatcaataaaaccaaaagctggttctttgatatgctcattacaatgaatgaattgatatgcaggctaaccaagaaaaagaagataacacaaatgaccaatttcagaaataaaagaggagccatctctactgaactgttaggcattaaaaggaatatyatgaacagttctatgaccgcagtctgataacctcagtgaaatgtatcaattccttgaaaggcaatcttcccaaggtcatgctaggatcctaatttgaataaacttatgtctactaaataagttgaatt

SEQ ID NO: 147476 - DNA, 614 bp, Homo sapiens
cacaaaatccccaaatatttgcaaattagcaatgcacttttaaataactcttgggttaaagaagaagtctcaatagaaaattaaaaatacttttaactacattaaaagaaaatgtgacttggcaagatttctggatgtagcaaaagcagtccttagagggaaatctatagcattggatgcaatatactaaaaatcacaagacctaaaatcagtaatatcatgtttcaattagggaactatagaaaatagaggaatgcaatggaaagcaagtaaaagtaataaacaacatcacagaaatcaataaaattaaaacactgaaatcatcagaaaatcaataaaaccaaaagctggttctttgatatgctcattacaatgaatgaattgatatgcaggctaaccaagaaaaagaagataacacaaatgaccaatttcagaaataaaagaggagccatctctactgaactgttaggcattaaaaggaatatcatgaacagttctatgaccgcagtctgataacctcagtgaaatgtatcaattccttgaaaggcaatcttcccaaggtcaygctaggatcctaatttgaataaacttatgtctactaaataagttgaatt

SEQ ID NO: 147477 - DNA, 437 bp, Homo sapiens
tctaaagaaatatattaattgaaaaataataatatagcaccactctttcagggagatctatgcttatrtttaacaaccaggtaagttctagacattagcttgaagcattgtctatcattaaacatgaaccaaaattgacttttaagtagatatttacttttgtggtggtagcaatatttactgaccaggcaaattagaatcctgacacattaaaaaatatggcttagtctcttcatagtttcctcttacatatgggacactgaatactccccgcaactgcaattcttgaatcaacttaattaatgaacttccacagtaccttcttgtgggtacctcttcttctttacccgggagccatgaggtctcctacactggttggtgtgcacagcatagcttcttgtgttctctatcagagaagatgctggttaatgcattga

SEQ ID NO: 147478 - DNA, 437 bp, Homo sapiens
tctaaagaaatatattaattgaaaaataataatatagcaccactctttcagggagatctatgcttatatttaacaaccaggtaagttctagacattagcttgaarcattgtctatcattaaacatgaaccaaaattgacttttaagtagatatttacttttgtggtggtagcaatatttactgaccaggcaaattagaatcctgacacattaaaaaatatggcttagtctcttcatagtttcctcttacatatgggacactgaatactccccgcaactgcaattcttgaatcaacttaattaatgaacttccacagtaccttcttgtgggtacctcttcttctttacccgggagccatgaggtctcctacactggttggtgtgcacagcatagcttcttgtgttctctatcagagaagatgctggttaatgcattga

SEQ ID NO: 147479 - DNA, 356 bp, Homo sapiens
tttacttttgtggtggtagcaatatttactgaccaggcaaattagaatcctgacacattaaaaaatatggcttagtctcttcatagtttcctcttacatatgggacrctgaatactccccgcaactgcaattcttgaatcaacttaattaatgaacttccacagtaccttcttgtgggtacctcttcttctttacccgggagccatgaggtctcctacactggttggtgtgcacagcatagcttcttgtgttctctatcagagaagatgctggttaatgcattgacaatagatagggctgttgacatcttgctgacagaagaccagagggaaaatagtgataatctgttctaagtt

SEQ ID NO: 147480 - DNA, 448 bp, Homo sapiens
aagttgggtttcaggaagatcacggagttcagtgagcactcaacacctctatcagacagactgcgtgggcagtgccttcctggagaggggaacacagcmggatgactgtgagtgcagggctggtgcagagtgggggcccggattcaaattccactaagccatgtggacctggcaagctcatgtcctccctctgccctcagttctctgcactgtcataatgtaattttagcaatactttttaggccctatttaagccctacttcttagtatcacagtacagggctaaaaaatcactaaatacaggaaaaccttagagaggactggtacttcagtaatgttctctaagtgtttactacatgccaggaggaataagctggacacttagcagtggcggaatatggagggggaacttggatggctccggggcagtggagcatgctttcctgtt

SEQ ID NO: 147481 - DNA, 347 bp, Homo sapiens
gggagaggggcagggggtgtgggttgggccgaggcacagctgggtggcccccaggctcacgtggcataaagggttttggtgggtgggcctgcctacctgcttcttctaggaaaagctgaggtcatcaatgcccgcgaggtggcccccaggctggcctttgccagcatgttcaacagctcggagcagtcccagaagggtaagccatgctgcagacttggggcatgggtgcagagctggctgagccaccgggaaggggccttgcccacagragcctgctcccgtcagggttcaggggcagttctagcaccccccatcccttcctggccccatagcaccctcccacaatg

SEQ ID NO: 147482 - DNA, 484 bp, Homo sapiens
taatcctcctggctttgcttcccagagtgtagagattacaggcatgaccactgaacctgcccctttccccccaacaacatcttgattgcaacctcctaagagactccgagtcagaagtatccagttaagatgttactgactttctgaaccatagaaactgtgagataataaacatctattgttcctttaagccttaagtttggggcttttttttttacaccaatatataactaatgtagacacctgcagtcyctaagattgaatgcaaaattgtgttacatacacatgagtgtgttcttctgggaaaagagtccataaacttcaaaagattctcaaaggaatccaagacccaaaaagattaagaaacattgcatcagacaataaattgtcaatgagcaaggtcctgtccttttagattgggttttgaaatcacccatcccacaaatatatgataccacttaactagtttttcaagatatttctt

SEQ ID NO: 147483 - DNA, 501 bp, Homo sapiens
atgaacaaaaacatgaagaagtgtaattggtaatacgtaacagaggtttaatgtcttaaaaacagtttttcattaataagaaactctagctgaaaatggagaaaagtatgaattaattcatgaaagattttgtaacgaaaaagaaaaaatgcatataacacactagtaactaaaatgcatactaaattaacagttagtactaaagctaagagtacttcaccctgaagtatgtaacacagaatatacacattttagctaaaagacatgttagaatattcataatatcactattatagccaaaacttgtaattaacacaaatgtcaatcaacaggaaaacagattaacatatgaagtatattcacttaataaaatgaraagaaagtgcatattgttatatgcaacaacataggtgagattcacaaacatcatttttgagcataagaagctacattccaaagagtacatattgtatcattcactttttataaatctcagaaaca

SEQ ID NO: 147484 - DNA, 525 bp, Homo sapiens
tacccattagaacattgcagaagaaccatgagtaataacattgcactctactttttagcacaccgtgttggactttgctctgtggtctgattatacttttgattaccccagggctaagcatttctcaagtgctaagtatagggacatttggatctcaaacttatcttctgtaatagcatttctcaggaatcctctaaagagaaagtgacattgccaggataattttgaagaacattttatttagctacaattctgctgtcatyttctatatgtttggtatttctctccccttttgattaatagagacattctcataaataaaagatcttagtctcttcaaagtgtctgtcttggtctcttatttcccctgtgaagtcataatcccccatttgtgacatcacagtctttccactgcaatcaacagtgatgtttcaagctggggattaaatgcttcagaagaggaagactttacaagagcagagggactctcaaggaataaagatccaattagcatgtaaatgcctg

SEQ ID NO: 147485 - DNA, 525 bp, Homo sapiens
tacccattagaacattgcagaagaaccatgagtaataacattgcactctactttttagcacaccgtgttggactttgctctgtggtctgattatacttttgattaccccagggctaagcatttctcaagtgctaagtatagggacatttggatctcaaacttatcttctgtaatagcatttctcaggaatcctctaaagagaaagtgacattgccaggataattttgaagaacattttatttagctacaattctgctgtcattttctatatgtttggtatttctctccccttttgattaayagagacattctcataaataaaagatcttagtctcttcaaagtgtctgtcttggtctcttatttcccctgtgaagtcataatcccccatttgtgacatcacagtctttccactgcaatcaacagtgatgtttcaagctggggattaaatgcttcagaagaggaagactttacaagagcagagggactctcaaggaataaagatccaattagcatgtaaatgcctg

SEQ ID NO: 147486 - DNA, 619 bp, Homo sapiens
gtaacaatattgagaattctcatgattattctcaaatatggagcaaactgactatatgctaacatattctctcttttgactgacatgttttagacacaactactgggcaaaatggaggcatgaatgaaagggccgtttttctggtagatatgaatgttctgactccacacatctggtggaacaaataacccacagagtctatggaaatggtgagcaccctacaacctggtgaaatgaatcttcctctaggacaaggaaagccagtcagacatgataacatctgaagggcagatgaggagttgaatagagctatgctgctagaattacaggatccagctgcctgatrtagggccagggccagaataaaactctaaagattttggctagctcgctcctagctcagaggggaaagcacccaggtctcaaatattatgggaaggaataaagtagtccacataaatacaacacacacgatattataggaatattatatgactatataatactatcatagtacatgccaagatctagctcaagtaggacaacaacaggcagttttcaaatatgaagacattcagaaagtttaatactcataagcctttcttaaaaacaacaagaa

SEQ ID NO: 147487 - DNA, 552 bp, Homo sapiens
ggaagagacagtggagtaaaattattaaataatcaaaataggaaacaaaaatactacctagaattctataccgtgtgaaaaatatcttttaaaaactaaaagtgaagtagagacttttttcagatatataaaagcttaaacgattcatcatcakaagagtcacactacaagacattttaaagaaagtgattcaagcagatagaaaatactacatgaaaatataaatttatacaaaaaacgagcacctgaaataatacctgtattggtaaatatgtaattttttctattatttaaatgtctttaaaataatttattgcttaaataaaaaatgtagtttgtgtcttataatatatataaaagcaaaatgtttgacaacaatagcacaaaggccaagaaaagagaaatggaagtctaatgcttaagattcttgtactatccccgaagtggtatactatcacttgaagttagtctgtaataagctagaagtatatattgtaaactcttaagcaacaactaaggtgacaatattgaaagttactagtaataagccta

SEQ ID NO: 147488 - DNA, 409 bp, Homo sapiens
ggtggtttattatcacattttcttctaaatttcaatttaactttcacttttaattcaccatttaaatcaggtaaattcactctgcaaatataatcaagggatgttcatattgtattaatagattgctttagttttttagttctcacaacttaattatttagcgcccaattcccttatttaatgttagcatattaaggcaaaatctaatttgcagtaagcagcttgaggccacagaatcacaaaaaagagtagatggaggcctgtgaatatgttgaattttttattttgtcartgcatctaagaagctgatggatgtagtcttgcgtctttcagcatttcggttgagtaaagcagggtagatatttagcagggatgcttgcattttaagaatatttagtagttccccgtc

SEQ ID NO: 147489 - DNA, 565 bp, Homo sapiens
ttttatagttacctatttagcacagtgcctcaaatagggtaacctctcaacaaatgttagttaccattattattattattattattattattattattattattatatcagacattatcaccattgcttttttcttccttgcaggcaaaactacgtttctctggagtgcccaatcctctccaatgtgacttggataattctcaataatttaagcaacttggagtcctaatgttttttgccagagactaatttagagtttgccaatggactgtctctgaccaatgaagaagtgaggggtggtctcctgggagcttctttgaaaggttccctcacttcacaaagaacatgaggaagaaatacttgctcttttgaatgttatgttcctgtatagggcacctaaactgatattgccatgggcatcaatgaaggacattaggcaaaggcaaagacarcatgtagagaaagatagaactaaaaggcagaagcaacccacgttcaaacgtcatcatgaagccactgaattagcctagtaatggacctcagtgcttaactattattgagatac

SEQ ID NO: 147490 - DNA, 168 bp, Homo sapiens
ccaatggaacattgtagcctcttcctcttcctgatctgaaaagttccacttcaaccagaagaaacttggcctccaacatcggccmtccatttatttaattattgaattccgggatacaggcatagtggctttagaattttcaaactgtattcctaggaaacacatatt

SEQ ID NO: 147491 - DNA, 512 bp, Homo sapiens
actcatcagtaggaagcctgagaaagacttgattctctgagtcaaccatcaatcctgcctcaagctaccaaagagtttcctagaagacagaagaggagtacctttctacttcaagtcacacatccaaagatrctgtatactatttttattaacaatgttaaatatgaagttgtaatccgtgagcagcaacgagagatctggttgcaaactgagtcatggtttgtcggtggtaattatatggtaggatcatatttgtgtttcatattcaatagatttaaaattttgatatatccagcaaatagcagactatcaggaacagactattgccaactattttcactggagaccaaaatgaaaaacagaattctgaatcatataatttcaataaatgattggtctgatggaattaatgcatagaatgatacatttattcattttattctcagagaaaatatatataatttatccactgaacatcagaagatcttactaaagagagtcagaataaagag

SEQ ID NO: 147492 - DNA, 451 bp, Homo sapiens
ccactggggtggccaatcctgatgcaaaagaaaacttctctacctgcctcccctgagaccagctctagaagctgcagttgatttggggtgtaagcaaatggggaaaagtgccatttccatgataaatgagggaakattgtgccccattcccccctcattggggaggagctgtcatcctcactttgtggatatttgaaagtcacaagagcccagcctccctcctcttttattttaaaggggagggaaatgcaatgtttacattttccagttcctaaattccagggcagagaacccagaggccagctggaaaactgaaagcaccagatcagtggcagaaactctattagattccaagcctggtctatgtttaaggaattctgtttgtcagtcatctcaacacctgggcgagagctttagattaaaatgaagagaaagaagtaaaaaattcagg

SEQ ID NO: 147493 - DNA, 586 bp, Homo sapiens
ttgccaattatcccagcaccacactgaacagacaaataacaagcagtgaggttgaaatggtgatttaaaaaattgccaaaaacagagtccaggaccagatagattcacagctgaattttaccaaacattcagagaagacttggtaccaatcctgttgacactattccacaagataaagaggtaatcctccctaaatcactctatgaagtcagtatcaccctaatacccaaaccaggaaaggacataacaaaaaaaagaaactatagaccaatattcctgatgaacatagatgcaaaaatacttagcaaaatacctgctaaccgaatccaacagcatayaaaaaagataatctacgatgatcaaatgggtttcataccagggttgcagggatggtttaacatgcgcaagtcaatgaatgtgatacaccacataaacagaattaaaaacaaaaatcacatgatcatctcaatagatgcagagaaagcacttgacaaaatccagcattcctttatgattaaaaccctcagcaacatcgacatacaagggacatacctcaacgtaataaaagtcatctgtgacaacccca

SEQ ID NO: 147494 - DNA, 474 bp, Homo sapiens
ttagggtctactagaatcatagtctagggggaaatcactgtttgaaaatcttcatgttaactctgccccttaatctttagtaataaatggagccttttgaaagaaaaaagcaatttccacttttcctcccagtgtttacttaaattgtttaattataatgctactttcaaatttatccttatggctctgatatatatataaaaccaaaaacaagttaaattatataattcaatacaagttaaattcaaacaaaactacaaagccaatttaacaaccttaatttaatgggaaggatgatgttgttttgctgaaaccaaattacctttcaaatgaaaacatgatattgactgctgcctcattaattyttttaaatttggcatgtctatgctactgggtgccatgtgatgaccaatttttccacaatttctctttatttgaactactatggaaactgcctttgtaaagtatacgtat

SEQ ID NO: 147495 - DNA, 474 bp, Homo sapiens
ttagggtctactagaatcatagtctagggggaaatcactgtttgaaaatcttcatgttaactctgccccttaatctttagtaataaatggagccttttgaaagaaaaaagcaatttccacttttcctcccagtgtttacttaaattgtttaattataatgctactttcaaatttatccttatggctctgatatatatataaaaccaaaaacaagttaaattatataattcaatacaagttaaattcaaacaaaactacaaagccaatttaacaaccttaatttaatgggaaggatgatgttgttttgctgaaaccaaattacctttcaaatgaaaacatgatattgactgctgcctcattaattcttttaaatttggcatgtctatgctactgggtgccatgtgatgaccmatttttccacaatttctctttatttgaactactatggaaactgcctttgtaaagtatacgtat

SEQ ID NO: 147496 - DNA, 399 bp, Homo sapiens
aaataaagctacccctgctcctctccaggagatcttgcttgccaagttggttttcataacacamttttacagttgatttatcttctctgaaaagtgagacaaaaactaaaaaataaagcagcacttagcagtgcttttgccaaaaacaatgaaagccaagagcatcatcgtagactctgttaccagaattggcaggttgatgtgtttccagacatgggaacaaagaccccaaattccaatgagtctggagaaattttcaatggccatctttgtagtgttttgtcaggaaatgaatgattggaaggcacttgtgtggctgctgcttggcttttaccatcaacaccacatcccactgccatttatggcccccacctccaaactcccaggccgagtggggtt

SEQ ID NO: 147497 - DNA, 367 bp, Homo sapiens
tcttgaattactgggtaaatgaggtttatatgtttctccagatgccctgtattgagcccaagagtcgtatyccaaaacattttgccaacagggtgtgcttactgtctggctgtgactgacacgatattccaccctccccctgcgcttgcttatctcttactctccctttgttactaagtagattattacactaacctgacaaagttgccatgagggtgagaagagataatggtcataaaagagttctgtaaacaaccagacttcggaatagttggacagaaaggtgttggcagagtggaggtgggggaaaaagggtgtacttgtgaagacaaactcacagacagaagctccaattgctggctctgac

SEQ ID NO: 147498 - DNA, 367 bp, Homo sapiens
tcttgaattactgggtaaatgaggtttatatgtttctccagatgccctgtattgagcccaagagtcgtatcccaaaacrttttgccaacagggtgtgcttactgtctggctgtgactgacacgatattccaccctccccctgcgcttgcttatctcttactctccctttgttactaagtagattattacactaacctgacaaagttgccatgagggtgagaagagataatggtcataaaagagttctgtaaacaaccagacttcggaatagttggacagaaaggtgttggcagagtggaggtgggggaaaaagggtgtacttgtgaagacaaactcacagacagaagctccaattgctggctctgac

SEQ ID NO: 147499 - DNA, 381 bp, Homo sapiens
gagatcattttctttgcagcaacatggatggagctggacaccattattctgaacaaactaacacaggaacagaaaaccaaataccatatgttctaacttatcaagtgggaactaaaaaattagaacacacaggcacaaatagggaaacagcagacactggggcctacttgaggttggaggataggaagaaagagaggattttaaaaatacctatcaggtactatacttattaactgtgtgactaaataatctgcacactaaactcctgtgacatgcagtttacctgtataacaacctgcacrtgtactcctaaacctaaaagttaaaaaagtttagtttcatggatgtgttgttttactagtctccatattatttatttct

SEQ ID NO: 147500 - DNA, 634 bp, Homo sapiens
cacataataatcaaactatcaaaaattaaacacatataaaaattgtgggagcagcaagatgtaagagatacatcaaatataaaagtgtcaatatgactatcagtggatcagtggatttctcagcagaaatcctaaaggtcaggagagaatggaatgatacagccaaagtcttgaagggggtgggggaaactgctaactgctaaccaaaaatactttatccagtaaaactatttttccatattgagacagtaataaaaattttcttacacaaacacccaagcttagagagttcatcatcactatacttgccttataggaattgytaaatggagttctttaaactgaagcaaaaggctgctaattaataacatgaagcatagtaaatcacagaactcaatggtatacgtagagcagagccatattcaaaatactatagttctgtaatgatggtgtgtaaaactattaataaaaattgtaggtaagataaattgccaagagatatacattataaaatgatgtaaattttgacatcaaaagcataaaatatgtgtgtggagggtggagagtgtagagtgcgtataactttctgttgccttagcaaccactttttaatgtaagtttaactttttattac

SEQ ID NO: 147501 - DNA, 616 bp, Homo sapiens
tttcttaattagcaggtatatggatgcctgtctttcatctcacgttattattgttgcagtaattcaataaaagtatcctaagcatttacattgtggagcatttttatgatttataccaacagaatggcatacacagtgttgtacatctcctttaaaagtcatcactttatttcatattctcatattccttttaagaacaagaaatattgtagttttcaggacatgcttttactttttatcatttctgtctatctgtgaatttcattctttcacatattccttaacaatcctcaaatcgattctgctgaatggtggcaatgtttttctgaaatctctcatgagagagtaatgaattgtcctcttaatccaytccattagatttttattttaaaaaataagtaacattttcccctgtctggtcactaagtagatttacactcagcctcttcaaaatgactcatgaatagtcaaaagcacaagtcctctatagagaaataaaatatatgtataaaggaaaattattataatatctttttagtattgatacaggagtggggcagggaagtgctgagaagggaagaatgtggtccctggctaggctccaccccaggcctgt

SEQ ID NO: 147502 - DNA, 616 bp, Homo sapiens
tttcttaattagcaggtatatggatgcctgtctttcatctcacgttattattgttgcagtaattcaataaaagtatcctaagcatttacattgtggagcatttttatgatttataccaacagaatggcatacacagtgttgtacatctcctttaaaagtcatcactttatttcatattctcatattccttttaagaacaagaaatattgtagttttcaggacatgcttttactttttatcatttctgtctatctgtgaatttcattctttcacatattccttaacaatcctcaaatcgattctgctgaatggtggcaatgtttttctgaaatctctcatgagagagtaatgaattgtcctcttaatccattccattagatttttattttaaaaaataagyaacattttcccctgtctggtcactaagtagatttacactcagcctcttcaaaatgactcatgaatagtcaaaagcacaagtcctctatagagaaataaaatatatgtataaaggaaaattattataatatctttttagtattgatacaggagtggggcagggaagtgctgagaagggaagaatgtggtccctggctaggctccaccccaggcctgt

SEQ ID NO: 147503 - DNA, 616 bp, Homo sapiens
tttcttaattagcaggtatatggatgcctgtctttcatctcacgttattattgttgcagtaattcaataaaagtatcctaagcatttacattgtggagcatttttatgatttataccaacagaatggcatacacagtgttgtacatctcctttaaaagtcatcactttatttcatattctcatattccttttaagaacaagaaatattgtagttttcaggacatgcttttactttttatcatttctgtctatctgtgaatttcattctttcacatattccttaacaatcctcaaatcgattctgctgaatggtggcaatgtttttctgaaatctctcatgagagagtaatgaattgtcctcttaatccattccattagatttttattttaaaaaataagtaacattttcccctgtctggtcactaagtagatttacactcagcctcttcaaaatgactcatgaatagtcaaaarcacaagtcctctatagagaaataaaatatatgtataaaggaaaattattataatatctttttagtattgatacaggagtggggcagggaagtgctgagaagggaagaatgtggtccctggctaggctccaccccaggcctgt

SEQ ID NO: 147504 - DNA, 465 bp, Homo sapiens
aattcttcttttagctgttcacactcctgaaacttaaatctagagtataaagtaaattattattaacatgtcttgtattagatgggaacaaaatgtgagagaagaagaaaacaagacacttgttttatatatagaaacatatcaaacaatggaagaatttcttataattattactgtataactacatgactmtatctagaatttgttgctatctttctctattacacatcctatattccctttgtcttcagcaagcccctaagctgcctcagatgcttccctgtgttgggtatctgttgcagtattacaaaatatccctaaaccccaataaacatttactacctcacagtttttgtgagtcagaaatccaggagtcacctagctgggtgatttggcctcagagtctcctgaggcattagccagggttgttgtagtaatgtaaagacttaactgcagctgacagct

SEQ ID NO: 147505 - DNA, 465 bp, Homo sapiens
aattcttcttttagctgttcacactcctgaaacttaaatctagagtataaagtaaattattattaacatgtcttgtattagatgggaacaaaatgtgagagaagaagaaaacaagacacttgttttatatatagaaacatatcaaacaatggaagaatttcttataattattactgtataactacatgactatatctagaatttgttgctatctttctctattamacatcctatattccctttgtcttcagcaagcccctaagctgcctcagatgcttccctgtgttgggtatctgttgcagtattacaaaatatccctaaaccccaataaacatttactacctcacagtttttgtgagtcagaaatccaggagtcacctagctgggtgatttggcctcagagtctcctgaggcattagccagggttgttgtagtaatgtaaagacttaactgcagctgacagct

SEQ ID NO: 147506 - DNA, 465 bp, Homo sapiens
aattcttcttttagctgttcacactcctgaaacttaaatctagagtataaagtaaattattattaacatgtcttgtattagatgggaacaaaatgtgagagaagaagaaaacaagacacttgttttatatatagaaacatatcaaacaatggaagaatttcttataattattactgtataactacatgactatatctagaatttgttgctatctttctctattacacatcctatattccctttgtcttcagcaagcccctaagctgcctcagatgcttccctgtgttgggtatctgttgcagtattacaaaatatccctaaaccccaataaacatttaytacctcacagtttttgtgagtcagaaatccaggagtcacctagctgggtgatttggcctcagagtctcctgaggcattagccagggttgttgtagtaatgtaaagacttaactgcagctgacagct

SEQ ID NO: 147507 - DNA, 448 bp, Homo sapiens
acaacccccgtgataatctccacctgttccctcccacgacatgggagtataggactacaaggtgagatttgggtggggacacagtcaaaacatatctttgatacttgtatcaaagatcaaaacatatttttgatacttgtatcaaagaatttgaggacatattttaaaagcattgtggtcttcatgattagttcacatgaattattttaatagctttctwattgttctttctgattcttgtggaatcaactacagttcattctacacccaacagctgaaataattattcaaaatgtaaattagatcatttagcatccctgattgatgctttccagtagctttcctttaaacctagaatgaaattaaaatggctactaatgccaacaaactcttacatgctggcaactgccaacctcagtgactttaacttttaccagtttcattctct

SEQ ID NO: 147508 - DNA, 607 bp, Homo sapiens
tctgcaattttaatggtccctaaatcctacatttccaagtagttaggaagtggcaaaagattggaaccatgcacatatggctgcatgagtgggtaatgcctgctgagcatacacagatggcgagaatcattgcttccctatctgaggtccccggaggtgggagggcactgtgtgagtctcttctactcargctctacgcctagtgattggctctggtattcattactatgcttaataagtatctggtctttttttccttctagtactggggaatctgaattctacgaccctttggtgactgggtggcaccatattattatatctggccaatgagttgtgaacaaaagtgatgtgtccattcggaattggagtatttaattacttatgtgaaactttccagaatatattttcactctgtgatggcaaattttaagataatggcttctcaattagcacgttattagagcaagatgacaccaagaaaagctcccagcatgatttacatataaatctttgttattttaagccactgagatttttgaggctgttccttatcacagcataatttattatatcttgactgatacagaagtatatgcctagaagt

SEQ ID NO: 147509 - DNA, 496 bp, Homo sapiens
ttgccttccccaacctccaaagccattgattcaattttactaactgccttagtaagagagaagtcactacgtaaaagaaataagttagtagacagctcctgaaagagaagtaattttcttgaatactgtgagttcagctttaaatagtaacaacaacagcaaaataacytaaagcaagaggacacaatatttacctataaataaccattggaaagacagtaattcaagagccataaaactccaaacatgagaatagatgagaatttataaagctgatattggggaggaaaattagaggggccataactataaagggagatgctaaattaggatgtacttcatggaacagaaaggaattatctactaaagagagcccaaagtatatccaaatgcaacccattaatcaaaagtgggaaacaagtcaatgtgcaacaggccttctgttgccattcaaataaacactgtgaacttcctgcaggatagagtttcattaacc

SEQ ID NO: 147510 - DNA, 560 bp, Homo sapiens
acttcctgcaggatagagtttcattaacctactataataattcctgtgagggtgccccattaacatctgactccctgtggctcatcratgaataagaaggagtgccatttgtctgttaatattttgttcagtcctttacgaattatggtgaatcaggatagtcataagctcctcaaaacaatggtttgatcacctggatgtaaaaaatagacaggggcactatggaaggaaaagcttccacctcatattcctaattgaatggggactagatggaatcaactcaagatttcccctgacccaagccagtattgtgaaattcacaagtattatagaaagactgtctgggagtgggtaaaatatattgaaataaatataataaaatggagagttaaaatttactgatccccagtatttgttagcataaagtcaggatgataaagcttacatatatagtacacaaattaggtgtgtttgaccaggctggcatagtaattattttctaataaattaggcagttcctatggtaacaaatttattcatttacataatatatattgagt

SEQ ID NO: 147511 - DNA, 567 bp, Homo sapiens
atttgttagcataaagtcaggatgataaagcttacatatatagtacacaaattaggtgtgtttgaccaggctggcatagtaattattttctaataaattaggcagttcctatggtaacaaatttattcatttacataatatatattgagtagctaatgtgctatttctgtgtagataggaggaagtttctgggtctaaatactatacagctccagagtgttttctgtggttgtctcttttcttcacttacagtctcatcaagtttgagagtttaaacttaatacatactctgatgaatatctaatagatacccttaatataaagcttacctcttatctccagacttgcatatctaactgattacttgatattcccatttggatctctgtattggtctgggatatatatatatatatatagacacacacacacacacacacacacayatggagagagaaagagagattgattgatttactatagggaattggctcatgtggttatggagactaagtccaaagatctgcaatcagcaaactgaagacccaggaaagcttattgtgatga

SEQ ID NO: 147512 - DNA, 369 bp, Homo sapiens
ttctggccttgtgtgtgggttggcgattattccatctgctccttccaggcaggtgtgccccaggtgacaggtagctccttacagctgtgtgccaatcagcactcagctgaagactcaaggagacctgaagatcttcaccgcttctctatgaggatttttctctctctggttttctgccctgccaactctagcctttctaaaatcccgagtctttctcctcaacttagggattgtggtggactctttcgaggtcctgcttttctgtgccatggcaaggaagctcactcagtgtgggtctggycctcagcaggatgctctgggctggtgatgtacatttgcaggttaccaatatgtacagcgaggggtgcc

SEQ ID NO: 147513 - DNA, 609 bp, Homo sapiens
gaatgacaaagaaatacaaaatctgagcagatgaataacaagtgaggagattgaaccagtaatraaaagtctctcatcaagaaaagcccaaggcctgttggcttcgctgctgaatgctgccaaacatttaaagaactattaccaattccccactgacttttctaaaaaaatcacagaggaaagaatacttccaaagtctttttacaaagtcagcattacccctatactaaagccagacaaggacatcacaagtaaagaaaactacaggccaatatccttgataaatatagatgcaaatatcctcaacaaaatactcacaaataaaattcaacaacacatgaaaaggatcatttaccatgatcaaatgggatctatccctgggatgcaaggatatatccacattgacaaattattaaatgtgatacaccacattgacagaaaaaataagtcatatgatcatcacattagatgcagaaagaaacacttcacaaaatttaacatcctttcatggtaaaaaaaaaaacactcaaattgtatataggagaaatgtacttcataataaaggccatatataatctcacagataacattatactcaatggtgaaaaa

SEQ ID NO: 147514 - DNA, 609 bp, Homo sapiens
gaatgacaaagaaatacaaaatctgagcagatgaataacaagtgaggagattgaaccagtaatgaaaagtctctcatcaagaaaagcccaaggcctgttggcttcgctgctgaatgctgccaaacatttaaagaactattaccaattccccactgacttttctaaaaaaatcacagaggaaagaatacttccaaagtctttttacaaagtcagcattacccctrtactaaagccagacaaggacatcacaagtaaagaaaactacaggccaatatccttgataaatatagatgcaaatatcctcaacaaaatactcacaaataaaattcaacaacacatgaaaaggatcatttaccatgatcaaatgggatctatccctgggatgcaaggatatatccacattgacaaattattaaatgtgatacaccacattgacagaaaaaataagtcatatgatcatcacattagatgcagaaagaaacacttcacaaaatttaacatcctttcatggtaaaaaaaaaaacactcaaattgtatataggagaaatgtacttcataataaaggccatatataatctcacagataacattatactcaatggtgaaaaa

SEQ ID NO: 147515 - DNA, 519 bp, Homo sapiens
aggatttcttttcactaacaacaaactttggaaaagaaatcgagagaataatcccatttataatagytataaaaaataaaataggaataaatttaatcaaggaggtgaaagacttttacaccaaaaagtataaaacattaatgaaaaaaattgaagacacaaatatatggaaataattctggctggaataattaatattgcaagccatgtatctgatagagaattagtattcaaaatacctaaggaactcaactctatagaaagaaaacaatctgattaagaaatatgcaaaggacctgaatagatattgtaagaattacactatgcaaagaaatttacagatttattgcaattcttatcaaaatcccaatgtcatttttcaaagatatagagaacacagtcctaaaattcatatggaaccataaaaaactcttaatggccaaggcaatcattagcaaaaggagcaaagccagaggcatcacactacctgatttcaatctgtactgtactacaaaacag

SEQ ID NO: 147516 - DNA, 519 bp, Homo sapiens
aggatttcttttcactaacaacaaactttggaaaagaaatcgagagaataatcccatttataatagttataaaaaataaaataggaataaatttaatcaaggaggtgaaagacttttacaccaaaaagtataaaacattaatgaaaaaaattgaagacacaaatatatggaaataattctggctggaataattaatattgcaagccatgtatctgatagagaattagtattcaaaatacctaaggaactcaactctatagaaagaaaacaatctgattaagaaatatgcaaaggacctgaatagatattgtaagaattacactatgcaaagaaatttacagatttattgcaattcttatcaaaatcccaatgtcatttttcawagatatagagaacacagtcctaaaattcatatggaaccataaaaaactcttaatggccaaggcaatcattagcaaaaggagcaaagccagaggcatcacactacctgatttcaatctgtactgtactacaaaacag

SEQ ID NO: 147517 - DNA, 445 bp, Homo sapiens
caagtgttagtgaactgaagaaataagagtttcatacattgctagcagaaatgtaaaaaggtgtagtcacttggaaacatttagaagttccttaaaaagttaaatacagaactatttctatatcagcaattccactgctaggtatacacccaagagatattaaaacataggaccacaaaaaaaaacttgcaattgaatgtttatagcagcattatttctaggagacaaaagtagaaacccaatgttcatcaacaaatgaatggataaacaaactgtgttatatagatacaatggaatattattcagctataaaaaggaactaagtactgacatatgctgcaacttgaaccttgaaaacattatgctamgcaagagaagctcgacgtaaaaagacatatattgtatggtttgctttttggacccagaataggtaaatccatagaaa

SEQ ID NO: 147518 - DNA, 596 bp, Homo sapiens
acctttagggcctggtagcatttccaagtctttttagaagagtgtttcccaatcttgctctaggaagcactagttctgaaaaatactaacagatattaaacaaagagttccatacttaaaaaaatggtaagaatgactgcaaggtatttctctttcttgtagaatcacaatgcacatggacatagtaaaggctctaaaaagtccttcagtagagraaccacattaggtgtgctaaaccccagcattcctaaactcttctattctggaagcagtgttccaccaaccaaagtcgggagaccctgccgtaggaaattctgcagatgacctgctggaatctgcacgcccaccgctgcatggtgcttctgcttatttgcatgagagcattatgcattttgcccttgacaccagggcagctcatactgtgaaatcacagccaacaaggttttctcgaacaccaggaaattacaacacttcctggcttacacatctaggcttacaaattaagaggataatccaaaccaactttaaattcccttaaaaataggtttcctcttttgagtgaaccattgagtaattctgctataaataaagtctta

SEQ ID NO: 147519 - DNA, 548 bp, Homo sapiens
ttttgtttttaaacctcacagtcttgcaggtgtcattgtcctcattttataaacaagaagagtgaagttcatacatggtgagcaggttgttcaaaagcacacccctaagaagtgacagggccaggactcatctcttcccttctcaacacttcctctcctccttgctgggtggggtggcaggcagagggagaacctgcaaattaactggagaaattggaagacccaaagtcaatggtttatgtgtttctcattaaaataaaagagttccctgtaatccactagccacagaggaatgatattctatttgtaacatgctctacacagtgcctggcatgaaacagtcactgaataaattgtggcyaaaacaatagtctatcatcactctcttgttttaaaccaaaatgggaccatattgctctagtgcagtggttctcaaccagggacaattttgccccccagaggacattcagcaatgtctggtgacattttcagttgtcaaaactgggggtggggtgctactggcatctagtaggtaaaggccaggaatg

SEQ ID NO: 147520 - DNA, 471 bp, Homo sapiens
ggtggtcatgtgaaggtcgaatcgtatcccatttggcctgtgtctcagtacccagggcccrggatctgtgtgcagggctggggggctacggatcctctctaggagtctcagctttgacactgagtcatcttttgaaagtacgtatatgataataaaggtaatcatttttgagtacttactgtgtgccaggcacagagctagacccctcccatgcatttgctcatttagtcctcacaataactcagtggggtaggtagcatttttatccccattttacagacaaggctctctgatgctcagaacacccaaggaacctgtccacatttcccagctgtggagcagcagagcctgcaataaacacagattggaaagccccccttgctttaagcaagtgctggttaatgtcctacaataggactgttatgagcactacatttcatagtgcaggagagaagagcattggctaatggg

SEQ ID NO: 147521 - DNA, 503 bp, Homo sapiens
gaattccaagctcccttttcagaaagaccccactggtggtcatgtgaaggtcgaatcgtatcccatttggcctgtgtctcagtacccagggcccgggatctgtgtgcagggctggggggctacggatcctctctaggagtctcagctttgacactgagtcatcttttgaaagtacgtatatgataataaaggtaatcatttttgagtacttactgtgtgccaggcacagagctagacccctcccatgcatttgctcatttagtcctcacaataactcagtggggtaggtagcatttttatccccattttacagacaaggctctctgatgctcagaacacccaaggaacctgtccacatttcccagctgtggagcagcagagcctgcaataaacacagattggaaagccccccttgctttaagcaagtgctggttaatgtcytacaataggactgttatgagcactacatttcatagtgcaggagagaagagcattggctaatg

SEQ ID NO: 147522 - DNA, 544 bp, Homo sapiens
gctcagcttgtacgcaggtttccactcctgggcaatgcccctgtgacttgcacatctagcttaattgaatgttctcagtargagaactagatgctccattagatttgtcctcacatggaggccccggggaaagtgtgtcttggagttccttcagccactaagtagggctgggtctagtcttaatttttcatgtaaattgtgccccttcttaaggcagaacaggagaacagggggattacaaatcctcatccctcccatggccacaaggactcaaattgctctggtccaagaaggggccctttgcaatccccttgtcctctccaacctcccccaacagttgagagtaggtagtaagctggcagtggtcaatccaaaccacctcttcccaagggagctgttcctgcctctctaccaaggatccttggaatgcccttggcaatcccatccagtgaaacttgagattccctgacttttctttccactagacctaaggaatgtatggcattttcatttgacatattatggaaatctttgcaaatcagta

SEQ ID NO: 147523 - DNA, 568 bp, Homo sapiens
gctctgcccttcgagtaagcaagaccctgaaatggctgcaggaattgcagctgcaggtttagatttgttcagtccctcaagaccatgtgtttgatttgcctgggaatctgtctttacaggcactggtcacctgggaaggtgatgtccttgtgtgtgtgcaaaagggggagaaggagaaccgcggctggaagcagtggattgagggggacaagctgtacctggtaagtactgggttctgctcagctcacttccattgtgcttacacacgctactgtggtcacctagccaggtgttttgacaagaaaaatggccctgcactcctaccccgagctccagccaartgcatgtggtcatatagtcagaaagccattcccatctggctcaggggactccaggaagaaatctatatggctgtttctgtgaacagctgcaattcaaaagaaagttcaaaatgctgagttaggaagcagagatccaaggagaaatacagggaacctgctaaagaccagctggggagaaatgtgagccacagaatttagatgccctggaggagggtgggacagggcct

SEQ ID NO: 147524 - DNA, 550 bp, Homo sapiens
gatctgtcttgtgttctctagattaaatttgcataggtcagatgctattaatataaatattttagaaactttatgccttatgagttattcatcaatgccttgctttctgtatatgtttcaattttaaggaaaacactgatcaaaaagtcttataaagtagttctgttgaattttcctatatttgtctgagtcttagtagtgttttacctgatkatattgagcaatagtgcatttcaattgttgtttaaaatattaattggccacagccttttttcattttttaaaaagcttgaatcgaataattttaggccagtggttctcaatgcacagatatactcacaaagttttatagaaatagagaagtctaagccctactccagacttactgaatctcttttcttgatattcttggtatgctatttacatgctaaatctaaggattattgtgtgttgtagctcaataatttttcctctataaaacatattcatctagttttataaagtggatatgacattcactaatttcttaaaaagtagacttaatcattac

SEQ ID NO: 147525 - DNA, 550 bp, Homo sapiens
gatctgtcttgtgttctctagattaaatttgcataggtcagatgctattaatataaatattttagaaactttatgccttatgagttattcatcaatgccttgctttctgtatatgtttcaattttaaggaaaacactgatcaaaaagtcttataaagtagttctgttgaattttcctatatttgtctgagtcttagtagtgttttacctgatgatattgagcaatagtgcatttcaattgttgtttaaaatattaattggccacagccttttttcattttttaaaaagcttgaatcgaataattttaggccagtggttctcaatgcacagatatactcacaaagttttatagaaatagagaagtctaagccctactccagacttactgaatctcttttcttgatattcttggtatgctatttacatgctaaatctaaggattattgtrtgttgtagctcaataatttttcctctataaaacatattcatctagttttataaagtggatatgacattcactaatttcttaaaaagtagacttaatcattac

SEQ ID NO: 147526 - DNA, 398 bp, Homo sapiens
gtttgaagacccccactgatagctgggatggctcagcagtgtgatttaattctcccactctccccatgttaacttttggtgggactggatttttcattttaagttttttatcttgtgggaatagactagttatttcaaagagaatctgatttgtcataagaacagaaaaaggaggtgtggagccaaggagggggactatcacttaaacacaaatgacagggaaaaggaaataagtaatgttggaaggtgaatgcctaacaaacaatgataattcattttcttgtgacacaaagtagaacttatgaaaacaactttccctaggacccaataacttattccatgacctccctytgaagtcagcagccagctgtctttgctagatcaggagcagtgaacat

SEQ ID NO: 147527 - DNA, 623 bp, Homo sapiens
tggtacaaccaaaagactggcagctagtgtttatcattccccttcaaggctcaagacttagcaaatttatagataaaggcagtcctaatcataaacctaactgcattaggtcaaaacggtagagttggcctatcccttcctgcctaaatcttggtgctcacttcttttccttacatgaataaatgtcctgtgtggctttttttttttttttctctctccaraatagggtacgtttgtcttcattgaaaacctgttcaggtagatatcccttctccttgatgatttttttaatggtatctgggaactcatttgctgcctcttctttgtcagcagaagctgcttctcttgttatctttacattttttaagccaaacttctttcttaaattgtcaaactacaatttggtggcattaaactctccagctttcgatccttcacctttcttttgctctcagttgtcatgtaatgactttgctttttctgcaatcacattagagtctatatgtatgcctttctgatagcaattctgaaccaaaataaaatctgcattatcaatatgagataaaaacgtatttcacaaaaagcataggttttgcacctgctactatagctgcagcaatagc

SEQ ID NO: 147528 - DNA, 628 bp, Homo sapiens
acatttggcaccttagctctgccatcaattaatggacactttgctcttctatgtcaacttcatccaagctcttaccttttaggtgccttyggtcataagtcaggtacaacctgtatacaaccagatgtctccaaagcccaggaacatgtgtcaaactctctaaatgtttctctgcaggtcccctcataagtcttagtgtaggcaagcatccgtctcccagccacagccctgtgtgtattctctctaaagaaatttttgctacggttcactttaacttcctgaaaggtcctttactttcccttatatatcccaggtactatcagaaccacttccatcattatttagtctgtgaaggtctagtaccacattttagggtatggtatattaagcatccgtgataatattctcagccttttaaacctcagttcaaaatccaagacaatgaaagtcatatgtaacctcttgttaaactaatttttatcaaagattctttagtgccaggcttagcattgggcattttgcatgtcatttgtcaataatctaattaaagtagacatattatcacctccattttacagatgagaaaattcaggccaagaattggtaaataatgagaaaaaaacaaaga

SEQ ID NO: 147529 - DNA, 628 bp, Homo sapiens
acatttggcaccttagctctgccatcaattaatggacactttgctcttctatgtcaacttcatccaagctcttaccttttaggtgcctttrgtcataagtcaggtacaacctgtatacaaccagatgtctccaaagcccaggaacatgtgtcaaactctctaaatgtttctctgcaggtcccctcataagtcttagtgtaggcaagcatccgtctcccagccacagccctgtgtgtattctctctaaagaaatttttgctacggttcactttaacttcctgaaaggtcctttactttcccttatatatcccaggtactatcagaaccacttccatcattatttagtctgtgaaggtctagtaccacattttagggtatggtatattaagcatccgtgataatattctcagccttttaaacctcagttcaaaatccaagacaatgaaagtcatatgtaacctcttgttaaactaatttttatcaaagattctttagtgccaggcttagcattgggcattttgcatgtcatttgtcaataatctaattaaagtagacatattatcacctccattttacagatgagaaaattcaggccaagaattggtaaataatgagaaaaaaacaaaga

SEQ ID NO: 147530 - DNA, 628 bp, Homo sapiens
acatttggcaccttagctctgccatcaattaatggacactttgctcttctatgtcaacttcatccaagctcttaccttttaggtgcctttggtcataagtcaggtacaacctgtatacaaccagatgtctccaaagcccaggaacatgtgtcaaactctctaaatgtttctctgcaggtcccctcataagtcttagtgtaggcaagcatccgtctcccagccacagccctgtgtgtattctctctaaagaaatttttgctacggttcactttaacttcctgaaaggtcctttactttcccttatatatcccaggtrctatcagaaccacttccatcattatttagtctgtgaaggtctagtaccacattttagggtatggtatattaagcatccgtgataatattctcagccttttaaacctcagttcaaaatccaagacaatgaaagtcatatgtaacctcttgttaaactaatttttatcaaagattctttagtgccaggcttagcattgggcattttgcatgtcatttgtcaataatctaattaaagtagacatattatcacctccattttacagatgagaaaattcaggccaagaattggtaaataatgagaaaaaaacaaaga

SEQ ID NO: 147531 - DNA, 628 bp, Homo sapiens
acatttggcaccttagctctgccatcaattaatggacactttgctcttctatgtcaacttcatccaagctcttaccttttaggtgcctttggtcataagtcaggtacaacctgtatacaaccagatgtctccaaagcccaggaacatgtgtcaaactctctaaatgtttctctgcaggtcccctcataagtcttagtgtaggcaagcatccgtctcccagccacagccctgtgtgtattctctctaaagaaatttttgctacggttcactttaacttcctgaaaggtcctttactttcccttatatatcccaggtactatcagaaccacttccatcattatttagtctgtgaaggtctagtaccacattttagggtatggtatattragcatccgtgataatattctcagccttttaaacctcagttcaaaatccaagacaatgaaagtcatatgtaacctcttgttaaactaatttttatcaaagattctttagtgccaggcttagcattgggcattttgcatgtcatttgtcaataatctaattaaagtagacatattatcacctccattttacagatgagaaaattcaggccaagaattggtaaataatgagaaaaaaacaaaga

SEQ ID NO: 147532 - DNA, 437 bp, Homo sapiens
ggcttggtatgagactaaaaatgataggcgagtaactggcacactttaccccatttcagtgcatggcatttgctcacacatttctattcatatttcaactaacatataacaatcattacaacctcattcttccacttaaaaagatgcaactatttttttaaaaaaacaaagttgtcatactttcctcaaaaacaaaasttccaacagacactattagtatttgagtgatgtaaattcctcttatttttttttttaaagtttactttaagttctgggatacaagtgcagaacgtgtaggtttgtaacataggtatatgtgtgccatggtggtttgctgcacctatccacttatcatgtagttttgaaaccctgcatgcattagctatttgtcctcatgctctccctcccctcccctcacccccgaaacccctactagc

SEQ ID NO: 147533 - DNA, 592 bp, Homo sapiens
acacatcactcattttccagccttcagatgttccggtgtcttccctatggctctcccagtacctgcaggtcacaggacaacaggggctgtggtaaagtcacctaggtgttcctggaacaaaggaaatggaacactggagcaaattattcttcttattcagtcacattttcacctaaatattcagtaaagtagtaactaaaaaaacttaattaccattgataaattttatattgcatattagggaaaaagaagaagggaaatatgcaatgaaatacatactaaataaataaagaataacatattttttgtaccagatgtttttatttatgtgactggtcattattcctccacaaactgtatcrtatcctttgccctgaagcctcagggtgaaagaatctggggtcaagattctttttctggtagagtgaactaaaacttcatttctgaagggtctgagccctctgcagccctgacttcaggacctaatttttcattaacttttactaattgattttgaagtagtgagaatcctttagaattcccagagttctagacatagtctttctttcttccttttttttttttttttttg

SEQ ID NO: 147534 - DNA, 633 bp, Homo sapiens
atgtgcttgcagtgtagctacttgcaaggctgaggcgagaggtgggaggaatcacttgagcctaggagtttgaggctgtattgccctataattgctcctgtgaatagccactgtacctcagcctaggcaacatactgacacctcttttctaaacacacaygcacacacacacacacacacacactccaaagcaaaaacactgctaacaaaggcagaccagttgtttgttggtagagatgaaaaggcaaagctatatttaaaaaaaaaaaaaaacactgtgaaggtagcagtaaaatatggtactggattaagtgacaacataaacatagtaaagtggggagatatttcctggttttgtttgggctttgtttcttctctacttttcccattccttgtacttttagtcacactgtcagtaataagattcttcctctttctggtgcaggtaatctaggcttgggcaatctgtatggcaaacagtaattgcccatgtgatgggcttgtgacctaagcaagtgtattcattctctactgctgctgtaacaaattacaaaagtttcatagcttgtgtttaacacaaatttagctacacaaaattattattttataattctgtaggtgacacatccagta

SEQ ID NO: 147535 - DNA, 551 bp, Homo sapiens
aagaaactgagcatgcagggctcgtcttcttccctctgttctctataggatgttttttattttggagaacatctgcttcggttggttcttggccatatggtaacctgaaaacaagccctgtacctgccagggaaggcctactgctgcctgccccaccctgggactctgaataactctgattaattcaggagagaagtaatagcaagtccttgactcagggctaaagctgcatttcctaatttgattttaattagcaataatgtttattttgatatctgtctgtctaactcctgtgtctatctctcagctgagttcaaactcaggagggcaaaaatgaattacacgggtaagtgaygctaggacttccattggatgcagtaatggttgatagttggtgttgtcaccctttagttgctattaccttttgtgggtgatagtttatttttatagacaggaatattctatatttataggaaggaatgtacatagattcttggcagcttaaggtggagtgtagtgaggaaacataggtttttgtaaactcagcattt

SEQ ID NO: 147536 - DNA, 539 bp, Homo sapiens
aataattctgcgaatagcagaattattactgaaacctctgtaagcattacaaatcaatgtaatgggtaatttaaaaaaatttttggtaatgtactcattgtatttttggagtaaagatgttaattatttgctgcgtgagtaaaacaattaaaattctactattgaaccagttcttttcatgttggacatgaattatcacattttgtgtgtacttgcaaggctcaaaggatttgccaraaggagacctgcatatttctcttattttcttcttttgggcaaaaatcaaagatcattcttctgagtttttttttttttcttttcaagcctagctttactattaaaatagcaaaatcctaccttgtataatctttattacatattatttgggtataacttctttactttcgttgtatgttagttagagttttggcctatttcagtttattctggtattttatatccattgaaggggctgagaaattcatattattgaggtagccatccaaatgagctgttcaatagaatattgacttgacttt

SEQ ID NO: 147537 - DNA, 539 bp, Homo sapiens
aataattctgcgaatagcagaattattactgaaacctctgtaagcattacaaatcaatgtaatgggtaatttaaaaaaatttttggtaatgtactcattgtatttttggagtaaagatgttaattatttgctgcgtgagtaaaacaattaaaattctactattgaaccagttcttttcatgttggacatgaattatcacattttgtgtgtacttgcaaggctcaaaggatttgccagaaggagacctgcatatttctcttattttcttcttttgggcaaaaatcaaagatcattcttctgagtttttttttttttcttttcaagcctagctttactattaaaatagcaaaatyctaccttgtataatctttattacatattatttgggtataacttctttactttcgttgtatgttagttagagttttggcctatttcagtttattctggtattttatatccattgaaggggctgagaaattcatattattgaggtagccatccaaatgagctgttcaatagaatattgacttgacttt

SEQ ID NO: 147538 - DNA, 605 bp, Homo sapiens
ctattagttcttttgtgttgtacrtactggagaaattcttccagttatgttgaggactgccttttccagggtgttgactaacacttgtttcttagactaattttgaggatgatatcctttttccattgaggccattgtagacttgggggtgggaaagtcttcctttcccgtttacaatcttcctcctttgaacatgttggaactattgtaataggttgtgtaaaagtatttgaaattttatgaagtctttattgaagacgtgtcaatttcaaagaggattacaacatgacattaaatagttgaagttatagaaaacataatccttcacccagcatttcacggaggaaatatttaaggaattaatatcttcacaaaatgtgtcttcttctgattgacctccaattctgtctttctattctcctctctttagtttttggcatgactccaaatctccacccacttttttttaaaaaatttatttgacattctggggtacatgtgtaggacgtgcaggttgttccgtaggtaaacttgtgccatggtggtttgctgcacttaatcaacccatcgcctaggtattaagccctacatgcaccttagctgtt

SEQ ID NO: 147539 - DNA, 605 bp, Homo sapiens
ctattagttcttttgtgttgtacatactggagaaattcttccagttatgttgaggactgccttttccagggtgttgactaacacttgtttcttagactaattttgaggatgatatcctttttccattgaggccattgtagacttgggggtgggaaagtcttcctttcccgtttacaatcttcctcctttgaacatgttggaactattgtaataggttgtgtaaaagtatttgaaattttatgaagtctttattgaagacgtgtcaatttcaaagaggattacaacatgacattaaatagttgaagttatagaaaacataatccttcacccagcatttcacggaggaaatatttaaggaattaatatcttcacaaaatgtgtcttcttctgattgacctccaattctgtctttctattctcctctctttagtttttggcatgactccaaatctccacccactttttttwaaaaaatttatttgacattctggggtacatgtgtaggacgtgcaggttgttccgtaggtaaacttgtgccatggtggtttgctgcacttaatcaacccatcgcctaggtattaagccctacatgcaccttagctgtt

SEQ ID NO: 147540 - DNA, 629 bp, Homo sapiens
atctctggggccaaatgcataagcacaggctcctgtatatccaaacactctgaacagaaactgctgtaaggatgacaggactaccaggtgagatcttcttggtcaatatcgagacattttgaaaaagtgcacagctaaacataatgcactgcttcacgtctctcgtattttccatgactcctcagtatgaacccctctgctcagtttgggttgggggkatgttttatgcagagccaatgtgttgatattacaaattacgacaactggtatcatgaatcgatcagctagtttattttttgaaatagtcagaaaagcattaaatggaattaaaaagagcagcattatagattgttctggtaaagctttaatgctgcattttcatcccatgaaataaggtcctaactgctagagtggctataataaggtcttaatggtattttttgtcctattttattattgccttcaggcaggctatgagctttatgaatttttagcttaccagagtagatagttagggaaggaagagtttttctttccttatttgtatttagtgtatctccacactttaaacttgacttaaactaagagaactatacaagtttcttggcatggctttaaagaaagcactc

SEQ ID NO: 147541 - DNA, 420 bp, Homo sapiens
atttaaaagactgaacttctcttaaatgttgcatatttttaaaaatgaaagctcctatgtttcctgggcttggattaatatgtagagtaggagttggtctaatayctaacctaccaaattcctatgtaatgttataggttgacgataacgcctcacaggaaagaggtaggaaacaatggtaaccatagcaagggaagttttctagcacaagtaaaatatatgatatgacaatcagcacgatgtagtgtgatagcagcaatcctgtgtaaacgaggagattctgtgcattgcttcttcagaactgtggctttcactgacatttacaaatgaggatgggaaaatgatatgaccctttctgggcagccactgccataaagctgaaaagtgttgcaatgtctgacacgtatcttatcaagtttg

SEQ ID NO: 147542 - DNA, 437 bp, Homo sapiens
taaaagactgaacttctcttaaatgttgcatatttttaaaaatgaaagctcctatgtttcctgggcttggattaatatgtagagtaggagttggtctaatacctaacctaccaaattcctatgtaatgttataggttgacgataacgcctcacaggaaagaggtaggaaacaatggtaaccayagcaagggaagttttctagcacaagtaaaatatatgatatgacaatcagcacgatgtagtgtgatagcagcaatcctgtgtaaacgaggagattctgtgcattgcttcttcagaactgtggctttcactgacatttacaaatgaggatgggaaaatgatatgaccctttctgggcagccactgccataaagctgaaaagtgttgcaatgtctgacacgtatcttatcaagtttggatcgaacaatttggaaaca

SEQ ID NO: 147543 - DNA, 495 bp, Homo sapiens
attctgcattaagtccttctgtaaaacaaataattgttttgcttattaatcataactttggatatctgtttgcaaattggcatcatatttgctcacagttctgcaattcgtctttttctctaaacattgtgtttttgaaatttatccatgtttatatacaggtagctctagttcattcactttaaatgcttcacagtattccatcgtaggaatgcattaagatgtgcttattattttattcatgggtayttgtattgctttcatctatttgctgttaccataatgctaaaaaaaattattgtacatatctcctttggcatgtatgcaagagtttatctgagagaatatacctgaattggaaacacggaatttatggcacaccttcaacattaatggcaaatagcttctgaaagtgtttgtatcaatagatactacctcagcaatttctggaagtttcccctgctcattcatttgttcatttaataaatatttatt

SEQ ID NO: 147544 - DNA, 600 bp, Homo sapiens
aataaagccaagagtgcatttattgctttgtacagaaatctctaccaaactgactgaagatttagctttcttgccaagtgatgagaaaacaactgacatacctatggaagagcagagaatactgaccatagtaaacccagaaaaggaattaaaaataaaagacaagttgaaactggatggtatgcaatggggatcccctttcttaagtgtttaattagaattcatttcattaaaccacagtcatagaaattttcctaaaagtaattcttctactgttataagaaaccccacacctactgtcatgatgattttgataaacacaaattactaatcacttacttaatacttgattttgtttcattttactttctcttaaaatctgtgttttaggtacattatacctcttcttttgttgaattctcacaactctaacttacacattaggttctatcatcctcataatacagataagaaagttgagtctcagaagtgctgagttaatgcccaagatctcacagctaataaackgcaaagcaaaggcaggtccagctgaaattatgtatactccacagcttcaaacgtcccacgtccagaattgat

SEQ ID NO: 147545 - DNA, 597 bp, Homo sapiens
aagttttccttgtcaccataaatggagtctccttccacctagtcacttaatttagagccccaaagtcatccttctgactccctattattctatttctacattctatctatcattaagtctattaggcatttattaagtcttcccctagttatatttaaaatctaccctcttgttgcgcctccacagccattgctctgggtcaagccactatcagttccagcctggataatcatgttagtcttttatgtgagttaacagattccactatctctgtctccaatttgttctgtgtacaaaaccctgagctctccttacaaaactaaatcggatcatgtcacttccatgctyataacccttatatggattcctactgcacttgctaaaaaatataaagtccttgatatgacgaacaaatttgtaccatcttacctctttcctactactgcagtccaggagtctctctaattacactaacctaaaggcttgggtttgccaatctcttccaggtttaacacatgctatttcctctgtctagaatagcttttctcttctctttacctggctaatatttattaatccttcaggtctcagctctgg

SEQ ID NO: 147546 - DNA, 608 bp, Homo sapiens
taggcagtaattaagttcctgaatgaaggaaggaataaatgaacatgaattgagggcattaaaaaaatggcttcacagtgtcactcaagcctctccggtggaatgtgcagtcgtggtttagaataaattttgtacccaaggaaatgtctggaatgaagtcattcttcaactgtttattaaatggatagatgaataaaacaggaatggaataaattagaaaacagcatcaatcgtaagaaaaaagaataggatctgatatcagagtttaggattcatttaccaaaactgtgttgagtatattccatcaataaatatgcacctgctctgtagkaggcaatatggaggatgagtacacactctcgaaaatggaacagactgatcaagtaattataaatgatgataagtgctatgaaggaaaattcttacactttcacagtgtattagttcgttctctcactgctatgaagaaatacccaagactgggtagtttataaagaaagaagtttaattgactcacagttccccatggctggggaggcctcaggaaacttacaatcatggtggaaggcacctcttcacaaggcagcgggagagagaatgagtgctga

SEQ ID NO: 147547 - DNA, 631 bp, Homo sapiens
agagatttggctctaaattgaatcaacaagcaggctgtatttccagggaggaccatcccagggaggataatgggttgggggtggtccttgttttttcgtttcttgaagattaaaaataaagttgtgaaatataaaaattggtaagatcaatatcaatttccattttaggatatccccagatcagtgaagaggagactatagtgtttgaaagacttagaaattcatataccataatgggctttgaaattctctcaaatctcagaatagattttaattcagtgatttttaaaggccatgattcctttgaccagttcacagagatacttaccattttgtttcacttagttgtttaacttgtaagtaaattcctcgtatctctaagactagccccccaaaaatacaatactgtaataaaaatgatcagaattttctcttcaccactagtgactgcctccttctctactcatgtagacctatagaagctcttcgatggccccaagcttatcaaatccaaaatccacatcatgaaaacatccaaatttcaatktttctcctttactgtggagtcagcttcacttcagggccatattaaattttatctcaatatctgaaagaataattacagaattac

SEQ ID NO: 147548 - DNA, 553 bp, Homo sapiens
aaggttctacataaaccctaccatatcaagaaaataattttaatacagaactgattattctaccagaagactttcattgttactgatgaaatgaaaaacatatcaagatcaatcaaaataaccatctttaatataaaactaagtttatagactgtaagttcttactttgtcctcggggttccaatggagtttctgttctaaatcagtcccaaaattgccactgtgcaaaactgatgagcaagtcagcactataaaaacataagtcaaggaagaatctcagagacgatctcagagaacaaaaatcactttacagtctaaaaggattactcacacatttattgctaaggtctaaacccattttcttaaagacttaatgttacacagcagtgrtactgtaaaactaaaaatgtgctgctcagagggtcacaacaaaatggttctcacagtcaaaccccacctctttgctcagaaaattagcagttctatcataatctttaactagataatggttctcagaaagggcatttactcatccctcatttctttgaagtga

SEQ ID NO: 147549 - DNA, 545 bp, Homo sapiens
ttcctttcatttcctcatatacaaggcaggacacctaggaatgcaggcaatcaatgaaaacatccaaacaagtagataaaataggtaaatgattataaattgttaggcatattaaaaacaaaacttttaaaatctgtaattgtgtcacttctaatttatatcaattttgtttcagtagtgagttgaagtaatctccaactaagtagtaatgaagactcyaataattgtcctgtggatcctaaaaaagttaaaataatttgtatttgttcagacttttaaatatgaatttttctagttgtgcaagtagctatttctaatagggtcaaataatttaaaggaagtgatttctattttgctaaggtaaagaaataacaacagcatgtaactgaatgcttcaggtttcccttttaatatatatatttatgtacttaaggaaaatacctatgctgggctaaaacacaaacctggaagtttgccacaatagaaagtcctaaacaactcagtattccaagtacaaggccagccttgtttaatttgatgataac

SEQ ID NO: 147550 - DNA, 630 bp, Homo sapiens
tccatgtggtcattgctgctaaggatgtctagtggaaaactattgaggaggcctgcatgctcctccatgaaattggtatggtttaatgggtctattatttcttcaaatattcagagaaggaagactaaacacattgctaattttgaaaaagcccctgttgacatagactcctgagagctgttcttgcaggtgcccccatccaactgcagggtcatgttgcttaaccttgttcacaggtcctataccatcctaagggccatgaatgaaattggtctgctggcacaatgtgagggttctgtccatcccgactcacaattctgacctaacaaagcttgcctcctagtgcatgggaacccctmgagtggactattcagccctccctttcttttccaactctcagattaccccattacctctgggtgatccagctcatcctgtttattggcaatttagaggcccctgtgtgcctcatgaagaattactagccaggccacacccaaattgcaacaactaaagaagattacgttaaaaagtcctcatcacttgcccacagatctgggatctcttgagaccacgcctccaaatccaactaattatgcctctggctaattctcagacccctgaaactgg

SEQ ID NO: 147551 - DNA, 563 bp, Homo sapiens
gtgccacatttttcaaattcaataattgatgggcatttgggttggttccaagtcttttctattgtaaatagtgctgcaataaacatacatgtgcatgtgtcattatagtagaatgatttataattctttgggtatatatccagtaatggcctcacaatcatgttgaaaggcaaaagaggagcaaagtcacatcttacatggtggcaggcaagagagcatgtacaggggacctcccctttataaaaccatcagatctcatgaaacttattyactatcatgagaacagcatgggaaaacccacccccatgatccagttacctcccactgcatccctcccatgacacatggggattatgggagttacaatttaagatgtgatttgattggggacacacctaaaccatatcaaggtctgacccagtacagtcccagtgatgggtggccacagagggcttgcattaccactcccttagtttcaggcagctcagtacacacagagattctgtttatttggaagaaagtaagggaaaagaacaaaagtctctgcctggtaatatagataa

SEQ ID NO: 147552 - DNA, 489 bp, Homo sapiens
tgtggacttcttgtaactcagcaagtcccttgtgagaaccctggaaggtatgcctatggagttatattaagcttctraggagcatgaggcttttaagccattgcagctttcacattttgttcaatgtgaatcttattacttcgaaactgatctgttacttggagagtcagaaaaaaataactcctatgtggctgtgggactactgcagggactgctgtaggggtctacttttataggagataaacgtcaggcaagctgtgatgcttgtccatatccttttgagtaaatctaaggattaactgtgattgttttgttttgttttgttttttggttggttggttttatttttggtcagtggatacatacatatggcatagttaagtacaattgcttttcttatgttccattgctttataaactcacagccaatatacagtcatcattaaaatttactgactgccagtaccaaatgtagaagcctccaacact

SEQ ID NO: 147553 - DNA, 539 bp, Homo sapiens
tggacttcttgtaactcagcaagtcccttgtgagaaccctggaaggtatgcctatggagttatattaagcttctaaggagcatgaggcttttaagccattgcagctttcacattttgttcaatgtgaatcttattacttcgaaactgatctgttacttggagagtcagaaaaaaataactcctatgtggctgtgggactactgcagggactgctgtaggggtctacttttataggagataaacgtcaggcaagctgtgatgcttgtccatatccttttgagtaaatctaaggattaactgtgattgttttgttttgttttgttttttggttggttggttttatttttggtcagtggatacatacatatggcatagttaagtacaattgcttttcttatgttccattgctttataaactcacagccmatatacagtcatcattaaaatttactgactgccagtaccaaatgtagaagcctccaacactgtaagagcatggcaagataggctttaggatgggtcagccctgacattactca

SEQ ID NO: 147554 - DNA, 554 bp, Homo sapiens
gtacacagagaaaaaatcaataaagacaaagcaattgaaaatatacaaatggaaaagcaaagaaaaggggagtaaaattatagagtgtgtgaaatttgaaggaaagtgaaatggcttaccatccttgtaattgagtctcagaaagggaagattgaaagaatgatacagaacaaatatttgaagagatatttactaagaactttttcaaagttgatggaaattcacacacaaaatcaagttgaaagtgagttttttgaaataagattgataaacacctggtaagacatatactgggctgaataatatcactccaaaattcgtgttcacttgaaacttcagatgtgaccttatttcaaaatagggtctttgcagatgtaattagttatgacgaaatcatactaggttagggtatcccgaaattcaatgastagtttccttataagaaggccttggcagagatacaaagtccatgtgaaaataaaggcagacattggagtgatgccaactttaagccaaagattgcctgcaaccagaagtaaggaagaggcaaagaa

SEQ ID NO: 147555 - DNA, 614 bp, Homo sapiens
ttttactctgaaagaaaagggctctaatgtgcaacaagaaatcatctgaagatggaaaactcactggtaaatctaagcacacaacattcagagcactctaatgctgtaattgtgtataagatgctagaaagtttagcatgaaaactaaaacataaacctaccaaaagtaatattgcttaagaaataggcaatataaaaagatacagagacaacaaaaagtctaaragtaggggtaataaacttagagcttagagttttttagtatttccttgtactgaccaaagttaaggtgtaatcagtttaaagtaacttattataaaacacttttttaaagccttataaccacaaagcaaaaactcataatacattaatatcaaagccaaagaattaaaatatattacttgacaaaatcacttttacacagaaaagatagtaagaaaggaagaaatgatttacaagacaaccagaaagcaacaaaatggcaggtgtaaatttttcctaataatattagaattgaatttaaagggactaaattctcgatttgaaagaaatggagtggctgaattttttttttaaagacccaggtatatgctgcctgctagaaactcactcca

SEQ ID NO: 147556 - DNA, 614 bp, Homo sapiens
ttttactctgaaagaaaagggctctaatgtgcaacaagaaatcatctgaagatggaaaactcactggtaaatctaagcacacaacattcagagcactctaatgctgtaattgtgtataagatgctagaaagtttagcatgaaaactaaaacataaacctaccaaaagtaatattgcttaagaaataggcaatataaaaagatacagagacaacaaaaagtctaaaagtaggggtaataaacttagagcttagagttttttagtatttccttgtactgaccaaagttaaggtgtaatcagtttaaagtaacttattataaaacacttttttaaagccttataaccacaaagcaaaaactcataatacattaatatcaaagccaaagaattaaaatatattacttgacaaaatcacttttacacagaaaagayagtaagaaaggaagaaatgatttacaagacaaccagaaagcaacaaaatggcaggtgtaaatttttcctaataatattagaattgaatttaaagggactaaattctcgatttgaaagaaatggagtggctgaattttttttttaaagacccaggtatatgctgcctgctagaaactcactcca

SEQ ID NO: 147557 - DNA, 239 bp, Homo sapiens
atataagtaaacaagcttgatcaggataagttcccctacactccattgtacctactccttgccctctgcctcagggtcagaaaacagctgccttcagctattatcccccaaagctatgcagagccttctgacctttcagaaggcctgctcctttttctatagtttctcccaccactctatacyaaatttcactttaccaaaaatattgaagttagagaaaaaagttaaatgaccatgag

SEQ ID NO: 147558 - DNA, 567 bp, Homo sapiens
ttattgcactgtggtctgagagtgtgctttgtatgatttgaatttttttgaatgtattgaggcttgctttatgaccaagcatatggtcaatcttagaatatattcaatgtgcagaagagaagactgtatattctgtgtttgttgggtggagtgttctgtatatgtctattagatccaattgggcaagtgttgagtttaagtccaaagtttcttatttatttgtttattttatttatttatatatttatttttgagctggggtgtcactcttctgcccaggcaggagagcagtggcctgatgacagttcactgaagccttgacctcccaggctcaattgatcctsctgcctcagcctcctcaacagctgggattacaggtgcatgccaccatgccctgctaatttttgtattttttgtagagacagggctttgttatgttgtccaggttggtctcaaacccctgggctcaaatgatccacccacctcagccttctgaagggctgagattacaggtgtgaaccactgtgcccaacctcagagtttcttttttagatttttgctttgatg

SEQ ID NO: 147559 - DNA, 552 bp, Homo sapiens
atccacatgggtggctaagatagtaacacttttgctttctgatggttcaatacacacactttgtttcatccacaaaattattaaaaatattgtataaaattacctttgggcaatgtgtataaggtgwatatgaaaataaatttcatatttggacttggtatctcaagataccaagatatctcatcatgtatatgcaaatattgtagaacttgaaaacatctgaaatctgaaatactggtcccaataattacagacaagggatacttaacctgtataaaccaaacactgacttgttttccaataatcaagccagaaatcccactttttggatattggtatgctgaaactttatgtacaacatattacaaataattttggggggaaaactttggtatacaaggcttataaaattaataatcaccatagtcaagggatataaaaactttaggaatgggggtaagctttaggctttatgatctgctttcaggaaaacaaaaactattatttccttcccataaggcaaaactgttattaaaaaaaagaactagtcta

SEQ ID NO: 147560 - DNA, 552 bp, Homo sapiens
atccacatgggtggctaagatagtaacacttttgctttctgatggttcaatacacacactttgtttcatccacaaaattattaaaaatattgtataaaattacctttgggcaatgtgtataaggtgaatatgaaaataaatttcatatttggacttggtatctcaagataccaagatatctcatcatgtatatgcaaatattgtagaacttgaaaacatctgaaatctgaaatactggtcccaataattacagacaagggatacttaacctgtataaaccaaacactgacttgttttccaataatcaagccagaaatcccactttttggatattggtatgctgaaactttatgtacaacatattacaaataattttggggggaaaactttggtatacaaggcttataaaawtaataatcaccatagtcaagggatataaaaactttaggaatgggggtaagctttaggctttatgatctgctttcaggaaaacaaaaactattatttccttcccataaggcaaaactgttattaaaaaaaagaactagtcta

SEQ ID NO: 147561 - DNA, 585 bp, Homo sapiens
tatataaaaatctttatttttattatcattattataatcactagtactaccgaccagcaaaataaaaatcgcccttaatgatttcaagtctactatcattatccttatgtaacaattggttatttaagataaattatttcttttcttatccctttctttatcataarcagactcattttctttcataaagtttcctctattacagaacgtgaccacattttccacatttgttaggctttgtcaggtggcaaaggttactgtggatgatacagattattttaaaagatgcaagagaaagtaagggaattagaaacaatggtgttagggctcaaagagaagacacatagtgttcaagtagcctgaaggatgcattattgactttacaggaagtccagtaagtggatacctcaataaaggcagcctccctggctgtctcgattgtactattcctgcactcccaaatattaaaatttctctataattccctctctaccttgggacttttcctttcctatgccttttgcttagtcatagcctctaccatttggcttctttctatatgtcttcttcctattaatcttatgt

SEQ ID NO: 147562 - DNA, 467 bp, Homo sapiens
gctcccttgttactcgatatttaaactaacaatttaaggctttcagcagtgaacttataatgcacgttggtaattgttagtcttgtctctaaagtggaaaaagatgtagagatggccaggatctttgaccagccatcattgctagggtaatgaggaagagctaaacacagagggcaaagccaagcaaaatgctcactcttttttttttttttttttttttttgagatggagcctcgctctatcacccaggctggagcgcagtggcgcgcaaattatctccctgcttgccaccccaaactggtcatttgtttaggaaatgtaaccacttgcaggggctgctgggtggttaraaaagtccagaaacttgaatcttgaatcctgtctggcaactgaaacactggaaggctgcggaaaaaaggaagggaaaaaaatgcagtttcaaaattagtgttgctggtattgaattc

SEQ ID NO: 147563 - DNA, 446 bp, Homo sapiens
gctcccttgttactcgatatttaaactaacaatttaaggctttcagcagtgaacttataatgcacgttggtaattgttagtcttgtctctaaagtggaaaaagatgtagagatggccaggatctttgaccagccatcattgctagggtaatgaggaagagctaaacacagagggcaaagccaagcaaaatgctcactcttttttttttttttttttttttttgagatggagcctcgctctatcacccaggctggagcgcagtggcgcgcaaattatctccctgcttgccaccccaaactggtcatttgtttaggaaatgtaaccacttgcaggggctgctgggtggttaaaaaagtccagaaacttgaatcttgaatcctgtctggcaaytgaaacactggaaggctgcggaaaaaaggaagggaaaaaaatgcagtttcaaaatt

SEQ ID NO: 147564 - DNA, 467 bp, Homo sapiens
gctcccttgttactcgatatttaaactaacaatttaaggctttcagcagtgaacttataatgcacgttggtaattgttagtcttgtctctaaagtggaaaaagatgtagagatggccaggatctttgaccagccatcattgctagggtaatgaggaagagctaaacacagagggcaaagccaagcaaaatgctcactcttttttttttttttttttttttttgagatggagcctcgctctatcacccaggctggagcgcagtggcgcgcaaattatctccctgcttgccaccccaaactggtcatttgtttaggaaatgtaaccacttgcaggggctgctgggtggttaaaaaagtccagaaacttgaatcttgaatcctgtctggcaactgaaacactggaaggctgcggaaaaaaggaagggaaraaaatgcagtttcaaaattagtgttgctggtattgaattc

SEQ ID NO: 147565 - DNA, 538 bp, Homo sapiens
tttgacacataaatgaatgaatgaacgaatatgataatttcaaagtctaagcttgtggagttgagtcaccaggtccagctgccttaacttgtctcagtttgtttcctgggaacatccaggtctccatggctcctaacctgttaattcactgcagcctcttttgtttaccagagtgaagagtagtccttactctgtagctttgatcctgcttttgagtcatattggaattttgggaggtaacagggcaagatgagcagaaggctgcctagcaactctgaaaaaaatcttcctcttctataacccaagttctaggtatctaaaccaaagcatgggttttccctacaggcttctttgaacagttggccccagagccaccacaaatgagatcagaaataaaatctaatcaaggtaaaagaagaaaamaaaaggtaagagaaaatttaagaaattgattcattaatttagaaagccagcatgtcatctgacatgtcagtagaaagctctctcattatcatctctaccccaggtcatgccaaag

SEQ ID NO: 147566 - DNA, 487 bp, Homo sapiens
ttaccaccttgacttagttcagtcggggcctattaccactctctggtggttttgatcttatttgggtttgtgcattttccacagacttctgtaaggtgtggctatgacttctattcagcccagtcttggttattcccacagttgcccttgccagagagccatcttaccccacaccagcaatccctctagccccttcttcaatcaaactctctctctctgctactatatgttctgtctacacaacttagaaaccaagagaagcagcggaaaactaaaygttaaggactccccctgcctggacttggtgcagcaccgggttgatgtgatctatccttgaatgaaataagaaagtgtcctcctagaatcccaaatacaaataaagggaagaaatgactacctgcaacagtcctttcaagttatttaaagttactcctcttctccaaaatgacccccagagaatgaaactcagaagacatggatatgaaca

SEQ ID NO: 147567 - DNA, 367 bp, Homo sapiens
tttcttttgatctagatttctctgttgctgaacacaggatctttccgtattgttttataggatataaaatgtttgcacaatgttgtctcwgaccttaaagcctccttggctgttccatagctgaaactctgccctgcaagtcaaggatggagcaattttagcagcaactggaatctgtgccctcagtttgtgctggcttgttgttgatgtaaataatgtgcagtagttttgccatggcttcgtgatactaagttagctacacactcatcgagagctcagaaattggatgtaaatctactgataatcatatcaatttatgccatttcattttttttctgtccattaccatccaggcaatttggtggtg

SEQ ID NO: 147568 - DNA, 540 bp, Homo sapiens
gtaaataaatgagtaaaaaagatatattttggagagtattaaatgctaagaaagaaaagaaggggcaatgtgatagatgtaagctaggggattaattttttgyttactaataaaaaactgcatttacttagtagcattcagaatatcagcaaaacagctgcaacttttttttcaattacagagtgagattcagttaacagaacaaccattatttcatataagctgcatcagagatgactaaagatgagaaaaaccaccatccttatatataactaatttgtgctgtgtaccacaaagaacgtgctttatatttccaagccaatttacaacctctgtactgtaccaggcaaggttaatggctttggaaaatgccagcagcatgggctatttaaagacacatgtggtagtatgttaactatataaaaaagacactacagttttaaaacaagtcatccagtcttacgtttccatttttgtttgaattcaaaggagtgagttgtgtatggggcagggtaagtgctttttagaacagaaaaaaac

SEQ ID NO: 147569 - DNA, 460 bp, Homo sapiens
aaataatcccttatgttttaatttgaatttctctgcttactaaaagtttgagggaaattctcatatgtatattagctattttgccttttattcaggaattaccagtgtctggcttgggggaaagccctgctcagatttytatataaaattcttgagaagactatatccaaattgtgagaagactgaatgctaatgtgattaaatttcagctttacttggtaatttctaaattttgaaataagttatttgttgatatccaaggctgtttatcagaatcaccactttttctttgactttgcttctttggggaccattctcacatattcaccttcacatctgaaaattttttttgtgcctagaatctgattcatttgcagtagaagacacacatcgataactaccagctctcctagttcgtaacccatgtctgtcacaggctttcttgatacaaatttaagat

SEQ ID NO: 147570 - DNA, 460 bp, Homo sapiens
aaataatcccttatgttttaatttgaatttctctgcttactaaaagtttgagggaaattctcatatgtatattagctattttgccttttattcaggaattaccagtgtctggcttgggggaaagccctgctcagatttctatatraaattcttgagaagactatatccaaattgtgagaagactgaatgctaatgtgattaaatttcagctttacttggtaatttctaaattttgaaataagttatttgttgatatccaaggctgtttatcagaatcaccactttttctttgactttgcttctttggggaccattctcacatattcaccttcacatctgaaaattttttttgtgcctagaatctgattcatttgcagtagaagacacacatcgataactaccagctctcctagttcgtaacccatgtctgtcacaggctttcttgatacaaatttaagat

SEQ ID NO: 147571 - DNA, 563 bp, Homo sapiens
tccagtgtattttgaaatacttcaaagccaaagaggctcttgttgctaacttatttctggaatagcccttcgtggttatggaatgttccctggacttgaaaatattgccttacccagagacttcttttcttccatttgtaaacactggtggaraaggtgatttgtcacataaccctacaatttccaggtgttttgtcttccgatttatgggcaagttctcaaagtggctaattagtggatcctccatcctgtggctctgcttggtgtgtaaaaacataaggcatagttactaggttccaaatgggatttccacaattattagggggactgtaaggaaacatctctctgagaaaactagcagaaacttgtctttgctggaaacaatagtcttcatctggcctcagatttttcagccaaagaaaaaagatgggagttggatatgctggggtggaaggggagaagcatttagacagtccattaacaatcagagccgcagtacaaacacgggaggtttgcctgagtgtagggaagcagcaaatgtaagaagcaatgaaacaaattag

SEQ ID NO: 147572 - DNA, 563 bp, Homo sapiens
tccagtgtattttgaaatacttcaaagccaaagaggctcttgttgctaacttatttctggaatagcccttcgtggttatggaatgttccctggacttgaaaatattgccttacccagagacttcttttcttccatttgtaaacactggtggaaaaggtgatttgtcacataaccctacaatttccaggtgttttgtcttccgatttatgggcaagttctcaaagtggctaattagtggatcctccatcctgtggctctgcttggtgtgtaaaaacataaggcatagttactaggytccaaatgggatttccacaattattagggggactgtaaggaaacatctctctgagaaaactagcagaaacttgtctttgctggaaacaatagtcttcatctggcctcagatttttcagccaaagaaaaaagatgggagttggatatgctggggtggaaggggagaagcatttagacagtccattaacaatcagagccgcagtacaaacacgggaggtttgcctgagtgtagggaagcagcaaatgtaagaagcaatgaaacaaattag

SEQ ID NO: 147573 - DNA, 563 bp, Homo sapiens
tccagtgtattttgaaatacttcaaagccaaagaggctcttgttgctaacttatttctggaatagcccttcgtggttatggaatgttccctggacttgaaaatattgccttacccagagacttcttttcttccatttgtaaacactggtggaaaaggtgatttgtcacataaccctacaatttccaggtgttttgtcttccgatttatgggcaagttctcaaagtggctaattagtggatcctccatcctgtggctctgcttggtgtgtaaaaacataaggcatagttactaggttccaaatgggatttccacaattattagggggactgtaaggaaacatctctctgagaaaactagcagaaacttgtctttgctggaaacaatagtcttcatctggcctcagakttttcagccaaagaaaaaagatgggagttggatatgctggggtggaaggggagaagcatttagacagtccattaacaatcagagccgcagtacaaacacgggaggtttgcctgagtgtagggaagcagcaaatgtaagaagcaatgaaacaaattag

SEQ ID NO: 147574 - DNA, 540 bp, Homo sapiens
gagactcacagggagaactcagtaacccagacttgacctgagccagggaccgtgagtggcccctgcaaatctactcatgtttctgcctctttatgagttttcacttcttctttttttttttttttttttttttgrgacaaagtctccctgtgttgcccaggctggcgtgcagtggtacaatctcagctcactgcaacctctgcctcctgggttcaagccattctcctgcatcagcttcctgagtagctaagactacaggcatgcgccaccacgcctggctaatttttgtatttttagtagagatggggttttaccatattggccagtctggtctcaaactcctgaccgcaagggatctgcctgcctcagcctcccaaagtgctgggattacaggcgtaagccactgtgcccagcctcttaacagcgttctgtatgtgatgggagccagggccatgggcagtctctgaatcacatccttattgcaacgtgatcagagaggaaagcactattttctccaggaaacgcttgaaacattcggag

SEQ ID NO: 147575 - DNA, 540 bp, Homo sapiens
gagactcacagggagaactcagtaacccagacttgacctgagccagggaccgtgagtggcccctgcaaatctactcatgtttctgcctctttatgagttttcacttcttctttttttttttttttttttttttgggacaaagtctccctgtgttgcccaggctggcgtgcagtggtacaatctcagctcactgcaacctctgcctcctgggttcaagccattctcctgcatcagcttcctgagtagctaagactacaggcatgcrccaccacgcctggctaatttttgtatttttagtagagatggggttttaccatattggccagtctggtctcaaactcctgaccgcaagggatctgcctgcctcagcctcccaaagtgctgggattacaggcgtaagccactgtgcccagcctcttaacagcgttctgtatgtgatgggagccagggccatgggcagtctctgaatcacatccttattgcaacgtgatcagagaggaaagcactattttctccaggaaacgcttgaaacattcggag

SEQ ID NO: 147576 - DNA, 581 bp, Homo sapiens
tctgtaagtaatgaagaaagtaatgggcagctgagtctactcatttgtattcacatctggtataaatcctttctactgctcattgctgtcggttgtatatctatgaaagagcaacaatgaacaaaatctgagtcttggtccttgtattatttatctaatgctatgtagaaaaatactgttgtctaaataataatttgcacagagcctacctgggatgacttgtctctggtcgaaaaggggttggctaggcttatacatacatttgcagtcctaccagttacattagctggtaactgactggtcccagatggcctcatttgtatgtttggcagttattaaaactgttttccagagtgagtctactcttttctacatggcttctctagcaggctaccatgggcttcctcacgtggccactagattttaaggagatgagagcagaaamtattaagacattctaagacctgagcaaaaattgcacaatatcacttctgccacatactattgatgaatgtaaatcacaaaaacagcccaggtccaattggtgggaaaggaggctctatctctcaacgggatgagct

SEQ ID NO: 147577 - DNA, 587 bp, Homo sapiens
tctaacttctctgaatgtctatgccagtttttttttaggcctagagcacctgcatagaaagctaaagagttaatatgaaggattcagtagtacattactgcttccttttattctcccttcagtaatagggaatgacctactcaaatattttgcccgacacttagcttgcatttgcaagaagaaaaatgaccattctccattgcttgtgtgattactgcatcatatctaagcttctggagtacacattgtttattgcttaaatgtgcccatgttgggcaaaatgttgctcccattgggttaaaccaatctctacaaagtaaagttctgcatggtaasggtttctgtttgttcattaaataatattttgcatgtagtgggtactcaataaatacttgttgaataaacagtggtttatttagacctgtcacagaaaataatatttggcacatattagtaggaagggcacatacaagagtaggctgtaatagtgaacacatggttaggctatgtgaatcatgctcctttgaagcaaggcttgtaagtgatattattgtttcgttatacacatccttagatttttgatacat

SEQ ID NO: 147578 - DNA, 500 bp, Homo sapiens
ggctcacacctgtaattccatcactttgggaggccaaggcgggcatatcacttgaggtcaggagttcaagaccagcctggccaacatggtgaaactccatctctactaraaacacaaaaaattagctgggcttggtggtgcttgcctgtaattccagctactcaggaggctgaggcacaataaccgcttgaacccaggaggcggaggttacagttgatattgtaccactgcactccagactgggcaacagaggcggaccctgtctcaaaaacaaaagaaaaaaagaagttgagtgcacttttaaactcagagagacccaccagatttcagaaatgtgtttacaagggttctttttctttttttctccacagtaggggcaagtatatctttaaccgtgtagatttattacctatttcagagtgaatgccaaagttttctgaatgagagctttacttgatcctggaagaattccatgccaattgaacactggttgcattcca

SEQ ID NO: 147579 - DNA, 500 bp, Homo sapiens
ggctcacacctgtaattccatcactttgggaggccaaggcgggcatatcacttgaggtcaggagttcaagaccagcctggccaacatggtgaaactccatctctactaaaaacacaaaaaattagctgggcttggtggtgcttgcctgtaattccagctactcaggaggctgaggcacaataaccgcttgaacccaggaggcggaggttacagttgatattgtaccactgcactccagactgggcaacagaggcggaccctgtctcaaaaacaaaagaaaaaaagaagttgagtrcacttttaaactcagagagacccaccagatttcagaaatgtgtttacaagggttctttttctttttttctccacagtaggggcaagtatatctttaaccgtgtagatttattacctatttcagagtgaatgccaaagttttctgaatgagagctttacttgatcctggaagaattccatgccaattgaacactggttgcattcca

SEQ ID NO: 147580 - DNA, 568 bp, Homo sapiens
ggaagagaaagaagtttgataaatctgtctacacttattattcataattcaggacatatgacagcttaaacaaaaaactgataacagaactgtattgtactttgaaattctatactagtccttaaaatctactatatgaaaatattaatgaggaaacccctcaactcaactttgtaagcctagcatacatgtatatacaatyatgtttttcttttaacattgcacacattccattatctgcttcagcaaacagcttatagagtgaattaaaataagtcaatagtcagaaaacaacaaaaataccaatgtaataatggccttggtcacacacaaaaaagatacattttgacaatttaacaatatcctgtacttgacaaaattcattcttaatgatttttatttttaattgatacataataattgcacatctaaatggaatacatgtgatattttgatataagcatacaatgtggaatgactaaatcaggttaactggcatatccataaatcatttatcatttctttgtgttaggaatattcaaaatcctctcttccagctattttgaaa

SEQ ID NO: 147581 - DNA, 538 bp, Homo sapiens
tacactccaaaacatgtttcacagccaactacttcaccacttccattgctaccatggtcctctcttacttggatttttgcaatcatctcctaaatgtttttattgctattgttctctttttaaaattgaagtaaaatttacatacaatgatatgcacagattttaagtgagttttgacaaacctatctgcccatgtaaccarcaccttgatctcctgtgtccattcatttcagtcaaattccacccattatgtgcaaccaccattccaatttctaacaccacagatttattgtatctgttattaaatttcacataaatagaatcgtacagtatgtatctttgcacatctggcttttttactcattataatgtttttgagattcatccaggttgttatatgcattattagtcatgtttttgtcaatttctgattagaattccattttatgaatatactgtaatatgtttatccattctcctgttgatagacatttggattgtttcctactttttgctatgagtaaagctattataaact

SEQ ID NO: 147582 - DNA, 538 bp, Homo sapiens
tacactccaaaacatgtttcacagccaactacttcaccacttccattgctaccatggtcctctcttacttggatttttgcaatcatctcctaaatgtttttattgctattgttctctttttaaaattgaagtaaaatttacatacaatgatatgcacagattttaagtgagttttgacaaacctatctgcccatgtaaccaacaccttgatctcctgtgtccattcatttcagtcaaattccacccattatgtgcaaccaccattccaatttctaacaccacagatttattgtatctgttattaaatttcacataaatagaatcgtacagtrtgtatctttgcacatctggcttttttactcattataatgtttttgagattcatccaggttgttatatgcattattagtcatgtttttgtcaatttctgattagaattccattttatgaatatactgtaatatgtttatccattctcctgttgatagacatttggattgtttcctactttttgctatgagtaaagctattataaact

SEQ ID NO: 147583 - DNA, 527 bp, Homo sapiens
tttcccattggttcactctacgcaaatgaagtagtggcctacaaccagtctgattggttgctggaggggaagagtaggcccacgaccagtctgattggctgtgggaggggaccaatcagaggtactttcatttttcaattgccacacagacaaaggaggggttgaaaagtcagtagcctctgatagccagtcagcatgcatcggccttaggttccctgctttcggaccctattctcctgcctcacctccctgggagagatctgggttgaggcccctctttccaaaaccagcactgggtcacatgatcaggtagatctgacwaacgtgggcaactgagaagctcctcctggtaaagtgaaggtccttagagagccctgcagagcctgagtttctctccacagggatacagggggtgcacacacagactgccccatcggtgtgtttgatggttgtagttcaagtcccctctttgttcttgacttgtgaacattgacacagcctggcagggagcactgactgcgctgggc

SEQ ID NO: 147584 - DNA, 437 bp, Homo sapiens
ctgtcccccttccccatgaagctgaaagaagttggtcactcatcctgtatttcccctagaatgccccaaggcagacacagtggtaaccaggagctgctcactccatcccctgggctagggcaagatgtgcatttccacttcctgtgtccattcattccagagaagacactgaccacagccattctggtctctcaaaacccagccctgccctccaggagctcctcacagygtagtggaagagaaagcagtgccatgtggaggatctccctacagtagagaaaagattctccctcctggcgctgtgggaacagggtgggggcatttagcccagaaatgggggtcagggtagacttcctggagtggtgtggaaggctaagtggggggtaaggaaggcagggagggccttccaggaagagcccctgcatgactaaagctgc

SEQ ID NO: 147585 - DNA, 544 bp, Homo sapiens
tttaaaaatggctttgtcttcattcagctctcccgatttattctgtgttttacaaatagaagctcagagcttctgtcgcccagtccttgcatgactcatggcggtggccacacgggtttcagggataacgggatgtttagaaaatcgctgcatatcggagtttcctagcacgttccatttatactgaacgcaggcggccgctgaaaatccagcctcgactcttgctaatgactgggtaggaccctcggggtcctgcgacggtgctggagggtgttcccggctccgatgyggggaggcctgcgcggggactaggttctcgagaggcgagcgggcgcgccagagaacccgagactgctgcggggccggatgcgggatccctgggctgcggttctacgcagaaacgccaatggccatgcctccccagctcctcccagccccagtcactaggccggcgcctggcccggagatcctcccagagccctggcggtgccatcatgccggagaagacaagctcggccccgctggaattcgctccaaacacaga

SEQ ID NO: 147586 - DNA, 544 bp, Homo sapiens
tttaaaaatggctttgtcttcattcagctctcccgatttattctgtgttttacaaatagaagctcagagcttctgtcgcccagtccttgcatgactcatggcggtggccacacgggtttcagggataacgggatgtttagaaaatcgctgcatatcggagtttcctagcacgttccatttatactgaacgcaggcggccgctgaaaatccagcctcgactcttgctaatgactgggtaggaccctcggggtcctgcgacggtgctggagggtgttcccggctccgatgtggggaggcctgcgcggggactaggttctcgagaggcgagcgggcgcgccagagaacccgagactgctgcggggcyggatgcgggatccctgggctgcggttctacgcagaaacgccaatggccatgcctccccagctcctcccagccccagtcactaggccggcgcctggcccggagatcctcccagagccctggcggtgccatcatgccggagaagacaagctcggccccgctggaattcgctccaaacacaga

SEQ ID NO: 147587 - DNA, 548 bp, Homo sapiens
ctttgtcttcattcagctctcccgatttattctgtgttttacaaatagaagctcagagcttctgtcgcccagtccttgcatgactcatggcggtggccacacgggtttcagggataacgggatgtttagaaaatcgctgcatatcggagtttcctagcacgttccatttatactgaacgcaggcggccgctgaaaatccagcctcgactcttgctaatgactgggtaggaccctcggggtcctgcgacggtgctggagggtgttcccggctccgatgtggggaggcctgcgcggggactaggttctcgagaggcgagcgggcgcgccagagaacccgagactgctgcggggccggatgcgggatccmtgggctgcggttctacgcagaaacgccaatggccatgcctccccagctcctcccagccccagtcactaggccggcgcctggcccggagatcctcccagagccctggcggtgccatcatgccggagaagacaagctcggccccgctggaattcgctccaaacacagatgctcatttttggaa

SEQ ID NO: 147588 - DNA, 544 bp, Homo sapiens
tttaaaaatggctttgtcttcattcagctctcccgatttattctgtgttttacaaatagaagctcagagcttctgtcgcccagtccttgcatgactcatggcggtggccacacgggtttcagggataacgggatgtttagaaaatcgctgcatatcggagtttcctagcacgttccatttatactgaacgcaggcggccgctgaaaatccagcctcgactcttgctaatgactgggtaggaccctcggggtcctgcgacggtgctggagggtgttcccggctccgatgtggggaggcctgcgcggggactaggttctcgagaggcgagcgggcgcgccagagaacccgagactgctgcggggccggatgcgggatccctgggctgcggttctrcgcagaaacgccaatggccatgcctccccagctcctcccagccccagtcactaggccggcgcctggcccggagatcctcccagagccctggcggtgccatcatgccggagaagacaagctcggccccgctggaattcgctccaaacacaga

SEQ ID NO: 147589 - DNA, 548 bp, Homo sapiens
ctttgtcttcattcagctctcccgatttattctgtgttttacaaatagaagctcagagcttctgtcgcccagtccttgcatgactcatggcggtggccacacgggtttcagggataacgggatgtttagaaaatcgctgcatatcggagtttcctagcacgttccatttatactgaacgcaggcggccgctgaaaatccagcctcgactcttgctaatgactgggtaggaccctcggggtcctgcgacggtgctggagggtgttcccggctccgatgtggggaggcctgcgcggggactaggttctcgagaggcgagcgggcgcgccagagaacccgagactgctgcggggccggatgcgggatccctgggctgcggttctacgcagaaacgccaatggccatgcctccccagctcctcccagccccagtcamtaggccggcgcctggcccggagatcctcccagagccctggcggtgccatcatgccggagaagacaagctcggccccgctggaattcgctccaaacacagatgctcatttttggaa

SEQ ID NO: 147590 - DNA, 218 bp, Homo sapiens
agcacagccctggggctgctgacgtccaggccaggaaccataagaggtgagtggcacaggrtgggtgtggctgctcagctcaggttggcctgggcagcacaaggcctgacagcctccagtgcccacccatcttgcacatggtgaccataccaattctcttagcctgctccctacctctgtcattcttatcctccaccatctgacctgacctataccca

SEQ ID NO: 147591 - DNA, 588 bp, Homo sapiens
tcccactcacatactgctgttgctttttaactagtaagcatatttgttaaagaacatctgagttgcacttttgtgatagataaacctcctaatattgagaacacagcacagtatcagaataataaccacaaattttactgatgatctactraaggctttaagtgaatttctaaattacatttataacacagattctaacccagctctttttgtttacacaccgtatttctgctcatcaggtcacctatgtaaaccactacgttaatctctggtgcccagatttcaaactctctctgccatgaggtgagggtggataaagggacgactataagaaaggggccatacagctggtgttggtggaacaggtaggagaggaatgatatggtctggatggtctttcctaggcccatttcatcagcaaggattacactattatttctgcagaaagaaaaaataaataaaaacaaaaaaatcattagttcaccaaaacacagaatgtgcataaacagcaacgacaccaatgcttcacaataacagccaagcaaggtgtcattcataagcctcaaatgtatttcttctcatctgcaa

SEQ ID NO: 147592 - DNA, 444 bp, Homo sapiens
agacctaatctgaaattctcccaccagaaactgtctaaaaatacgggatataatatttgcaaatccttcaggcttgaaagaaagcaagagaaaggcttccagataagatggtaaacagaacacaagcatcttttctctgcctccccaatcccactaaaacaatggtaaagggactgtccttaaaagagacaagcccacaaagacaagagaaaacaagagagaggataatggcaacaaaatattggcagcaygggaaatgacaaaacagacctgagaaaatgaaattcgaagccaggagggaagacagcctagaactaacctgacttacacggcaaaattcccccaacggcgaggtgtcttcagaaggaaggatgagggctaaaatggggagcggtttaaaaactgcttaagaagtaacacatatccagattcataagataccca

SEQ ID NO: 147593 - DNA, 551 bp, Homo sapiens
gtctgtcagtgttatgtacttattacaccagatgctgtaagggataagaaaaggggaaagatacaaatactgtgccttggtcttgatgggaggaaacctaatatattggaaagagcttctttgggaaatcacacaaatggacrctccagtcccagctctgttattaacagccatctgatttcagtcagttttttttagttctctgagcctccattccttcatctctaaaatggacactatatctatcttcatggatttttctgaggatgacaggaagtaaatatatgacaaattgtagggcattcactggctgatataatgaaagtattaagaagctaatgagaactggtattcattaggagcattagtgcttacaaataaggaaaaagagaagaatatacaaccctgtgctgaacataactcagcttgtctttcaagggagggaaccagagccattcttatgcaaccccgatgttagacaaaaggaatgtacctgttttctagtaagagaaggccactatatcttattaggtatgctaaaaaatttgttg

SEQ ID NO: 147594 - DNA, 622 bp, Homo sapiens
tttgtaacaaaacctggtatcagacattgtttcctctccaacattcttcatctttttccaagtgttttgactacttctgggttttgaatttacatatgcatttatcataaacttgccatgactctttttgatattccctgascttcttgaatatatggtttgttgtgtgtcattaattttgaaaacttctagtctattattgttttccaaggattctaccttgttctcattcttacttcttctgtgatttcattatgtgcatgttagatggtttgatagtgtcccaaagctcctggatgctgttttattttatttatttttactttctttgtggtttattccatgtcatttctattgacctatctttaaggtcactactgttttcctcagttttttcaagtctagaaatgagctcatcataggcattcttcattcctcttactgtgatttttatttctagcatttccgttaattatttcttatgatcttcagctctgaagttatccttcttaccctacatgtttccccctgtttctcttaaatctttagttattttaactttaaatttagctagatatatttccaatatctgtgttatacctaagtctgatcctgtttaata

SEQ ID NO: 147595 - DNA, 622 bp, Homo sapiens
tttgtaacaaaacctggtatcagacattgtttcctctccaacattcttcatctttttccaagtgttttgactacttctgggttttgaatttacatatgcatttatcataaacttgccatgactctttttgatattccctgaccttcttgaatatatggtttgttgtgtgtcattaattttgaaaacttctagtctattattgttttccaaggattctaccttgttctcattcttacttcttctgtgatttcattatgtgcatgttagatggtttgatagtgtcccaaagctcctggatgctgttttattttatttatttttactttctttgtggtttattccatgtcatttctattgacctatctttaaggtcactactgttttcctcagttttttcaagtctagaaatgagctcatcataggcattcttcattcctcttactgtgatttttatttctagcatttccgttaattatttcttaygatcttcagctctgaagttatccttcttaccctacatgtttccccctgtttctcttaaatctttagttattttaactttaaatttagctagatatatttccaatatctgtgttatacctaagtctgatcctgtttaata

SEQ ID NO: 147596 - DNA, 381 bp, Homo sapiens
ctctgagataaaagtaataatattggctctttcagcttttgatgatcaaactatcaagttaggtcctaggctacatattaacaaagctttaagccagtgttagccaggtagtgggcactaaacaaagattggctatgtcacatagtggctagtaaggtatgagtggggcagagagggctcttccacccacagaatgtcagtgaccatgaggtgatggcagcattgtcacattgtgtgacacttaaaataataattggtcacagccaaggccaggagaggcagtttcccaacagataaatcacctaraactggtaatcggcagctttcaggaattgggcaagtgggctggagcatgtgcattaagaggcaaaatggtgaagt

SEQ ID NO: 147597 - DNA, 649 bp, Homo sapiens
ttaatttttaaatattgttttatttgacttgttcacatctaacaggtattcacatattacaattttttaaaagacaaaaggacttatttgcagttgaaaaattaaaatttatcaaatgagaaataatagaaagaagagcataatatgctaagcctaactgaccacagtgtagcacccacagtctgtgtaaagaaaggtaggccacatttgtgagacartcttcatcattttgtagaagaaccctacttctacaaaatgaattgccctgaaggcaacaagatgtggaagtcagttaagagattgaaaacaactggaagtaggtgatctattagtatttaaaaacgtgacttcaaataaaagaataaggaaagtagagaaaagaatgcatttccacatagaagaccaggagcttttgacagaaggagagactccaaatgcagagtctgctatatacagaaattttgactcacccaagagtcattttgtattcacagttccaagatatagagaagtcagcatatacagcagtgtcaactgccttcaggtactgaggtcccagcctgggactcttttcagccatattcctcttttattctgcagttctctgcagtatctcctacaagtatctccttctcctttgtagttactc

SEQ ID NO: 147598 - DNA, 571 bp, Homo sapiens
tctgacatgcatgaggcctgtagcccctttgatttggccaatatctcccatttggaagaggtgtatttactcaatgcctgtgccaccccccaccattgtatctaggaagtaactaatttgcttttgattttactggcttataastaaaaggaacttgctttgtctcagatgacactttggacttggatttttgggtaatgctggaatgagttaagacttttggggactgttggaagggaatgattatgttttgatgtgagaacaagaggtttgggaagggccagcagtggatggtttggctctgtgtccctacccaaatctcaccttgaattgtaataatccccacatgtcaaggatgggaccaggtggagataattaaatcattggggtgttttcccacatgctgttctagtgagaggttatctgaagttggaactcttgttttaaaaagaggcaagtctaaaagcttggaaaatttgcagcctgatgatgcaatacaaaagaaaaacccattttctgaggagaaattcaagcctgctgcagaaatttcacaagtaataaggagttgaat

SEQ ID NO: 147599 - DNA, 571 bp, Homo sapiens
tctgacatgcatgaggcctgtagcccctttgatttggccaatatctcccatttggaagaggtgtatttactcaatgcctgtgccaccccccaccattgtatctaggaagtaactaatttgcttttgattttactggcttataacyaaaaggaacttgctttgtctcagatgacactttggacttggatttttgggtaatgctggaatgagttaagacttttggggactgttggaagggaatgattatgttttgatgtgagaacaagaggtttgggaagggccagcagtggatggtttggctctgtgtccctacccaaatctcaccttgaattgtaataatccccacatgtcaaggatgggaccaggtggagataattaaatcattggggtgttttcccacatgctgttctagtgagaggttatctgaagttggaactcttgttttaaaaagaggcaagtctaaaagcttggaaaatttgcagcctgatgatgcaatacaaaagaaaaacccattttctgaggagaaattcaagcctgctgcagaaatttcacaagtaataaggagttgaat

SEQ ID NO: 147600 - DNA, 571 bp, Homo sapiens
tctgacatgcatgaggcctgtagcccctttgatttggccaatatctcccatttggaagaggtgtatttactcaatgcctgtgccaccccccaccattgtatctaggaagtaactaatttgcttttgattttactggcttataactaaaaggaacttgctttgtctcagatgacactttggacttggatttttgggtaatgctggaatgagttaagacttttggggactgttggaagggaatgattatgttttgatgtgagaacaagaggtttgggaagggccagcagtggatggtttggctctgtgtccctacccaaatctcaccttgaattgtaataatccccacatgtcaaggatgggaccaggtggagataattaaatcattggggtgttttcccacatgctgttctmgtgagaggttatctgaagttggaactcttgttttaaaaagaggcaagtctaaaagcttggaaaatttgcagcctgatgatgcaatacaaaagaaaaacccattttctgaggagaaattcaagcctgctgcagaaatttcacaagtaataaggagttgaat

SEQ ID NO: 147601 - DNA, 571 bp, Homo sapiens
tctgacatgcatgaggcctgtagcccctttgatttggccaatatctcccatttggaagaggtgtatttactcaatgcctgtgccaccccccaccattgtatctaggaagtaactaatttgcttttgattttactggcttataactaaaaggaacttgctttgtctcagatgacactttggacttggatttttgggtaatgctggaatgagttaagacttttggggactgttggaagggaatgattatgttttgatgtgagaacaagaggtttgggaagggccagcagtggatggtttggctctgtgtccctacccaaatctcaccttgaattgtaataatccccacatgtcaaggatgggaccaggtggagataattaaatcattggggtgttttcccacatgctgttctastgagaggttatctgaagttggaactcttgttttaaaaagaggcaagtctaaaagcttggaaaatttgcagcctgatgatgcaatacaaaagaaaaacccattttctgaggagaaattcaagcctgctgcagaaatttcacaagtaataaggagttgaat

SEQ ID NO: 147602 - DNA, 591 bp, Homo sapiens
tgatggctttaaatgcagttgcaaattttcagacttgcctttagcattgggtaaacaagcatatagctaatcattttagaattgtttttatgaaaggaaactgtaaatatgaatgtactctagtaaataaattggacagatgtttagcaaaaataactggaaattcgatgctagttgtcatatgattaaaaactgaattctaaattttcatctatatgtggctggctatatataagcttatcaaatattgtatygcacatgagtaattcacactaaatacattctgacagaaaaaaaagaagctgaagttagttcaccttttttcaacatgcagctgctcatgacagcaattataaaatcttccccaatttttctgagtattttatcttcatgcacacaagaaagcaggaaacgacccagcagtgtttgctggggagtgggcaacttggagaaggggacttgaggagggaagtgagtcaccagaatattctcaaagcatgtgggtcataaagaaatccccagtcaacagattaaacttctgtttacaatgctgaggtttaaaatactcagcatcagccgttcatgccacat

SEQ ID NO: 147603 - DNA, 565 bp, Homo sapiens
gtctcacaaatccttttttcaattaatcagatacttgcagaagagacaaatagtgacatttaccacctacacacacacacacatacacatacacacacagaacttggcttgtaagaattttttacacattttgctggtataccaggtttctgggctccttttctctgcagcttccaggaaaatggagtagcgtttgaaggacccagctcactgtgccatagctatggaggtcaagccaccttcaaaaagaaaatcatccttttctgttttatggaaacataggcaaaaggttctcaattttgcaagatactgcccaaagctgcatggggaacaaaattagsattttccatcccagccaaagcaaaatgcacataacaaaacagacactagtcaccttgtttagcactcagtactgatgtggcaagtctcaaactttctcccattggtccctgttggttttgatccaactggtaattcagtgagtgctctctgggcaagacgaagagtggatagtctcccctcgtcaggcctgctgagctttctttagagctcaccgaatgtgatc

SEQ ID NO: 147604 - DNA, 581 bp, Homo sapiens
gatatttttcccaatccaggactgagagaagaaaattatttttatggtaggtgcatacagtcggccattctgtggcaatcygccagcatggccatgcaggcattttaatctctggacagggactggagcaccagctctggagcagggtagggacctccatagccctaactgtggaaagcgtcttagcactagaggcaggaattgtgctcttccctattacaagcctggggtgggaagacaactgctatagctgcagtgtctcctaggcaatgagacaactagagccaatttagtgacctggaaccagtctgcatgtgccattgacggttgtctcagcctgttcccctgtgatcatggtacattggggctgtctttgcttcaccctaaagcaggtctccagacattctgagcacccatgcattgggttcagcagcctgaggtgccccactcttactggatatagatcattgtgcaacaaagccctctccactccatgcccaggcagatttctagatctcagagcaccagctcacctggatcagcagcctgagccaccacatcttaccttccaacagaagtgc

SEQ ID NO: 147605 - DNA, 581 bp, Homo sapiens
gatatttttcccaatccaggactgagagaagaaaattatttttatggtaggtgcatacagtcggccattctgtggcaatccgccagcatggccatgcaggcattttaatctctggacagggactggagcaccagctctggagcagggtagggacctccatagccctaactgtggaaagcgtcttagcactagaggcaggaattgtgctcttccctattacaagcctggggtgggaagacaactgctatagctgcagtgtctcctaggcaatgagacaactagagccaatttagtgacctggaaccagtctgcatgtgccattgacggttgtctcagcctgttcccctgtgatcatggtacattggggctgtctttgcttcaccctaaagcagrtctccagacattctgagcacccatgcattgggttcagcagcctgaggtgccccactcttactggatatagatcattgtgcaacaaagccctctccactccatgcccaggcagatttctagatctcagagcaccagctcacctggatcagcagcctgagccaccacatcttaccttccaacagaagtgc

SEQ ID NO: 147606 - DNA, 524 bp, Homo sapiens
cctcgaacattggaccccaagttcttcacttttggggctcggactggttctccttgctcctcagcctgcagacagtctattgtggaaccttgtgatcatgtaagttaatactttatatatatatctccatcctattagttctgtccctctagagaaccctgactaatacacctaccaatcaagaaaatccccagaccagatgaactcacaggtgaattctactaggtgtacaaggaggagctgtacacctagtagaattactgtacacctagtagaattattagagcattactctgataccaaaacttggcaaaracatgatgaaaaaaaaaaacataggccaatatccctgatgaacatagacacaaaaatcttcaacaaaatattagcaaactgaatttaacagcaatttgaaaagttatttcaacatgatcatgtaggcttcacttctggggtgcaaagttggttcaatatatgcaaatcaataaatgtcattccacacatagagttaaaaaccaaagcca

SEQ ID NO: 147607 - DNA, 524 bp, Homo sapiens
cctcgaacattggaccccaagttcttcacttttggggctcggactggttctccttgctcctcagcctgcagacagtctattgtggaaccttgtgatcatgtaagttaatactttatatatatatctccatcctattagttctgtccctctagagaaccctgactaatacacctaccaatcaagaaaatccccagaccagatgaactcacaggtgaattctactaggtgtacaaggaggagctgtacacctagtagaattactgtacacctagtagaattattagagcattactctgataccaaaacttggcaaagacatgatgaaaaaaaaaaacataggccaatatccctgatgaacatagacacaaaaatcttcaacaaaatattagcaaactgaatttaacagcaatttgaaaagttatttcaacatgatcatgtaggcttcacttctggggtgcaaagttggttcaatatatgcaaatcartaaatgtcattccacacatagagttaaaaaccaaagcca

SEQ ID NO: 147608 - DNA, 547 bp, Homo sapiens
tctttttccaatataaagctgttccatctacattaaaaacctgttgtttagtgtagccaccttcatcaatgatcttagctagatcttctggatctcttgctccagcttstatgtcagcatttgctgcttcaccttgcacttttatgttatggagacattttctttccttaacttcatgaaccaacctctgttagcttcaaacttttcttctgaaggttcctcacttctctcagccttcaaagaactgaagagagttaaggccttgttctagattaggttttggcttaagggaattttgtggctggtttgatcttcagtccagaccaccaaaacttcctccatatcagccataaaatgacttcactttctgtcatttatgtgctcactaaggtagcacctttaattttcttcaggatcttttcctttgcattcacaacttgactgcttggcacaagaggcctagctttcagtctatctcagctttgaacatgctttttcattaagtttaatcatttccagcttgtgatttaagtgagatatgtgtgcc

SEQ ID NO: 147609 - DNA, 547 bp, Homo sapiens
tctttttccaatataaagctgttccatctacattaaaaacctgttgtttagtgtagccaccttcatcaatgatcttagctagatcttctggatctcttgctccagcttctatgtcagcatttgctgcttcaccttgcacttttatgttatggagacattttctttccttaacttcatgaaccaacctctgttagcttcaaacttttcttctgaaggttcctcacttctctcagccttcaaagaactgaagagagttaaggccttgttctagattaggttttggcttaagggaattttgtggctggtttgatcttcartccagaccaccaaaacttcctccatatcagccataaaatgacttcactttctgtcatttatgtgctcactaaggtagcacctttaattttcttcaggatcttttcctttgcattcacaacttgactgcttggcacaagaggcctagctttcagtctatctcagctttgaacatgctttttcattaagtttaatcatttccagcttgtgatttaagtgagatatgtgtgcc

SEQ ID NO: 147610 - DNA, 454 bp, Homo sapiens
acattccaaatattgagaatctgtcagccagtcccctcagttactaccttcaggcctttctccagcatctcagaatgagtcaccagtgagctgatgactatgagcattgtcacttttctattatacaactcactgcagagatcaatgaatttccttacaggagagcagatagattaagattctctgaaattatagcgaggtcttaaattataactggactttcactgtggtgagtgtgttctaaaagaagaaggctataaataaaacaagcaaactcactttagtagcatttctaccaaagaaataatagaaatgaaacactttcacytagaaggtaccacatgacaatgacaattaacctctctcttagcaggctccaagaatttataaaatatcagtgaatatatggtttttaaatagcttgctttatgcagatgttaatttaaggtttagg

SEQ ID NO: 147611 - DNA, 470 bp, Homo sapiens
acctagaaggtaccacatgacaatgacaattaacctctctcttagcaggctccaagaatttataaaatatcagtgaatatatggtttttaaatagcttgctttatgcagatgttaatttaaggtttaggtttcctgaccttgcaacccattctcagtgctatgcatgatggatatcattttctaagtcttcaccatggattattttactaaaatctattcattcctgaacacatgaaagtacttatttgtgttgcatagaaattgatytgaaaacaaaacagaaacaaaacaggtgctcaacttgaaaagaaaggttaatgttattctgacatccttcctgagcattgacaagggtcagtgcacgttttcacatttctttttccagcagttcaaaaccgccactcagcaccacaaaaaataagaaggcatatgcaatcgggagacaagatcgtctccaagggtcaggccc

SEQ ID NO: 147612 - DNA, 470 bp, Homo sapiens
acctagaaggtaccacatgacaatgacaattaacctctctcttagcaggctccaagaatttataaaatatcagtgaatatatggtttttaaatagcttgctttatgcagatgttaatttaaggtttaggtttcctgaccttgcaacccattctcagtgctatgcatgatggatatcattttctaagtcttcaccatggattattttactaaaatctattcattcctgaacacatgaaagtacttatttgtgttgcatagaaattgatttgaaaacaaaacagaaacaaaacaggtgctcaacttgaaaagaaaggttaatgttattctgacatccttcctgagcattgacaagggtcagtgcacgttttcacatttctttttccagcagttsaaaaccgccactcagcaccacaaaaaataagaaggcatatgcaatcgggagacaagatcgtctccaagggtcaggccc

SEQ ID NO: 147613 - DNA, 470 bp, Homo sapiens
acctagaaggtaccacatgacaatgacaattaacctctctcttagcaggctccaagaatttataaaatatcagtgaatatatggtttttaaatagcttgctttatgcagatgttaatttaaggtttaggtttcctgaccttgcaacccattctcagtgctatgcatgatggatatcattttctaagtcttcaccatggattattttactaaaatctattcattcctgaacacatgaaagtacttatttgtgttgcatagaaattgatttgaaaacaaaacagaaacaaaacaggtgctcaacttgaaaagaaaggttaatgttattctgacatccttcctgagcattgacaagggtcagtgcacgttttcacatttctttttccagcagttcaaaaccgcyactcagcaccacaaaaaataagaaggcatatgcaatcgggagacaagatcgtctccaagggtcaggccc

SEQ ID NO: 147614 - DNA, 529 bp, Homo sapiens
aaaaaaatgcaaaaggcatgaattccaaacattcatttaggaaagcagtttttgtctatttttgatgctacaatgagtcattaagtttcatacattttaatatacatttgtcccaataccagatatatgttattttaaaagatatttgttaacaaagcatgctttccccttacataattaaacattttgcattacttggaaaaygtgaaaaggttgaaactagtcttttaataatatagatattactgctgtatttatgtatttactgagacagggtctctctctgtcgcccaggctgaagtgcagtagtgtgatctcagctcactgcaacccacaggaggtttcgccatgttggtcaggctggtctcaaactcctggcctcaagtgattcacctgccttggcctcccaaagtgctgggattacaggtgtgagccaaagtgcccagccggtattactgttttaaagttatacatggatctaaaataagttttatttaacaatcccttctctattacacatcatacacaa

SEQ ID NO: 147615 - DNA, 592 bp, Homo sapiens
ttgtaagaggtgattaattttaaaatgcacaaacagaaaagtgatcagactcagaaagtgcaggtttctaatcttcacaggtaactcactgaccaccaggagtctcttaggtacttctgagagctgagctcaaagcaagatcccaaacagacaacaataaatgaatgagagatcattctgtcaacctcctatccacagagaaatcctttccacaaaaccctagctcctatttgaaaactgctagcatcagaatttcagttcctctcaaggcaacttattccattttccaacaactcttatggttagaacattcttcaatattgtttctgtccctactggttactgctggaatggcagtggctttaggaactgttttcctgataagatggtagggttggaaggaagctaaactagttcttctttccttaatttagaaatcttcagctamgaaattattgattaggccataaacaacaaacatactctgagcctatttgtggcccagtgtcttaaagtgatgttgatagaattttttaaggttgtggtgggtgataaaaatcaagtgaggcagggcatggtggctcacaccgta

SEQ ID NO: 147616 - DNA, 496 bp, Homo sapiens
tgaagtcttactaaacatttttacaaaaataaactcatttacaattgtagcattgttccatgtctgtctagttgccaatgtaaagcatcagtgtcatgcttcatgcatgttatatcttgacctacatgtgtgcaaatgtaggcraattatgaattattcatattggaaaatgctcctcagctgccatgtgcaactatagcaaatattgtgctaatgtgtgagtacctctgcaaccacaaagaaaagcaagaaagtgcatcttgccaccgctgggatctgccacttctcttgcattcttgctatgtgagaggaaggatttgatcaatgccttttctcttaccttagtgtgcacaccatccactcctcgctacactccagagccagggcagtgtctgtctctggtgtgaacagcagcatagcccagaaattttcacagtatgtagacacagtcttttttgattcaaggacataacacaaaggatgtgaggcgtttccc

SEQ ID NO: 147617 - DNA, 381 bp, Homo sapiens
tggtaaccaagagtgtgcgtggactctggagtcgaactgctccgtgggttgagtctggagcctatcgcacaggcgctccgtgacactagaaaagttacttatgaaaatcccccctcacggtgctactgtgagaatgagatgagatgatgtaaaaacacttggcatagtcctgggcctgctgtttgccttgaggtgccaccctactgaccatgtcctgtggacacagcaaaaatggggaatgtaaaccttgatctagctggcatgtggggccccgccrtggaactggggggatgagggaggtgaccataccacaggggagggcctgagaggtctgcctgagaaagatggcagctggatggccaaccctgttgggtgctgcag

SEQ ID NO: 147618 - DNA, 584 bp, Homo sapiens
atttggcttgcgactatagtttgttgatccctgacttagattacattgactccaaagtcagcgtaaagccaaatggaaacaattatctgggttacttggtcaaaactagccaaatgtattatttcatggtggcagcactttgaagtataagaaagctggtatgcttgcttttgaaaatctaagacacatgagttgcaacagtattttatttgagaagtggctcttttataaattcatcatataaaacatataatttagaaggaattagaaaccactctgcagatgggctattacagttcttaataaaaattacagactctgtaaaaattacatgttcttaaaattaaaccagagttatctgtcttgtggtaaaagatcaatatgaaagatcagaactcattgtctatgaggcctcctmtatgtatataaaaacatgtattatacaaaatatcaaaattccagaaacaaaaggctagttattaaacaactgtaaataggttgaagagggagaaaaggcttagagcagcacacagaactctgcaataaatttcattttaatcctaaaagaaactaggatagaacaa

SEQ ID NO: 147619 - DNA, 599 bp, Homo sapiens
tacccagagcatcagggaacatctccaacaggcagccaagcacggtcatatttctgtagcaaaataaaatgacggttcatacaaaacggggtgaagacaacacagcgcttgtggttcaggtcaggctttccgtccagtaagttatgcaaaactttttcagagcttttggcattgcaaattggggcgaaggaattgggacctgtaacaggggtctttccctaaatatttgggagaggctgacaattgcactttctgtatgtgtgtgtgtgtatgcagatattccactgtctgttggtatcttggaccccagggccagcccgacccagctgaatgcagtcgagtttttgtgggaccctgcgaagagagcttctgcattcattcaggtgggccacagggagcttgccctccaggggaagacctagtytttggggtggcctgcgtgcagtttctcaaaactaacccatctgggagggtctggatgagcttctgctccctgtcactgggaaggaaactgcaggagagagagaatgagtgttgcaaagagtcacagagctcattggtccatatttagggaaaggagtggggagggttttagaatt

SEQ ID NO: 147620 - DNA, 554 bp, Homo sapiens
ccagagatgtgacagatagtagctttgtgtaaattgcaggaacataaagtcacagaatggcaagttaagtcttagagcctgggattcaaacacatgagtggaaatccagttgcagagaatgagaaactgtagttttagcactttgaaacttgtttgaacctcaatttccttacgagaggtgaagccagcggagcttctgggttgggtggggacttgtagaacttttgtgtctagctaaaggattataaaggcaccaatcagcactctgtgtctagctaaaggattgtaaatgcaccaatcagcactctgtaaaaacgcaccaatcagcackctataaaatggaccaatcagcattctgtaaaatgggccaatcagcaggatgtgggtgtggccaaataagggaataaaagctggctaccacagcagcagcaaccaattctggtccgtttctatggtggggaagctttgttcttttgctcttcataataaatcttgctactgctcactgtttgggtttgcactacctttatgagctgtaacacttaccgcgaggg

SEQ ID NO: 147621 - DNA, 537 bp, Homo sapiens
cctaccacaacagggtagattataaatacattaattttaaatatttttatttactgcatttatctataagtattaaaactaacccatatttcatgcaaatgtgcaaatatattgcactctagtttagatgtaagtcagctactgtaagataataaatatwtctggaataaattcatattctcataattgcatttgaattcctactataaaggaatattatatgtacttgtttggggatatggtatacttttctcattaggccatgtgcatgtcttttgtatttgacaaggcagtcccagataaaagtctctattaagtagcattatgacttcccatcttattcacttttctagtaagatatgtgtatgtttgcatgtcaacatttatcttatgtctgtataaatatatattttatatatacatatatattatttcaagacttttgaattacataatgagttttattctctgacttatcatgcttattttatgaagtgcaaagcacatttattgtcaatttgatcttcatttgtctac

SEQ ID NO: 147622 - DNA, 585 bp, Homo sapiens
aatcaggtgggaagcccttttgcttggtaacacagtaacttctgttggctggctcccgagctcactctgaaatgggctgtcagctaattgcccaggcctcccagttgtagatatatgatgcctacacctaacatctttggctttattgatgaatcactattgaatcagttatcaaatctgggctcacaaaataatgatttcttaattgataattgacatttaactagaaaaaagagctttctatttctcctttaagttggtattgctatgtgttatttatttatttttaattatttaacagttttaacttatttgaagttttttttcccctcattgtcacaagttagccacattagccatttagtcagaagggactccttcaagctggcttctaggttcttttcatataaccataggttattgttcttcatattttagtacttcctcactttctgcaactactacatctaacatgcttaacttgtattttccctacttccgatcagccatattcccaaggatctctgatccttttaatggggagcaatatttagaaaacaaracgtggtgactaggtgagctcat

SEQ ID NO: 147623 - DNA, 618 bp, Homo sapiens
ctggcttcacaattatcagttcagagaatgaaaccaatttctgccgtagcttgggctgctgtaacaagagtaccctagactggatggcttaaacagtgaacatttatttctcatagttccggaggctggaagtccaagaacaaggtatgggcagatctggtgtctcatgagggactactttctggtttgcaaatggctactgctayggtttgaatgtgtcccctaaagttcatgtgttggaaacttaatccccaatgcaacagtgttgagaggtgggacctttaagaggcaattaagtaggtgagagttctgccctcacaaatggattaatccattatcttggtagtgggtttgttatcataggagtgggtccctgataaaaggatgagtctaagtcccttcctctcttgcatacatgcactcttgcccttccacctgccaccatgggatgatgcagaagaaggcccttattagacaggagccacttgaccttgggccccccagcctccagaactgcaataaataaatccctgttctttatacattcttcagtctcagacattctgttatagcaacacaaaatggactaagaaaactggtaccaagaagtagggctgt

SEQ ID NO: 147624 - DNA, 605 bp, Homo sapiens
tagaaaagatgaggggcatgatatttaaaagacagcaagcaatccccaaggaccatggatttagcacacaataggatactggctaatttgtcccccatccattagccaggaccccaggaccttgaggaaggacatatgtcttatttttctgctgtgtctggcagtgccatgggctcctcggaggcaagggggcgtcccctgggctggcagcctcctgtgttgggagcacagcgggctgtctgaggtggcagtcctgctggggcacatctgtccctcttgatattcacactrctaatgtctcactgtggtgacaaatgcaaattgggctgcttcgtccaaacatgtcagcctatttagcaggtgcatagggattggcacaaggcaccggctgtcccagtttcttctgttcttaacctccatccgctcagcagtctcccgtccttcaggattgctgatggggtagtctagttgtggagaaccggcaggaaaaccctttctaagaaaagaaaggtctagggttattaggagacgtttatcatgggccattctccataaaaacgaattgacttcctctggtcaaatatcgagtaaaaccagacaagaat

SEQ ID NO: 147625 - DNA, 429 bp, Homo sapiens
ttaactcacatgatcacaaggtccacagtaggccatctgcaagctggggagcaaggaaagccagtctgagtcccaaaactgaagaacttggagtctgatgtttgagggyaggaagcattcagcaagggagaaagatgtaggctgggaggctaggccagtcaagtcttttcccgtttttctgcctgctttatagtctagctgcactggcagctgatttgatggtgcccacccagattaagagtgggtctgcctttcccagcccactgactcaaatgttagtctccttcggcaacaccctcacagacacacccaggatcaatactttgcatctctcaatccaatcaagttgagtcagttttaaccatcacaagtgggaagaaggcagggagggggagaacaagctcaccttatctccatctgaagcccatt

SEQ ID NO: 147626 - DNA, 287 bp, Homo sapiens
gtcagcttcatctgctatcaagttctgtttacaycttaagagaatccaggttctcatttctgattctattcctagttggtgacaacagaaactatgtttaggatgactctgagtcttggaagccatctgatctgaagcttgggggcactggaaaataatctccagctaggtctgggcttccaaggagagaaatgaatgcatttctcttggataaaatggaagggggaaacctttggtttgagaggcgactctagtgcactgtaagatacattattacagttgcctca

SEQ ID NO: 147627 - DNA, 348 bp, Homo sapiens
cttatttggggatggacagggggaaaggaggacccacacatctaagggataagtagagccagtgttaagagagacctcatggctgtctgggacacagagaatgccctgtgaagccagcctgcaatyggtggcttattggccaagccagcctctgaagggcaaaaaatatacaagctttgttgagcagactgcctggaaaagctggaccatcttggcgagagtatttatttgcaatggaagagtatcagggacatcaggatcgaaggggtcaggagtcaggcagtggccgatcagacccctggacacactgaaaggtattgggtcagatgtaggacccaatgaaggtac

SEQ ID NO: 147628 - DNA, 442 bp, Homo sapiens
gggcaatatgctccttgcttacatcccacagcagaaaaaatcaacagttcttcaatcagtgtaaaaagaagtttacattcaagaaatctaggcggaaatgctactctcaacaattccagtgctacatgtaacagtccatcttttaaaaaaaaaagttttctggttgtcttttctgtgagaagtaaagatgtggaaaaaaagtcacggaggagttataacagttaagtaattagtaaagtagcaagacaatactaaaagcccgttgtttttgttttcaattatgtcctcttctaaatccttcagctaccttaggctgctttgtgcaccctgtgtaccaacctgtgacccatctgtagggrgagcaagtttgtttaccctcttagcaaaattcagcagagttgtcatatcccactggtgacatggtgggacatgagaggaattc

SEQ ID NO: 147629 - DNA, 531 bp, Homo sapiens
gtgttgtgatgatggcaaaaaccaaaagtgctttttcagactttgtcacagtgtctgcaaagctgagctgggcagaatttaacagcctaggcaaacttggctgctggcctgactttccagagttcacttttcccctgttgaaaaggcttctcttaattatttttggattgagcctcatagacagggagtttgctggatcttcccatcccagcaggctcacacctgggggatgttattgtgccacctacagctgggttagagtcagctgcatgacagggcagaccagcttgggtgatgtgttaaggtatttcaaatagccatgtaacatatcatagcccttctgccataagaggagacctttacawttcctgtgctccaaaacgcttcctctggcactgccatccctattctgatccaaaccattcattataggctaggccattgagaaacttccaactcatgctcctaacaacatagctacaatggagacccatttcaatgagattctgtccttcttctaaataaaactag

SEQ ID NO: 147630 - DNA, 592 bp, Homo sapiens
tagttgaaagaagtgtactagttcattaacaaaatgcataaacaggcctatttataatcacatgcataccttaagtcactctccccaaaccataaatacatatagtatccaactatacttgggtatcttaaatatgcatttttataggctctatttttttattcttgtgtgtatgttcattctgtctctctttttttttcttcttttgttctttttgaggcaaggtctcactctgccacccaggctggagtacagtggtgcgatctccactcactgcaacctcaatctcccagtttcaagtgatcctcccayctcagccttccaagtagctggggctacagacacacacaagccaccacacctggctactttaaaaaatattttgtagaaatagggacttgctatgttgctcaggctggtcttgaactcctgggctcaagtgatccacctgcctcggcctcctgaaatgctgagattaaaggcataagccactgtgcctagcctgtatgttcattcttaaatttaaggaaattgacacaccaagaagcttttctattattaagtacagctaaaacaaataaataaaaactgc

SEQ ID NO: 147631 - DNA, 580 bp, Homo sapiens
atcactgagacaacaagtattgccagggaagaaggttgtattcaggtgctkcagctgagcagatgggagatcagtctcaaatacatgtcagctggttaaaattttgggtttatatagcaatcaggtatgggaaaaaaggaattaggtaagggcaaggtagaggagttggtctataggaagcagctcgtcagttaagcaaccatgatgcctaaggggtctgcgtctcattttccagatgcaataatctggtaagtttcaattccttgatactatctggaaggccttatggttggtttcctgagaagagaactcacataagacaagtgtaactttcataaattttaagattggaaattttctatgtttattcaaaagaaatcataaacgtggttttatgggacaattaggccagttttactatcactatactcagtttcaaaaccctaaaaagaatgtgggagtttatatgtatgtgatggaatttagagccaattacttaccagtaattaacagcagactgccaactaccatcagttcatccttgcttacagttcattgtaaagtttacactataaaattc

SEQ ID NO: 147632 - DNA, 580 bp, Homo sapiens
atcactgagacaacaagtattgccagggaagaaggttgtattcaggtgctgcagctgagcagatgggagatcagtctcaaatacatgtcagctggttaaaattttgggtttatatagcaatcaggtatgggaaaaaaggaattaggtaagggcaaggtagaggagttggtctataggaagcagctcgtcagttaagcaaccatgatgcctaaggggtctgcgtctcattttccagatgcaataatctggtaagtttcaattccttgatactatctggaaggccttatggttggtttcctgagaagagaactcacataagacaagtgtaactttcataaattttaagattggaaattttctatgtttattcaaaagaaatcataaacgtggttttatgggacaattaggccagttttactatcactatactcagtttcaaaaccctaaaaagaatgtgggagtttatatgtatgtgayggaatttagagccaattacttaccagtaattaacagcagactgccaactaccatcagttcatccttgcttacagttcattgtaaagtttacactataaaattc

SEQ ID NO: 147633 - DNA, 621 bp, Homo sapiens
cttgctcacccccaacttgtctgtgtacctcattcttcctagatgcaggaccaggactcaggacctgctgaatggtggggctaaaagagctgtaacacaaatagagctgaaacatgccctttgtttgycacgttgtgggcaagaagaaggagagagaaaaggagagaagagctgtggcccttcagggagcccagacctagaagctccccaagccaagactatgacactctctttggtgttctgcagtttctggcatctccaagcttctgggcatcactgcatttcctggtaccagccatgaaagctgcttgcagtatgcctggtccagatgcaactcacagggagctggtgcccaggccagtgcctaaagctgcctgccttctgccaccagcatgcgtagctgtgcacaggggctggaccccatgctcactagctcacacaccacttgccactccacttggcctaggtgggcatgggatctaggccagtagcatgagctgagtgcagctgagtgggcagaatgagcccagtgcacctgagcaaaacttgggcaaaggcgcctctgcccacagaggtttccagctggaaaggaatcactccaaggatcctgtgacagtagta

SEQ ID NO: 147634 - DNA, 458 bp, Homo sapiens
accagaatttaactcaatggttatctggaatgagatagaacaaatgataccttaagagatamaagtgttttatacaatgagtaaaaaagtctatgataagcacattaaaacatgtttattatgcagcagaacaaataagcaaatatctcttagagtacagtttttcaaaatcaaaggtataccagaatcattacattgtcctggtatagctctggcaggatatggggtatgtttgcacacagtgtatggatgtaggactgtgtgatgtttgtggggaatatttgtaatttgaaagtaggtttccccaaagagtctactgtttacaaaccttgctttaacaatcactctcctagaggaagggaatattttcagagaacaagtggaactgggcacacaagggcagcatttgtctttgacacatgcacaaagtgcccatattgtattcatgaaattggtat

SEQ ID NO: 147635 - DNA, 458 bp, Homo sapiens
accagaatttaactcaatggttatctggaatgagatagaacaaatgataccttaagagatacaagtgttttatacaatgagtaaaaaagtctatgataagcacattaaaacatgtttattatgcagcagaacaaataagcaaatatctcttagagtacagtttttcaaaatcaaaggtataccagaatcattacattgtcctggtatagctctggcaggatatggggtatgtttgcacacagtgtatggatgtaggactgtgtgatgtttgwggggaatatttgtaatttgaaagtaggtttccccaaagagtctactgtttacaaaccttgctttaacaatcactctcctagaggaagggaatattttcagagaacaagtggaactgggcacacaagggcagcatttgtctttgacacatgcacaaagtgcccatattgtattcatgaaattggtat

SEQ ID NO: 147636 - DNA, 626 bp, Homo sapiens
tctgtggatacagaacatgcagatacaaagggctggtgggatgactgtctacttgacactgaactctcaggaattcagtcattgaccaatctttttaattgtagtgtgactttaacttcaaattttgacttttaaaattaaagaggcttaaagattttgcagcccttccatctttttgtccaagagattagaacactcaggtataacaaatatttggcatagctrgaaatacaattagagatttctaacatccaacacagtgctttttgtttttgtttttgtttttgttttgtctcactcttgtttgcccaggctggagtgcaatggcatgatctcagctcactgcaacctccgcctcctgggttcaagcaattctcctgcttcagcccaagccagtgctcatgccactgaatcatgcttctctttgtcaagtatcttgaaaaagtcacttaacctcttgtggctttatttttttcatctttataatataaatagcttccaaggtctctcttgaattacgttttataattcagtactgtatcaatagcacaaatcttttacatttctacatatatatagagattggtttgatgaacaagtgaaatatttgttttattttaaaaaat

SEQ ID NO: 147637 - DNA, 553 bp, Homo sapiens
agaatctgatgtgtctctctctggggctttctcttaagactctgttgcccatcagaacacctactcttttaccaytgtttcttacatgtctgattttctgctagattataagctatttagaggtggagatattgtcttttcatattcttattgacagtgaagtttccaatagacaggagtctatcaatgaccatgttggcttctacgtcccagtgcctctcaaatccatctttagtgtagatgctttggtgatgtgctttggagccacatcatcttgggcccaaagtataataccctccacactcatccctctcaaatccattttctcttctcctagaagggtaatttttttaagaacaaatattatcactttgctcctctccttaaaaccctagagagctcccctcttcctacaagaaaaattccaagttccttgggataaaattgacacgttttcaagtcaactctcatagctttaaacactgcctctttcctcatttatgtattcttcccatgcagaattgccgtattcacttaccatatgcataattat

SEQ ID NO: 147638 - DNA, 553 bp, Homo sapiens
agaatctgatgtgtctctctctggggctttctcttaagactctgttgcccatcagaacacctactcttttaccactgtttcttacatgtctgattttctgctagattataagctatttagaggtggagatattgtcttttcatattcttattgacagtgaagtttccaatagacaggagtctatcaatgaccatgttggcttctacgtcccagtgcctctcaaatccatctttagtgtagatgctttggtgatgtgctttggagccacatcatcttgggcccaaagtataataccctccacactcatccctctcaaatccattttctcttctcctagaagggtaatttttttaagaacaaatattatcactttgctcctctccttaaaaccctagagagctcccctcttcctacaagaaaaattccaagttccttgggataaaattgacacgttttcaagtcaactctcatagctttaaacactgcctctttcctcatttatgtattcttcccatgcagaattgccrtattcacttaccatatgcataattat

SEQ ID NO: 147639 - DNA, 571 bp, Homo sapiens
ttaacacacacaaagaacccttaaattcaaaatttaaaccaacgtcattaaattgattgtgaacagaactaaggtgygatagataagtagatagatatagatagatagatatacacatatagatatatgtgtacatatgtgtgtgtgtatatatatgtatataacaattagataataaggattctatctataatacttaagaattcagagggaggtgttatattgaagaaaccaatgctgcaatattttgcagctattctcaggggatgagtctgtttctcaagcctttgaatctggtcttagttaagtgacttgttttgcccaatgagatattagcaaatacaaagcaagcaggagtttaaaaatgtttcacatttggtcttgccctctcttccttcttgttggaaccctgagaccactatctaagaaaggatcacctaggggaggatgagacctacctgtagcagaggctaactgccccagccaatgaccctgacaattgtcagacatgttagggaggcctttctagaacgttttggcccacttgagtcatcaactgattcacaagtca

SEQ ID NO: 147640 - DNA, 571 bp, Homo sapiens
ttaacacacacaaagaacccttaaattcaaaatttaaaccaacgtcattaaattgattgtgaacagaactaaggtgtgatagataagtagatagatatagatagatagatatacacatatagatatatgtgtacatatgtgtgtgtgtatatatatgtatataacaattrgataataaggattctatctataatacttaagaattcagagggaggtgttatattgaagaaaccaatgctgcaatattttgcagctattctcaggggatgagtctgtttctcaagcctttgaatctggtcttagttaagtgacttgttttgcccaatgagatattagcaaatacaaagcaagcaggagtttaaaaatgtttcacatttggtcttgccctctcttccttcttgttggaaccctgagaccactatctaagaaaggatcacctaggggaggatgagacctacctgtagcagaggctaactgccccagccaatgaccctgacaattgtcagacatgttagggaggcctttctagaacgttttggcccacttgagtcatcaactgattcacaagtca

SEQ ID NO: 147641 - DNA, 530 bp, Homo sapiens
tattctgcaaataatttttaagtttttattctaatgcttaaaacttttttccccttgccttattgcataggttgagacattcaataaagtgttgtacagaagtgatcattgtaggcatctttatattctccaaatttttacttaaatattcaatattttaccatcaagtagatgcttaatgcagtttattattgataacttatcagattaataaatttttttagcttcttactttgctaagagttataccatgaatgagtgatgaattttgaattttattaaaatgccttttctgaatctaygtttttcctcctttattctgtgtagtgactaactttaaatgatttttaaattttattccaaattatcttttctgcataattatacttgctcatgatatattaacctttttaaatattgctagaattgatttcctaatattggggatataatttttccattttcatatctaatttttatattgatttaattttttttctattttgcagaaaaaatgttactgaaatttt

SEQ ID NO: 147642 - DNA, 568 bp, Homo sapiens
atacaagacacagggaaaaagtattagatccagaacatgtttgcaatataaaaaaatacttgggaaccctaaaccctcatcgtcattcttaactttgttttctatttcattgagaaaataatggaagattagagagaacttctacaaactgtctactacatctaacccttayttgaatctgttcccaattattctaacttattcactttgctgctgataaaagtaatcaattccacttacctaatagatcttattacctcttacatgaataaggatgtaattcaatcaattctcatatttttctcaaatttatatctataggtaaggcctcttcccagaacatcagacttgtatatccaactgcctggtagacattgccacttgattgtctaataagcattgcaatctttacgtgtatatgaccaagatcctaacccatccttcaagaagctcacaacaatttactgccaaacctgtatgccacagtattttctatgtctgtcaaagacaacaccatcattacagttgttcaggccaaaatctctacattcacactgtcagaaaacct

SEQ ID NO: 147643 - DNA, 534 bp, Homo sapiens
caatatcaatatcagaaaatgtgggctktcaaagataaaacacattattggcaatagaatgagtcattactgaatgacccttataattatcttttaagaaaaacctcatagtttttataatgatagtcctatgattatcattataagaataatgataactaaaaaatagctgatgtcaatatagcatacactatgtgcttgatattttcctaaaatcttggatacatcattttattttcaccacaattctatatctactatcattatcctcatttcaccaatgaagaaattaaggcactgaaaggctagctcatagccatacaactagttagtgaagaggcaaagagtcaaaccaggaagataaacaccagtctctatgttctcaattctaatccataaatttattaaaatattatatttactgaaaaaatgtagtgactaggccaagcatggtggctcacacctgtaatcccaacactttgggaggctgaggcgggtggattacttgagacaatggagttcaagaccaggctg

SEQ ID NO: 147644 - DNA, 606 bp, Homo sapiens
aatttacatgaacacagttaccattgattatcagattagagtctgatgcagaagaatatgttatatgtcatatagaagagacacatataaacgtgaagcatgaaaagtgtgaatgtaaagaaggacagaaatgttatactagataaatactatataaaataaagctgaagatgcaatatcaatatcagaaaatgtgggctgtcaaagataaaacacattattggcaatagaatgagtcattactgaatgacccttataattatcttttaagaaaaacctcatagtttttataatgatagtcctatgattatcattataagaataaygataactaaaaaatagctgatgtcaatatagcatacactatgtgcttgatattttcctaaaatcttggatacatcattttattttcaccacaattctatatctactatcattatcctcatttcaccaatgaagaaattaaggcactgaaaggctagctcatagccatacaactagttagtgaagaggcaaagagtcaaaccaggaagataaacaccagtctctatgttctcaattctaatccataaatttattaaaatattatatttactgaaaaaatgt

SEQ ID NO: 147645 - DNA, 532 bp, Homo sapiens
accagctgagccagaattttgctaagctataaaactggtggaggagatcagcctccagatcaaaccaatttttctgaaggacctaaagaaatgaagatctatactattcctataaaaatgaaagctcaaaatcatatgcatatcaactgtcctttaatttatctgaaattcaatgcaattttgatcaaaataccaacagggtttttcatgaatcttgacaaactratttgaaactttatctggaggagcaaaagaccaaaaatggccaaaactgaagaatgtatcctaccagctatcaatgtatattataaacctctagtgataaagtcaatatgttattggcacagaaatacaaaaacattgacccatggaacagaatgaagatctgggaaatagactgtgttttacaacttaatatatctcaaaggtgcaactgaagatcatcgtggaataaagagtattcaaaatgtgagactgaacaattaactgcccacgtaaattggatccttaaattggattcttactttccacc

SEQ ID NO: 147646 - DNA, 532 bp, Homo sapiens
accagctgagccagaattttgctaagctataaaactggtggaggagatcagcctccagatcaaaccaatttttctgaaggacctaaagaaatgaagatctatactattcctataaaaatgaaagctcaaaatcatatgcatatcaactgtcctttaatttatctgaaattcaatgcaattttgatcaaaataccaacagggtttttcatgaatcttgacaaactgatttgaaamtttatctggaggagcaaaagaccaaaaatggccaaaactgaagaatgtatcctaccagctatcaatgtatattataaacctctagtgataaagtcaatatgttattggcacagaaatacaaaaacattgacccatggaacagaatgaagatctgggaaatagactgtgttttacaacttaatatatctcaaaggtgcaactgaagatcatcgtggaataaagagtattcaaaatgtgagactgaacaattaactgcccacgtaaattggatccttaaattggattcttactttccacc

SEQ ID NO: 147647 - DNA, 532 bp, Homo sapiens
accagctgagccagaattttgctaagctataaaactggtggaggagatcagcctccagatcaaaccaatttttctgaaggacctaaagaaatgaagatctatactattcctataaaaatgaaagctcaaaatcatatgcatatcaactgtcctttaatttatctgaaattcaatgcaattttgatcaaaataccaacagggtttttcatgaatcttgacaaactgatttgaaactttatctggaggagcaaaagaccaaaaatggccaaaactgaagaatgtatcctaccagctatcaatgtatattataaacctctagtgataaagtcaatatgttattggcacagaaatacaaaaacawtgacccatggaacagaatgaagatctgggaaatagactgtgttttacaacttaatatatctcaaaggtgcaactgaagatcatcgtggaataaagagtattcaaaatgtgagactgaacaattaactgcccacgtaaattggatccttaaattggattcttactttccacc

SEQ ID NO: 147648 - DNA, 532 bp, Homo sapiens
accagctgagccagaattttgctaagctataaaactggtggaggagatcagcctccagatcaaaccaatttttctgaaggacctaaagaaatgaagatctatactattcctataaaaatgaaagctcaaaatcatatgcatatcaactgtcctttaatttatctgaaattcaatgcaattttgatcaaaataccaacagggtttttcatgaatcttgacaaactgatttgaaactttatctggaggagcaaaagaccaaaaatggccaaaactgaagaatgtatcctaccagctatcaatgtatattataaacctctagtgataaagtcaatatgttattggcacagaaatacaaaaacattgacccatggaacagaatgaagatctgggaaatagactgtgttttacaacttaatatatctcaaaggtgcaaytgaagatcatcgtggaataaagagtattcaaaatgtgagactgaacaattaactgcccacgtaaattggatccttaaattggattcttactttccacc

SEQ ID NO: 147649 - DNA, 550 bp, Homo sapiens
ggaaaacattattgtttgtgtgtttaatgtttacattttatctgttcctgtaaaagctaaattttgcattgtatggctgcctgtatcattttttaataaactcaaaggatttctttaatttgaattttaacatgacaataaaaggatcagttaatgactcgaattgtagtagataatgaaatgttcagatttaactgaacaatttagatgaataagatatatgggaacctactagtgacataaccatgtaattttggtaataactcttaagtgtttgtaataagggaatttgtgagctccatttggagaaattgttaagagagaaatttctcttcttgtgttattctactggttctcctgttctgcattccatttggtctatgtctcaggctgatatgtgttatatgacttacataaattctgtaaatctatacttggaattgctccagtgagaacttttaagtgtagtttcttcgcctrtcattgaaaggacatttgctgttcggaagtcactctgccactgtgtatcatgagtgacagtaggaggtgt

SEQ ID NO: 147650 - DNA, 642 bp, Homo sapiens
gaattctatcaggtaaatctaacacaaagattgaaatcattaaaaataatcaagcagaaattctggagttaaaaaaatataactgacatactaaataacacatcagagtctgttaatagcagaattggtcaagcagaagaaaggattagtcagcttcaagacaggctrtttgaaaatatgtaatcagaggagataaacaaaaaaagaataaaaatcataaagtatgcctgcaagatctagaaagtagcctcagtgggccaaatctaagttattggcattaaagaggaggtagagaaaaagtggtagaaattttattcctaagggtactaacagagaacttgccaaacctagagaagatatcaatatcccagtacaagaaggttatagaacaccaagcagatttaacccaaacaagattacctcaagacacttaacaatcaaactccctcaaaatcctaaaagcagcactagagcaaaaagaaataacctacaatagagccccagtacaactgacagcagacttttcagtggaaagcttaaagggcaggagagagtggcatgacatatttaaagtgtagaagaaaaaaagtaccctagaatagtatatttggtaaaaatatccttcaaacataaaaagagaaa

SEQ ID NO: 147651 - DNA, 195 bp, Homo sapiens
ccaaacatccctgaaacaaagggaggttttcttctttgcccttagttatttctctaaacttgtcataattcactggcttaaccatacactttttcctctactttttttcccacagcacagcaagtggatgaaaatatttgtaagtcatgagatattaaatcaaagaacatggrcaacttcacaaactcctctata

SEQ ID NO: 147652 - DNA, 428 bp, Homo sapiens
aaaggtgttgtatatttacaccataactggcttaygtacacttgccttgtccgatttaaaagggactttgccgcaggttttctattctaggcacacaaatgattttggctagtggtgggcatgagtaggcagttgtggcaggtggagttcagaattccaaactcatattttgcaagtggtaagtcataaattacttaggattctatgcagctctcctttactggtttaatgaggtaaaggagaacagtcatcatattaaattatgtcagtttttctgggaacaggtgacagaacaaatcatttcaaactccctcattctacatactaagaatccactgaggactataactgctgacctttgtagcagtgagctgtagcttgtgaaaaaaataatgagtgaagattatattttactgaacatttttacc

SEQ ID NO: 147653 - DNA, 428 bp, Homo sapiens
aaaggtgttgtatatttacaccataactggcttacgtacacttgccttgtccgatttaaaagggactttgccgcaggttttctattctaggcacacaaatgattttggctagtggtgggcatgagtaggcagttgtrgcaggtggagttcagaattccaaactcatattttgcaagtggtaagtcataaattacttaggattctatgcagctctcctttactggtttaatgaggtaaaggagaacagtcatcatattaaattatgtcagtttttctgggaacaggtgacagaacaaatcatttcaaactccctcattctacatactaagaatccactgaggactataactgctgacctttgtagcagtgagctgtagcttgtgaaaaaaataatgagtgaagattatattttactgaacatttttacc

SEQ ID NO: 147654 - DNA, 428 bp, Homo sapiens
aaaggtgttgtatatttacaccataactggcttacgtacacttgccttgtccgatttaaaagggactttgccgcaggttttctattctaggcacacaaatgattttggctagtggtgggcatgagtaggcagttgtggcaggtggagttcagaatyccaaactcatattttgcaagtggtaagtcataaattacttaggattctatgcagctctcctttactggtttaatgaggtaaaggagaacagtcatcatattaaattatgtcagtttttctgggaacaggtgacagaacaaatcatttcaaactccctcattctacatactaagaatccactgaggactataactgctgacctttgtagcagtgagctgtagcttgtgaaaaaaataatgagtgaagattatattttactgaacatttttacc

SEQ ID NO: 147655 - DNA, 428 bp, Homo sapiens
aaaggtgttgtatatttacaccataactggcttacgtacacttgccttgtccgatttaaaagggactttgccgcaggttttctattctaggcacacaaatgattttggctagtggtgggcatgagtaggcagttgtggcaggtggagttcagaattccaaactcatattttgcaagtggtaagtcataaattacttaggattctatgcagctctcctttactggtttaatgaggtaaaggagaacagtcatcatattaaattatgtcagtttttctgggaacaggtgacagaacaaatcatttcaaactccctcattctacatwctaagaatccactgaggactataactgctgacctttgtagcagtgagctgtagcttgtgaaaaaaataatgagtgaagattatattttactgaacatttttacc

SEQ ID NO: 147656 - DNA, 420 bp, Homo sapiens
gaattctcaacctgtgatcaccaccacccacccaaatatcatcaatctcaggaagacaaattcctggggttttatttagtgacatgacagtgaagaatttgccaacaaaataccatgtatgtgaagactagaaccccatgcagccattagcagtcacagagtatagtgggtgagtgcaagggcagtggtgctaagtagttctgrctcaaatatagtctctactgttagttccatggccttggctattatataacctctcttcatctcagatttcttcatttgtaaaatttaaattataatacttgatatcaaaagatttttgtggagattagatgaataaacacaggtgaagttcacagagcagggatatgatacatagctagctttagactcacgttgtttattataacttctgaggtc

SEQ ID NO: 147657 - DNA, 420 bp, Homo sapiens
gaattctcaacctgtgatcaccaccacccacccaaatatcatcaatctcaggaagacaaattcctggggttttatttagtgacatgacagtgaagaatttgccaacaaaataccatgtatgtgaagactagaaccccatgcagccattagcagtcacagagtatagtgggtgagtgcaagggcagtggtgctaagtagttctggctcaaatatagtctctactgttagttccatggccttggctattatataacctctcttcatctcagatttcttcatttgtaaaatttaaattmtaatacttgatatcaaaagatttttgtggagattagatgaataaacacaggtgaagttcacagagcagggatatgatacatagctagctttagactcacgttgtttattataacttctgaggtc

SEQ ID NO: 147658 - DNA, 391 bp, Homo sapiens
gtttcaatgttgttagttcttatatttagacctgcagttcattgctaatacagtacaacactcaagtgctcttcgcttaaggaagacattgatgcagatataaacctccaagagggatttcccttgcctaggtgacaggactcatgagtgtatcaaatgtaatgactcagctcagacaataaaacatatgttccaggagcacatttaattaggacaggaactgttagtgtgcaagagagcagagcagaattaatggcacagtgtttctctgtggactccaaggggtttattttcaagtgattagaaaaratctgtcatgtacattatgccatcacgtttctgtcctattaccaagacacccttaacttgggtttgcattttcatccacaca

SEQ ID NO: 147659 - DNA, 595 bp, Homo sapiens
ggtgtatggggtttaagggatgacaaggatcataaaaatctgagattgcagcataattaccttatgactagaagcatgtgaatgcactctatgtmtaatttggaggaatattaaatttcaaatcccttaagagttaggactccaaaaagttaggactatgtaccatagtcatcctcttctcattacatttagaatcatgtttttctttggtaataaaatgactttcatagagcattagatacatgctatgaaatatgtaggtaatcaggataatatttatcagcagattattatcgtttgtagaaattgtaaactaaatgctacattttcaggtacaaaatacttaaggcacaactatgtacactaaaattgtataggttatcttatcagtgttaatataaattctgacaggtgatctttatggaagatataaaataaaataattgttatgaagatggaaacaataaaaatacttaagtactcattaataaaaactaacagtatgaggcattttgatttcagcttcaacattcctcccattcctataataaaagaaagctagacaaactgaacattattgactttccttgaacat

SEQ ID NO: 147660 - DNA, 595 bp, Homo sapiens
ggtgtatggggtttaagggatgacaaggatcataaaaatctgagattgcagcataattaccttatgactagaagcatgtgaatgcactctatgtataatttggaggaatattaaatttcaaatcccttaagagttaggactccaaaaagttaggactatgtaccatagtcatcctcttctcattacatttagaatcatgtttttctttggtaataaaatgactttcatagagcattagatacatgctatgaaatatgtaggtaatcaggataatatttatcagcagattattatygtttgtagaaattgtaaactaaatgctacattttcaggtacaaaatacttaaggcacaactatgtacactaaaattgtataggttatcttatcagtgttaatataaattctgacaggtgatctttatggaagatataaaataaaataattgttatgaagatggaaacaataaaaatacttaagtactcattaataaaaactaacagtatgaggcattttgatttcagcttcaacattcctcccattcctataataaaagaaagctagacaaactgaacattattgactttccttgaacat

SEQ ID NO: 147661 - DNA, 646 bp, Homo sapiens
agggatgcagggatggtttaacatacacaagccaataaatgtgatacaccacataaagagaattaagaacaaaaatcacgttatcatctcaatagcaacagaaaaagcatttgacaaaatccagcatcgctttgtgattaaaatcctcagcaaaattggtgtacaagtgaaataccttaaggtaataaaagccatttatgacaaacccacagccagcattatgctgaatggggaaaagttgaaagtatttcccctgagaactggaataagacaaggatgcccactctcaccacctctattcaacatagtactggaagtcctagmcagagcaatgagacaagagaaagaaatcaagagcatccaaattggtaaagaggaagtcaaactgtcattgtttctttgtgacatgatcatatacctagaagaccctaaagactcatctaaaaagctcctagacctggtcaataaattcagcaaagttctaggatataaaagtaatgcacacaaatcagtagccttcctatacatgaacagcaaccaagctgagaatcaaatcaagaattctactgctttcacaatagctgaaaaaaaatacttaggagtatacctaactaaggaggtgaaaggcctctacaaggaaaacaat

SEQ ID NO: 147662 - DNA, 559 bp, Homo sapiens
tcagtgaggttcatttacctatgatttctaaacaacaataacattgtggagtggtagtaatattgagtattatgggaacttattgaaacttctatggcagacatacaaatgtgccagctttcatacagtgaatggaagtggattgaaagctatgacactctgtttagccataaggagacagaatggcagagtagaaagaatgttgaactaaaaataaaggaaattaagttctaatctggattctgacacaattgtttgacctcatctgcaaaatcataatgttcatccaaatgatttccaaagtcccttctagtaaagaaattccatatattatcatgctgcttttctactaaacacagaagagatgagtttgggtttcaaggaagtgtttcctgacctaaagtataacaagacaccacatattttgctaagggaggtagagaattcttcacaagagagtttytaaaaaaggaaaaatcagctccctaaagtagggtatgtgcaatcttccaaaggagcatgagattgaggcactaaaggaacttgcaatgtctccaac

SEQ ID NO: 147663 - DNA, 426 bp, Homo sapiens
gctggttttcaaaactcagtcaaagyagtttctttaacaggatgagccctgtggaaagcttccaggatgcttgttctgaacatgcaattatttttaccctgacacattgtagccatagaggtatttgttgtcaggcttactgtctgagggaattctccacagtcaagaaacctagaattcttgaattttgataagagactctgaagtgataaattgtttacagcacttgagaggtaaaaaagttactgggttatagctacagattagttttatgaaaaaccctttgccctggtcagtagaagagctgaatctcttattaatgaaatggaatgagaccactgacatacttgatttataagaaatatacatgaatagctcaaccctacaaataatgtgcatttcacacaaaaggatcatgtgtgatac

SEQ ID NO: 147664 - DNA, 426 bp, Homo sapiens
gctggttttcaaaactcagtcaaagtagtttctttaacaggatgagccctgtggaaagcttccaggatgcttgttctgaacatgcaattatttttaccctgacacattgtagccatagagrtatttgttgtcaggcttactgtctgagggaattctccacagtcaagaaacctagaattcttgaattttgataagagactctgaagtgataaattgtttacagcacttgagaggtaaaaaagttactgggttatagctacagattagttttatgaaaaaccctttgccctggtcagtagaagagctgaatctcttattaatgaaatggaatgagaccactgacatacttgatttataagaaatatacatgaatagctcaaccctacaaataatgtgcatttcacacaaaaggatcatgtgtgatac

SEQ ID NO: 147665 - DNA, 577 bp, Homo sapiens
tgttctattatttttttgggtagagtgtactgtatatatctgtacagtctgcccaatagttggtctattgtgttgttcaagccctctatttccttacttatcttctgtgtggttattttatcctttattgagagtgaggtattgaagcttctattatttagacctttctacttcttctctcarttttgtccatttttacttcatatattttgatggtctgttattaggaggataaatatttctaatctgtatatctttgctgtatttaactttttactaatatgtcttgcgggtttgttacataggtaaatatgtgccataatggtttgctgcacctatcaacccattacctaggtattaagccctgcatgcattagctctttatcctgctgctctcccttccctcctgcccccctccacagaccccactgtgtgttgttcccctccctgtgtccatgtgttctcattgttcagctcccacttataagtgagaacatgccatgtgatgtttggttttctgttcccgtgttagtttgctgaggataatggcttccagctccatccatgtccctgcaaa

SEQ ID NO: 147666 - DNA, 577 bp, Homo sapiens
tgttctattatttttttgggtagagtgtactgtatatatctgtacagtctgcccaatagttggtctattgtgttgttcaagccctctatttccttacttatcttctgtgtggttattttatcctttattgagagtgaggtattgaagcttctattatttagacctttctacttcttctctcaattttgtccatttttacttcatatattttgatggtctgttattaggaggataaatatttctaatctgtatatctttgctgtatttaactttttactaatatgtcttgcgggtttgttacataggtaaatatgtgccataatggtttgctgcacctatcaacccattacctaggtattaagccctgcatgcattagctctttatcctgctgctctcccttccctcctgccccyctccacagaccccactgtgtgttgttcccctccctgtgtccatgtgttctcattgttcagctcccacttataagtgagaacatgccatgtgatgtttggttttctgttcccgtgttagtttgctgaggataatggcttccagctccatccatgtccctgcaaa

SEQ ID NO: 147667 - DNA, 523 bp, Homo sapiens
aacctataatatcaagttgcaggtgttctcaaaatgagataactaaggtcatctgtttaatttctgtgatatcatactatccacatactatggttagatttaactgaattactgattaagtgaactttgcatttatctctaaaattaaattctcaagtacttgtgtttaaatttgcaaattccaatttctcctaaatatattcatttcttatttcactataacaagtttaagctttaaaaagacaggtttattttaagagaattaatcccaacaattaaaaactaaaaacagctttcaatttgcttttcagctgctaaataaattagggaaatacaaagtggtcatccctcaaacacaaaggtaaagaaagaagcaattatgaagataaattacttaagttatttttcttaaatcagattcttttctcttaaataggtttttgggctaatacccatmaatttatccttatttttctctgaaaagaataatcatccagactttatcttttactcacacatttag

SEQ ID NO: 147668 - DNA, 498 bp, Homo sapiens
ccacattcaaccttcaagcccgtgtgtgatccagttcttccaggaggctgggcaagagcttgggatacagaaagctgtcacactggccctctgcccttgtgaaaaggcagagggtccattgagctggttaacacttaagctgtctgaggatggcaaggctaagaaagcattagcgcccagtgttacaacactggggccacaagcacccacmcctagacactactgcagccctggagcccaaaactctcaccctggctcctgcatctgcctgtctctgtgctccccctcctgccaggggtttgagcagcagcagcagcagcagtggtgaccgattacaggcgagccacacccctgtcacatgtcctgcaaggaggatgagggaactctcctgtttcaccaggacctgttatttttttactttttagttccttcatacctagtttattgacagtttttaacatgaatgggtgttgaattttaacaaaagcattttctgca

SEQ ID NO: 147669 - DNA, 622 bp, Homo sapiens
ttctgtcccatgaccagttaggacccagccacaagtcaaatctggggctaaagcaggggataaatccaaataacaaacatagaaccgtgtttattttcatgctgctgtcactgggtctggctcaatgtgcctggatccttcttttctaacgacaaattattacccataagcctccctgacaccttatgtaaagaaatctcatgcagaccaaccccagctagttgttgaatatgcctagacgtgtttgactcagacatgtttgactctcagcaggttcttaaggaaggctgaggctgagctaaccccacccttaagcactggcaaagctgaatggttttgctgcactctattgtactctgtttagtggctgttaaatgttcttattttatgataggtttttattgatatttagtttrattttcttgttttctcagaacaaaatgcacaaacaccctcctccatcccaaagaatccttttctctcatggttttaattcttttttatttccctgtatttggatggttttcttaacctttctttgttttagccaagtaggcaataaatatgtgaaaattctgagacactaagtgtctcagacaccatgtgaaagaataaaaaagca

SEQ ID NO: 147670 - DNA, 486 bp, Homo sapiens
taagttagtgatgaaagccaggacccaagctgatctacacagaatattccaaaggcttctacattgatggcatcagatatccttggaagtaggggtgaaggggcagattcctgaagagctgtttgaggagcagttagatcctagtatcctctctttttttttttttttttttttyatcagttcccagacaatcattcctcccagccccagcagatgcctgagggctagtccggatctctagacttagagaacctgggcacaggttctaagtgggtggtgtacgtatcaaccaggaacagtgagtgaaggcagaatgcaggctcctcagcttgcttcctccactcagtctccaggctgctggcagccaaatacacactctccaggaggaaacaaaagaaccttctctgggaatctgataagccaagataaagtcctaatgaaggcaggctgtgcagtgtctgcatgtaggaatcatgagtctcggct

SEQ ID NO: 147671 - DNA, 545 bp, Homo sapiens
cagtgaagggtccacacctcctcaaaatatattagtgttgcctaatttgcatttatgctaaacctacaactggaagtgtaggggtggcatagagtgcgtatgcaccaatcatatctaggaccaactaaggttcactcagtataactccaggcttccacagctccaggacccctgctcccactgcaggggcgcatgctgtctcgccattctcctaaccstagaaggctgacactctggccagaggctccgggcctcaccttgatgagacccctcataccacatccagccacagagacagcctagggagctgctggggaaacagggaacacccaaaccctcaaggtgactgatgagccatcacagacaacaccaagagattaatgtactgtggctttctatcccaaccacaaaacatgggtggcatcgtggcatatgaataaacaaggtctagtttaggtagattaaagaattccatattggataatctttctgaaaggctatctctgattgatttccacaatattacataaagccaacagagggaa

SEQ ID NO: 147672 - DNA, 556 bp, Homo sapiens
agctgcctatgtgcagtgaagggtccacacctcctcaaaatatattagtgttgcctaatttgcatttatgctaaacctacaactggaagtgtaggggtggcatagagtgcgtatgcaccaatcatatctaggaccaactaaggttcactcagtataactccaggcttccacagctccaggacccctgctcccactgcaggggcgcatgctgtctcgccattctcctaaccctagaaggctgayactctggccagaggctccgggcctcaccttgatgagacccctcataccacatccagccacagagacagcctagggagctgctggggaaacagggaacacccaaaccctcaaggtgactgatgagccatcacagacaacaccaagagattaatgtactgtggctttctatcccaaccacaaaacatgggtggcatcgtggcatatgaataaacaaggtctagtttaggtagattaaagaattccatattggataatctttctgaaaggctatctctgattgatttccacaatattacataaagccaacagaggg

SEQ ID NO: 147673 - DNA, 545 bp, Homo sapiens
cagtgaagggtccacacctcctcaaaatatattagtgttgcctaatttgcatttatgctaaacctacaactggaagtgtaggggtggcatagagtgcgtatgcaccaatcatatctaggaccaactaaggttcactcagtataactccaggcttccacagctccaggacccctgctcccactgcaggggcgcatgctgtctcgccattctcctaaccctagaaggctgacactctggccagaggctccgggcctcaccttgatgagacccctcataccacatccagccacagagacagcctagggagctgctggggaaacagggaacacccaaaccctcaaggtgactgatgagccatcacagacaacaccaagagattaatgtactgtggctttctatcccaaccmcaaaacatgggtggcatcgtggcatatgaataaacaaggtctagtttaggtagattaaagaattccatattggataatctttctgaaaggctatctctgattgatttccacaatattacataaagccaacagagggaa

SEQ ID NO: 147674 - DNA, 558 bp, Homo sapiens
ttcgctgaaggctcggtttctggctgtttcccctacaggtatatagatagtcaagactctggagaacctcttccgaatctgcctggttggctagaggtgtagaggagccaggggcacattgtgactcagaccctcactcattggcacaaagaagctacagaatagttatataaacagaggcagtgygccagcctgggaaaactcccagcctccctttggccatagagtaagcaaaacaaatggcttcactggccccatctacccacttgacttaggtcagtattcagcctaaatgttttatttcctgagaggctggaatctgtatttgtggtatcaatcagtcaactgaaatttattaaatgcctgctgtgagcaaggcctaatgctgagggatgtaaagaagagtgagaagctagtctggttggggtgatatgacatggcaagtcatagaatgaagaagcgtattccttgtcatatgaaagctgcagattagtgtggttctaagtagaggccagggtcactggagtctaggattgcagggttggctggcttcccaga

SEQ ID NO: 147675 - DNA, 558 bp, Homo sapiens
ttcgctgaaggctcggtttctggctgtttcccctacaggtatatagatagtcaagactctggagaacctcttccgaatctgcctggttggctagaggtgtagaggagccaggggcacattgtgactcagaccctcactcattggcacaaagaagctacagaatagttatataaacagaggcagtgcgccagcctgggaaaactcccagcctccctttggccatagagtaagcaaaacaaatggcttcactggccccatctacccacttgacttaggtcagtattcagcctaaatgttttatttcctgagaggctggaatctgtatttgtggtatcaatcagtcaactgaaatttattaaatgcctgctgtgagcaaggcctaatgctgagggatgtaaagaagagtgagaagctagtctggttggggtgatatgacatggcaagtcatagaatgaagaagcgtattccttgtcatatgaaagctgyagattagtgtggttctaagtagaggccagggtcactggagtctaggattgcagggttggctggcttcccaga

SEQ ID NO: 147676 - DNA, 558 bp, Homo sapiens
ttcgctgaaggctcggtttctggctgtttcccctacaggtatatagatagtcaagactctggagaacctcttccgaatctgcctggttggctagaggtgtagaggagccaggggcacattgtgactcagaccctcactcattggcacaaagaagctacagaatagttatataaacagaggcagtgcgccagcctgggaaaactcccagcctccctttggccatagagtaagcaaaacaaatggcttcactggccccatctacccacttgacttaggtcagtattcagcctaaatgttttatttcctgagaggctggaatctgtatttgtggtatcaatcagtcaactgaaatttattaaatgcctgctgtgagcaaggcctaatgctgagggatgtaaagaagagtgagaagctagtctggttggggtgatatgacatggcaagtcatagaatgaagaagcgtattccttgtcatatgaaagctgcagattagtgtgkttctaagtagaggccagggtcactggagtctaggattgcagggttggctggcttcccaga

SEQ ID NO: 147677 - DNA, 562 bp, Homo sapiens
tgccaagccttggggctgtccatggtgtgctcatgtgccttctccttcccacagcagtgttgtgacttaggctaccatgcaagtctgaaccgggctctacgcaccttcctctctgctgagttaaacctggaacagtcgaagcatgagggtctggatgccatcgagaatgcagtagaaaacctggatgccaccagtgacaagcagcgcctcatggagatgtacaacaacgtcttctgcccccctatgaagtttgagtttcagccccacatgggggatatggtgaggccctttccctatacccccaccctcaaggggcttgagtggacttgtctagattaattacacagaaggcacattattctggggtgggagaggcctgggcccggctttttgtcaggtgggtgaggcacattccmcttattgagcaaacagttagtgagtgcctgctgtcagacactcgggcttgggtgcagacatgggggattaaagccctcggggagcttacagtctggggaataaggtcgctaaggcttgaggagggttcgaactatgcatagagagg

SEQ ID NO: 147678 - DNA, 562 bp, Homo sapiens
tgccaagccttggggctgtccatggtgtgctcatgtgccttctccttcccacagcagtgttgtgacttaggctaccatgcaagtctgaaccgggctctacgcaccttcctctctgctgagttaaacctggaacagtcgaagcatgagggtctggatgccatcgagaatgcagtagaaaacctggatgccaccagtgacaagcagcgcctcatggagatgtacaacaacgtcttctgcccccctatgaagtttgagtttcagccccacatgggggatatggtgaggccctttccctatacccccaccctcaaggggcttgagtggacttgtctagattaattacacagaaggcacattattctggggtgggagaggcctgggcccggctttttgtcaggtgggtgaggcacattccccttattgagcaaacagttagtgagtgcctgctgtcagacactcgggcttgggtgcagacatgggggattaaagccctcrgggagcttacagtctggggaataaggtcgctaaggcttgaggagggttcgaactatgcatagagagg

SEQ ID NO: 147679 - DNA, 458 bp, Homo sapiens
tccctcccttttgacagaagatggcccagggcattcactactaagtctcaacctcttacccaaagccctcagtctagtgttgctctttcyttcgtgctatttttgtttctttcttttcttgtaatcatcttggcaataaaataatcagttttttctttctacctattaaagatgttaccttagttaattacaggggtttccttcagaatgataaatggtctttcaaaatgatgtaaagagatctaaatccgtgtgctccagaacttgaatgaagctctgtctagcacgggtgccagtgactctcccagagtgctccatgcagctggacccacagagtccctctgtgctgtcatatcacccactgccttctgtgaatgagatattctgattagaatcctggtggatgctatttgagccagtgcccccacaactcctacgaaagccgaggaccacaggcc

SEQ ID NO: 147680 - DNA, 631 bp, Homo sapiens
tctcaccgctgccttgactgtgtccccatctgctgtgaagtgaatggtgtcttctaaattcgtgctgagccctaattgctgaaaactgtaagacatgcaatggggggattatgtgcatcttcccgacaccaacatgatgctcaggaaggagacttcttgttttctcttaggattcttttactaaccaagattttgcctctactgcatatttccctttgctgattgtccctcccttttgacagaagatggcccagggcattcactactaagtctcaacctcttacccaaagccctcagtctagtgttgctctttccttcgtgctatttttgtttctttcttttcttgtaatcatcttggcaataaaataatcagttttttctttctacctattaaagatgttaccttagttaattacagkggtttccttcagaatgataaatggtctttcaaaatgatgtaaagagatctaaatccgtgtgctccagaacttgaatgaagctctgtctagcacgggtgccagtgactctcccagagtgctccatgcagctggacccacagagtccctctgtgctgtcatatcacccactgccttctgtgaatgagatattctgattagaatcctggtggatg
